United States Patent Application Publication US 2005/0228172 A9 - sequence listing, part 121

SEQ ID NO: 562280 - DNA, 597 bp, Homo sapiens
catccaccaaacaggctgagtgtggaattaaaaggaaagaaatgaagaagaagaaaaagaaaggcatgatgtctaaaaacaaagagctacaaaaaagaaagaaaaacatggaagaaatgtgaggggaaaaaaagaaaatacaaggcagttttttatttccaagggctaacagaagatatccttaaagacaacatgcataatacatttagatgtgaaagaaacaaaatttaaatgaatgagaaaggaatagttaggttaagcttcttggtgaaagggatggtttagtcaccatggtttacaacgaccctgctgggcactgcactgtggcaaaatctggtatgttcaaggcagcaagaatgaycttcctccaaaacaatgctacttttctcagaacagggagtgaggggtagagtaacagtcctgaccaacccattaggccacctctcctaaaagctctggttaagagccagcaagatgagatgaactgcccccagaacacttgaggtcaggagtctgagacaagcctggccaacatggtgaaaccccatccctactaaaaatacaaaaattagtctggcatggtggcacatgcctata

SEQ ID NO: 562281 - DNA, 560 bp, Homo sapiens
ttccatgtcgctcacgctgggagctgtagactggagctgttcctattcggccatctggccagtatctaaaaaatactctctaatcttttaattcttagttttttgtcatcttgttctatatttactatgcaacatgtgttgtctccctttatgacaattgattagtctaactgattaatatctagtatatatgttttagaaacactgcaactcaacaagacacacaactgcattaaaaagtaagtgaactatttcagtaaacatttccccaaggaagatacacaaatggcctgtaagcacataaaaaggcactcaaatacaccaattattttaaaaatgcaaatcaaaactacaatgagatactacttcacatgaattaggatgtctattgtttwaaaaaaaaagtggaaaatagttaagtattggtgagaatgtgaagaaattggaacacttgcgccctactgatgagaatgtaaaatgataaagtcactgcacaatacagtatagtggttaccaaaaaaattaaacattaaattatcatatgatccagaaattccacc

SEQ ID NO: 562282 - DNA, 277 bp, Homo sapiens
ttcattcatatttttattgcagcaccattcacaatagcaaagacatgaaatcaacctgagtgtccatcaacaactgactgtatgaagaaaatgtgtttcatatacactgtggcatactatgcagccataaaaaaagaatgaagtcatgtcctttacagcaacgtggatgaagctggaggccattattctaagtgaaataactcaaaatcagaaaatcacataccacatggtttcacttataagtgggggctawacaatgggtactcatggacatagg

SEQ ID NO: 562283 - DNA, 565 bp, Homo sapiens
cctctcccacctgtgaaggtagagactagaaactgaaatgcatgttgttacaggatggctttaagttgccccartattacttacttgtcagacatagctcccaggagttgcaggaacctgtcctgggactcaattccaaatctcataggagtgcatctaattgtcagaaaattattaataaattcaaggagacttaaaaatgtagtttatttttcttcttcttctttttttacttcaacttttaatttaagttccagggtacatgtgcaggtttgttacttaggcaaacatgtgccatggtggtttgctgcacagatcaacccatcaactaggtattaagcccagcatccattagctatttttcctagtgctctccctcctcccatcccaccttccaacaagccccagtgtatactgttcccctccctgcgtccatgtgttctcattgttcagctcacacttacgagaacatatggtgtttggttttgtgaatagtgctgcaatgaatatacacatgcatgtctctttataatagaatgatttatgttcctttgggtatataccc

SEQ ID NO: 562284 - DNA, 565 bp, Homo sapiens
cctctcccacctgtgaaggtagagactagaaactgaaatgcatgttgttacaggatggctttaagttgccccagtattacttacttgtcagacatagctcccaggagttgcaggaacctgtcctgggactcaattccaaatctcataggagtgcatctaattgtcagaaaattattaataaattcaaggagacttaaaaatgtagtttatttttcttcttcttctttttttacttcaacttttaatttaagttccagggtacatgtgcaggtttgttacttaggcaaacatgtgccatggtggtttgctgcacagatcaacccatcaactaggtattaagcccagcatccattagctatttttcctagtgctctccctcctcccatcccaccttccaacaagccccagtgtatactgttcccctccctgcgtccatgtgttctcattgttcagctcacacktacgagaacatatggtgtttggttttgtgaatagtgctgcaatgaatatacacatgcatgtctctttataatagaatgatttatgttcctttgggtatataccc

SEQ ID NO: 562285 - DNA, 565 bp, Homo sapiens
cctctcccacctgtgaaggtagagactagaaactgaaatgcatgttgttacaggatggctttaagttgccccagtattacttacttgtcagacatagctcccaggagttgcaggaacctgtcctgggactcaattccaaatctcataggagtgcatctaattgtcagaaaattattaataaattcaaggagacttaaaaatgtagtttatttttcttcttcttctttttttacttcaacttttaatttaagttccagggtacatgtgcaggtttgttacttaggcaaacatgtgccatggtggtttgctgcacagatcaacccatcaactaggtattaagcccagcatccattagctatttttcctagtgctctccctcctcccatcccaccttccaacaagccccagtgtatactgttcccctccctgcgtccatgtgttctcattgttcagctcacacttaygagaacatatggtgtttggttttgtgaatagtgctgcaatgaatatacacatgcatgtctctttataatagaatgatttatgttcctttgggtatataccc

SEQ ID NO: 562286 - DNA, 565 bp, Homo sapiens
cctctcccacctgtgaaggtagagactagaaactgaaatgcatgttgttacaggatggctttaagttgccccagtattacttacttgtcagacatagctcccaggagttgcaggaacctgtcctgggactcaattccaaatctcataggagtgcatctaattgtcagaaaattattaataaattcaaggagacttaaaaatgtagtttatttttcttcttcttctttttttacttcaacttttaatttaagttccagggtacatgtgcaggtttgttacttaggcaaacatgtgccatggtggtttgctgcacagatcaacccatcaactaggtattaagcccagcatccattagctatttttcctagtgctctccctcctcccatcccaccttccaacaagccccagtgtatactgttcccctccctgcgtccatgtgttctcattgttcagctcacacttacgagaacatrtggtgtttggttttgtgaatagtgctgcaatgaatatacacatgcatgtctctttataatagaatgatttatgttcctttgggtatataccc

SEQ ID NO: 562287 - DNA, 417 bp, Homo sapiens
acatgaaggcaacattttttttwaaaaaaggctaacaagtctaaaattatatggactcttcaaatttacttttgacctttgttcaatgtatatgaatatatttcatagtttttatcagtttgtatgtgctaggtttgtatgtgcttgcttctgtcatttacatctgctgttttgttatatttattattatttaatttatttatttataattgtatttattatatgttggggttacattccccccgccccttaattctgcatttctgagaagcaatagaacaatgacttccatgcacagaggtttctgtttgtctgtctaatggccgctggtctggatttatatctgggccattttcagggcctgggataagcaacagaggtagggtggagacagagagggaaggtcaggatgaattc

SEQ ID NO: 562288 - DNA, 444 bp, Homo sapiens
ttgggggcctaaggcaggtggaccacatgagcccaggagtttgagaccagctcaggcaatacagtgagacccagtctctacaaaaaaaatttaaaaattagccaggtgttgtggctcaattgacagtcccagatacttgaggacctgaggtaggaagatcacttgagcctggaaggttgaggctgcagtgaactgtgaccaactcactgtacttaagcctgagagacagagcaagaccctgtctctaaaaaaaaataactgcagtacacctgttattagattctagtcttgcctaatgtttttccatttgtattattttctaaataataaaatttttatttgaactgaattctaaaatttttcctggacacaagctggaatgttttcaatttttttccttcttcttttccttttttctgyccattttgttctaatttgaaatca

SEQ ID NO: 562289 - DNA, 611 bp, Homo sapiens
tattgaggactaaattctgacctttttttcttctcttgtccaaattcttatctaaggggcctggggagtcayatcctacaagccatagactcttatcagagaaattttatttaacccatttaatgtggcttactttccaaactgactctggcataacatcatgacagataagaaaagaaatcataatattttaaccacacgtatgtttcttgggtatatcttgaaatagacctgcaaagtgatctgttttggggaaaactctacattctgtaaaaagtcccctttcccttttccaggtctttttattgatccaggagagaatcaaccaaagtctgacaccattttaagtctaataagtcacatttacaatctattctatctgtagcctgctacctggaggctttatctcataataagaaccttggcctctaaaatctcttatctttattattattattattattatactttaagttctagcatacatgtgcacaacgtgcaggttttttacatatgtatacatgtgccatgttggtttgctgtgtccattaactcatcatttacattaggtatttctcctaatgctatccctcccccatccccccacccca

SEQ ID NO: 562290 - DNA, 611 bp, Homo sapiens
tattgaggactaaattctgacctttttttcttctcttgtccaaattcttatctaaggggcctggggagtcatatcctacaagccatagactcttatcagagaaattttatttaacccatttaatgtggcttactttccaaactgactctggcataacatcatgacagataagaaaagaaatcataatattttaaccacacgtatgtttcttgggtrtatcttgaaatagacctgcaaagtgatctgttttggggaaaactctacattctgtaaaaagtcccctttcccttttccaggtctttttattgatccaggagagaatcaaccaaagtctgacaccattttaagtctaataagtcacatttacaatctattctatctgtagcctgctacctggaggctttatctcataataagaaccttggcctctaaaatctcttatctttattattattattattattatactttaagttctagcatacatgtgcacaacgtgcaggttttttacatatgtatacatgtgccatgttggtttgctgtgtccattaactcatcatttacattaggtatttctcctaatgctatccctcccccatccccccacccca

SEQ ID NO: 562291 - DNA, 611 bp, Homo sapiens
tattgaggactaaattctgacctttttttcttctcttgtccaaattcttatctaaggggcctggggagtcatatcctacaagccatagactcttatcagagaaattttatttaacccatttaatgtggcttactttccaaactgactctggcataacatcatgacagataagaaaagaaatcataatattttaaccacacgtatgtttcttgggtatatcttgaaatagacctgcaaagtgatctgttttggggaaaactctacattctgtaaaaagtcccctttcccttttccaggtctttttattgatccaggagagaatcaaccaaagtctgacaccattttaagtctaataagtmacatttacaatctattctatctgtagcctgctacctggaggctttatctcataataagaaccttggcctctaaaatctcttatctttattattattattattattatactttaagttctagcatacatgtgcacaacgtgcaggttttttacatatgtatacatgtgccatgttggtttgctgtgtccattaactcatcatttacattaggtatttctcctaatgctatccctcccccatccccccacccca

SEQ ID NO: 562292 - DNA, 561 bp, Homo sapiens
cctcagttggaaatgcagaaatcacccatcttctgtgttgatcatgctgggagttgcagaccaragctattcctattcagccatcttggaacagatcccctacaatctcttatcttaacccagacttttcctttctattgattccagatctttagataaactctttcaaccaactgccatccagaaaatctttgaatctgatcataataacctggaagccccaccacttccagttgtcctgcctttatggaccaaaccaatatacatcttacatgtattaattgatatcatatgtcctcctataatggataaaacctagttgtggcctaaccatgggcacatgttctcagggtctcctgagggcagtgttatgggctgtggtccctcatatatggctcagaataaatctcttcaaatattaatattttacagagtttgactttttttttttttttgagatggagtcttgctctgtcacccaggctggagtgcagtggcacaatctcaactcactgtaacctctgcctcctgagtttaaatgattctcttgtctcagcctcc

SEQ ID NO: 562293 - DNA, 561 bp, Homo sapiens
cctcagttggaaatgcagaaatcacccatcttctgtgttgatcatgctgggagttgcagaccagagctattcctattcagccatcttggaacagatcccctacaatctcttatcttaacccagacttttcctttctattgattccagatctttagataaactctttcaaccaactgccatccagaaaatctttgaatctgatyataataacctggaagccccaccacttccagttgtcctgcctttatggaccaaaccaatatacatcttacatgtattaattgatatcatatgtcctcctataatggataaaacctagttgtggcctaaccatgggcacatgttctcagggtctcctgagggcagtgttatgggctgtggtccctcatatatggctcagaataaatctcttcaaatattaatattttacagagtttgactttttttttttttttgagatggagtcttgctctgtcacccaggctggagtgcagtggcacaatctcaactcactgtaacctctgcctcctgagtttaaatgattctcttgtctcagcctcc

SEQ ID NO: 562294 - DNA, 508 bp, Homo sapiens
tcacttgaaacaccgcatattctcactcataggtggggattgaacaatgagatcacatggacacaggaaggggaatatcacactctggggactgttgtggggtggggggaggggggagggatagcatcgggagatatacctaatgctagatgaygagttagtgggtgcagtgcaccagcatggcacatgtatacatatgtaactaacctgcacaatgtgcacatgtaccctaaaacttaaagtataataataaaaaaaaaaaattaaaaaaaaaattcatattaactggctactccaggagagaaatgcatgtatccaaaagtgtctttttgtgaagaagtgatggtactaaaggtggagaagtgaagaatctagggagaagattgtctttcatggtttttcaagtgtactatgatgatatttggattatcctgatgcatatgtaacatgaaacactgtctcatttgtagattgatttatttcactaatagtagtagtagtagtaaca

SEQ ID NO: 562295 - DNA, 526 bp, Homo sapiens
ttgaaaaagaaaaaaaacaaccactgggcctatttatttaagttatcaaaattagccaatttgtaccaatattctttsttcatttaattaactcagtgaagtttaaggattaatttttatttgtgatttaaatattcaaaatctcctcaggagtttatagaaaaaactcaatgtaagagcaaaattattttagtaagccgtattaatcatgaaataatcttatccttttaaggtgttcaattccaggatgaactgattaatgaaacacagtaataatgccagatatattaatcagtaaattatagtaataaatttaagcatttacaataatatatctttcaattaaaataagcagggtttgttgttgttttttagcttcatacaatctagaataaaccagtttgaaatacatagccccaaaggtgtttatttttcagcatattaaaatattgtattattatagtattttgtcaatgttagacataagaatgtaaatgatgcataacaatattaatggaataatttt

SEQ ID NO: 562296 - DNA, 526 bp, Homo sapiens
ttgaaaaagaaaaaaaacaaccactgggcctatttatttaagttatcaaaattagccaatttgtaccaatattctttgttcatttaattaactcagtgaagtttaaggattaatttttatttgtgatttaaatattcaaaatctcctcaggagtttatagaaaaaactcaatgtaagagcaaaattattttagtaagccktattaatcatgaaataatcttatccttttaaggtgttcaattccaggatgaactgattaatgaaacacagtaataatgccagatatattaatcagtaaattatagtaataaatttaagcatttacaataatatatctttcaattaaaataagcagggtttgttgttgttttttagcttcatacaatctagaataaaccagtttgaaatacatagccccaaaggtgtttatttttcagcatattaaaatattgtattattatagtattttgtcaatgttagacataagaatgtaaatgatgcataacaatattaatggaataatttt

SEQ ID NO: 562297 - DNA, 532 bp, Homo sapiens
gggaaataaatctggcttaaattcagggatcttctacctcagtagaatttctaggggtccagtggtgtggggcctgtygagatattccttcaaagataaaggataagttaccacatttggtccctcctacaaccaagaaagaggcacaatgcctagtgggcctatttggattttggaggaaacacattcctcatttgggtgtgttactctggcccatttatcaagagacatgaaaagctgccagttttgggtgggttccaggacaggagaaggctttgctaaggtccaggctgctgtttaagctgctgtgccacttgggccatatgacccagcagatccaatggtgtttcaggtgtcagcagcagataaggatgctgtttggaacctttggcaggttcacataggtgaatcacagcggaggcctctaggattttggagcaagtccctgccatcttttgcagataactactctctttttgagagacaggtcttggcctattactgggctttggtggaaactgaacatttgact

SEQ ID NO: 562298 - DNA, 526 bp, Homo sapiens
ttgaaaaagaaaaaaaacaaccactgggcctatttatttaagttatcaaaattagccaatttgtaccaatattctttgttcatttaattaactcagtgaagtttaaggattaatttttatttgtgatttaaatattcaaaatctcctcaggagtttatagaaaaaactcaatgtaagagcaaaattattttagtaagccgtattaatcatgaaataatcttatccttttaaggtgttcaattccaggatgaactgattaatgaaacacagtaataatgccagatatattaatcagtaaattatagtaataaatttaagcatttacaataatatatctttcaattaaaataagcagggtttgttgttgttttttagcttcatacaatytagaataaaccagtttgaaatacatagccccaaaggtgtttatttttcagcatattaaaatattgtattattatagtattttgtcaatgttagacataagaatgtaaatgatgcataacaatattaatggaataatttt

SEQ ID NO: 562299 - DNA, 526 bp, Homo sapiens
ttgaaaaagaaaaaaaacaaccactgggcctatttatttaagttatcaaaattagccaatttgtaccaatattctttgttcatttaattaactcagtgaagtttaaggattaatttttatttgtgatttaaatattcaaaatctcctcaggagtttatagaaaaaactcaatgtaagagcaaaattattttagtaagccgtattaatcatgaaataatcttatccttttaaggtgttcaattccaggatgaactgattaatgaaacacagtaataatgccagatatattaatcagtaaattatagtaataaatttaagcatttacaataatatatctttcaattaaaataagcagggtttgttgttgttttttagcttcatacaatctagaataaaccagtttgaaatacatagccccraaggtgtttatttttcagcatattaaaatattgtattattatagtattttgtcaatgttagacataagaatgtaaatgatgcataacaatattaatggaataatttt

SEQ ID NO: 562300 - DNA, 532 bp, Homo sapiens
gggaaataaatctggcttaaattcagggatcttctacctcagtagaatttctaggggtccagtggtgtggggcctgtcgagatattccttcaaagataaaggataagttaccacatttggtcsctcctacaaccaagaaagaggcacaatgcctagtgggcctatttggattttggaggaaacacattcctcatttgggtgtgttactctggcccatttatcaagagacatgaaaagctgccagttttgggtgggttccaggacaggagaaggctttgctaaggtccaggctgctgtttaagctgctgtgccacttgggccatatgacccagcagatccaatggtgtttcaggtgtcagcagcagataaggatgctgtttggaacctttggcaggttcacataggtgaatcacagcggaggcctctaggattttggagcaagtccctgccatcttttgcagataactactctctttttgagagacaggtcttggcctattactgggctttggtggaaactgaacatttgact

SEQ ID NO: 562301 - DNA, 532 bp, Homo sapiens
gggaaataaatctggcttaaattcagggatcttctacctcagtagaatttctaggggtccagtggtgtggggcctgtcgagatattccttcaaagataaaggataagttaccacatttggtccctcctacaaccaagaaagaggcacaatgcctagtgggcctatttggattttggaggaaacacattcctcatttgggtgtgttactctggcccatttatcaagwgacatgaaaagctgccagttttgggtgggttccaggacaggagaaggctttgctaaggtccaggctgctgtttaagctgctgtgccacttgggccatatgacccagcagatccaatggtgtttcaggtgtcagcagcagataaggatgctgtttggaacctttggcaggttcacataggtgaatcacagcggaggcctctaggattttggagcaagtccctgccatcttttgcagataactactctctttttgagagacaggtcttggcctattactgggctttggtggaaactgaacatttgact

SEQ ID NO: 562302 - DNA, 619 bp, Homo sapiens
ttttttttttttgaagtttcaaaatttcataaaatctcatgaaagctagttgtggtctgtgggtcccttcttaaaagtgaaacataacctaccccatccatgaaaaaataaattcatcaaaatggagaagaaagatagcatcatttgcctggactcttatgaggaccaaatagcccccaaaataattcctaaagaaacttgatactgtcatyataaacaagactgggagaaagggaccaaccgtaaatgcgaatggtgatgttcaagggccatgttttgcattcaggctagatatactaccagtcctagatttggttgctgtatcagttaacatcccagctggaaatagctggcacattcagactgggtaattgaaggaaagttttatagaagggacaacagaatagcgtgatgggtcactttaccatccctcagcctgaagggaggagagaaaggagcagttaccaaaactgagagatgagagcgaaagagaacttgagctgttctctggagagatcagcttgacaggagccagggctgtgggtggagcagggagggagctgagagccagggaacagatacctcctcccttctctcctccctctctctgatttctgag

SEQ ID NO: 562303 - DNA, 636 bp, Homo sapiens
gaaaataataccaacacctagcataaattatgtactgagaactttgaatgcattactccattcagtcttcgaaacaacacctactcacttttgttttcgtaactaaaggatgaagaacctggggtttagagaattaaagcaaattgcccaaggtcatgttgctggaagcagcacaagagagagttgacactgaccctgaaatccagagcttctgcatataatcactgtgctatgctgtgtcccctttgaagctatgttaagaagaggcatctgatcctaaaattagtgatgacttgtatctgggaagctgagaagattcaatggctcacggagaggatggctgaaggtgtctcaacaactggggctagaatcatctgtaagcatctttgcccaatgtcttagtcctttggggcagttataacaaaataccataaactggatggcttataaacaacagaaacttatttttacagctctggaagctgaaaagtccaagatcaaggcattggtaggttcagtgtttggtgattcccacttcttcatagatagccatctttttgctgtaamctcatatggcagaaggggtgaaggatctctctgtggcctcttcttataaagacactaatcccgttcatg

SEQ ID NO: 562304 - DNA, 587 bp, Homo sapiens
tcccatgaacatgtcattattccacttatgagggcagaactctcatgtcttaatcacctctgaaaggttccaccttttaatactgttacaatagcaattaaatttcaatgtgagggttttttgttgttgttttttcttcttgttgttgttgttattgttgttttgagayggagtttcgctcttgttgcccaggctggagtgcaatggagcgatctcggctcacagtatctctgctttcctggttcaagtgaatctctgcctcaacctccccagtagctgggattacaggcatgtgccaccatgcccaggtaattttgtatttttagtagagatggggtttctccatgttggtcaggctggtctcaaactcctgacctcaggtaatccgcccaccttggcctctcagagtgctgggattacaagcatgagtcaccgcacccggcctcaatatgagttttgaggggacaaacattcaaactatatcatttccctgagtcacaaaaaaatcaactgacactatatagacctacaataatttatgtatacaaaataagaaatacctatttaaaaaataaatgttagtggta

SEQ ID NO: 562305 - DNA, 561 bp, Homo sapiens
gtctcacctttgtattttttttctttgcttttgtgcttataatctgttaaatattcacatatttgttttaattttacatttttatttctctttttttgtaaacttaaagccttatattaaatttatttccatgtggttgaaaatcaaataccaacttaatattaaacaatactaacacaaatatgaaaatataatattctccccttcactccctccccatctccagacccactcctaagagcaaytacttttagctatttgtttttcgagtgattactcaaatctgtatctttcaatatgtgtttactgttctttattattatacaaattttagagattatctattaactaataacagataaggatttatcatttgagtaaaaccctacttctccttccgtcatctttctgatataattatattgcaatttctaattaaatcaataaggagtatttacattgtaatgatatgtatgttgtgtctgccaaagacaagctgttcactgttattgaattttctttactggatattttttctaaaaattattattcattttttat

SEQ ID NO: 562306 - DNA, 561 bp, Homo sapiens
gtctcacctttgtattttttttctttgcttttgtgcttataatctgttaaatattcacatatttgttttaattttacatttttatttctctttttttgtaaacttaaagccttatattaaatttatttccatgtggttgaaaatcaaataccaacttaatattaaacaatactaacacaaatatgaaaatataatattctccccttcactccctccccatctccagacccactcctaagagcaactacttttagctatttgtttttcgagtgattactcaaatctgtatctttcaatatgtgtttactgttctttattrttatacaaattttagagattatctattaactaataacagataaggatttatcatttgagtaaaaccctacttctccttccgtcatctttctgatataattatattgcaatttctaattaaatcaataaggagtatttacattgtaatgatatgtatgttgtgtctgccaaagacaagctgttcactgttattgaattttctttactggatattttttctaaaaattattattcattttttat

SEQ ID NO: 562307 - DNA, 568 bp, Homo sapiens
acattgccttttttgttgttttaggcagggtctcactgtgttgcccaggctggagtgcagtggcacagctctctgcagccttgacatcctgaactcaagcaatcctaccacctcagcctcccaagtagctgggactacaggctcggcaccacaccaggctaatttttgtaattttttgtttttggtagatgcggtttccgcatattgctctggctagtcttgaattcctgcactcaagagatccatccacctgcctcgacctcccaaaatgctgggattacagatatgagccaycgcgtttggccaacactgactttttttaagagttcaggtcaattgtgttagaatgaaaaatatctctcaatttgtttcttatgattctaatcatacgattagatgatttgattaaacatcatctaatcgtttggttaaccaaacatttaaccaaaatgtttggttaaacattttgggcaggaataccatgtaggtggcattagattattctcagtatcacatcaaaatggacatgatgtctatttgtcccattatttatcacatcaaaacgaac

SEQ ID NO: 562308 - DNA, 580 bp, Homo sapiens
gaaaactatcaaatgttgatgaaagaaattgaagaggacacacaaaaaaatggaaagatattccatattcatggatttgaagaattcatattgttaaaatgtccatactacctaaagcaatctacagattcaatgcaatccctatcaaattatcaatgacattgttcacagaaatggaaaagaaaatcctaaatttatgtggagccaaaaaagacccagaatagccaaagctatcctgagtaaaaagaacaaaactggaggaatcacattacctgaattcaaattatactacaaagctatggtaaccaaagcagtatggtgctggcataaaaacaggcacatagacctgtggaacagaatagagaacccagaaacaaatccatatatctacaatgaactcattctcaacaaggtgccaagaacatacattgagcaaaggacagtctcttcaataaatagtgctragaaactcagtatctatatgcagaagaataaaactagacctttatttttcatcttatttttaaaaatcaagtcgaaatggattaaagacttaaatctaagacctcaaactataaaa

SEQ ID NO: 562309 - DNA, 537 bp, Homo sapiens
tgtgtcatgtaagacttttaaaatttgtatacttttctgttgtcaatctgtctttcgctacaggagcccagctgaaaacttagaaagggagaaggagagatatttttcctctccttcaacacatacccaatacgctgaacatctttgcaggaatggaacttacagctgaatccaacactatctgcctattcccctgatttttaaaatacttcttttaaagttcacrtagcttcctcatataggtaaatggactaagtaaattatctcgcttagaaaggtatcaaaattattcgggactctattaaatcactgaatcactggaatgttgcctggacaaagcgttgtaaacgtaactgttttttgtctctgcttttcatagtcttattttcctttccctccataggtatggtgcagacgctgtcctctatgtgagcgtgtgagtaacaggagcaagacgatacaccagtgttctcagcaggcatccaatgagggcgtcttatatgccagtggaaatagcagaaagtcaaggctgcccaa

SEQ ID NO: 562310 - DNA, 383 bp, Homo sapiens
acaaatttttaaaacacacattttaacagaagtcaactaacttatcagccataacataatacagtaggtggataaacaaaatctgaacaattcttccactagctgaatccctcattctctgcaataaattacccataggtcaagttggatacaccccagacgaccagtgggtagacaatgtgactaaaggccattgtgactcttgtcagaaaggagttccacaacatagttaatgggggacgcccttcagctaactgaaattcagaacaccttgccacagtcgggatggaaagtaaccctgtcctagagttacctcccgacaggccttagcctgcttttggaatgaaatacactcttacaayaattcaaacacccatctgatt

SEQ ID NO: 562311 - DNA, 363 bp, Homo sapiens
aaacgtctgcttgttatcagttatagaacaatcagtcttgtcctaagtttgtggagggttttgattcataccctcgtggaggcttccttgatgtgtaaggccatttttagcttaaacatttttattgttccattgagctcctgtgacccatctctcattctgacagtgrtgtggtctaacttgcaaatcacctgaaaccacacttccaaggtaagagtctataccttaacttcaatacccattattgaaggtaatccattgactatctaggacattattagacaggcaaagcagagtggttggatgaaataaaagaacataccagatttgtgattaaccagtaaataattatttagcatgcaa

SEQ ID NO: 562312 - DNA, 621 bp, Homo sapiens
cttgttccccaacctacacaatggtagaagccttattgacttgaggtatttgagcatctctgtctactcattggatgactattactaggctacacagacacacatgggatgacccattgagcactaggctaaaaatttaaattaggataaaaaaagtactgggtagagctgtatgcaattacactttatggcaaaaacacattccatagattgaatccagacaagataccaaaataaagtaaaacccaaaataaaagaaaaactatccagaacagctgtcctcaggggggaaaaaaccataatccaaggttgctacwctatgtgatctaaaatatctacttttcaacaacaacaacaaaataaagaaccatgcaaaaaaacagggaagggtgacccaaattcaggaaacaaacaaacaaacaaaaaaacaaaaagcagtttctgaacaggccaagatcttcaatttagcaaagagttcaaagcagccatggtaaatattttatataattaaaggaaatcaggtttaaaaaattgaaggaggccgggtacggtggctcatgcctgaaatcccagtactttgggaggccaaggcaggtggatcatgaggtcaggagattgaga

SEQ ID NO: 562313 - DNA, 510 bp, Homo sapiens
agcaacatcaggaatgtaaccctgattcacaatttacaattgccacagaaacaataaagtacctaggaatacagctaactagggagacgaaagatctctacaatgagaattacaaaacactgttcaaagaaatcagagatgacacaaacaaataagagacatttcatgctcatagataagaagaatcagtatcaytaaaatggccatactgcctaaagcaatttacaaattcattgcaatttctatcgaactaccaatgacattcttcacagaactagggaaaactattttagaatccatatggaaccaaaaaaagctaaatagccaaggaaatactaagcaaaaataacaaacctggagttaccacgttatccaaatatcatggtgttggtacaaaaatggacacatagactaacagaacacaatagagagcccagaaataagtttgcacacttgaagccatctgatcttcaacaaaactggcaaaaagaagcaatggggaaagaactt

SEQ ID NO: 562314 - DNA, 510 bp, Homo sapiens
agcaacatcaggaatgtaaccctgattcacaatttacaattgccacagaaacaataaagtacctaggaatacagctaactagggagacgaaagatctctacaatgagaattacaaaacactgttcaaagaaatcagagatgacacaaacaaataagagacatttcatgctcatagataagaagaatcagtatcactaaaatggccatactgcytaaagcaatttacaaattcattgcaatttctatcgaactaccaatgacattcttcacagaactagggaaaactattttagaatccatatggaaccaaaaaaagctaaatagccaaggaaatactaagcaaaaataacaaacctggagttaccacgttatccaaatatcatggtgttggtacaaaaatggacacatagactaacagaacacaatagagagcccagaaataagtttgcacacttgaagccatctgatcttcaacaaaactggcaaaaagaagcaatggggaaagaactt

SEQ ID NO: 562315 - DNA, 510 bp, Homo sapiens
agcaacatcaggaatgtaaccctgattcacaatttacaattgccacagaaacaataaagtacctaggaatacagctaactagggagacgaaagatctctacaatgagaattacaaaacactgttcaaagaaatcagagatgacacaaacaaataagagacatttcatgctcatagataagaagaatcagtatcactaaaatggccatactgcctaaagcaatttacaaattcattgcaatttctatcraactaccaatgacattcttcacagaactagggaaaactattttagaatccatatggaaccaaaaaaagctaaatagccaaggaaatactaagcaaaaataacaaacctggagttaccacgttatccaaatatcatggtgttggtacaaaaatggacacatagactaacagaacacaatagagagcccagaaataagtttgcacacttgaagccatctgatcttcaacaaaactggcaaaaagaagcaatggggaaagaactt

SEQ ID NO: 562316 - DNA, 510 bp, Homo sapiens
agcaacatcaggaatgtaaccctgattcacaatttacaattgccacagaaacaataaagtacctaggaatacagctaactagggagacgaaagatctctacaatgagaattacaaaacactgttcaaagaaatcagagatgacacaaacaaataagagacatttcatgctcatagataagaagaatcagtatcactaaaatggccatactgcctaaagcaatttacaaattcattgcaatttctatcgaactaccaatgacattcttcacagaactagggaaaactattttagaatccatawggaaccaaaaaaagctaaatagccaaggaaatactaagcaaaaataacaaacctggagttaccacgttatccaaatatcatggtgttggtacaaaaatggacacatagactaacagaacacaatagagagcccagaaataagtttgcacacttgaagccatctgatcttcaacaaaactggcaaaaagaagcaatggggaaagaactt

SEQ ID NO: 562317 - DNA, 410 bp, Homo sapiens
aaataaacaatagttaagttaatgaatgttatgaagaaaattatagcagggtaaaagagataatgaattctctggttagatgaatttgtaatttaaatagagaagtcctcattgagacagagatatttgagcaaagattagaaggagataatctgagtggatatcatagaaagcggattccaggcagacagtaatgcaaagcccttgagttgggtgcagtctgtgtatatatgcagagctgtgaaaagaccacaataccagaaatgtaggaataaagggaaaggtagtagacaaaatcagagaggtaatggcagagaggagaagtcaggagatagatactgtgtaggcaatttgaggccattttccttctaaatataaatgtgtatagmccattgattacatccagatat

SEQ ID NO: 562318 - DNA, 418 bp, Homo sapiens
aaattctcaacaaaaatatgaataaactgaatctggcaaaatagaaaatgataatctcacaatcagatgagattcattccaggaatgcaagactggttcaacatgcaaaaaccacagtcactgtattaacacactaaagcaggacggcctttgggtttgactatgactttacgtacgtgacagtcaagcacaatccagtcagctattgaaggaaatgaagcactgagtcctgctacaacatgcataaatggacctcgaagaaacaccacgctgtgtgaaagaagccagatgcaaaagactaaatactgcatgagckcgcttatgtgaaacgtctagaaaaggtaaatttatagaactggaaagaagactggtggctgcccagggctggagacgggattaactgtgataagcattaaaa

SEQ ID NO: 562319 - DNA, 418 bp, Homo sapiens
aaattctcaacaaaaatatgaataaactgaatctggcaaaatagaaaatgataatctcacaatcagatgagattcattccaggaatgcaagactggttcaacatgcaaaaaccacagtcactgtattaacacactaaagcaggacggcctttgggtttgactatgactttacgtacgtgacagtcaagcacaatccagtcagctattgaaggaaatgaagcactgagtcctgctacaacatgcataaatggacctcgaagaaacaccacgctgtgtgaaagaagccagatgcaaaagactaaatactgcatgagctcgcttatgtgaaacgtctagaaaaggtaaatttatagaactggaaagaagactggtggctgcccrgggctggagacgggattaactgtgataagcattaaaa

SEQ ID NO: 562320 - DNA, 387 bp, Homo sapiens
tctctgtgtcataaataagtttaaggaaatgtgctgtgccttgatgtgcatgcacacaaacatctcggttcaataaagagcagtattgccaccagcatgtctcacctcaagccctaaggtggttttctcctatctcagtaaatagaacatacaatcgggttttacaccaagacattctattcccagggacgagcaggagacagatgccttcctcttatctcaactgcaaagaggccttcctcttttactaatcctcctcagcacagaccctttacaggtgtcgggctgggggatggtcaggccgtatctcaggctatcacatgtggagaaaccttggacaatacctggctttcctaggcagaggwccctgcagccttccgcagtgtg

SEQ ID NO: 562321 - DNA, 286 bp, Homo sapiens
cttcccctcagtaggaaaattgatatataaactgaataatccctgcaatggaatagcatatgggggttaaaattaatcaaccagtttacatatctcagtaagaatacatctcaaaaacaaagctaagtgggtggagggtggggaaggaagttgcaaaarcacataaacatttatgtaaatttttaaaatacaaaaacaacactatgcattatacacacacatcgtatgtagaaaaaatattaaaacatgcatggaaacaatacacgttaatttcagattagatttt

SEQ ID NO: 562322 - DNA, 581 bp, Homo sapiens
taatctttctatgttatatagataatgaatagcagagccagaatttgacagaattttgcttaattcaagatacagactttcccatcacactatactaccttcaagaatattaaccctgggaggtagtcaaaaggttttcaaggttaactgttgttatgttttgatttattttgatttattttataggttacaaagcacaatagtgggtaaaagctttttttagaccccaaaatgccaaggttagatagcttcttctctattggtttcagttgcatkaatgtgttgacttcagcaggttcactaaatatcctcaagttcccatgttagcatttgctaagtaatgtgttcaactcaaaagtcccaatgtgggtcctctggtgcaattttctcattgatcattttttctaaaaataaaataatgagatatcatggcattgatatgcattactaaggcaaagaaaatgtaatttgctttaggatttttttgttgttgttgttaaattatactttaagttttagggtacatgtgcacattgtgcaggttagttacatatgtatacatgtaccatggtggtgcgctg

SEQ ID NO: 562323 - DNA, 602 bp, Homo sapiens
gttatttccttttttttttggatacttagtaatgggattgctgggtcacatgttagtatttttagttttctgaggaccctcatactgttttccataatggctatactaatttacattctgactaaaagtgtatacgagttcccttttttcaacgtcctcaccagcattggttattttttattttttctgataataggcattctaataggggtgagatgatatatcatygtggttttgatttgcatttccctgatgattagtgatgttgagtatatttctcatatatctgttggccattatgaatagttggcagatgaatagtatgcaaatatttttgcccattctgcaggttgtctccttactcggttgattgtttccttttagttggatacagtcccattagcccgtttttgcttttgttgcctgtgcttttgaagtcttatccacaaaaaatctttgtccagaccaatatcctaaaccctttcccttatgtagtcttctagtagtttacagtttgggggtcttacatttaagtctttaagccgttttgagattttgagttgatttttgtatatggtgaattataggggtctagtttcatt

SEQ ID NO: 562324 - DNA, 571 bp, Homo sapiens
gaaaccctaactggtgttgagagacaggcagccttacaggtagcagaaaaaatcagagatgagcagcatgtttcmtatagccagtcaaaaagggaaagagggtgagaaacaggcagaatccccattcccagtaggaaaagaggcagtatcccttgaaaactctaattggaaccctactaagcccatagatgattgaaaaatagaaacactttcagatgtatacggtagaagtcttacaggggaccagagccaaacctgttaactactctaagctatccatgatagatcaaaacccagatgaaaatccctcagcctttttataaaggctgagagagactttggcaaaacatgcttccctatctcgtaattcaattgagggacagctcatcttgaaagacaggtttactcaagcagctcctgatatttgaaggaagctacagaaacaggctataggactagaaggcaccttagaaaaccttctaagagtagccacctcagtctttcataagacgtactaggaggaggctcaggaaaaggagagaaaatagaagaaaaagtcagacagagggta

SEQ ID NO: 562325 - DNA, 392 bp, Homo sapiens
atacagtaaaaggtggacttatwtataaagaaaataaccaccagattttgtctatggcacaaacttcttaaaaattttgaggtctttagccttaaagacctaatcaaatatttattactttgaacagtgagctactgggatatgctgggctttgagcctatgtacaaatctaattttaaaagtcaggacgtgttgtaagcaatagcaaaaaatatgctaaatgatcagcttggcaattgttgaacaaacttcattcagcagtgtgaggacgtaattaaagcagtggaccttcaatctattcactctctttattggcaaatggccgaggaataagactagaaggaagatgaactggtttagtctctttgtcagctgaacttgtggggaaagag

SEQ ID NO: 562326 - DNA, 570 bp, Homo sapiens
ttttctgattatgagtttcttatatgttttagatattaatgcattatcagatatattgttttcaagtacattctaccattccatgggtgactttttatttatttatttatttatttatttatttactgtgccacaatcttttagtttgatgtagttgtatgtgtttatttttgtttatcttgtctayacattgggattcatagccaaaatatcatgccaaggtcaatgttatggaggatttcccctgttttcttctagggattctttggtttcagatgttatgtttaaattccttttcaattttcaatttattcctgtgcatagcataacactccaatttcattcttttgcatgtgggcctccaataattccaacgctatttattgaagagactatcctgtctccattaggtgttttgggcatgttattgaagattctttgacgatattggtgtaggctttctattctgctccattcttctatgtgactgttttcataccagtatcatatatatatatatatattactgtagtttagtaatataacttgaaagtgagaagtgtggtacct

SEQ ID NO: 562327 - DNA, 588 bp, Homo sapiens
aacacaataccatataaaacgttgatattcttaaacttcaactgttttaaataaaatgcagtggaaagtttactattagaggacatgtctaaatacatattctcaccttatttggcgccatcgatgttcacagacccagtcattgccacaagtagtgtctggattaatagtaacttctttaattactccattattatttggtggcccaacccaatcattaacatccttaagtaggggggaaaaagccaaattttactatgcatgtatttacctcttccttctcctttacaccaaacccaaccaatcctgttacttgtgtctctgcattcagtgactttatctagaatccaatgccttcattaatgtttatagccctttactgggtcttyatcatctctctatcctctggttttcttctggcatatttcaaacaaggtaacaaatttttatcctctccttttcattccaaagaactgcaaaggcttctttgctctgtcacccaggctggagtacagtggcatgatcatagctcactgcagccttgatctcccaggctcaagcgatcctcctatctcagcctcctaagta

SEQ ID NO: 562328 - DNA, 621 bp, Homo sapiens
acaaattgcatatttaaatccactaaagaaagagagatctatatctcctgccatctttgaaagtttacatttatttttttctttccaaagctatgattattccaacacactatgataatgtaaaaatgatcaatgtaaaatatttcggttcactgggaaggatacacttttttaaatttttaattgttgttggtacctaggaggtgtatatacttataggrcatatgtcatattttgatacaggcagataatgtgtagtaatagcatcagggtaaatgggttatccatcaccacgagcatttacctttatgttacaaacaatctaattatattcttttagttattttaaattgtacaattaagttgttattgacgatagtcaccctgttgtgctgtcaaatattaggtcttattcattcttctgttttttgtactcattgaacattcacacttgcttcccatccacccttctcagcctctagtaaccatctttctactctctatgaccgtgagttccattgtttggaattgctgctcccacaaataagtgagaacatgtgatgtttgtctttctgggccagtttattttacgtcacataataatgtacagttcagttccat

SEQ ID NO: 562329 - DNA, 562 bp, Homo sapiens
tatgtaccacatcttctttatccattcatatgttgatggacatttaggtagtttccaagtcttagctattgtgaacagggctggaataaacatgggagtgcagttatcatttcaatatactgattttcttacttttgggtatatacctagctgtgggattcctggatcacatcatagctctatttttagttttttgatgaacctccaaattgttttccatagcagctgtactaatttacataaccacaaaaagtgtatgatgggtcccttttctccacctcctcaccagcatttgttattgtctgtgttttaaataaaagccattttaactggggtgagataatatctcattgtagtttttattatgtatttctctgatcaatgatgttgagcacattttcatatgctygtgtaccatatgtctgtctgcttttgagaaatgtctattcaaatcttttgctcactttttgatgcacttattagattttttttccctctagagttgtgtgagctccatatatattctgggtattaatcccttgtcagatgtgtgaaaggaaaa

SEQ ID NO: 562330 - DNA, 562 bp, Homo sapiens
tatgtaccacatcttctttatccattcatatgttgatggacatttaggtagtttccaagtcttagctattgtgaacagggctggaataaacatgggagtgcagttatcatttcaatatactgattttcttacttttgggtatatacctagctgtgggattcctggatcacatcatagctctatttttagttttttgatgaacctccaaattgttttccatagcagctgtactaatttacataaccacaaaaagtgtatgatgggtcccttttctccacctcctcaccagcatttgttattgtctgtgttttaaataaaagccattttaactggggtgagataatatctcattgtagtttttattatgtatttctctgatcaatgatgttgagcacattttcatatgctcgtktaccatatgtctgtctgcttttgagaaatgtctattcaaatcttttgctcactttttgatgcacttattagattttttttccctctagagttgtgtgagctccatatatattctgggtattaatcccttgtcagatgtgtgaaaggaaaa

SEQ ID NO: 562331 - DNA, 562 bp, Homo sapiens
tatgtaccacatcttctttatccattcatatgttgatggacatttaggtagtttccaagtcttagctattgtgaacagggctggaataaacatgggagtgcagttatcatttcaatatactgattttcttacttttgggtatatacctagctgtgggattcctggatcacatcatagctctatttttagttttttgatgaacctccaaattgttttccatagcagctgtactaatttacataaccacaaaaagtgtatgatgggtcccttttctccacctcctcaccagcatttgttattgtctgtgttttaaataaaagccattttaactggggtgagataatatctcattgtagtttttattatgtatttctctgatcaatgatgttgagcacattttcatatgctcgtgtaccatatgtctgtctgcttttgagaaatgtctattcaaatcttttgctcactttttgatgcacttattagattttttttccctctagagttgtgtgagctccatatatattctggktattaatcccttgtcagatgtgtgaaaggaaaa

SEQ ID NO: 562332 - DNA, 597 bp, Homo sapiens
tgtctgtctaaatgatctatccattgttgtaattggagtattgataatttcaacagtgtcaataaggttacctatatctgtagtattattgattgctctgtatctctccctccagatattaatgtttgctttacattttcaagtgctctaatgttaagtgcatatttatttataattgtttcatccctttaatcaactcatccctttatcattatatagtgaccatctttatcacctgttagagttttatcttaaggtatattttgcctgatataaggatagttatccatgttgtttttttgttttaatttgcatggaatatcaaattttctcatcccctaaattcacaccatatgtgtccttgaagctgaagtgagtctcttgtaggcagtatattgttgggtctccttttgtaatccattcagccwctgtggcttttgaatgtagaatagaatgaatttatcttcaaggtaattattgatagataagcacacacaattcacattttgttcattgcttttcagccttttaacatatttttgttcctttatttctcccttgctgtcgttctttgagattttatgattttctgtagtg

SEQ ID NO: 562333 - DNA, 597 bp, Homo sapiens
tgtctgtctaaatgatctatccattgttgtaattggagtattgataatttcaacagtgtcaataaggttacctatatctgtagtattattgattgctctgtatctctccctccagatattaatgtttgctttacattttcaagtgctctaatgttaagtgcatatttatttataattgtttcatccctttaatcaactcatccctttatcattatatagtgaccatctttatcacctgttagagttttatcttaaggtatattttgcctgatataaggatagttatccatgttgtttttttgttttaatttgcatggaatatcaaattttctcatcccctaaattcacaccatatgtgtccttgaagctgaagtgagtctcttgtaggcagtatattgttgggtctccttttgtaatccattcagcctctstggcttttgaatgtagaatagaatgaatttatcttcaaggtaattattgatagataagcacacacaattcacattttgttcattgcttttcagccttttaacatatttttgttcctttatttctcccttgctgtcgttctttgagattttatgattttctgtagtg

SEQ ID NO: 562334 - DNA, 597 bp, Homo sapiens
tgtctgtctaaatgatctatccattgttgtaattggagtattgataatttcaacagtgtcaataaggttacctatatctgtagtattattgattgctctgtatctctccctccagatattaatgtttgctttacattttcaagtgctctaatgttaagtgcatatttatttataattgtttcatccctttaatcaactcatccctttatcattatatagtgaccatctttatcacctgttagagttttatcttaaggtatattttgcctgatataaggatagttatccatgttgtttttttgttttaatttgcatggaatatcaaattttctcatcccctaaattcacaccatatgtgtccttgaagctgaagtgagtctcttgtaggcagtatattgttgggtctccttttgtaatccattcagcctctgtggcttttgaatgtagaatagaatgaatttatcttcaaggtaattattgatagataagcacacacaattsacattttgttcattgcttttcagccttttaacatatttttgttcctttatttctcccttgctgtcgttctttgagattttatgattttctgtagtg

SEQ ID NO: 562335 - DNA, 382 bp, Homo sapiens
ctatttcatttattttgggaaccagagtcttttttttttttttttaagatggggtctccctctgtcayccggctggagtgcggtggcacaatcacagctcactgtagcctcaacctcccagactcaagcaatcctctcaactcagcctcctgagtagctaggaccacaggcatgcaccacaatgcccagctaatttttatttttgtagagatgggggtctcactttgttgcccaggctgacctcaaacttctgagctcaagtgatcctcctgcctctgcctcccaaagtgctaggattacaggcatgagtcaccacacccaacctagagtctttatttatttatttatttattcatttatttattttttgagacaaagtttc

SEQ ID NO: 562336 - DNA, 586 bp, Homo sapiens
acttctaggtggaatgcatctcttttgatttttcatctctacttaatttgttgagttgtatattggaatgaaaatattggcattttagttagatgttcctccttttttatcaattgtttttctgtctatatttttgcttttgtctattaaatctctctgataatgaggcattgtgttattttaaaatacctcttataagtcagtgtgacccttctgtcatgaagtgacygtgtatatgcaaggcacaagtcaaagaaaaagaatcacactatttgggaaagagaaaggggaatcataaattgtctttattgtgccatttgagcataaactctaatctcaatgtaaagagacctagatgatggtattatcttgcctatggcagctaattttaacctaccctacctacactttcttattcacctgacctacctacttgcatacaagacaagacttctaagacagacatcaaacttgttttttccaatgagaaccattttccctctgtcctttgaagtatacttttatatgagttgagtaataaaaataaaaagtgtttttttttgtttattgtggcatacaggccact

SEQ ID NO: 562337 - DNA, 490 bp, Homo sapiens
atgactgagtagacgtaaaactaagcaaagaaaggatgcaaggcgcccgaaacagaaagcacacagatggagcaagcaggtggcatgaacgcagcaggagctgatgatgaacagaatactgatggtaggaaaatatgaccagattccataaattcagatgtatttcagcagaggctactaaattttagaggacagaatcagaaacccatctggggcacttatggttgatataggaaagttgccagcacttgaaaacaatgcaatgcctctgtcttattgaataaggaattggtrtaagtcaccaggattgagtcattatttctaattttgttgtggaccttgaatggaaaccttttggttaggtaagatttaagaggatatttttgtatacagctaaagagatgaatatgtatattctatgaagtgcagtagcctgaactattataaaataaaggacaaaagtaaaagaaatatgtctatcttcagccta

SEQ ID NO: 562338 - DNA, 490 bp, Homo sapiens
atgactgagtagacgtaaaactaagcaaagaaaggatgcaaggcgcccgaaacagaaagcacacagatggagcaagcaggtggcatgaacgcagcaggagctgatgatgaacagaatactgatggtaggaaaatatgaccagattccataaattcagatgtatttcagcagaggctactaaattttagaggacagaatcagaaacccatctggggcacttatggttgatataggaaagttgccagcacttgaaaacaatgcaatgcctctgtcttattgaataaggaattggtgtaagtcaccaggattgagtcattatttctaattttgttgtggaccttgaatggaaaccttttggttaggtaagatttaagaggatatttttgtatacagctaaagagatgaatatgtatattctatgaagtgcagtagcctgaactattataaaataaaggamaaaagtaaaagaaatatgtctatcttcagccta

SEQ ID NO: 562339 - DNA, 608 bp, Homo sapiens
catgtgttctcattgttcaatttccacctatgagtgagaacatgtggtgtttggttttttgtccttgcgatagtttgctgagaatgatggtttccagcttcatccatgtccctacaaaggacatgaactcatcattttttctggctgcatagtattccatggtgtatatgtgccacattttcttaatccagtctatcattgttggacatttggcttggttccaagtctttgctattgtgaatagtttgagagagtccaccaaggaagccatctggtcctggcttcctttttctttgtgtgattttttttyccctccattttaactagttaagtagactttatatttggagcacttttaaatttacaagtttggggttttgggggttcttttgggttattaattcaatccctttacttgttaaaagtttattaaaattttctattaatttgatatcagtgtcagtagtttgtgtctttgtaggaatttcatttagtctgtataattagttggtatacagtttctcagagttttacttaatagtcctttttatttctgtaagattgcttgcaatgatccctcttttattgcttattttaatcatttgaat

SEQ ID NO: 562340 - DNA, 608 bp, Homo sapiens
catgtgttctcattgttcaatttccacctatgagtgagaacatgtggtgtttggttttttgtccttgcgatagtttgctgagaatgatggtttccagcttcatccatgtccctacaaaggacatgaactcatcattttttctggctgcatagtattccatggtgtatatgtgccacattttcttaatccagtctatcattgttggacatttggcttggttccaagtctttgctattgtgaatagtttgagagagtccaccaaggaagccatctggtcctggcttcctttttctttgtgtgatttttttttccctccattttaactagttaagtagactttatatttggagcacttttaaatttayaagtttggggttttgggggttcttttgggttattaattcaatccctttacttgttaaaagtttattaaaattttctattaatttgatatcagtgtcagtagtttgtgtctttgtaggaatttcatttagtctgtataattagttggtatacagtttctcagagttttacttaatagtcctttttatttctgtaagattgcttgcaatgatccctcttttattgcttattttaatcatttgaat

SEQ ID NO: 562341 - DNA, 547 bp, Homo sapiens
tttgccatgttggccaggctagtctcgaactcctggcctcaagtgatccgtccacctcagcctcccaaaatattrggattacaggcatgggccactgctcctggcctgccttgaatatggtaagtcttgaagttggctagacattggtattgttttgcctgtccatataaaatttaaatcatattattaatatctacaaaaaatgattcctggaattttggttgagaatacattaaatctattgatgtagttgagaaaaattaatgtattaaaaatattgagaccaacaatacatgaagaagataagcatctttccatttagttaggtttttttttttttttttggttttaaggagcagagagtttaataggcaagaaagaaaagagaaggcagaaggaagaggctcccttgtacagtgacagagaaaggagtagctccaatgccgaaatagaaagtcccaaagtgcggtggacaccagccaggtatatacgcagaggttgcaggaggtgatgtcatgatttctttgagttatgtggttttcctcaa

SEQ ID NO: 562342 - DNA, 547 bp, Homo sapiens
tttgccatgttggccaggctagtctcgaactcctggcctcaagtgatccgtccacctcagcctcccaaaatattgggattacaggcatgggccactgctcctggcctgccttgaatatggtaagtcttgaagttggctagacattggtattgttttgcctgtccatataaaatttaaatcatattattaatatctacaaaaaatgattcctggaattttggttgagaatacattaaatctattgatgtagttgagaaaaattaatgtattaaaaatattgagaccaacaatacatgaagaagataagcatctttccatttagttaggtttttttttttttttttggktttaaggagcagagagtttaataggcaagaaagaaaagagaaggcagaaggaagaggctcccttgtacagtgacagagaaaggagtagctccaatgccgaaatagaaagtcccaaagtgcggtggacaccagccaggtatatacgcagaggttgcaggaggtgatgtcatgatttctttgagttatgtggttttcctcaa

SEQ ID NO: 562343 - DNA, 627 bp, Homo sapiens
tgataattgcccttatgttgacatggaaagactgtaaaaaaccttctctgtagcatgaaaattagcacttgtaagcactaattgtttttccatgattataaaacctgcaactaatacactaaaaatagctagcttatgctatgctactcatgtagcaattatcatgaaagcatttcattacattcattcatattaatggtgcattcttcatttataggtttgtaaacatttcagactctattacctactaacattatttcattcttttgacagaatacattatcttttgttttatgctgaagtagagtgcagcaagcaaaaagcagcaaaagacacataatcaaagtacttggaatgctgactgtaaaattatgctgagaactggctgcatgataagatgcttttscttcctctttgttatttgtattattttgtaaagataggccagtgtgagtatgtccaaataagctaataatctatttcccttaaaatttcagcaaatattcaagagaataaaaatgtaagttattgtccacacagctaatgttaatttttcattaacataatttaagtctcggtgatagtttgaaaatgttcataatgttcattatctaataaaatagataa

SEQ ID NO: 562344 - DNA, 627 bp, Homo sapiens
tgataattgcccttatgttgacatggaaagactgtaaaaaaccttctctgtagcatgaaaattagcacttgtaagcactaattgtttttccatgattataaaacctgcaactaatacactaaaaatagctagcttatgctatgctactcatgtagcaattatcatgaaagcatttcattacattcattcatattaatggtgcattcttcatttataggtttgtaaacatttcagactctattacctactaacattatttcattcttttgacagaatacattatcttttgttttatgctgaagtagagtgcagcaagcaaaaagcagcaaaagacacataatcaaagtacttggaatgctgactgtaaaattatgctgagaactggctgcatgataagatgcttttccttcctctttgttatttgtattattttgtaaagataggccagtgtgagtatgtccaaataagctaataatctatttcccttaaaatttcagcaaatattcaagagaataaaaatgtaagttattgtccacacagctaatgttaatttttcattaacataatttaagtctcggtgatagtttgaaaatgttcataaygttcattatctaataaaatagataa

SEQ ID NO: 562345 - DNA, 562 bp, Homo sapiens
ttcgttggttattcagggccttttgtggttccatatgaattttagaacctgaaaccacagaactcctagaagataatgtaggaaaaaaaaattctttgacatttgccttggaaataactttttggatatcataccaaaatcgcaggctacaaaaccaaaaataagtaaatggtattgaatcaagstaaagagcttctgcacagcaaagggaacaatcaataagataaaatggctacccatgtattggaaaaaaatgtttgcaagccatctacctgataaagcgttaatagggttaatatccaagattcacaaggaactcctacaagtccctagtaaaaagccaaataacctgaataataaatgggcaaaggacctgaacagatgtttctccaaagaagagataaaattgaccagtgggtataaaaaaggctgctccaacctcattagtcaccagggaaatgcaaaccaaaccactataatgatataaattcacacccattaggatggctattatcaaaagttaagatataacaaatattgctgagggtatggagaaaaggga

SEQ ID NO: 562346 - DNA, 520 bp, Homo sapiens
tctaaattaaccaggcctggtggcacctgcctatagtcccagctccttggtaagctgacggctgagggaggatagtttgagaccagaaagtggagactgcagtgaactatgatcctccagggtgacaaagcaagaccatttcatcaaaacccaaaacagaaaaacagaaaagaagcaaaacaaaacaaaacaaaaaaactataaactggctaaaatttaataacaggtatgtcataggttttttttccaacacatattttttctctttccagtctcttatttttaccaaaggccaatttatttgcaaaataagttttagttttatgatatttggcttaattatttgcataaagtgcaacaatagtagtgattggccatatcgattctatttaaattggcttttctgaactctttcataatgaatctcagattagacttttgamgtctgttgaggataggaagccaagccaaggatttgccatcagactgtgtctgtaatatctgaatgaattgggtaatt

SEQ ID NO: 562347 - DNA, 612 bp, Homo sapiens
gtttttatatagattgagtaggcacctctcatgtgtataattttaaagacattgaaaagggctgttrttttccaaaatgactctcctacaggttgttcatttattctttattcagtagatatcttcattcagtaaacatttattcaataaataactcagtatacctgttgtgttgggtaagctttgtccctggctcataagcaggactccttgggaggtataaaacattaattgttacctgttgtttataccttattctggctaagcttcatatttttacctgtgacagtgtttgtggggagatggagaagtgaagagagcttgatttcacagagcatgaggagaaacaattaggagactcattgggcatgaagaacagggaacaaagtctcaattttttttttgaggcagagtctcattctgtcaaccaggctagagtgcagtggcttgatctcggctcactgcaacctctgctgcccgagttccagcaattctcctgcctcagcctccgaagtagctgggattgcaggcacctgctatcatgcccagctaatttatttatttatttatttatttatttatttatttatttatttatttttagtagagacg

SEQ ID NO: 562348 - DNA, 612 bp, Homo sapiens
gtttttatatagattgagtaggcacctctcatgtgtataattttaaagacattgaaaagggctgttgttttccaaaatgactctcctacaggttgttcatttattctttattcagtagatatcttcattcagtaaacatttattcaataaataactcagtatacctgttgtgttgggtaagctttgtccctggctcataagcaggactccttgggaggtataaaacattaattgttacctgttgtttataccttattctggctaagcttcatatttttacctgtgacagtgtttgtggggagatggagaagtgaagagagcttgatttcacagagcatgaggagaaacaattaggagactcattgggcatgaagaacagggaacaaagtctcaattttttttttgaggcagagtctcattctgtcaaccaggctagagtgcagtggcttgatctcggctcactgcaacctctgctgcccgagttccagcaattctcctgcctcagcctccgaagtagctgggattgcaggcacctgcyatcatgcccagctaatttatttatttatttatttatttatttatttatttatttatttatttttagtagagacg

SEQ ID NO: 562349 - DNA, 535 bp, Homo sapiens
ctttttagtacatacttgtgtatgagatggaatgtgttgagtgcggaggggaaagtcctccagcctgtgccgtcaggatggcattatttagtaggtaggattttgatacatagtagatggaaagaagggcattcttagcagggggaacagcctaggcaaaggcctagaggctggaarggggtaggtttgtatgagccatggtgaaccaaagtgtgagaaagaaatggcaggagaggtttgagtccgttaagagaagccttgagtgatgagctatggctgacattggaagcagtaggaagccactgaaagaaatcaaaaggagggaaaggttcaggaagatggccatgaagcctggcatgggaggaggatccagagcagggagaggcaagctggaggccaggaggggctatatgggcctagcctccattaagccagaccctgggtgtggctatttctgcccagccagctactccagcagttgggagaggccaggacatagcccacatccttggtggatgggccacaatggcaggga

SEQ ID NO: 562350 - DNA, 477 bp, Homo sapiens
tcagctactcaggaggctgaggtgggagaattgcttcagcccaggaggcagagattgctatgagccaagattgcaccactgcacttaagcctgggcaacagagtgagaccctgtccccaaaacaacaacaacaacaataacaacaatgagaatgaaggacaaaaacgatatgatcttttcaattgatattgaaaaagaattcaaaaaaattcagcatctcttcatgataaaaaccatcaaaaaactgggtatagaaggaacatacctcaacacaataaaagccatatatgacagactcatggttagcatcatactgaatggagaaacactgaaagcctttcctgtaaaatctggaatatgacaaggatgcccactttcactgctgtcattcaacatagtactggaagttctagttagagcaatyagaccagacaaagaaatgaaggagatccaaattggaaaggaagaagtcaaatt

SEQ ID NO: 562351 - DNA, 584 bp, Homo sapiens
gcatgaaccactgtgctggccatgaattatttttgtggtgtmtttagctatgcttcagagattcaaaacccagaagcatataattcaaaagaagtaaactgctggctttaattttaatgagctgtggtagagtgtgaaatggtgtgattttcaaaggcaatttcaaggactgttttagtatcaaagatattcttcagaacagcctaagtggctttgcttatcatgtgactctggattccagtctgttttggtacaaggatttagcaaagtcatgatgttctcagatgctgggcatgcaagtggttataaaaaaggtcaaaactccaggacaattcaaaatattttacacttccaagcttaaaatttcccacatctttcttgttaccaaaatttttcacatttgtgaaagcaaagtcctcattatctgcaccaaattttgatccaaatgattgagatattgcaacacatgatactacattattgatgagcagatttttaaaaacttaatagtaacttagctaccaaaatactccatcaaatgaaagccatcaccaacagatatgtagtagaatgctcatagtagc

SEQ ID NO: 562352 - DNA, 378 bp, Homo sapiens
tatctcagttactaagaatcccaaacaagccaccttcctgtctctctccagctgcttcatgtactgctgtttaaaatagccaggagaagagcaataggtgcatccagtggggaggaggggtacatgggtatctggaggggtcagtccttgactgatatctttgycccctagtgtttggtcactgctgttcagttggaagcataatttccttcaaatattgttcatttggttattgtagaagtgacaaggataaagggaagctgaaagttcaaacaacctacctcctagatgaattggggatgtgtcaagacaagtttactcaacccttccggaattttctgggcctcatataccatcttctcttttataatctctgcc

SEQ ID NO: 562353 - DNA, 378 bp, Homo sapiens
tatctcagttactaagaatcccaaacaagccaccttcctgtctctctccagctgcttcatgtactgctgtttaaaatagccaggagaagagcaataggtgcatccagtggggaggaggggtacatgggtatctggaggggtcagtccttgactgatatctttgtcmcctagtgtttggtcactgctgttcagttggaagcataatttccttcaaatattgttcatttggttattgtagaagtgacaaggataaagggaagctgaaagttcaaacaacctacctcctagatgaattggggatgtgtcaagacaagtttactcaacccttccggaattttctgggcctcatataccatcttctcttttataatctctgcc

SEQ ID NO: 562354 - DNA, 538 bp, Homo sapiens
attgctattaacattgttgtatagatggcaatgtcctagtctttcatatttttttgttaaatttatttctaagtaatttatactttacatcattaaaaatggcattataggttgggcacagtggctcacgcctgtaatcttagcactttgggaagccaaggcaggaagatcacctgaggccaggcattcaagaccagccaggccaacatggcgacaccccatctctactaaaaatacaaaaattagcctgtcatggtggcacatgcctgtagtcccagctacttgggaggctgaggcaggagaatcacttgaacccaggaggcagaggttgtagtgagctgagatcgccccactgtgctccagcttgggtgacagagtgagaccccatctcaaaaaaaaaaaaaagcattgtatctttaatttgaattgttcatctttgttactaccgtatcgatgttactaaacactagttcytgaagctttgtatatttttatttttctacattgctaaatattttcttcaaaaaaagaaagtatt

SEQ ID NO: 562355 - DNA, 565 bp, Homo sapiens
caattgtcttatatatagagtaacagaaataaaaaaacctaacaagttgagcacttactacattcaagactctgtgttaagcactgtgtaacacatttgttatatatctcagaaacacctttgtgatgcagctattactttacttatttacaggtacactaactgaggctttggattaagtgagtagatcaaagttagtgagatcataagtagaggcgttggaatttgaattctttcacctctaaatttccatggatctgtaatctaaatatactgaatagaaaataaatacacggccgggcgtggtggctcacgcctgtaatcccagcactttcggaggccgaggtgggcagatcacgaggtcaggaratggagaccatcctggctagcacggtgaaaccccatctctactaaaaatacaaaaaattagccgggcgtggtggcgggcgcctgtagtcccagctactggagaggctgaggcaggagaatggcgtgaacccaggaggcggagcttgcagtgagctgagatcgcgccaccgcactccagcctgggcgacagagcaag

SEQ ID NO: 562356 - DNA, 341 bp, Homo sapiens
ctcccaggcttattaggttgaggaaattaccacctaataaactttggtcagaccagttatctgctctcaaaccctgtttcctgataagatgttatcaatgacaatgtgtgcctgcaacttcattagcaattttaatttcaccrcggtcctgtggtcctgtgatcttgcccggcctccatttgccttgtgatattctattaccttgtgaagcacatgatctctgtgacacacaccctattcgtacactccctccccttttgaaaatcactaataaaaacttgctggttttacagctcagggggcatcacggaacctgccgacatgtaatgtctcccctggac

SEQ ID NO: 562357 - DNA, 519 bp, Homo sapiens
aagtgcaggcccaatttcttttttttttatgtgtgtgtacatagaccttcagttttttcaacatcttttttttttttttttaaacggtcgttttctcattttttggctttcaaactcatgtcaaaatcatttgattttatatgtgacagtttatttctgtgctttttatttagctccattggtctgtatatttttctatataccagtacaatactgctttgatrattatagctttgtaataccttttgaaatctgaaagcatcatatctccacgtttattttctttctcaagatggttctggctactctggatcttttaataatgcatataaatttctgtatgattttttttctatttctgcaaaacatgctaatgggatttcgattgggactgcagtgaatctggagattgttttgggtactatagatatttcaaaaatattaagtattttaattatgagcataatttgtgtcttctttaatttctttaagcaatgtttttcagttttcagagtacaa

SEQ ID NO: 562358 - DNA, 519 bp, Homo sapiens
aagtgcaggcccaatttcttttttttttatgtgtgtgtacatagaccttcagttttttcaacatcttttttttttttttttaaacggtcgttttctcattttttggctttcaaactcatgtcaaaatcatttgattttatatgtgacagtttatttctgtgctttttatttagctccattggtctgtatatttttctatataccagtacaatactgctttgatgattatagctttgtaataccttttgaaatctgaaagcatcatatctccacgtttattttctttctcaagatggttctggctactctggatcttttaataatgcatataaatttctgtatgattttttttctatttctgcaaaacatgcyaatgggatttcgattgggactgcagtgaatctggagattgttttgggtactatagatatttcaaaaatattaagtattttaattatgagcataatttgtgtcttctttaatttctttaagcaatgtttttcagttttcagagtacaa

SEQ ID NO: 562359 - DNA, 627 bp, Homo sapiens
cttcgtatgttgtctagggtggtcttcccagcttttgtttatctgggaagttttaatattgttattattacttcttcattttggctggttatgatattcttcttttgtggtgtttttctcttttagcactttaattttatcatctcatacccttttgacctatgatgttttttcttagcaacccactgataaatctcaggaaaactcttgtaataataccatgggattttcttttgtcctgttgcttcaactttttttctttgtctttgattttggcaatttggttgtaatgggtctgtttttccctctctgggttccattcatttgtaatgtttttagmtttctgaatttgtatgacccttttcttcctcagatttggaaagtttctatttttttcttagcgaaacaaaagacacaaacaaatcccacatattgaaaatgttaaatagacaataccgcttttttaacaaaatggtttcttagaatcataactgaaaaacaccaaaatataatatgtacaattttattttgacaatagcagaattaaaaaatggggtggtatatgctcttgaaataatgtctttgaaatagttactcatagtattcttttttgctcttgtaatgata

SEQ ID NO: 562360 - DNA, 627 bp, Homo sapiens
cttcgtatgttgtctagggtggtcttcccagcttttgtttatctgggaagttttaatattgttattattacttcttcattttggctggttatgatattcttcttttgtggtgtttttctcttttagcactttaattttatcatctcatacccttttgacctatgatgttttttcttagcaacccactgataaatctcaggaaaactcttgtaataataccatgggattttcttttgtcctgttgcttcaactttttttctttgtctttgattttggcaatttggttgtaatgggtctgtttttccctctctgggttccattcatttgtaatgtttttagatttctgaatttgtatgmcccttttcttcctcagatttggaaagtttctatttttttcttagcgaaacaaaagacacaaacaaatcccacatattgaaaatgttaaatagacaataccgcttttttaacaaaatggtttcttagaatcataactgaaaaacaccaaaatataatatgtacaattttattttgacaatagcagaattaaaaaatggggtggtatatgctcttgaaataatgtctttgaaatagttactcatagtattcttttttgctcttgtaatgata

SEQ ID NO: 562361 - DNA, 582 bp, Homo sapiens
tacatcaatccttgcttctctttaagtaaaatgaatgcaataaagttgtaaccttttaaactcctaaaataatgtttaaatgttactaatttgtaggcaagcgtaaaacttgaatagctaatatgtgggacagagtattaaaaattccagtataattttttaaagaaaatgaacaaaaatatttatataattaaaaggcaggggcctaacaaatccatgatctcaaatccttttttcccccaagaaaagtagctaatgcttttgcattcaaaagttgattattgctctacgtgtactaggaagtgcttaacttgttttgactttgtgtgtgtgtgtgtatatcttctasaacaagaaatactttctagtttctatatttgcttattgttgtgatttatgatttataaggaatcaggactgctccaagtaattttttaagtttctgttaaagggtagtgcatgtataaaaaagcacatgtgccaataactatagtttacttttgattaaatatatgtcatacttaactacttaactacatctataaagtggttattttagtgtcaaaaaatgtgaaggttttg

SEQ ID NO: 562362 - DNA, 628 bp, Homo sapiens
atgttgattttcattactgtataaatgttatcgagtgaatattatacctctaactttcaatgaatattttagtagttttttaacttttggctcttatgaacatagaagtagttttatatcaaacagagataatttgactgctgaatatctaatcactacacaagaaaacaaaataactgagggcaagaaatatgaacagcaaacactatggctttacttttgagaacaacaaataaatgatataatattatctgtattctttaattttagcmgatcttctgataaaaatgattatttcagcctatacctaagagctgctaaccaaacatatccctaacttatgctgggatattatttttttcctttaagcaaacatgtgcaactgctaggagagagaatcatttctgtccactctgtgtgataagactatggtgacttaagtatttgccacagtataatgttattaacacctgtactacacctatgataaggacatgtgatgacaatatatgcttattgatatcttgtttgtcaccaatactattaattaaaattccttagatttaaattatatcaacagaatcaaaaccttcatgagaacatcacggtatatactgcagaaactgtg

SEQ ID NO: 562363 - DNA, 380 bp, Homo sapiens
gagtcaattctctcaaaccctgctgatgttttataaactaagtttatttaatattctaaattctttgttgtcatttcaacaatatttccaacatcttcaccagaagtagattccatctcaataaactattttctttgttcktccataagaagcaattcttcatctgttcaagttttatcatgagattacagctagttatatcgtaaggctccacttctgattctggttctcttactactttcaccacctatgcagttacttcctccactgaagtcttgaacccctcaaagtcatccatgagggttggaatcaacttcttccaaagtagcgttagtgttgctattttgacctgctcccatgaatcgtgaatgttattaatg

SEQ ID NO: 562364 - DNA, 505 bp, Homo sapiens
gtggatatatatcatcaatataaactataattcataatgaaatgtcttttttcttaacaatgccctcatctactgctatagtttgggtytttgttccccaaaactcacgttgaaatttgatcaacaatgttggtgtttgagtgccaggtgtttgggtcatggggtcagttccgtcatgaatagattaatggcctccctaggtgtgggtgagtgagttcttgctctattatttccctccagagctgattgataaaaatagctgattgttaaaaaccttctttcccttgcttcctttctcaccatgggatctctcgtcactggctccccttcacattttgccatgattggaagtagcatgaggacctcgtcagaagcagatggtagtgccctgcttcttggacagcctgcagaactgttagtgaggaagggtcttttctttataaactatctagtgtcaggtattcctttatggcaacacaacggactatgacacttgcatctgccg

SEQ ID NO: 562365 - DNA, 610 bp, Homo sapiens
gaattggattgttttatctaaggaaacctgtttacgtgtaatacctattatttcartaaatgttcttaacattaaaaattaattgacaatagatgattattgagagctcacaacctactaggtaatcaccattcaaagtgctagggattcagtggcatataaggcgaggtttaccttctcatggtaaaggattctcttctttgggagaaagatcaatgaatcattacatagatgattaaaaataagatttactaagccataagtcatgtttaacttataattattatactcccaaaaagtgaagtactttaagacttttgattgctatagtaattatgtgtgaaaaactctggaatagaaatcagagctgggcgcagtggctcacacctgtaatcccagcactttgggaggctgaggcgggtggatcacctgaggtcaggagtttgagaccagcctgaccaacatggagaaaccccgtctctactaaaaatacataattagccaggcgtggttggcacatgcctgtaatcccagctacatgggaggctgatgcagtagaatcgcttgaacctgggaggcagaggttgcctccctctgcagagctgagatg

SEQ ID NO: 562366 - DNA, 610 bp, Homo sapiens
gaattggattgttttatctaaggaaacctgtttacgtgtaatacctattatttcagtaaatgttcttaacattaaaaattaattgacaatagatgattattgagagctcacaacctactaggtaatcaccattcaaagtgctagggattcagtggcatataaggcgaggtttaccttctcatggtaaaggattctcttctttgggagaaagatcaatgaatcattacatagatgattaaaaataagatttactaagccataagtcatgtttaacttataattattatactcccaaaaagtgaagtactttaagacttttgattgctatagtaattatgtgtgaaaaactctggaatagaaatcagagctgggcgcagtggctcacacctgtaatcccagcactttgggaggctgaggcgggtggatcacctgaggtcaggagtttgagaccagcctgaccaacatggagaaaccccgtctctactaaaaatacataatyagccaggcgtggttggcacatgcctgtaatcccagctacatgggaggctgatgcagtagaatcgcttgaacctgggaggcagaggttgcctccctctgcagagctgagatg

SEQ ID NO: 562367 - DNA, 557 bp, Homo sapiens
ccctgacacaaagatagtttgttattttttttgtttttgtttttccaaatggaaactgaaagcagaaaagttggcctagaatcaataattcaataatatgtattaagcacttactacaggcaaaaaatgactacagaagtcaggcataagaatctttgtaaaggcattatttgccataaaaatctaatagctttcttgagaagactgacaagtatatagacaattttcartatctttgaaattttcaatgtcttgtgtgtggatcagaccattataaaaacacacgtcatcttctttacaaacaaacccctgctttttaaaacatgtattatgtgaatttatactgtaaaaccaagcttccttcttagagatatatatttcctaaatgcatgtattagtcaaggttttccagagaaatacgcaaaaccaatagggtatctatgtgtatgtatgcatgtatgtatgtatgcatgtatgtatgcatgtatatgtatatacatagaaacagatcatatatatatatagtctgtctctattttacaatttaaaaaaaaata

SEQ ID NO: 562368 - DNA, 530 bp, Homo sapiens
gcaaaaccaatagggtatctatgtgtatgtatgcatgtatgtatgtatgcatgtatgtatgcatgtatatgtatatacatagaaacagatcatatatatatatagtctgtctctattttacaatttaaaaaaaaataaaatgtaaatatatataatctttctatacatacaaacacacacacacayctctctctatagagagagagagattgtaaggaattaggtcccatgattgcacagataaaagtccataatctgcagggtagaacagcaggctagagacctagggaagagttacggtctgaatccaaaagcattctgctggcaggatttcttcttgctttggggagttcaggctttgctctcttaaggacttcaccaattagactaggcccatccttattatggaggataatatgctttattaggagtccacaggtttaaatactaatcttatctaaaaaacatcttcacagaaacagccagattaatgtgtgacaacatatctggacactatggtttagccaagt

SEQ ID NO: 562369 - DNA, 585 bp, Homo sapiens
aaaacgtatttatttataaagtacttagtctcaggtattgtgttatagcagcataaaacaggstaagacacaaacctattagttttctttctgtaaatgaataattaatatcaatgccaagttataaagcttggatatcatgacctattcttactttactgagctcatgattaaatattagatgactgaaatacaggacatgtcctcaaaaagcatatatcaaatttcaggaaatatttttaccaacccatctacacttataatatagaaaaaaagtagagcatatgaagcattttttgataatagtccttaagcttgaaatgcagtgtcctatgacttacacgcataaggtaatggtgagattgaacaggatgttcactcaaactctatgaacttggaaccaaggatgggtaatatattgcagattcctcatagcatagttagactaagccacagaattttttttttaatacatatgattcagtagcttaatttagttggaagtttaatttttcaggttaatttctcatgtaagcataggttggggaacaaaatgtcagcaacaatgaaagggcccctaaattt

SEQ ID NO: 562370 - DNA, 585 bp, Homo sapiens
aaaacgtatttatttataaagtacttagtctcaggtattgtgttatagcagcataaaacagggtaagacacaaacctattagttttctttctgtaaatgaataaytaatatcaatgccaagttataaagcttggatatcatgacctattcttactttactgagctcatgattaaatattagatgactgaaatacaggacatgtcctcaaaaagcatatatcaaatttcaggaaatatttttaccaacccatctacacttataatatagaaaaaaagtagagcatatgaagcattttttgataatagtccttaagcttgaaatgcagtgtcctatgacttacacgcataaggtaatggtgagattgaacaggatgttcactcaaactctatgaacttggaaccaaggatgggtaatatattgcagattcctcatagcatagttagactaagccacagaattttttttttaatacatatgattcagtagcttaatttagttggaagtttaatttttcaggttaatttctcatgtaagcataggttggggaacaaaatgtcagcaacaatgaaagggcccctaaattt

SEQ ID NO: 562371 - DNA, 622 bp, Homo sapiens
gatatttaatttttctccaaaattctcttaagatcattatgaggatggtttataaataaagtttactgatagctgtggtgttaaaataaaaattgtgaattatatgttgtgtgtgtgtgtctagaatctaatatggcatagcatatattgtcgtgtatcaactgctcgaattttgactaacagatgctttcaaatacaatctgttatttagtgtttttaccttttctaattattttttctctttatacggtagcatttctatttcattagtctgttttgtttaacttcctttatattgtgatacaaatgtacccccaaattatcatacaaaagaatctgaataaaggatcaattaatagagaaggagtcgatgatgtgtttgcyaagctgccttgagccatgaatttattataatcattttctatataatttttctaatagtaataataatcagtgacagatttttaacatagaaactagagctttgaagtaaagaataacaaaaaaattattcctttattaagcatcaaataatattaatattttttgttttcactagtgtaatgcacacattgtacatacagacaaacatacttgcacacacacacacacacaaacacaa

SEQ ID NO: 562372 - DNA, 567 bp, Homo sapiens
ccaagttgacacataaaattatcaatatgtataaataaattattgctgttggtaacatctttgcttactttgtcgatatttgcatgtacaaagattttctatgagtaatgaatatcagcagctactctggatgattgttgyctgtctccttaggtcctccccaggactaccaaaagagaagttgatatacttcaaatgatgtatattttaagtcagatcctgtcaaacataaatcacaaaatttgatgaaatgtatctagttgcattcaggtatttttaacaaagatagctgatacttttatataaataaatatgtattaattatatgaatattgtcatgtggaaagagaggtgatgcctcctccatcaaaggacacttgagcaaaactctttctccagtgtgactaagcgtagttcatcaaactctgaaaagctttcacagaatcattaaatcactcaataacaaggcaagaggcaagtgcagcagaagactgaccagattttctggtacttgctccttataacactgggaatacacagcagatctccatggacaatgttcacacc

SEQ ID NO: 562373 - DNA, 567 bp, Homo sapiens
ccaagttgacacataaaattatcaatatgtataaataaattattgctgttggtaacatctttgcttactttgtcgatatttgcatgtacaaagattttctatgagtaatgaatatcagcagctactctggatgattgttgtctgtctccttaggtcctccccaggactaccaaaagagaagttgatatacttcaaatgatgtatattttaagtcagatcctgtcaaacataaatcacaaaatttgatgaaatgtatctagttgcattcaggtatttttaacaaagatagctgatacttttatataaataaatatgtattaattatatgaatattgtcatgtggaargagaggtgatgcctcctccatcaaaggacacttgagcaaaactctttctccagtgtgactaagcgtagttcatcaaactctgaaaagctttcacagaatcattaaatcactcaataacaaggcaagaggcaagtgcagcagaagactgaccagattttctggtacttgctccttataacactgggaatacacagcagatctccatggacaatgttcacacc

SEQ ID NO: 562374 - DNA, 604 bp, Homo sapiens
atataaatagaactttatagcgtgtggtttttagaatctggattctttcacttagcataatgctttgaaattcgtctatgctggatgcatgtatttgtagttcatttttttaattgctaattagagctccattgtaaggctgtatcattgtttatccactcactagatgaagaatatttgggttattttctgttttaattatgtacaaaacctctatcatcattagtatacatgtttttctgttaacgtaagttttcatttttcttcaagaaataggtatttcttgagtgagatgggtgataacatttaacttagcaaaagagaaaaaaactgatagccaggatatataaagaacccccacaaatcagtgtaagtaaaaaaggcaaaattttaattaggcaaataatatgactagattttttagcaaagaatgtatgtgtgtatgtatatacgtatacatacatatataataaacacatatgggtgctcaacatcattagttgttaaagaaatgcaaagtaaaacaaaatgccactatrcacatctattagaatatataaaatttaaaagactgagaatattaaaagcttataaggatgtaagc

SEQ ID NO: 562375 - DNA, 602 bp, Homo sapiens
tttgccctgcaactggcaaccctcatttgggacaccactttttcttagagcatttctgtcacttaatacatttgactctgccttactcactttctggtgtccgcctgccttattcttcttggtcttgagacaagaacctggagtttgccagtggtgagtgtaaccaaaaaacaggagtgaaaaagctgcaacaacatcccagtaatttcagttgttggtgtttcccaggttacttccaatatgttctttttcttattatacttaacatttatataattatgtaaaatgattaaatgaaatatgctttggtttcatatcatccttagttaaaatatcaaggtacaatacatgtaaagggcataatttatttttaatactagtagaagattactcagaaattcatatttcagataatcttttgatratgccaaatgctgtatctcattgccacttttgatatttcaatttagattgccattatttttataccataatatggctgagaagaacactttaaggagtagcaataccagctgtatcaattatttttgcttcttcatatcagtatcatcattacattgaggcctcagtttctaaacagg

SEQ ID NO: 562376 - DNA, 364 bp, Homo sapiens
cggcttaaaatgctctcactagttcttacaagtaacttcctttcacatcatctaaattgctttcctttttgagatcaaaattttagatacacttcactccaccaaatcatatgatttatattggataaagyaaatataatttaaggaaaagcacatttgggaaggcaaactttttaataccaaatacacatatttacaatacaatatgtgtgtgtacacaacacatttgtacttaaactataatgtcaaaatattttcagctttgaaaaaaaattcataaacttattgatgtaaaataacttccagatgagcatacattatcctttacacttgcaaagtacatgatacattttcaagcaaaata

SEQ ID NO: 562377 - DNA, 609 bp, Homo sapiens
ttctcgagcagatatttctctggtcccacataccacaacttaagagtaagaccaaaaagaaaaaaaaaagtaatggtaattaatccagaaatagtatagatgacataattagtacataaagacattaaagcagttaaaataactttattctgtgttgccaaaaagctgcagaaagtttgaccgtgctaagtcaataaataaatatatttaaaagaccaaaatcatatcctgagagagaaaatatcatattaaagtacatgaaaaataaaaattataaaatttattccatatgaaatattccagataaaaatattagtaattctgaaaatatagcatcataaactatacagactgtaacctagaaaaaaagaagaatkaaaaaaaataaacagaggttcagtgaactgtgagacaaagcatgcaaagcaagtagcctaaggcatgtgcaattggattcccagaaaatagggtgtgggcagaaaatgccacaagaaataatggatatttttgcatattttattaaaactgtaaactctcagatccatgagctcaataaaatatgacataaactaaaacaaagtacatctttattgaattgcttaaaactgg

SEQ ID NO: 562378 - DNA, 437 bp, Homo sapiens
atgactaaggccaatgggaaatataggtttaacttagtaaaaaactgccaaaataccttttaaagtggccctacaattttgcatcccaccatatacatatagaaattttagttgcttcataattatccctatacttgataattttcataayttaaagtgtagctatctgggagaagaatgtacctgtatttccctatgatttaaatttgtcttttcctaaagatgaaatttttgagcatttttatatgctaatttaccatccttgttttgtagtaaatttcctgtttcaatctttcacccacttattgatttttatgtttgaattagcattcaaaatatattcatataatctatatataattaatggaagtataatttccatacaataaatttaactgtatataaaagtatacagttttatgacctttcacagatct

SEQ ID NO: 562379 - DNA, 608 bp, Homo sapiens
aaaaagtaaagaaaataaacaaacaaaaatcacaagcatacccattgaagttatgcctttctccaggcaatgcaatggcaaagttgaaacttactcttgaatatgactacgttatgaagaccactacacttttgaacaattaggttattatttattgtgataacatgatggcattagatcaatctccttcacatttatgcttaaagtaaatgaatatttattggtaattcattttgtatttctgtttctcttgaaaaatgcattctcaattagtatcatcaaaactcattttttaatgtgtttaatgttcaaataactgacaataggtaaaattctgttaaacattctacagaacgatagtttctatgggtaagtgggagtcagcatcatctatggaatatatttataatatagattcrttgagtcctcctaacagattctgttcaaataggttagaggtaaattcaatcttctgaaaaatatttaatatacttacagggaatattaattcatagacggattatgaggctatactgctttacaactctaaactagaattgaaattttatttctttatttgtgatacattttataattcttaaagacaa

SEQ ID NO: 562380 - DNA, 297 bp, Homo sapiens
tgcttctcaccactggtcttagctgatattttcccatcatgttmtaagctccagaagagaatgccagggttttagttgcctgtaaaactcaagttctgtgttctacaattaattctatgtcttgactcttcttaactgttgttgaccattagtagttgaaagcaatgctgaaaacttggtagaaagtgttttgtacttggatttctttattatcttaaggagatactgtgttttgcttttggaattcaaagccgatataaagaaaaagtgttcacttctatattttaatttacacag

SEQ ID NO: 562381 - DNA, 575 bp, Homo sapiens
taacattctaaatagattgtaatgttataatccacaagcaaatataaatctaatgcaagtaaatatataagttttgaggataattttagaaaaggcaaattagagaaaagtttgtccaaaagaacatttctggccagsatgccggcttatgcctgtaatcccagcactttgggaggccaagatggcaggatcgcttgagctcaggagatggagaccagccccgggcaacatagcaagacctcatctttataaaaaatttaaaaaaattagcagggcatggtggcacatgcctctagtcccagctacttgggaggctcacttgggtccaggagtttgaagttgcagtgagttatgatcactgtactctagccagcaccagagtgacagggcaagactctatcagtaaacaaaaccaaaaaaaaaagaaaagaaaataggaaataaaataaaattctgagggcttgtttgtctctagcgaatgcctcttaatcttttttgtctcaatttacaggcacatattctgaatttctagattagatttaatgacaggcactcagaatttttccatggagttt

SEQ ID NO: 562382 - DNA, 382 bp, Homo sapiens
gtttttttctcatttctttaaatgacaaattatgttcaacawgtcttcatatgctaacttgccatctgtgtataatttggagtggtatcttcagatttttgctgatgtaaaaataagttatttattttttactacagagttttaagaactatttgtatgttttaggagtgacataagcaatatggcagaataggaggctactgacgctcccttcacccatggacacactgaataaacatctacacaaggatcattgtcatctgaaagagagtcatagacaaacttgagactctatactccaggcgactgagaaaatatctacagcaaaagtgtagaaaaagcttaggcacacttaggtatgaacctcaccttgggaactacc

SEQ ID NO: 562383 - DNA, 451 bp, Homo sapiens
gtggtttattttgtgtgttaatatgttgattgaattaattaattttaaggtttggactgagcttgcattcctgagaagttctgcttgggcatagcatattaaatattgtatatgctaccagattcagcttatttctgttttgtttagaatttttgtgtttatctttatgaaaaatattggtctttttttttctagttctattttttactcctttattttgtttgatggcaatattaaccttatgatacaaggttgcagtcctttctctcctatattttctggaaaacaaattgtatataattgatattattttctgctaatctrtctgttagaattcaccaatgaaactattgcacctgaagttttctcttctagaagctttatatctaagaatatactttctaaggtgatttgaaaactgaaattctaaaaatattttgcatgaaaacta

SEQ ID NO: 562384 - DNA, 567 bp, Homo sapiens
aaaacgacatgcattgttcctagattcagagtggtcaaagcttatgatttatgggggrcagggataacatttagatgatttaggttataaattattctgactccaagggatacaacagttcagcagtaagagaatagcatcatgttggtgtgtatccaggggcaggagctgatgctttccagggacacaatgacctacactgatacaagctgaatctatcactagtttaatatatgactaaagagttgaaacatcttttatgaaacaaacgatattttattgaaagaaatacataagtctgtttattcttaagcaatagaatggtcaagggaaaatatattattttacaaagaaacagagtacttttcaattctatttttttttttttgagaccgtgtcttgccctgtcacccaggctggagtgcagtggcatgatctcggctcactgcaacctccacctcccaggttcaagtgattctcctgcctcagcctcctgagtagctgtgattacaggcacataccaccacacctgtctaatttttgtatttttagtagagacagggtttc

SEQ ID NO: 562385 - DNA, 608 bp, Homo sapiens
tgcagacttcttgaattatccagggggtgtgatggacagtgtgagaactactaatccagaggtcaatgctaaaaaggccaatatggactggctgagcatgtttaaaacgcatagccctcaggatttagccactttcccagcaaagcaagtcaatagcctactcacaagaaacattcacctctgcatggataggggtacacaaatgaacatgacattattctctaattcagtcaatcttcagcaaagagcatacagattgcccacgactaatattcaagtcttggagtgacagcaataagggctcaaccccttactactggagaattaaatgtaagtcacttaattctgagcttcactatttgcaktttaaaataagatcttgtgagaactcaactaaagcaattatgtaaagtgctagaacccagtaaataaagtagttgcaaaggtaaggcagatttatgtatactgatttgaggtgattgcctaaatattgttaattttttaaaaaaccaaggtttaaaactatatttagttttataaaatcagtaaaaaaatggaaatatctgtatatatatatatatgtgtgtgtgtgtatatacatatacaca

SEQ ID NO: 562386 - DNA, 455 bp, Homo sapiens
cctgtaattccagcactttgggaggctaaggaggtggatcgcatgagctcaggagtttgagaccagtgtgggtaacatggtgaaaccgtatctgtaaaaaaaaattagcagagtatgggggtacacacctgtagtcccagctttttgggaggctgaggtggaaggatcacctgagcctggttagttgaggctgcagtgagccaygattgcaccactgcactccagcctgagcaacaaagtgagaccctgtgtcacacacacacaaagaaagaaactagcaacaaaaatgttggcctctattctattttggtaagtgcctttcatactgggaccagcccctttcccattttgcatttctccctgagtttcaaaaaagcaaatgcttttctagcatcacagtgattcatgaaacaattaggatacacactgaccttgcaagtgcctttcatactggg

SEQ ID NO: 562387 - DNA, 455 bp, Homo sapiens
cctgtaattccagcactttgggaggctaaggaggtggatcgcatgagctcaggagtttgagaccagtgtgggtaacatggtgaaaccgtatctgtaaaaaaaaattagcagagtatgggggtacacacctgtagtcccagctttttgggaggctgaggtggaaggatcacctgagcctggttagttgaggctgcagtgagccatgattgcaccactgcactccagcctgagcaacaaagtgagaccctgtgtcacacacacacaaagaaagaaactagcaacaaaaatgttggcctctattctattttggtaagtgcctttcatactgggaccagcccctttcccattttgcatttctccctgagtttcaaaaaagcaaatgcttttctagcatcacagtgattcatgaaacaattagratacacactgaccttgcaagtgcctttcatactggg

SEQ ID NO: 562388 - DNA, 553 bp, Homo sapiens
ctacatgagaatttaatctcaaaacagaaatcagaaaaaatatcaagtccagggcataaaacctaaaccagtgcttagattattcattttaaatagagctaagagtaaaatcttctccataaaatacatattgtatctatacataaaatatatgttgtatctgagttcagsgtgtgatgagtgtgaccatggactacccagcattcatgtggaagtgaaggaagaggactggatcaatcccagtggaaagcatgcctctcagcagcccacaccatcctccacctacactgtgtaatgacagtgctttgagatgtagcaaaggctgtaaatttatctattctctggtgtctcagagacctgacattctgtgtcagaaagaaaagttataaaaaggcaaaagtcttaatgagaatcattggtactcaatagaatagtgaattaaatacagccaggggaagacccaagtctcatatttctctgtatattccaaagttccagtgaaattccaggtaatagaggttatttcccacactgttaaagcaaggttgcagac

SEQ ID NO: 562389 - DNA, 553 bp, Homo sapiens
ctacatgagaatttaatctcaaaacagaaatcagaaaaaatatcaagtccagggcataaaacctaaaccagtgcttagattattcattttaaatagagctaagagtaaaatcttctccataaaatacatattgtatctatacataaaatatatgttgtatctgagttcagggtgtgatgagtgtgaccatggactacccagcattcatgtggaagtgaaggaagaggactggatcaatcccagyggaaagcatgcctctcagcagcccacaccatcctccacctacactgtgtaatgacagtgctttgagatgtagcaaaggctgtaaatttatctattctctggtgtctcagagacctgacattctgtgtcagaaagaaaagttataaaaaggcaaaagtcttaatgagaatcattggtactcaatagaatagtgaattaaatacagccaggggaagacccaagtctcatatttctctgtatattccaaagttccagtgaaattccaggtaatagaggttatttcccacactgttaaagcaaggttgcagac

SEQ ID NO: 562390 - DNA, 339 bp, Homo sapiens
tggtagtggttacacaactgcatgtgtgtgccagcagaactgcacactaacatgggttaatttactctgggatatcaataaatctgacttaaacatgagtaaaatggaataaaaattctcaaaagatcagtgtgaacatcaaaacagtttatgaatagttawgaagtatgggccacacaccagcagcattggtgtcacatcagtgttactgtgaaaatcaaagcgtttatgaagtgtgggccacagaccagcagcatcagtgtcacttgggagcttgtcagaaataatctcaggcctgcccaagcccactaagtaagaattgcacttatacaagaaccc

SEQ ID NO: 562391 - DNA, 497 bp, Homo sapiens
ttcattatactgtaaaaatctcaatatttatatttcttgtttttctctttatatattttgcattttaatatrttgagccactggaaatttgtaacagattaatttgttataggagattaaatgtgttgtcattgtctccattgtctttgtccagagcctattattatggaaacaataaaatttattgtgtcaaaaaaaaaagaaaaaagaaaaacggccacaatgtaatgttgctaacagctcagtagagggtgctgtaacttaaagctgaagaatggctctcggatagattatgaaagctgaaaggtgaatgcaggcaggaggaggtaagaggaaagaaaaataagtggatctttactttttgaaagtacatcactgcagttatagatccttgaagtacaccaacaaatgatacagaactaaaatatgattttaaacctgagtgtaacacgttttttgttttaaaaaatattctctgtccatattcactcactgtg

SEQ ID NO: 562392 - DNA, 497 bp, Homo sapiens
ttcattatactgtaaaaatctcaatatttatatttcttgtttttctctttatatattttgcattttaatatgttgagccactggaaatttgtaacagattaatttgttataggagwttaaatgtgttgtcattgtctccattgtctttgtccagagcctattattatggaaacaataaaatttattgtgtcaaaaaaaaaagaaaaaagaaaaacggccacaatgtaatgttgctaacagctcagtagagggtgctgtaacttaaagctgaagaatggctctcggatagattatgaaagctgaaaggtgaatgcaggcaggaggaggtaagaggaaagaaaaataagtggatctttactttttgaaagtacatcactgcagttatagatccttgaagtacaccaacaaatgatacagaactaaaatatgattttaaacctgagtgtaacacgttttttgttttaaaaaatattctctgtccatattcactcactgtg

SEQ ID NO: 562393 - DNA, 556 bp, Homo sapiens
tgaggtcaggagttcaagaccagcctgaccaacatggcgaaaccctgtccctactgaaaatacaaaaattagccaggcatggcgccatgagcctgtaatcccagcaactcaggaggctgaggcaggagaatcacttgaacccaagaggtggaggttgcggtgagccgaggttgcaccactgcacttcagcctgggcaacagagcgagaccccgtctcaaaaagaaaaaggaaaagaaggaatgatggaagatagaattgaggtagtatcccaggaagtaaaatactagagaratagaaaattaaagagaaaataatgagcaaatgagaaccagtttaggaggtttaacatccaatagataaaatccaaggtccactttatctcttttattattctagaattcctgtaaaagaactgaatgcagtaaaatgtacccaaagttaggacacatttttcctttttaaaaggactcaccatggaccagcacaatgaatgataaaatagtcctgcaagaagacttactgtcataaaattttaaacacctaagatagagaaga

SEQ ID NO: 562394 - DNA, 587 bp, Homo sapiens
aaatgggattcattcacatggcatttagatttgcaagacagcagcttggagcaggagcatctgtacactgtcaaggcaaggtgacagaggtgcggccaccacaagaatgcacaccagatctccaactctggggagtataattaaccacaaggctcaactgctgtcctctgagagccacctgcactgaggccatactcccacatggctgctcaatgagtgttgcaagataccaaggaagggcctattcctgtcctcacaactgacttcagctggaagacaccctgatggaccttcctgaataatccttagactgcaaagcagccagtacacctccacctaccctaactccctttttctgagctcasacttggttggatgtctgatggttctccctgctattctagcatgctgtcatttactctcacgcagatattttcccttaaaaatccttgcatgttccgttctacataggtgtctgcttctaggaggaccgggatcagtgcaagaggcatttagctttgaaggaagtcaatggctgcaagatgagtccctagcaccagagtagtaacaaaaagggaacaatagac

SEQ ID NO: 562395 - DNA, 587 bp, Homo sapiens
aaatgggattcattcacatggcatttagatttgcaagacagcagcttggagcaggagcatctgtacactgtcaaggcaaggtgacagaggtgcggccaccacaagaatgcacaccagatctccaactctggggagtataattaaccacaaggctcaactgctgtcctctgagagccacctgcactgaggccatactcccacatggctgctcaatgagtgttgcaagataccaaggaagggcctattcctgtcctcacaactgacttcagctggaagacaccctgatggaccttcctgaataatccttagactgcaaagcagccagtacacctccacctaccctaactccctttttctgagctcagacttggttggatgtctgatggttytccctgctattctagcatgctgtcatttactctcacgcagatattttcccttaaaaatccttgcatgttccgttctacataggtgtctgcttctaggaggaccgggatcagtgcaagaggcatttagctttgaaggaagtcaatggctgcaagatgagtccctagcaccagagtagtaacaaaaagggaacaatagac

SEQ ID NO: 562396 - DNA, 495 bp, Homo sapiens
aagacttaactataaacccgaaactataaaaactttagaacaaaacctaggcaatgccataggcacaggcaaagatttcatgatgaagacaacaaaagcaattgcaacaatagcaaaaattgccaatttggatctaattaaaataaaaaggttttgccccccaaaaaaaaaactytaatgaaactaaacaggttttgcaaccccaaaaaaaaaaaaaaaaaaaaaaaaaaaactatcaaaagagtaaacacacaaagtacagaatgggataaaattttgcaatattagacaaaggtctaatatccagcatctataagaacttaaacaaatttacaagaaaaaaacaaccccattaaaaagtaggcaaaagacatgaaccaacacttctcaaaagaagaatatatgctactaacaaacatatgaaaaaggctcaacatcactgatcattagagaaatacaaatcaaaactacaatgagataccatctcacaccatt

SEQ ID NO: 562397 - DNA, 530 bp, Homo sapiens
agttggacactaagaaagctttttgacattaatgattatgacactgcatcatatcttttctacaaactatttatgaaaataattartgtctatattctgaaaattttcaatattgttttgccaaaaataacagatgaatttgaattctactgaatatgtattttatttttaaatatctcaggtccatatacagcaaaactaataagaagaaactaacccaggaaactgatttgagttttataaagatggccttggtgtaattaatatttataaagctatacttatttggaatatattgatcatatgcaaagcactatgtctgacatttagaaagtaaagatttgaacccttggtgacatctgagaatgttatcatgcgattaagtcacctttaaataagctggaaattttaaatggagcctaaacaaactatataatgcagtttagtagagcatagaacatacactaacataggaggaaaatttgtaaaagttttcaaggtataattcataatacttcctcctgaaatgg

SEQ ID NO: 562398 - DNA, 498 bp, Homo sapiens
ttcttgatttttaaaagtcagtgtactctcaaagaaacaaaactattattcatggattctgttatttgaaaatatttactgatcatttttactttacaccaagtgatctccagctcgtggaaaaatatgtaaagttgcccagcttcattaagcttaaactcttctgaaggagaaaagaagcaatggagtagggacattaaagsaggagtgtggtgatacggctgagacttctacttgcacactgtggtagctgtgtggagactggattgaaaaaagggcaatgacagaagcttaaattagtatcaaatatggcaatcctataattttaagggtccttgaaataagaatgtataatagttctcattatttcctcaagaaatctctgcacttggccttgtgaaggaagcgctatagttaccaagtggtgggggtgggaatgtgaatttggaaacaacatttggaattattacactttaaaggtaaagctggcaggaattc

SEQ ID NO: 562399 - DNA, 498 bp, Homo sapiens
ttcttgatttttaaaagtcagtgtactctcaaagaaacaaaactattattcatggattctgttatttgaaaatatttactgatcatttttactttacaccaagtgatctccagctcgtggaaaaatatgtaaagttgcccagcttcattaagcttaaactcttctgaaggagaaaagaagcaatggagtagggacattaaaggaggagtgtggtgatacggctgagacttctacttgcacactgtggtagctgtgtggagactggattgaaaaaagggcaatgacagaagcttaaattagtatcaaatatggcaatcctataattttaagggtccttgaaataagaatgtataatagttctcattatttccycaagaaatctctgcacttggccttgtgaaggaagcgctatagttaccaagtggtgggggtgggaatgtgaatttggaaacaacatttggaattattacactttaaaggtaaagctggcaggaattc

SEQ ID NO: 562400 - DNA, 498 bp, Homo sapiens
ttcttgatttttaaaagtcagtgtactctcaaagaaacaaaactattattcatggattctgttatttgaaaatatttactgatcatttttactttacaccaagtgatctccagctcgtggaaaaatatgtaaagttgcccagcttcattaagcttaaactcttctgaaggagaaaagaagcaatggagtagggacattaaaggaggagtgtggtgatacggctgagacttctacttgcacactgtggtagctgtgtggagactggattgaaaaaagggcaatgacagaagcttaaattagtatcaaatatggcaatcctataattttaagggtccttgaaataagaatgtataatagttctcattatttcctcaagaaatctctgcacttggccttgtgarggaagcgctatagttaccaagtggtgggggtgggaatgtgaatttggaaacaacatttggaattattacactttaaaggtaaagctggcaggaattc

SEQ ID NO: 562401 - DNA, 245 bp, Homo sapiens
gcaggaattccatacacatcagatctgaaaatgtgtgtgtgtgtgtgtgtgtgtctgtctgtgtgtgtttgtgtgtgtgtgaagcagggaaagagagcaagagtgagagtgagcaagagaggagagagagggagagaatcagacagrtacaggaagagagtgacagagctacagagacagaattaaaaggggacaccaagaatattgagcagagaaactataaaatgggagttgccattaaacag

SEQ ID NO: 562402 - DNA, 245 bp, Homo sapiens
gcaggaattccatacacatcagatctgaaaatgtgtgtgtgtgtgtgtgtgtgtctgtctgtgtgtgtttgtgtgtgtgtgaagcagggaaagagagcaagagtgagagtgagcaagagaggagagagagggagagaatcagacaggtacaggaagagagtgacagagctacagagacagaattaaaaggggacaccaagaatattgagcwgagaaactataaaatgggagttgccattaaacag

SEQ ID NO: 562403 - DNA, 540 bp, Homo sapiens
tgaaaatgtgtgtgtgtgtgtgtgtgtgtctgtctgtgtgtgtttgtgtgtgtgtgaagcagggaaagagagcaagagtgagagtgagcaagagaggagagagagggagagaatcagacaggtacaggaagagagtgacagagctacagagacagaattaaaaggggacaccaagaatattgagcagagaaactataaaatgggagttgccattaaacagaatggggaagagcaamtttggggagtttcagtggctccatacagacatattaattttgagattcctaactgacatccacgtggataagtcagggagtgttgggtgtagtgtccagtgtttaggtgtaatatgaaatatcaggaaattaatgacacaaaaattagtaagaaagcaaagataagaaagataagaagtgaatgtcctgagcctaatggtcctctaacatttaaaaaatagtaaagatgaaacctgcaaaaaaggactaggggtaattatcaaaaacgtggtggggggaaagtaagttaagtgttctggaattc

SEQ ID NO: 562404 - DNA, 540 bp, Homo sapiens
tgaaaatgtgtgtgtgtgtgtgtgtgtgtctgtctgtgtgtgtttgtgtgtgtgtgaagcagggaaagagagcaagagtgagagtgagcaagagaggagagagagggagagaatcagacaggtacaggaagagagtgacagagctacagagacagaattaaaaggggacaccaagaatattgagcagagaaactataaaatgggagttgccattaaacagaatggggaagagcaactttkgggagtttcagtggctccatacagacatattaattttgagattcctaactgacatccacgtggataagtcagggagtgttgggtgtagtgtccagtgtttaggtgtaatatgaaatatcaggaaattaatgacacaaaaattagtaagaaagcaaagataagaaagataagaagtgaatgtcctgagcctaatggtcctctaacatttaaaaaatagtaaagatgaaacctgcaaaaaaggactaggggtaattatcaaaaacgtggtggggggaaagtaagttaagtgttctggaattc

SEQ ID NO: 562405 - DNA, 540 bp, Homo sapiens
tgaaaatgtgtgtgtgtgtgtgtgtgtgtctgtctgtgtgtgtttgtgtgtgtgtgaagcagggaaagagagcaagagtgagagtgagcaagagaggagagagagggagagaatcagacaggtacaggaagagagtgacagagctacagagacagaattaaaaggggacaccaagaatattgagcagagaaactataaaatgggagttgccattaaacagaatggggaagagcaactttggggagtttcagtggctccatacagacatattaattttgagattcytaactgacatccacgtggataagtcagggagtgttgggtgtagtgtccagtgtttaggtgtaatatgaaatatcaggaaattaatgacacaaaaattagtaagaaagcaaagataagaaagataagaagtgaatgtcctgagcctaatggtcctctaacatttaaaaaatagtaaagatgaaacctgcaaaaaaggactaggggtaattatcaaaaacgtggtggggggaaagtaagttaagtgttctggaattc

SEQ ID NO: 562406 - DNA, 540 bp, Homo sapiens
tgaaaatgtgtgtgtgtgtgtgtgtgtgtctgtctgtgtgtgtttgtgtgtgtgtgaagcagggaaagagagcaagagtgagagtgagcaagagaggagagagagggagagaatcagacaggtacaggaagagagtgacagagctacagagacagaattaaaaggggacaccaagaatattgagcagagaaactataaaatgggagttgccattaaacagaatggggaagagcaactttggggagtttcagtggctccatacagacatattaattttgagattcctaactgacatccacgtggataagtcagggagtgttgggtgtagtgtccagtgtttaggtgtaatatgaaatatcaggaaattaatgacacaaaaattagtaagaaagcaaagataagaaagataagaagtsaatgtcctgagcctaatggtcctctaacatttaaaaaatagtaaagatgaaacctgcaaaaaaggactaggggtaattatcaaaaacgtggtggggggaaagtaagttaagtgttctggaattc

SEQ ID NO: 562407 - DNA, 474 bp, Homo sapiens
ccaacctttcaagaaggcttgcgtctttccttatagcttctcccaccaccctgaccgatctcccacatcactggtcattagagaaatgcaaatcaaaaccacagtgagataccatcccatgccagttagaatggcgaccactaaaaagtgaggaaacaatagatactggagaggatatggagaaataggaatgcttttacactgttgatgggagtgtaagttagttcaactattgtggaaggcagtgtggtgatttctcaaggttctagaaccagaaataccatttgacccagcaatcccattactaggtttctacccaaagtattataaattattctactttttttgacatggagtttcactctygtcatccaggttggagtgcaatggcatgatcttggctcactgcaaccaccacctcctgggttcaagtgattcccttgcctcagcttcctgaggagctgggattacagg

SEQ ID NO: 562408 - DNA, 521 bp, Homo sapiens
tagcttagtttcatttctggttgatcccctttgttagaattaggaattaaaaaaaaatcttttgtatgtaatgactctttataataataataaatcctgccctgtgtttgtcactggcattaacctctgtctacaccctctaattctttaattatggctccagtggttacaaaaggtgaattatggttatttggctcatgcagcaaattaattggagaaactgatgacaaatggtctgtgaagaactgcaaggtcttgccccatgctgtcccattttagttaccatttagttatgtaggcattatacaaatgcctcaaattaggacacctttgctgtctcagtaggtcgagtktatgaaaatttactttatgcagaagaaataaattctaatttattggttacctgcatcttaatgtatgaaggttctaagtaaatatttgatgaattgatggtagcagcgttaatttttaaatgttccaagctcctagattttttttgttttgtttttacaaaagcctta

SEQ ID NO: 562409 - DNA, 570 bp, Homo sapiens
accattaaatggtgtacttttaggttggctaatggagcagaatccaatctattctgtgtgcaagaaacatattgaacaaggcaattcagaatggtttaatgtaaaaggaagagcaaagatagatcttgtatgatagcaagawcctgaaatagttgtcagaattttgctatgagacaagatagaatttaagacaaaataaatttaacaggataaggaagggaaatttattctacagaaggaatcatgcttcattctacattaaaaataaaatatatattaataacatacacaaaattacaattttcataaagcagaaataacagaagttgaaagaagaaatagacattaaaactggagattttaacatagcttattaattggtaagtccttgaagaatgcaaataagcctcacttttagtaattaaaaaaaattaacacaaatactgacaaagactctctccttcatcaaactttagtcagatttttgagctctcctctcaactagatcttcacctaggccccttgcctagtctccatagctcacttttaacaagaatccttaagtccata

SEQ ID NO: 562410 - DNA, 570 bp, Homo sapiens
accattaaatggtgtacttttaggttggctaatggagcagaatccaatctattctgtgtgcaagaaacatattgaacaaggcaattcagaatggtttaatgtaaaaggaagagcaaagatagatcttgtatgatagcaagaacctgaaatagttgtcagaattttgctatgagacaagatagaatttaagacaaaataaatttaacaggataaggaagggaaatttattctacagaaggawtcatgcttcattctacattaaaaataaaatatatattaataacatacacaaaattacaattttcataaagcagaaataacagaagttgaaagaagaaatagacattaaaactggagattttaacatagcttattaattggtaagtccttgaagaatgcaaataagcctcacttttagtaattaaaaaaaattaacacaaatactgacaaagactctctccttcatcaaactttagtcagatttttgagctctcctctcaactagatcttcacctaggccccttgcctagtctccatagctcacttttaacaagaatccttaagtccata

SEQ ID NO: 562411 - DNA, 571 bp, Homo sapiens
attgagcagttaaaaatttattaagaggatatatctcatgttaaacatacttacttcattaacagaaaaaaagggaatattttacacataaaattacatatatgcctgaatttcacatttcgtttcacaaattgtactggtgcttaaaaggtatttttgcattaaaaaacatctaactgaaggaaaagttacaaatgagtgatcattcataaatacaatataatcctagggaccgctgtttttccattttgaacaccctccacaattagtcttaataatyatgttgactgaatgcaaaataatgatttctcaagaggcaatagaaaatagagaataagtccattcttgagaaaatttataattagtgaaagtaattttttcatcctcttttcttatttaaatctcaagtactctctgccactctgtgctcttctttctggggtaaaatatgccagctatccaccgtcagggcattctctaaccactcctccttagagatgtctacagacttttactcagctagactgtcttgttgcctgtcttcatatcaacttcgcaagacgtgtggacc

SEQ ID NO: 562412 - DNA, 312 bp, Homo sapiens
ttcaaggttagaaaaggagaaatttttatcttagcattcccaggaccaatcacaatgtctaatacttagagcgtgcaatgttggttgaactgaaataaatctgatataaaaacaaataatgctttagggaagtgatttttcatttgagattattttctcagaaaaattaatatgaccaggttgtcatcctatgcaaacattagtatgccttattgatttttcactaagttatatagcttatattataagacttttttatgggtgtctctacctayagattccaggcactaacaaacctatagaaattcataa

SEQ ID NO: 562413 - DNA, 312 bp, Homo sapiens
cttataatttctatcatgattgattaattttgttcatcttcaaattccaataattagaattcctacaggatgtgtgtgtgagtgtgtatctggtttattttctttagcataaatacatatttgagatttagccaaatatttgtgtgtatcrtttgtttatttttcctcacatttctgagttgcctatgtatttgtcagagtttgcttattcattagtctgttagtgaatattcagattgcttccagaattagcttttacaaataaaggacttaggtgcattctcaaacaggtttttgtgtaaatatatgctt

SEQ ID NO: 562414 - DNA, 312 bp, Homo sapiens
cttataatttctatcatgattgattaattttgttcatcttcaaattccaataattagaattcctacaggatgtgtgtgtgagtgtgtatctggtttattttctttagcataaatacatatttgagatttagccaaatatttgtgtgtatcgtttgtttatttttcctcayatttctgagttgcctatgtatttgtcagagtttgcttattcattagtctgttagtgaatattcagattgcttccagaattagcttttacaaataaaggacttaggtgcattctcaaacaggtttttgtgtaaatatatgctt

SEQ ID NO: 562415 - DNA, 312 bp, Homo sapiens
cttataatttctatcatgattgattaattttgttcatcttcaaattccaataattagaattcctacaggatgtgtgtgtgagtgtgtatctggtttattttctttagcataaatacatatttgagatttagccaaatatttgtgtgtatcgtttgtttatttttcctcacatttctgagttgcctatgtatttgtcagagtttgcttattcattagtctgttagtgaatattcagattgcttycagaattagcttttacaaataaaggacttaggtgcattctcaaacaggtttttgtgtaaatatatgctt

SEQ ID NO: 562416 - DNA, 473 bp, Homo sapiens
gctctgcccctgtggctttgmgggatatagcctgccttctggctgcttttgtgggctggtgttgagtgtctgtggctttcccaggcacatggtgttgttggtggatctaacattctgaggtctggaggatggtggccctcttcccacaggtccaccaggcggtgccccagtagggactctgtgtgggggctcccacccaacatttcccttcctcactgccctagcagaggttgtcaatgagggccccatccctgcagcaaacttttgcatgggcatccaggtgtttccatatatcttctgaaatctaagcagatgttcccaaacctcaattcttgatttctgtgcatccacaggctcaacaccacgtggaagctgccaaggcttggggcttccaccctatgaagcaacagctcaagctgtactttggtcccttttagtcacagctggagtggctgggatgcagggcaccaaca

SEQ ID NO: 562417 - DNA, 473 bp, Homo sapiens
gctctgcccctgtggctttgagggatatagcctgccttctggctgcttttgtgggctggtgttgagtgtctgtggctttcccaggcacatggtgttgttggtggatctaacattctgaggtctggaggatggtggccctcttcccacaggtccaccaggcggtgccccagtagggactctgtgtgggggctcccacccaacatttcccttcctcactgccctagcagaggttgtcaatgagggccccatccctgcagcaaacttttgcatgggcatccaggtgtttccatatatcttctgaaatctaagcagatgttcccaaacctcaattcttgatttctgtgcatccacaggctcaacaccacrtggaagctgccaaggcttggggcttccaccctatgaagcaacagctcaagctgtactttggtcccttttagtcacagctggagtggctgggatgcagggcaccaaca

SEQ ID NO: 562418 - DNA, 418 bp, Homo sapiens
gatgagttaaacatgtatactacaaactcaaaagcaaccattaaaattaacaatatagagagttttaattctcaagtaaaaaaggagataagatgaaaccataaaatatatttaattcatagaaaagaaggcaaacaagagggaaaataagcaaaaaacagatgggatggtaggggaagcaaaattttattaccatcttcttagttttttttttttcctctgctaagcctgagaattaaattgatataagacagatcaacaggaaaatgcatacaaatttatttaatacatgtatyatgtggcatgagagattctttaaggaaggaagactccatgacataatcacttatgttctgaagtagacacagagtagtaaattgtgaaatatgacaagacaaaggagctggaactagtgtag

SEQ ID NO: 562419 - DNA, 444 bp, Homo sapiens
aacacgtaactcatgatacaaaaattaatttagtacagatcatatgcctaaatgtaaaatgtaaaaacaaagtgaaaaaaaaaggaagaaaaattatgtataggagaaaatatagaaaagcattttacctcaggctagtaaatactacttagacatgacacaaacaccatgtttcatcaaastaggaattgacaactcgagttcatcaaaatgtaaaacatatgttcctcaggaaacactgtaaaacaaatagaaatataagacactactgagaacaatatttgcaaaatatatgtctggcaaaaaagttgtgtccagaaaacgtaagaactctcaaaacttgataataaatctagcaactctaataaaagtaggcaaatgacttaaatgaatacttcttctctaaagaacatatgtagatagaaagtaaacacatggaaagat

SEQ ID NO: 562420 - DNA, 444 bp, Homo sapiens
aacacgtaactcatgatacaaaaattaatttagtacagatcatatgcctaaatgtaaaatgtaaaaacaaagtgaaaaaaaaaggaagaaaaattatgtataggagaaaatatagaaaagcattttacctcaggctagtaaatactacttagacatgacacaaacaccatgtttcatcaaactagraattgacaactcgagttcatcaaaatgtaaaacatatgttcctcaggaaacactgtaaaacaaatagaaatataagacactactgagaacaatatttgcaaaatatatgtctggcaaaaaagttgtgtccagaaaacgtaagaactctcaaaacttgataataaatctagcaactctaataaaagtaggcaaatgacttaaatgaatacttcttctctaaagaacatatgtagatagaaagtaaacacatggaaagat

SEQ ID NO: 562421 - DNA, 484 bp, Homo sapiens
aagctttgtgtattaattacctgatttatactttagtccctttaagtaaaagaaygtaacaaatagaaggatagttattaatatatttggaggagaaagaaggataaaatgaaagaaagatacaatgttcttaaaaaacgggagttttatcttttttcagaagtttaaaaaatatttaaacatcttcctttatgttagcgcatatttatgttatacatttcatttacaagtaattgtatggtaaatagttacaaaaacaacaaggaaaatctttgagttaaggagctcatgattttcagtgtaaaatacatgttatttgagtaatttgggaaactgacagaagctttcttgcagtcaagaatactgctcaaaaattaattttaaaataaaaataaaagaaaaaaaatcctgaaagcttatgtagcaaaacaagtattgtagtccattaccaaaattagccttttctgaaatgttaaaaagcaaa

SEQ ID NO: 562422 - DNA, 564 bp, Homo sapiens
gataaaatgaaagaaagatacaatgttcttaaaaamcgggagttttatcttttttcagaagtttaaaaaatatttaaacatcttcctttatgttagcgcatatttatgttatacatttcatttacaagtaattgtatggtaaatagttacaaaaacaacaaggaaaatctttgagttaaggagctcatgattttcagtgtaaaatacatgttatttgagtaatttgggaaactgacagaagctttcttgcagtcaagaatactgctcaaaaattaattttaaaataaaaataaaagaaaaaaaatcctgaaagcttatgtagcaaaacaagtattgtagtccattaccaaaattagccttttctgaaatgttaaaaagcaaaaagatcttagagcagaatttcatatacagttcattttgggactgatcttacttccttggtaggtggtcttacttcatcctgttggagcccatcatggagagctgttttacaaatattcttagctctactactcacaaaaaaattcaacctatgactcctgtttctgataaagtagctattta

SEQ ID NO: 562423 - DNA, 484 bp, Homo sapiens
aagctttgtgtattaattacctgatttatactttagtccctttaagtaaaagaatgtaacaaatagaaggatagttattaatatatttggaggagaaagaaggataaaatgaaagaaagatacaatgttcttaaaaaacgggagttttatcttttttcagaagtytaaaaaatatttaaacatcttcctttatgttagcgcatatttatgttatacatttcatttacaagtaattgtatggtaaatagttacaaaaacaacaaggaaaatctttgagttaaggagctcatgattttcagtgtaaaatacatgttatttgagtaatttgggaaactgacagaagctttcttgcagtcaagaatactgctcaaaaattaattttaaaataaaaataaaagaaaaaaaatcctgaaagcttatgtagcaaaacaagtattgtagtccattaccaaaattagccttttctgaaatgttaaaaagcaaa

SEQ ID NO: 562424 - DNA, 498 bp, Homo sapiens
gccacattgacacatctaaataaagttctctacttatatgaaatgcatttcaatattgcataatacgtttgtgtcaaagcatcttgctaaaagctcatattcattagtataatgtatcttacaatcattttgaattttctgtgtacttagtgtcatyggtaacatagtaatctgttttctctttcataattcttattttttttaatatttacaatcctatcccagtgtctaagacctgcaaaaggataaataaaattgcttgtaccatctatgtttattttgttcccaatcacaaaggaaatattttaacattccattgttaagtgttataatttcaatagaacttttgaaaacaaatgttatcagttaaactagattctcttttaatttcgggttgttaaaatgtatgactttttaagaaaataaaattaaatatgcttataatattgttaagttatttgttgtggtgtatcatattaattgatacctttacatgag

SEQ ID NO: 562425 - DNA, 498 bp, Homo sapiens
gccacattgacacatctaaataaagttctctacttatatgaaatgcatttcaatattgcataatacgtttgtgtcaaagcatcttgctaaaagctcatattcattagtataatgtatcttacaatcattttgaattttctgtgtacttagtgtcatcggtaacatagtaatctgttttctctttcataattcttattttttttaatatttacaatcctatcccagtgtctaagacctgcaaaaggataaataaaattgcttgtaccatctatgtttattttgttcccaatcacaaaggaaatattttaacattccattgttaagtgttataatttcaatagaacttttgaaaacaaatgttatcagttaaactagattctcttttaatttsgggttgttaaaatgtatgactttttaagaaaataaaattaaatatgcttataatattgttaagttatttgttgtggtgtatcatattaattgatacctttacatgag

SEQ ID NO: 562426 - DNA, 498 bp, Homo sapiens
gccacattgacacatctaaataaagttctctacttatatgaaatgcatttcaatattgcataatacgtttgtgtcaaagcatcttgctaaaagctcatattcattagtataatgtatcttacaatcattttgaattttctgtgtacttagtgtcatcggtaacatagtaatctgttttctctttcataattcttattttttttaatatttacaatcctatcccagtgtctaagacctgcaaaaggataaataaaattgcttgtaccatctatgtttattttgttcccaatcacaaaggaaatattttaacattccattgttaagtgttataatttcaatagaacttttgaaaacaaatgttatcagttaaactagattctcttttaatttcggrttgttaaaatgtatgactttttaagaaaataaaattaaatatgcttataatattgttaagttatttgttgtggtgtatcatattaattgatacctttacatgag

SEQ ID NO: 562427 - DNA, 336 bp, Homo sapiens
tggacagctgaccctgctccctgctccatcacaggttgtagagtattaattcycaagttacccagacatttagttctgaatgtgcaaaaatggtttaggttcaaatgttttcaactactgacaagctcaagaattcagaggaggtagtactaagggaaatgtaattaatatataatatcaaaacttaagcatagcaccataacacctaatttttgatgatgtcaaatacttaaagttctccctttttattttctggtgaaaggtgcgtagtatacaaacctctactaacttcttgggcttctgaataaaggaaaggactacctaatgacagtaata

SEQ ID NO: 562428 - DNA, 548 bp, Homo sapiens
atcataagagaagcccaaataggtcttattttaatggaatatttttccactggacttcaactggtttatcttatttatccgtccatctaagatcagttgaaaaaagagacttgcagatgcaatattttagcyaatatatccaatctcctatttgaaatctcctgcgtgtctaacagaaaactcaaatttagtatgtctgaaatcaagctgactgctgcacatgttcacactgaaacaaagcaaaacaaaattccttcaacagctttcttatctcaataaatggtactacactgtgcctgtatgactcatgcccaaaacctagaggtcgacctaggttctttttttccccatgactctccatttccaagatttccatttcttccgtgaacacttctcaaagccacacccatctctctgtcagaataccacaatgcattgcaaatctgcctccccacttgtcatctcctccctaaatgctctattttcacggtagtcagagtggcttttttttttttaaagcacacaagatcttgactcttcattcccta

SEQ ID NO: 562429 - DNA, 548 bp, Homo sapiens
atcataagagaagcccaaataggtcttattttaatggaatatttttccactggacttcaactggtttatcttatttatccgtccatctaagatcagttgaaaaaagagacttgcagatgcaatattttagctaatatatccaatctcctatttgaaatctcctgcrtgtctaacagaaaactcaaatttagtatgtctgaaatcaagctgactgctgcacatgttcacactgaaacaaagcaaaacaaaattccttcaacagctttcttatctcaataaatggtactacactgtgcctgtatgactcatgcccaaaacctagaggtcgacctaggttctttttttccccatgactctccatttccaagatttccatttcttccgtgaacacttctcaaagccacacccatctctctgtcagaataccacaatgcattgcaaatctgcctccccacttgtcatctcctccctaaatgctctattttcacggtagtcagagtggcttttttttttttaaagcacacaagatcttgactcttcattcccta

SEQ ID NO: 562430 - DNA, 516 bp, Homo sapiens
aaaatagtgacaacaaaagctgrcaatgatgaagaaactgtatcattcatacattatttgaattgtaaaatgttataatactctggaaataatttattagtttctttaaaaactaaacatatatttataataagatccagcaactgcacccctggaaatttatctaagagaaatgaaaacctatatgcgatctttaatatctttcatagcacctttaattctaacagggaaaaactggaaacatccaagatgttggacaggtgaatggttgaataaactgtggtatatccatatgattaaatactacccagaaataaaaaagaatatacttttgacacatgcaataacttgcatagatctgaagggcattatgcttagtgaaaaaaagcaaatatcaaaaggacacatggcatattatttcatgtatataactttaataaaataacatacatatagaaaacagattagtgatttccagaggttagtgatggtatgggaatgtgagatgaatatggc

SEQ ID NO: 562431 - DNA, 425 bp, Homo sapiens
aattctaacagggaaaaactggaaacatccaagatgttggacaggtgaatggttgaataaactgtggtatatccatatgattaaatactacccagaaataaaaaagaatatacttttgacacatgcaataacttgcatagatctgaagggcattatgcttagtgaaaaaaagcaaatatcaaaaggacacatggcatattatttcatgtatataactttaataaaataacatacatatagaaaacagattagtgatttccagaggttagtgatggtatgggaatgtgagatgaatatggctataaaatgtgaggaagacacttttagtgatggaagagttctgtaacttaattgtaataatggtcacattaatcaacaygtgataaagttggcatagacctatgcattcacattgtataaatgtc

SEQ ID NO: 562432 - DNA, 425 bp, Homo sapiens
aattctaacagggaaaaactggaaacatccaagatgttggacaggtgaatggttgaataaactgtggtatatccatatgattaaatactacccagaaataaaaaagaatatacttttgacacatgcaataacttgcatagatctgaagggcattatgcttagtgaaaaaaagcaaatatcaaaaggacacatggcatattatttcatgtatataactttaataaaataacatacatatagaaaacagattagtgatttccagaggttagtgatggtatgggaatgtgagatgaatatggctataaaatgtgaggaagacacttttagtgatggaagagttctgtaacttaattgtaataatggtcacattaatcaacatgtgataaarttggcatagacctatgcattcacattgtataaatgtc

SEQ ID NO: 562433 - DNA, 425 bp, Homo sapiens
aattctaacagggaaaaactggaaacatccaagatgttggacaggtgaatggttgaataaactgtggtatatccatatgattaaatactacccagaaataaaaaagaatatacttttgacacatgcaataacttgcatagatctgaagggcattatgcttagtgaaaaaaagcaaatatcaaaaggacacatggcatattatttcatgtatataactttaataaaataacatacatatagaaaacagattagtgatttccagaggttagtgatggtatgggaatgtgagatgaatatggctataaaatgtgaggaagacacttttagtgatggaagagttctgtaacttaattgtaataatggtcacattaatcaacatgtgataaagttggcatagacctatgmattcacattgtataaatgtc

SEQ ID NO: 562434 - DNA, 584 bp, Homo sapiens
attaatatggaagggcattctttgttggtacttgatgaggtaagaattaagaatttaaaacttattggtataaacatatacctaatttaaatcatttaagttatgatatattaagctaatacatgcttgaatttgttactacttttgaaaaattctgtgtctccccacaccttcctcattccacttcgctagttattatgtttcttttttaatttatgaagatggaatataatgcccaattcataatactgtttttcaggtacaaagttggcatagacaatactgaaatacatgtgatgacatttacagtagcaattcaaattaaaagagaaaagcatctttctaaaccatcttcaagtaaacasttgccatttatttctactagcaaatatttctatgtatcctaaaaattaaaagtgatatacattgagtaagactttacagtactcagaatactataatggaaaaatatgtatttgatatgttttcctgccatttcactatctagaaattgtcctaatccttaaaagagatcattagttagccactgaaatctcaggggaaaagctgttaaaactgacagc

SEQ ID NO: 562435 - DNA, 584 bp, Homo sapiens
attaatatggaagggcattctttgttggtacttgatgaggtaagaattaagaatttaaaacttattggtataaacatatacctaatttaaatcatttaagttatgatatattaagctaatacatgcttgaatttgttactacttttgaaaaattctgtgtctccccacaccttcctcattccacttcgctagttattatgtttcttttttaatttatgaagatggaatataatgcccaattcataatactgtttttcaggtacaaagttggcatagacaatactgaaatacatgtgatgacatttacagtagcaattcaaattaaaagagaaaagcatctttctaaaccatcttcaagtaaacacttgccatttatttctactagcaaatatttctatgtatcctaaaaattaaaagtgatatacattgagtaagactttacagtmctcagaatactataatggaaaaatatgtatttgatatgttttcctgccatttcactatctagaaattgtcctaatccttaaaagagatcattagttagccactgaaatctcaggggaaaagctgttaaaactgacagc

SEQ ID NO: 562436 - DNA, 584 bp, Homo sapiens
attaatatggaagggcattctttgttggtacttgatgaggtaagaattaagaatttaaaacttattggtataaacatatacctaatttaaatcatttaagttatgatatattaagctaatacatgcttgaatttgttactacttttgaaaaattctgtgtctccccacaccttcctcattccacttcgctagttattatgtttcttttttaatttatgaagatggaatataatgcccaattcataatactgtttttcaggtacaaagttggcatagacaatactgaaatacatgtgatgacatttacagtagcaattcaaattaaaagagaaaagcatctttctaaaccatcttcaagtaaacacttgccatttatttctactagcaaatatttctatgtatcctaaaaattaaaagtgatatacattgagtaagactttacagtactcagaatastataatggaaaaatatgtatttgatatgttttcctgccatttcactatctagaaattgtcctaatccttaaaagagatcattagttagccactgaaatctcaggggaaaagctgttaaaactgacagc

SEQ ID NO: 562437 - DNA, 582 bp, Homo sapiens
tttcatagctcccctgggttggaggtaaaaagtttctattccttaggaaatggaataaaataaattggttaaaagaasttttgagattcattcgtccatagcattctaaaataggaattagcttagaaaggtcatcgatgaccaaaattatctgagtttggtggagataaaaaagcaagactgaaagttatatatttttttcaagcaatgtttgaatggataaagtacagaaggagaaaaatggttgcatttctatgcattgaaaatgcttatttggttttcttttaagcttgttgtttcaaatggcccacttaaatttactgaccctataccaaataaattaatctcacttttcacactgctatccctctagtttcttgcctcaatttattccagaatgacattctacatttattcaataagtactcagagggatgtgttatgtgcatggcattcaactaaccattagttggacaagacaaactaagtaaagcatatctttcctgccttcttaaagtttgcagtttaattatcttgatttcgagcctcattctcttacattttcactaattttccatattt

SEQ ID NO: 562438 - DNA, 582 bp, Homo sapiens
tttcatagctcccctgggttggaggtaaaaagtttctattccttaggaaatggaataaaataaattggttaaaagaacttttgagattcattcgtccatagcattctaaaataggaattagcttagaaaggtcatcgatgaccaaaattatctgagtttggtggagataaaaaagcaagactgaaagttatatatttttttcaagcaatgtttgaatggataaagtacagaaggagaaaaatggttgcatttctatgcattgaaaatgcttatttggttttcttttaagcttgttgtttcaaatggcccacttaaatttactgacyctataccaaataaattaatctcacttttcacactgctatccctctagtttcttgcctcaatttattccagaatgacattctacatttattcaataagtactcagagggatgtgttatgtgcatggcattcaactaaccattagttggacaagacaaactaagtaaagcatatctttcctgccttcttaaagtttgcagtttaattatcttgatttcgagcctcattctcttacattttcactaattttccatattt

SEQ ID NO: 562439 - DNA, 475 bp, Homo sapiens
ccataaagaaatgaaataatcatgtatctcattatataattatactaaattgatctcaacacattttcttagcaatatataccaacattgtttccaatattgtttattacaaatgatgctacagttgaaatctttatatctgaacgcttgtgtgtgtgtgtgtacctattctgtgtataacactgattttatttatttgtataggcctggaagtggaaatactgtgacataaaatagaggcacagcaaattattcaagatgtygacaaacagcattgtttccaagtttttgttcccttacaatccttgccattggccaatctctcagaatcccgtgttgcttaacatttagtagcttagtaaatattttaaatctcagagattttacctaactgataccagggtttttaaaatttgtttatatagattaagcatctttgaagaaataacaatatgcaaaaaatatggttgggatt

SEQ ID NO: 562440 - DNA, 475 bp, Homo sapiens
ccataaagaaatgaaataatcatgtatctcattatataattatactaaattgatctcaacacattttcttagcaatatataccaacattgtttccaatattgtttattacaaatgatgctacagttgaaatctttatatctgaacgcttgtgtgtgtgtgtgtacctattctgtgtataacactgattttatttatttgtataggcctggaagtggaaatactgtgacataaaatagaggcacagcaaattattcaagatgttgacaaacagcattgtttccaagtttttgttcccttacaatccttgccattggccaatctctcagaatcccgtgttgcttaacatttagtagcttagtaaatattttaaatctcagagattttacctaactgataccagggtttttaaaatttgtttatatagattaagcatctttgaagaaataacartatgcaaaaaatatggttgggatt

SEQ ID NO: 562441 - DNA, 606 bp, Homo sapiens
tgggcctaggtaacttcctgatgactaatgcccacatggctcctaaggaccatctgaggcctggtattaatttagagactggtatccacctggggtccaggtatccacttgggacctgatgttcacctggagtgtaggaattcacgtggggcctggtatccaccttcagggtgtgtatccaattgagtgctggtgtccacctggagtcccgtgtatacctggggcctgatgtacacatggagcctgggagtccatctaggacctgatgttcagataagggctggcgttctcctggcctggtgtccacatggagcctgggtgtacacttgaagcctgatatcccaggtggatacctgggccccagtggtcatcagatcctaggaacctctcaggccccaggtgcacataaagctccaagtggccacctaggccacaggttgatacacaggatccaggtggacactgggtgcaagatgaacaccaagccccaggtgtctgcctagtcctcaagtggacaccaggcactagattgacacacaggtaccaggtggatatcaggcyacaggtgaacaccaggccccaggtggttgggttacttatagcata

SEQ ID NO: 562442 - DNA, 606 bp, Homo sapiens
tgggcctaggtaacttcctgatgactaatgcccacatggctcctaaggaccatctgaggcctggtattaatttagagactggtatccacctggggtccaggtatccacttgggacctgatgttcacctggagtgtaggaattcacgtggggcctggtatccaccttcagggtgtgtatccaattgagtgctggtgtccacctggagtcccgtgtatacctggggcctgatgtacacatggagcctgggagtccatctaggacctgatgttcagataagggctggcgttctcctggcctggtgtccacatggagcctgggtgtacacttgaagcctgatatcccaggtggatacctgggccccagtggtcatcagatcctaggaacctctcaggccccaggtgcacataaagctccaagtggccacctaggccacaggttgatacacaggatccaggtggacactgggtgcaagatgaacaccaagccccaggtgtctgcctagtcctcaagtggacaccaggcactagattgacacacaggtaccaggtggatatcaggccrcaggtgaacaccaggccccaggtggttgggttacttatagcata

SEQ ID NO: 562443 - DNA, 606 bp, Homo sapiens
tgggcctaggtaacttcctgatgactaatgcccacatggctcctaaggaccatctgaggcctggtattaatttagagactggtatccacctggggtccaggtatccacttgggacctgatgttcacctggagtgtaggaattcacgtggggcctggtatccaccttcagggtgtgtatccaattgagtgctggtgtccacctggagtcccgtgtatacctggggcctgatgtacacatggagcctgggagtccatctaggacctgatgttcagataagggctggcgttctcctggcctggtgtccacatggagcctgggtgtacacttgaagcctgatatcccaggtggatacctgggccccagtggtcatcagatcctaggaacctctcaggccccaggtgcacataaagctccaagtggccacctaggccacaggttgatacacaggatccaggtggacactgggtgcaagatgaacaccaagccccaggtgtctgcctagtcctcaagtggacaccaggcactagattgacacacaggtaccaggtggatatcaggccacaggtgaacaccaggccycaggtggttgggttacttatagcata

SEQ ID NO: 562444 - DNA, 257 bp, Homo sapiens
actcaggtggacatctggtgacaggtggacaacaagcctggtgtgtaccttgtccccaggtggtcatcaggccycagttcaacaccagtccctgagtggattcctcggctccaggtggacatccggtcttcagctgaacatcagaccccaggtgaacaccaggtcttaggtggacattaggcccctggtggacataaagtaccagtggacatccatgctgcaggtggacacccagggcccagatgggcatcaggccc

SEQ ID NO: 562445 - DNA, 602 bp, Homo sapiens
ttccgggcagtaggaaagaatacaagtgaataacattagtccagaagttttaataatattctttgctggttgaaattcatgtttaatatgatgtaaattacttgataagcaaattaagaactatgctactacagactccaaataagacgcaagaaaaatgagaggaaatacattaaaggaaaatcttaaaaaaaacagctgcacagragataaattatttttccaggagttttaaacatagttgcttttgtttgtttgctttgctgttttttcttaataattgttttagtaagctcaggctgctatataaaaataagataggcactggtctgaacaatagacatttatttcttatagttcttgaacctggcaagtctgaggagggtcatcttctgggctttcaaagggctgcctttttcctatgtacgtacatagcgaatagaaagcgttagctctctggtctcttcctgtaagagcactaatcccatcatgaagaccccatccttatgggctcatctaaacctaattacttccaaaggtcccacctccaaatgctaacacattgagagttaaggcttcaatatattaattttggggaaaca

SEQ ID NO: 562446 - DNA, 564 bp, Homo sapiens
tctccctctcattttagtattatcattctcattaatgaataattccctttttgttaaaagtttacattgaccttccgttgtccttcagttatcaacttactttgtattctttctttgaaagaaatcaatcaaacaatagacagtctccttcaatatttcctgtactgtcttcaacccacttagctgagtactttcttttttctctacttactcactttttcccctgagtgttctcaagcattttcatgggtttaaaggccagttacatgatagcatctcagaatatttccaattttggtatcttctctgagttagagctttgcatagtcatcyacttacttaatatcaaatgtggattgttttatagacaactgaaattcataatgttttaagtagagttttgttattttctctgcttcccagtttgtgtgtgtatgcttgtttgtttacttcagctggtgttcccattgattttatcttatctaatacaccaaaaccctatcagtagctcttttcttcaaacttgcacatatcttaaatatgtatttcattattttgaacaag

SEQ ID NO: 562447 - DNA, 609 bp, Homo sapiens
tttgtgctaaagcaatacatctctttctatcatatactgatatcttgaaaacttttataacgtttcttgtcacattcagtattttaaaaataggattgattctaagttttgagtttatggtgyatttgaatattagagatattatctcttatacatttcaaagctttgctgcattctaaactcagtcctgccttagccttagtaatggcaatgaagtgcggggatagaatgttcactatttttttatgtgctgttaaaatttcatacctcctgttctatcttgaagtcttatagttttggaatggtgagtgggggaaacaagcataaaactattacataattcatgcagttttcactgggcaacagtctctatcctctgaatggtgaaatggctacttttcatttatttatttttttctttcctggggtaaaacgcttgaaaactgcaccactgggaaattgcagctatagtccatgtttcaacatagtccatgcttctttgagttggccacttactgtttactctcatctccttaggtttagcagtaaagacctgtaagatttcttctgttaggatcatctagccattccaaacatttctcttagatt

SEQ ID NO: 562448 - DNA, 609 bp, Homo sapiens
tttgtgctaaagcaatacatctctttctatcatatactgatatcttgaaaacttttataacgtttcttgtcacattcagtattttaaaaataggattgattctaagttttgagtttatggtgcatttgaatattagagatattatctcttatacatttcaaagctttgctgcattctaaactcagycctgccttagccttagtaatggcaatgaagtgcggggatagaatgttcactatttttttatgtgctgttaaaatttcatacctcctgttctatcttgaagtcttatagttttggaatggtgagtgggggaaacaagcataaaactattacataattcatgcagttttcactgggcaacagtctctatcctctgaatggtgaaatggctacttttcatttatttatttttttctttcctggggtaaaacgcttgaaaactgcaccactgggaaattgcagctatagtccatgtttcaacatagtccatgcttctttgagttggccacttactgtttactctcatctccttaggtttagcagtaaagacctgtaagatttcttctgttaggatcatctagccattccaaacatttctcttagatt

SEQ ID NO: 562449 - DNA, 538 bp, Homo sapiens
atttccactattctttctgtatttattgattagaattctactgtatggaaaagctttcctttgtcccacttttcttatttatccaattatttatttatattagtgtggattcatgtgtatttggtttaattaatctgaataatctattgccatcattatttattcccttgctcaatttatctcagtttgggtcactgagagccacttctagttagctcctatgttctttggcatgtctccatcattagttgagacttccttatattcttaacaacaacagacgtctcagacccattttgttctttctgccccatgcacctaggatcaggcattgatccaaggagctctgtatccttttaaagaagaaaaaagtgaatccaagatttgaatgctagatgtgctgattgctattaaaatgttattgcttctagtcttagtggttaaaattaagaaatatacacacattyggccgggcgctgtggctcacacctgtaatcccagcactttgggaggccgagatgggcggattatgaggtca

SEQ ID NO: 562450 - DNA, 609 bp, Homo sapiens
tttgtgctaaagcaatacatctctttctatcatatactgatatcttgaaaacttttataacgtttcttgtcacattcagtattttaaaaataggattgattctaagttttgagtttatggtgcatttgaatattagagatattatctcttatacatttcaaagctttgctgcattctaaactcagtcctgccttagccttagtaatggcaatgaagtgcggggatagaatgttcactatttttttatgtgctgttaaaatttcatacctcctgttctatcttgaagtcttayagttttggaatggtgagtgggggaaacaagcataaaactattacataattcatgcagttttcactgggcaacagtctctatcctctgaatggtgaaatggctacttttcatttatttatttttttctttcctggggtaaaacgcttgaaaactgcaccactgggaaattgcagctatagtccatgtttcaacatagtccatgcttctttgagttggccacttactgtttactctcatctccttaggtttagcagtaaagacctgtaagatttcttctgttaggatcatctagccattccaaacatttctcttagatt

SEQ ID NO: 562451 - DNA, 409 bp, Homo sapiens
aaaaacttctttcatcaaaacacagtattttttaaaaaatagagtgcttcatttttatttcacagaaaataatcaaatgatagccagaatattatgaactagagtcacataggatattctaataatactgcttgtgaaagaagtattgaggaggtcttaggaccaaagaatatttgtttaatagtgtcagaattcattttaacaccataaaaaggatatgtatttgttcaattttcactcactgcacaaagaattagataaaagaagattttcagtaatagcattcattttgagtcttaccaatcctttcagttttggtataacaaaaagkctattagcttttactctgttgtgttgaattttgatgatttctgacagtcttcactgagatgctcaaagagatgagact

SEQ ID NO: 562452 - DNA, 609 bp, Homo sapiens
tttgtgctaaagcaatacatctctttctatcatatactgatatcttgaaaacttttataacgtttcttgtcacattcagtattttaaaaataggattgattctaagttttgagtttatggtgcatttgaatattagagatattatctcttatacatttcaaagctttgctgcattctaaactcagtcctgccttagccttagtaatggcaatgaagtgcggggatagaatgttcactatttttttatgtgctgttaaaatttcatacctcctgttctatcttgaagtcttatagttttggaatggtgagtgggggaaacaagcataaaactattacataattcatgcagttttcactgggcaacagtctctatcctctgaatggtgaaatggctacttttcatttatttatttttttctttcctggggtaaaacrcttgaaaactgcaccactgggaaattgcagctatagtccatgtttcaacatagtccatgcttctttgagttggccacttactgtttactctcatctccttaggtttagcagtaaagacctgtaagatttcttctgttaggatcatctagccattccaaacatttctcttagatt

SEQ ID NO: 562453 - DNA, 417 bp, Homo sapiens
atcaaatagaagtggtacaaactatagtaagagatatagagtataaaaataagagtaaaaaacagaaattgagagattaaaaacatctaaaaattttctaarcatagaacttaggcaaagaatagtaatacccatgtaatggttatttctaagaacaaaaattaaaataaaaaataatattaattatttgagcatgaaggtaaaaggataagaagtttatattgataatagacttcttgatagcaacattttatacaggatggtaatcaagaaatggtttaatgattatgaaacagataacacagtagcgagatgagattttattcatcctcactatgaatcatgtctaaggtatgtagaacatcatgaatattcatgaattttaaaaaacattgttcctgtgatggcttttttaga

SEQ ID NO: 562454 - DNA, 417 bp, Homo sapiens
atcaaatagaagtggtacaaactatagtaagagatatagagtataaaaataagagtaaaaaacagaaattgagagattaaaaacatctaaaaattttctaagcatagaacttaggcaaagaatagtaatacccatgtaatggttatttctaagaacaaaaattaaaataaaaaataatattaattatttgagcatgaaggtaaaaggataagaagtttatattgataatagacttcttgatagcaacattttatacaggatgrtaatcaagaaatggtttaatgattatgaaacagataacacagtagcgagatgagattttattcatcctcactatgaatcatgtctaaggtatgtagaacatcatgaatattcatgaattttaaaaaacattgttcctgtgatggcttttttaga

SEQ ID NO: 562455 - DNA, 556 bp, Homo sapiens
aagccaaaattctgtaaagcagcctgaaaataaggcttattaccattaaataacaacatttcagtctatagaaacttacatcctaggagagggaatactttaaataaaaaagtaatggatgaaaagagaaaaattccatcaagtgggataactgttatccataaagaagtagcaggtgagatggggagtaaaaaaacaaacatatataaatcctcttattttatatattatagctcaattttattcccatctttgataatccaaaaattatacactgatcaatatatctgttctaaatgttaagattccaacaggtagatcatgtctctcaaaatgtgttgcacattgcctcaactggwggttcatgatgcatattaaaataagaaaggcttagagaattcttacagcaaggaaaacaatgtaagtttatttaatttagtgttttagctatatatttaataattattttaggtaggcagttgtttaaagacaatagaaattacttggaatttaaagcaagcaaaaatgaatgcgttggaaaagcacaacgcagctc

SEQ ID NO: 562456 - DNA, 548 bp, Homo sapiens
atattctcctttagacaaagtttgcacttatatagcacaattaacctacttcttatcaatcaataaaacgaagagacaattacagaacaggataaggtgtttgcaaactatgtattcaacaaggtttgatatccagaatatataaggaactcaaaaaactcaatagcaaaagaaaawgttgattaaaaaatggacaaaagaagacatacaaatggccaaaaaatatataaagaaatgctcaacatcattaagcctcagaaaaatgcaaaacaaaaccgcaatgagctattaccttatcccagtttaaatgatggatattatcaagaagacaaaatataacaaatggaaacgataatgtggagaaagaggaatgttatacactgttggtgggaatttaaaatagtatagctgttatgaaaagcagtatggagtttccacaaaaaataaaaaagagaactattatattacccagcaatcccactactgggtacgtaatcaaaaaaaatgaaattagtatgtcaaagagacatctgcacccagggatattg

SEQ ID NO: 562457 - DNA, 569 bp, Homo sapiens
gactttcataaactttcaacttgttaaatatagtatttttattaacattctagtttgtaacagaaggcaaaacctaaacacttaccatttataaataatgggtaatactgtttcaacttaaccttgagaatgtaaaaaaaaaattgagtccagtctgatagcaaccaaaagatctcagaaacagtaatcttagtgctcgcctggcagacacaatctgcacagaacttactcaraataagattaaaagtccatagcaatttccttgagtggccagtcagatatcccccattacagtcaccaaccagcctgcctctggggcctatttcagaaataaactggtttgtagatgagctgatgcagaagaaggaaaaaaaaatgttttcttgagactgtacctaaatcttatcaagtaatacagggaagcttcaaagtctttttattctgaaatgttattttattctgctttatatcatcttaaatttattagtattatattaaatattagtttatgtaaccttattatttgactctgtataggatataatagatggcattgaatatttaataag

SEQ ID NO: 562458 - DNA, 592 bp, Homo sapiens
tgtataggatataatagatggcattgaatatttaataagatagcaacagcaataacacctgggaaattgttcagggaaggattctattcagttattaaaagatttgcatacttatttcactaatattactagcaatcacaagcattgggtaaygctagacaaatctgcaagaggtaccgttattccagcaccttaaaaacatttttcaatctgaaagatacttctagatgtttttttccataacagagcagatgatttataagtgtttatatcactgaaacttcacagtattagtggaatatgttatcctttataccaaaagtaatcagattattttataaagcaattatcaattaaaagtagattactaagaacatactgtataaaatgccttatgggctattaattctgcatgcattgccacatttgattgtctcaaaaaacctcctgaaatatgtattcttaacacacttttattgagaacattatgagtaataaaagttgaaagattttcccaaagatgtacaagtaagacaggtcctcaaataaagttgttttattcaatgttgttttgctataatgtagatgagaa

SEQ ID NO: 562459 - DNA, 592 bp, Homo sapiens
tgtataggatataatagatggcattgaatatttaataagatagcaacagcaataacacctgggaaattgttcagggaaggattctattcagttattaaaagatttgcatacttatttcactaatattactagcaatcacaagcattgggtaatgctagacaaatctgcaagaggtaccgttattccagcaccttaaaaacatttttcaatctgaaagatacttctagatgtttttttccataacagagcagatgatttataagtgtttatatcactgaaacttcacagtattagtggaatatgttatcctttataccaaaagtaatcagattattttataaagcaattatcaattaaaagtagattactaagaacatactgtataaaatgccttatgggctattaattctgcatgcattgccacatttgattgtctcaaaaaacctcctgaaatatgtattcttaacacacttttattgagaacattatgagtaataaaagttgaaagattttcccaaagatgtacaagtaaracaggtcctcaaataaagttgttttattcaatgttgttttgctataatgtagatgagaa

SEQ ID NO: 562460 - DNA, 421 bp, Homo sapiens
actgtgtgtcccaatgtgagtgaatgtggttgtgccctgccatggaatagcatactgtgcagggtttattcctgcattgcatgctgagtaagaataggttcttgccacccgagactctgaactggaataattgggtaaataatcatcttacttgtttttatyaatctttttaaaaatgtatgtatacctcacacttatttcagtgttgaatgttataagtgttgttttagtctccatttagaagtacagtgataatattgtgaccagaaatatgcagtaggaacttatatcttgttgtatcaattggcctatggtaaaatttgtttcattgttcaccattttgctgatagttgcagtttccaataatctactgatattaaatgtggacttactatgtaaacaatagcaaggatcctaaatc

SEQ ID NO: 562461 - DNA, 592 bp, Homo sapiens
gtacagtgataatattgtgaccagaaatatgcagtaggaacttatatcttgttgtatcaattggcctatggtaaaatttgtttcattgttcaccattttgctgatagttgcagtttccaataatctactgatattaaatgtggacttactatgtaaacaatagcaaggatcctaaatcctaggttatatctaagtttaaatggcttgacaccaagtcagaattgccttatgaccatgctcttataagtgtttcattttttaaaacagtgcaaactgaattttgcatgagaattatcattaaaaaaatttttgttacagataggatcttgctatgttgcccaggttgaccttgaagttctgggttcaaatgatccttttgcctcagcatccagtgtamctgggactacaactgtgtgccaccatacccagggctgcaggaaaagttgttatgtaaagcagtgatttatgaaaataagactttatttgggcaacatagaaaatgtaaacaaaaagagttgctcaacataaaacttactcaagtcacaatttacctctgacatgacatatttccatccacctcagaaaaaaaatg

SEQ ID NO: 562462 - DNA, 568 bp, Homo sapiens
tcttgctatgttgcccaggttgaccttgaagttctgggttcaaatgatccttttgcctcagcatccagtgtaactgggactacaactgtgtgccaccatacccagggctgcaggaaaagttgttatgtaaagcagtgatttatgaaaataagactttatttgggcaacatagaaaatgtaaacaaaaagagttgctcaacataaaacttactcaagtcacaatttacctctgacatgacatatttccatccacctcagaaaaaaaatgtgtatacctttttatttctttttttcttttctttccttttttttttttttttagaygggctggagtgcagtcacagctcactgcacctttgagctcctgggctaaagtaatcttcctttctcagcctcctgagtagttagaactaagacatgcaccaccatgtctggctaatttttaacatttttttgtggagatggagtctcgctatgttgcccaggctggtcttgaacttctggccacatgctatcctctcacctcgaccccccaaagtacttggattatcagctcaagtacttagat

SEQ ID NO: 562463 - DNA, 573 bp, Homo sapiens
gtaaaagctaaaaatgacaagacaattgttagaaatcatatcacgacagcataatcatgtatccacaagtgattgatacaataacatgaactgacattttgctgcaatattaatcagttaatacaggtttttaggtttcagttaactggttaatcataaaatattatcaaattgtgtaagtcatctcactgtattctaaaatttatgttattttatatttctatgttttgcagagatcatgaaaattttactgggtaactgaagaagaattgtcccaaggacttgaataaatgttaatgttcataacagtatgttctaaaaagaaatttaagtaaaaaaggaaaaaacatatttcattttaaaamtatctacgcatgcacatcattcatctaaaaaacccatttaatataatcatctagttatgtaaagatatacccaatagctacttaaaatacaaatattctatttcattattagaaattattattttaaaaggttgttaaaacatcaaaaatatgcttatttctagtaaccagagaacacagcagggttatgaaactttggattcctgtt

SEQ ID NO: 562464 - DNA, 573 bp, Homo sapiens
gtaaaagctaaaaatgacaagacaattgttagaaatcatatcacgacagcataatcatgtatccacaagtgattgatacaataacatgaactgacattttgctgcaatattaatcagttaatacaggtttttaggtttcagttaactggttaatcataaaatattatcaaattgtgtaagtcatctcactgtattctaaaatttatgttattttatatttctatgttttgcagagatcatgaaaattttactgggtaactgaagaagaattgtcccaaggacttgaataaatgttaatgttcataacagtatgttctaaaaagaaatttaagtaaaaaaggaaaaaacatatttcattttaaaactatctacscatgcacatcattcatctaaaaaacccatttaatataatcatctagttatgtaaagatatacccaatagctacttaaaatacaaatattctatttcattattagaaattattattttaaaaggttgttaaaacatcaaaaatatgcttatttctagtaaccagagaacacagcagggttatgaaactttggattcctgtt

SEQ ID NO: 562465 - DNA, 573 bp, Homo sapiens
gtaaaagctaaaaatgacaagacaattgttagaaatcatatcacgacagcataatcatgtatccacaagtgattgatacaataacatgaactgacattttgctgcaatattaatcagttaatacaggtttttaggtttcagttaactggttaatcataaaatattatcaaattgtgtaagtcatctcactgtattctaaaatttatgttattttatatttctatgttttgcagagatcatgaaaattttactgggtaactgaagaagaattgtcccaaggacttgaataaatgttaatgttcataacagtatgttctaaaaagaaatttaagtaaaaaaggaaaaaacatatttcattttaaaactatctacgcatgcacatcattcatctaaaaaacccatttaatataatcatctagttatgtaaagatatacccaatagctacttaaaatasaaatattctatttcattattagaaattattattttaaaaggttgttaaaacatcaaaaatatgcttatttctagtaaccagagaacacagcagggttatgaaactttggattcctgtt

SEQ ID NO: 562466 - DNA, 470 bp, Homo sapiens
attttaatatcttgaatataatattaaataaacatttctacaaataatttgaacctcaaagtttcataaacatctatccttcaatatttaggcctaaaaagtaatctccattatctatcaaattctaaatttgaacttattatggtttactcctactttttaattattactttggttaaagatacttcatgatattaagttccttactaataatgtatatggttgtattacattcatttatccatcaagactaactttgagctactatgaaatataattcaaatcattcacataatatctaatgaakgattactataatacaaagcactatactaggtttcataagtgatacaaaaacaagtgcaaccgcctcagtaaccaacacatttgcagtctaatagaggaaaacaagccctgttataagaataattatagtaaaaggctatataaaatacaatccattttgagac

SEQ ID NO: 562467 - DNA, 585 bp, Homo sapiens
cactatactaggtttcataagtgatacaaaaacaagtgcaaccgcctcagtaaccaacacatttgcagtctaatagaggaaaacaagccctgttataagaataattatagtaaaaggctatataaaatacaatccattttgagacacaccttcaactctatttgctaattctcattttcactctttagtttatttttagattaaatagttattttcacaaatcagtctgaggacagagttttttgttttgttttgttttgttttgttttgttttgtttttgtgagtcatcagcactatgcaattgcatatacctgttgtgtttrgtctacaaaggctgaacatcatgtaatagtttttatgcattttgttcataggttactgggtgctttaaggcaaaactgaatgagtttccaatagtcagtacaaaactacaagaaatacaggcacaaagtgcctggggttatcctcagatgaagttagatttgaattgcattcaataaccttttttacaatgtgtagatgctcaaagcaaatacaatagtttctctttgcctctgtgacttgagttcatagtgttgtgttta

SEQ ID NO: 562468 - DNA, 610 bp, Homo sapiens
aaatacaatagtttctctttgcctctgtgacttgagttcatagtgttgtgtttaaatataacttttgtaatgtctacttcactgaagaaacttttwaaaaatttgacttataatggttttctgtaataacctatggtgcttggtttgtaaagtaaaacaggaactcaatttagtacctactgaataataacattttttaactgagattccactcataaagcacctaaatttttaaagttaaaacatattatattgacattaaatttaaaaagaataaacaagttagagaagaaataaaaaaaaatattcagagaataaactgcttccaagtatacaagtactaaagaggctacacactggtatgctcattataaataaaaacattcattcatgtaattttatctcattactacatatttaaaataatctcttatcattatagtaggccatcattttccaaatagcatcaagaatccttattttgaaatagtaatcagatcatgtagttctcctgatcagatctcttcacactctagaataagatgcataccttcattttagcttttagacttttttctgatctagctctagattattgtttgatctcatt

SEQ ID NO: 562469 - DNA, 582 bp, Homo sapiens
ttgtaatgtctacttcactgaagaaactttttaaaaatttgacttataatggttttctgtaataacctatggtgcttggtttgtaaagtaaaacaggaactcaatttagtacctactgaataataacattttttaactgagattccactcataargcacctaaatttttaaagttaaaacatattatattgacattaaatttaaaaagaataaacaagttagagaagaaataaaaaaaaatattcagagaataaactgcttccaagtatacaagtactaaagaggctacacactggtatgctcattataaataaaaacattcattcatgtaattttatctcattactacatatttaaaataatctcttatcattatagtaggccatcattttccaaatagcatcaagaatccttattttgaaatagtaatcagatcatgtagttctcctgatcagatctcttcacactctagaataagatgcataccttcattttagcttttagacttttttctgatctagctctagattattgtttgatctcatttttactattcttctcattgctcattcaattcaattt

SEQ ID NO: 562470 - DNA, 610 bp, Homo sapiens
aaatacaatagtttctctttgcctctgtgacttgagttcatagtgttgtgtttaaatataacttttgtaatgtctacttcactgaagaaactttttaaaaatttgacttataatggttttctgtaataacctatggtgcttggtttgtaaagtaaaacaggaactcaatttagtacctactgaataataacattttttaactgagattccactcataaagcacctaaatttttaaagttaaaacatattatattgacattaaatttaaaaagaataaacaagttagagaagaaataaaaaaaaatmttcagagaataaactgcttccaagtatacaagtactaaagaggctacacactggtatgctcattataaataaaaacattcattcatgtaattttatctcattactacatatttaaaataatctcttatcattatagtaggccatcattttccaaatagcatcaagaatccttattttgaaatagtaatcagatcatgtagttctcctgatcagatctcttcacactctagaataagatgcataccttcattttagcttttagacttttttctgatctagctctagattattgtttgatctcatt

SEQ ID NO: 562471 - DNA, 610 bp, Homo sapiens
aaatacaatagtttctctttgcctctgtgacttgagttcatagtgttgtgtttaaatataacttttgtaatgtctacttcactgaagaaactttttaaaaatttgacttataatggttttctgtaataacctatggtgcttggtttgtaaagtaaaacaggaactcaatttagtacctactgaataataacattttttaactgagattccactcataaagcacctaaatttttaaagttaaaacatattatattgacattaaatttaaaaagaataaacaagttagagaagaaataaaaaaaaatattcagagaataaactgcttccaagtatacaagtactaaagaggctacacactggtatgctcattataaataaaaacaytcattcatgtaattttatctcattactacatatttaaaataatctcttatcattatagtaggccatcattttccaaatagcatcaagaatccttattttgaaatagtaatcagatcatgtagttctcctgatcagatctcttcacactctagaataagatgcataccttcattttagcttttagacttttttctgatctagctctagattattgtttgatctcatt

SEQ ID NO: 562472 - DNA, 589 bp, Homo sapiens
cattactacatatttaaaataatctcttatcattatagtaggccatcattttccaaatagcatcaagaatccttattttgaaatagtaatcagatcatgtagttctcctgatcagatctcttcacactctagaataagatgcataccttcattttagcttttagacttttttctgatctagctctagattattgtttgatctcatttttactattcttctcattgctcattcaattcaatttcaagcataatgattttttgctctttttggaatacactagctttttgatttcattagagcctgtacacttccctcttcctgaaatgttcttccccaaatttatgtatagcttattttctctctttgttcagggctcagtgtaattgtagattgttctctaccttgaatatgtcttacccctcatttgactggttttccttcataccaattatttgtattctaaaatattttatatttttctgttgacktgttcactgagttccttcctctaaaatgtagcttcatgagggcgatattttgttaaaattgtatgctactgtatcactagaactgagaacaatgcctgaa

SEQ ID NO: 562473 - DNA, 532 bp, Homo sapiens
ggagtaaatgataagaaattacttaatragtacaaggtatgctttttaggtgatgaatatgctgaacatcctgacttcactatgcaacctatggatgtaacaaaattacagttgcactccataaatttatagaaataaaataaaataaattacattttaatagagacactatcagagaaatacaccaaaaatgactggactgaattggaaatggaaaaggtagaaatctcattttctcttcagagactattgcaaatttgtttgtatgtaatacactaatcacatcagatgccagttttaagtacatattttcctccactgtgtagatttgtttcaatacggaaaaatttcagaacatacgtaatcaatacaaagccattctcagtaatttattttcattccatgccatgttacttaggtttacatttactaccttagaaaacattatgtacaaaagcttttctttcttatagtgaattaaatctccaactgcttttgtttctattttaagaaagtaaatattatgacataa

SEQ ID NO: 562474 - DNA, 532 bp, Homo sapiens
ggagtaaatgataagaaattacttaatgagtacaaggtatgctttttaggtgatgaatatgctgaacatcctgacttcactatgcaacctatggatgtaacaaaattacagttgcactccataaatttatagaaataaaataaaataaattacattttaatagagacactatcagagaaatacaccaaaaatgactggactgaattggaaatggaaaaggtagaaatctcattttctcttcagagactattgcaaatttgtwtgtatgtaatacactaatcacatcagatgccagttttaagtacatattttcctccactgtgtagatttgtttcaatacggaaaaatttcagaacatacgtaatcaatacaaagccattctcagtaatttattttcattccatgccatgttacttaggtttacatttactaccttagaaaacattatgtacaaaagcttttctttcttatagtgaattaaatctccaactgcttttgtttctattttaagaaagtaaatattatgacataa

SEQ ID NO: 562475 - DNA, 607 bp, Homo sapiens
taaatctccaactgcttttgtttctattttaagaaagtaaatattatgacataaatgtttgcaatgtttttgtttaaataaagtatttctagatttctcttaattcatagttacrtttgtttctttattgatgttcaaacacagacttttaaaaattcatatttttttcaaaatgtgtgactatttactttctagttcaatttaaaaagcatttaccataaaaatggcagtatctttttgtacagatgctacctctgaatcaaagcctctcagcaactggcaaacaggaagctctaatgcactttaaccctaatagttataaaatatgcaatcatctgaaatcacatactgatttccacttcttttctaactacggttatatgtaaatatttcactttcaataatagatctttgcctgtttatttggtttttttttccttggcttagaaatagtttttatgaaatattcaaatacaaacatagtctctaaaagcaaagtatggttctttgacagccaaaacactttcccctaagcatttcattagttatataagtgataaatgtttttctgaatgggaatttacctaaagtgtttcaaaattaggtg

SEQ ID NO: 562476 - DNA, 417 bp, Homo sapiens
tttattaagtctgaagaaatatttacttgaatatgacatctaagaatgatggacaaaagctttttaaattttctttccactcctttttctgaaagctttgatacaaaaatcatttgacacaaatgatttttttttttgtgacaggatcttactatgttgcccaggctgaagtgcagtgtgctcatgcaatcctcccatctcagcctcctgagtaactgggactacaggcacatgccrccatgcccagctaatttttgtatctttagtagaaacaaggttttgccacattgcccaggctggtctccaactcgtgggctgaagtgatctgcccaccttggcctcccagtgttctgggattacaggagtgagccactgtacccggctgatgcaaatgatttctattattaatatcttgca

SEQ ID NO: 562477 - DNA, 360 bp, Homo sapiens
tagcgtccctggctcgaaaccagggtgcgcttcgggcccgctagtggtacctcaaggcgggcagaaarcccatgaggggaaggtgaggcacctggggaaaagcgaaaaaaacaaaaacaaaaacgtcgcagaggagcagagcctgggtccccgaggaagaaagtgtcttcgcatcagcccttgcgctgggccccggggaccctggtgtcccagtttcgaacccagggtgtgcgtctggccactaggggtaccccaagtcggacagaaggcccatgaggggaaggtgaggtttgagggaggagacgtgaggcaactgtggcagaaaaaaaaaaaaaaaaaacacgccgcggagaagcgggg

SEQ ID NO: 562478 - DNA, 604 bp, Homo sapiens
gccaaatcattctgtatacttaatggttgttcagcactttctgttttataaagtactttcaaatatatcaattcagttagctagtacccaaatccttgatgtaatcactgtcatataacatacaagcaaactgtgtgtaatgaatcacactgcagttggagtacaagagtaggcatcaggaaagtggcagctgtgtcattttgaataaaggctgttgtgggaaaggttccttcagacagatccctctccctaggtatttatgtggtgagaatagcaggtggggtttgtggagtagagtccggggcttgtgcatccttaattcaagtaacagcacttgaattaaaggtttatcctaactataaagctatacatttttctcatgatgtatttgaatatattctttttaaggaaagaaaaaaatgtagtcatataaatgttcaggtcctgaagtatatgtatgtcacttattgctattctcttctgtattttatgtgaatgccacaaayatttttaaaattttaaagaagtaaacatatatacaacatagatttttaaaatgagatatatgctgaaacaaagttttgaggaggtataatgttccaaa

SEQ ID NO: 562479 - DNA, 567 bp, Homo sapiens
actgagtcaccaaattaaacattcaaattattctacatctccaaaagtagcccataattaaaaggaatttcatattggaataactggacctaatttgcttattcattaaattgtgtccaagtgtagtctctgaattatatcaattagggaacgagaaggcatacttaaaaagagctgaattaacagtgcaaataaagtaaccactgtggatacttttgaaaattctagtrttaattttgttagtcaatgcaatggaaatacatcagtagcatagtaataaaaaatatttctttttatagcatctttgataattataaaattaataaagatttattatttaaaaaaaagaataattcctacatcattaaaatcacaagtaactccactgtctaattacaacaactattgcggtttttatgtattttcttatcattttatttatttataattgataggtgagtattaaaatatagcctgacattattttatgattaataatttatttaaaatatattatatgattaagtgtctatttaaaattaagcctgttaaaaataaaactattga

SEQ ID NO: 562480 - DNA, 594 bp, Homo sapiens
aaatcacaagtaactccactgtctaattacaacaactattgcggtttttatgtattttcttatcattttatttatttataattgataggtgagtattaaaatatagcctgacattattttatgattaataatttatttaaaatatattatatgattaagtgtctatttaaaattaagcctgttaaaaataaaactattgatctttcctatcctctaatcccaaatttgctcctyccaaatttaaacccaggtgagtaattccaactctgttcctcccatagttcaggccaaaacattgccaatatcatggacttttgcctctaatatacagggttcaaatatatcttgtttgcatagaacaatttcaatttataatttacatagtttatagtttagaacagcttcaggaatagtttacacgatagtttcctcactaatttccctgttttctcttttgctatgctatggtctattttcacagatcagtcaaactgttactgctaattctttaaagaggcgattgcttttctgtttaaaacccttcatggctgccaattaaataaacaaaagttcttaccattttctaagaagctt

SEQ ID NO: 562481 - DNA, 594 bp, Homo sapiens
aaatcacaagtaactccactgtctaattacaacaactattgcggtttttatgtattttcttatcattttatttatttataattgataggtgagtattaaaatatagcctgacattattttatgattaataatttatttaaaatatattatatgattaagtgtctatttaaaattaagcctgttaaaaataaaactattgatctttcctatcctctaatcccaaatttgctccttccaaatttaaacccaggtgagtaattccaactctgttcctcccatagttcaggccaaaacattgccaatatcatggacttttgcctctaatatacagggttcaaatatatcttgtttgcatagaacaatttcaatttataatttacatagtttatagtttasaacagcttcaggaatagtttacacgatagtttcctcactaatttccctgttttctcttttgctatgctatggtctattttcacagatcagtcaaactgttactgctaattctttaaagaggcgattgcttttctgtttaaaacccttcatggctgccaattaaataaacaaaagttcttaccattttctaagaagctt

SEQ ID NO: 562482 - DNA, 490 bp, Homo sapiens
tctgatgaacccttttgaaatctaatagtggctgtaatcataataaattttttctaggtagttttacaaacactttttaatcttcaaaattcaaggctaatgtatgcatgttgaatgattatggcattcatatataagctatgtttggaaccagaacttaccagtgcttatatttatgtgtaggtatgatagacaaagcataggaataacaagatatcattagyttattattcattaaaaatatgagtagaactggttttgctctgtagtttttgctatgataaaccttagccatgaaaataacctgctattgagcatgtgtgtcatccatcttatgactcaccaaaaatggggaaatgagtctagaaccatcaaagcagttgacaacagaagtgagatttcagcttggatgcattttattataaaagtagtataattatattcaagaatttgttaaccttttatctcactaaataaatttcaatattca

SEQ ID NO: 562483 - DNA, 490 bp, Homo sapiens
tctgatgaacccttttgaaatctaatagtggctgtaatcataataaattttttctaggtagttttacaaacactttttaatcttcaaaattcaaggctaatgtatgcatgttgaatgattatggcattcatatataagctatgtttggaaccagaacttaccagtgcttatatttatgtgtaggtatgatagacaaagcataggaataacaagatatcattagtttattattcattaaaaatatgagtagaactggttttgctctgtagtttttgctatgataaaccttagccatgaaaataacctgctattgagcatgtgtgtcatccatcttatgactcaccaaaaatrgggaaatgagtctagaaccatcaaagcagttgacaacagaagtgagatttcagcttggatgcattttattataaaagtagtataattatattcaagaatttgttaaccttttatctcactaaataaatttcaatattca

SEQ ID NO: 562484 - DNA, 507 bp, Homo sapiens
ctggttcctgttttccctcaagtttacgggagatgatgacaaggagttcaagttgatgctacacacagtttgtgtcacagatgaagaactccaagtaaaggaaacttaaatctttaataaatgagcagtaagcacacttgtctgatgttttctgtggaggaaacactatcttcattttacttgaaaataaacaaatctgttctctcatccataaayaaacaatatcttgatcttccagggctatccgctatataaagatctttaaaaaggaaaacctgtaataaatgtgaagctagtgcctttctatttgcaagatgcacagaaatgcatgagaccaattgaaaattgcctgtgaacaaacacgcttccagatttttagcttgctcttttctaaacatgaaaattctcagaaagtacgtgttctcaaaattcatgccatttcttttttcccaagttcctttatcacgaccatcttatttttcacattaccaaataatgcacttccct

SEQ ID NO: 562485 - DNA, 606 bp, Homo sapiens
actgaccttgacagagattggtgagataacattatttccttctttggaccacaaggaaatgctgtatttttcagcctcaattgcaggtaggatgagaccatttcactggtgaatgaaatgtaggtagaagttatatttcccacttttagactgagctataagatacctcaygcaatgcttctcatactcctctttatattaaatgcagaggattcagtgaaaacctttaaggaatttcagaaagttaatcctctactgaattattatatgaatgagaataaaaaaattgtgttaagtcacagatatttgcagtttggttcagaaactaatattaattgccctgactaatatactgagatactagtgatgattctgcaatgactgcttttacagtgaaagtgaccacagtagcatgcatggataaatttaaggtgataaacattaggattgcttacatattttttggcttcttcatgcacatggtaggatatagctcactgccctgtttacttcagttatggaatgtgatttccttttgcttattgaaatgttagtagactaaagtgtctgtttccttctagaggcaaaaattcagagcgtgcctca

SEQ ID NO: 562486 - DNA, 378 bp, Homo sapiens
cattcccttttgaaaacaaagaataataaccaaagtaatataatctaaacctgctttaaagtccgagtgtagtttatgttatatgttcctgtaattatttgtcatctgtggctcaaatcccttttactaaaatactttgcacttcaccataaacaaacttgtgcaaacaaacaagacacagaagcgatataaaactcccaaaatcaagttactaagtttcagtaacaaataaacctgaatgtgtaattaaatagattataataatgctgaaaattctgtattttaggttctttrtgatctagagttcttcacatgtatttagtaaaccattccaagtgctatatttcttgctaataaaaccaaataacaatgttcagg

SEQ ID NO: 562487 - DNA, 573 bp, Homo sapiens
atttagtaaaccattccaagtgctatatttcttgctaataaaaccaaataacaatgttcagggtaaattttaatgaattaatgcttataatgcaaactatgctttcatcmattttattcagaagcacacgattaattatacaacagatattttatatgattgttcagagtaaagactatttttatttgcttgaatgacaacataatttattaaatgaataaatacacggattcgtcttctccatcaccatttcaggcatgtttttgtgacatctaccttcttcaccatgaactccttcctaaccaaccattatatctaaaataaattatcagcaaacataaataatgtgctattccagaactacctcacatgagctagatgatgggaggcataattcataataaacagaccctacctttaaattctataaagccacagcatttaaattataactatgccacagagcagtaacctattttcctattaattatatcccataaaagcaatataccttcactaattaattatacttgaagtaacaactatggcttaattaaatgaaccattcctaat

SEQ ID NO: 562488 - DNA, 598 bp, Homo sapiens
tatttagtaaaccattccaagtgctatatttcttgctaataaaaccaaataacaatgttcagggtaaattttaatgaattaatgcttataatgcaaactatgctttcatcaattttattcagaagcacacgattaattatacaacagatattttatatgawtgttcagagtaaagactatttttatttgcttgaatgacaacataatttattaaatgaataaatacacggattcgtcttctccatcaccatttcaggcatgtttttgtgacatctaccttcttcaccatgaactccttcctaaccaaccattatatctaaaataaattatcagcaaacataaataatgtgctattccagaactacctcacatgagctagatgatgggaggcataattcataataaacagaccctacctttaaattctataaagccacagcatttaaattataactatgccacagagcagtaacctattttcctattaattatatcccataaaagcaatataccttcactaattaattatacttgaagtaacaactatggcttaattaaatgaaccattcctaataatgaaaccttaaaataattggac

SEQ ID NO: 562489 - DNA, 598 bp, Homo sapiens
tatttagtaaaccattccaagtgctatatttcttgctaataaaaccaaataacaatgttcagggtaaattttaatgaattaatgcttataatgcaaactatgctttcatcaattttattcagaagcacacgattaattatacaacagatattttatatgattgttcagagtaaagactatttktatttgcttgaatgacaacataatttattaaatgaataaatacacggattcgtcttctccatcaccatttcaggcatgtttttgtgacatctaccttcttcaccatgaactccttcctaaccaaccattatatctaaaataaattatcagcaaacataaataatgtgctattccagaactacctcacatgagctagatgatgggaggcataattcataataaacagaccctacctttaaattctataaagccacagcatttaaattataactatgccacagagcagtaacctattttcctattaattatatcccataaaagcaatataccttcactaattaattatacttgaagtaacaactatggcttaattaaatgaaccattcctaataatgaaaccttaaaataattggac

SEQ ID NO: 562490 - DNA, 579 bp, Homo sapiens
acatgtatttagtaaaccattccaagtgctatatttcttgctaataaaaccaaataacaatgttcagggtaaattttaatgaattaatgcttataatgcaaactatgctttcatcaattttattcagaagcacacgattaattatacaacagatattttatatgattgttcagagtaaagactatttttatttgcttgaatgacaacataatttattaaatgaataaatacacggattcgtcttctccatcaccatttcaggcatgtttttgtgacatctaccttcttcaccatgaactccttcctaaccaaccattatatctaaaataaattatcagcaaacataaataatgtgctattccagaactacctcacatgagctagatgatgggaggcataattcataataaacagaccctacctttaaattctataaagccacagcatttaaattataactatgccacagagcagtaacctattttcctattaattatatcccataaaagcaatatascttcactaattaattatacttgaagtaacaactatggcttaattaaatgaaccattcctaat

SEQ ID NO: 562491 - DNA, 430 bp, Homo sapiens
ttcttcaaagtacatatcaaatgcattsactctttccatcgccattgctactattactgttttagtcaattctgactgctatcacaaagacctatagactaggtggcttagaaataacaaaaatcaattttttcacagttctaaaggctagaagtctgagaccgtggtaccagagtgaccaggtttcagtgatatctctcttctaatttgcagactaccattttcttcttgtatcctcacatgtcagagagtgagagaactctctagggtctattatataggggaactagttccgtttaggagggctccaacctcatgatgtaaccacttcctgaaagtaccacctcctaataccatcatattaagggttaggatttccacctataagtttcagagacagggtggcaacagccatgcagtccattgcaat

SEQ ID NO: 562492 - DNA, 430 bp, Homo sapiens
ttcttcaaagtacatatcaaatgcattgactctttccatcgccattgctactattactgttttagtcaattctgactgctatcacaaagacctatagactaggtggcttagaaataacaaaaatcaattttttcacagttctaaaggctagaagtctgagaccrtggtaccagagtgaccaggtttcagtgatatctctcttctaatttgcagactaccattttcttcttgtatcctcacatgtcagagagtgagagaactctctagggtctattatataggggaactagttccgtttaggagggctccaacctcatgatgtaaccacttcctgaaagtaccacctcctaataccatcatattaagggttaggatttccacctataagtttcagagacagggtggcaacagccatgcagtccattgcaat

SEQ ID NO: 562493 - DNA, 430 bp, Homo sapiens
ttcttcaaagtacatatcaaatgcattgactctttccatcgccattgctactattactgttttagtcaattctgactgctatcacaaagacctatagactaggtggcttagaaataacaaaaatcaattttttcacagttctaaaggctagaagtctgagaccgtggtaccagagtgaccaggtttcagtgatatctctcttctaatttgcagactaccattttcttcttgtatcctcacatgtcagagagtgagagaactctctwgggtctattatataggggaactagttccgtttaggagggctccaacctcatgatgtaaccacttcctgaaagtaccacctcctaataccatcatattaagggttaggatttccacctataagtttcagagacagggtggcaacagccatgcagtccattgcaat

SEQ ID NO: 562494 - DNA, 614 bp, Homo sapiens
ccagttatgttactattatatatattagtaatatatatatatatattactgatattatatagataatgcatctgggtgactgagtgaaggctttacaaccatgcagtttcccccaagggttatttctcctgaacacgtcctgtgtcttcctaaccaaagagaagcaacatagcagggtatagttaaaagagatgggcactctcattatctttccagactgacttcgacaagagaacttaatgggtcactttactgaaaagtcttcagtttggcttgatttagggctaagaggatgtcatagagactgactgactccactttgctcaaggagggagaaaggtaagcttggcttaagtgtgtgcaccatgtcaattaaaggaaaagtagtgggcttatcactcatatgtctccccaaacaacccttccagagacattattctcacactacctgtgtctatcccttagcacaccctgattttaaaatgagcgaaagacctgaacagacacttcaccaaagaaaatatataaatggcaaattagcatatgaaaagaygctccacatcacgtcattaaataaatgcaaattaaaacaaagagatacagctacacatcta

SEQ ID NO: 562495 - DNA, 377 bp, Homo sapiens
tttttttaaatatataaaataaaatcttcatgaccttggacaagacacaaaaagcattaatcacaaaagaaaaaaaaatsaataaattgtgcctcatcaaaaatttttaatttattcatcaaaggacactattaagaaaatcataaaggataatgacttttaagacttgaaaagcatgcagtttttctacaggtactttcagtaaatttcaactgtcactctcagacctaataacccttcattctaactccctctgtgagttgtaaatccaggccccctgtcttccagtcttgctcaagacccttttggctaagggcaactattttttccttcctttgcctttggagattagaagataaaagcacaatggaagataa

SEQ ID NO: 562496 - DNA, 377 bp, Homo sapiens
tttttttaaatatataaaataaaatcttcatgaccttggacaagacacaaaaagcattaatcacaaaagaaaaaaaaatcaataaattgtgcctcatcaaaaatttttaatttattcatcaaaggacactattaagaaaatcataaaggataatgacttttaagacttgaaaagcatgcagtttttctacaggtactttcagtaaatttcaactgtcactctcagacctaataacccttcattctaactcccwctgtgagttgtaaatccaggccccctgtcttccagtcttgctcaagacccttttggctaagggcaactattttttccttcctttgcctttggagattagaagataaaagcacaatggaagataa

SEQ ID NO: 562497 - DNA, 559 bp, Homo sapiens
cctgtgttgagtgaatgcagctcaagaaacaaaccccaaatcatgtccttgctaaatagtagatatggaatttggacccagatctgagtccaaagaccatgatctgtgtccgaggaggcagagccctcacaagcatcagcgtatgaggcagttgaggcctgagagccaaagcagaccgtactgtttactacaggctcaagaacctagatgaaaatcccaactgcttacctgccttgcaagttcagcccatcatcctgtctccccggccctgctgccacctctctctccacactcyggctgcaatggcttctttctgctccttggccactcttggtttctgcagcttggaaagctcttccagaagattctcacaatctggtttctcatcattaaggttacatctgaaatgtcacctccccagagacgccttcccagaccaccagacctaaggctactattctctcagccaccacatccttgtcacaatcatctgaaatactacgctttttttctttttttttacttctttcccactctcatgcatatttaatgaggccag

SEQ ID NO: 562498 - DNA, 508 bp, Homo sapiens
acataccatgtttccaggcttcctattctgtttcattaatttcttcgtttattttttcactaatactatactgttttaattactataaagtttatgatatcttgatatctgccagaattgctatccttgttcttttttagaattgtattgactttggattttcctattccatgtaaacttaagaatcagtttgctaagttstactctgttacaaagattataatcaatcatattgggaaaatattacatctttattcagtttcccatccatgaacaaggtatagcctgtttattcaagatttctttcttttgtgtcttttcataatattttataattttctcttaaaaccttttgtcagatttattgctagttttttttttaacatttttttgctactatggtgaattatatgtgcacacacactctattgcattttaaaattgctattgctggtttataggaatgttgttgatcttagtataatgattttgtagccagcaaatctct

SEQ ID NO: 562499 - DNA, 585 bp, Homo sapiens
agagaggcaggaaatttggtcatttttgttaagctttgcatttctagcatctagaaccctgggctaagatgttgcccaactttaggagggagcattcatgtacagtataatgatagatttcaatgtggtggctttacctaaaatagcacctggcacataattagcccttgataggtttttgttcatgaataatctgtctattcttggcacasttaaatctcttcaaagtagaatgcaatgcccatggttaagtttcccattcaaaggcaatataggcataaaatagatgcagccatagaaatttaaataggggctttccccaaaaaatatttgtgccagtcttttgctctttctccatctttagctctgaaatttaataatcagagcatgggagggctggtctgaagacctgtgagagttaacacagagagatttaagtttacctatcacagagagatttaagtttacctatcagctcgtcattggaaggcaattctccagggatatcttgcatctttgcatgtcttgccagcagaggcactggctgcctttgttctggactatcttttcaagggtgtttgtata

SEQ ID NO: 562500 - DNA, 585 bp, Homo sapiens
agagaggcaggaaatttggtcatttttgttaagctttgcatttctagcatctagaaccctgggctaagatgttgcccaactttaggagggagcattcatgtacagtataatgatagatttcaatgtggtggctttacctaaaatagcacctggcacataattagcccttgataggtttttgttcatgaataatctgtctattcttggcacagttaaatctcttcaaagtagaatgcaatgcccatggttaagtttcccattcaaaggcaatataggcataaaatagatgcagccatagaaatttaaataggggctttccccaaaaaatatttgtgccagtcttttgctctttctccatctttagctctgaaatttaataatcagagcatggragggctggtctgaagacctgtgagagttaacacagagagatttaagtttacctatcacagagagatttaagtttacctatcagctcgtcattggaaggcaattctccagggatatcttgcatctttgcatgtcttgccagcagaggcactggctgcctttgttctggactatcttttcaagggtgtttgtata

SEQ ID NO: 562501 - DNA, 519 bp, Homo sapiens
ccttgctcctcaacttgcagatagcctattgtgggactttaacttgtgattgcgtgagccaattctccttaataaactccctttcatatatacatatatcctgttagttctgtccctctggagaaccctgactaatacacccctcttctcttgatgttaaatgttactctgtttgatgtaatctgtaacatttatatattgagtatactactatgtatggttttgcaattttgactgacctrtgctgtggcttgagcctgtgtgccatgtctctgactaccaagcaaatggatagtactaagaatttccttcttgggaactccatgtagcttgtggcttttatggttgaataagcatcaataaatcagaccttatgaaaagacacaaacatgcatgggcctggttatatcttatcttgtgcagctcatgacacttagtttcttagtagttggctgaacttggatatgttactttctctctatgagccttagcttttttaaatatgcaaagtggggctaa

SEQ ID NO: 562502 - DNA, 583 bp, Homo sapiens
ggggagtgatagcattaggagaaatacctaatgtagatgacgtgttgatgggtgcagcaaaccaccayggcacatgtatgtaacaaatctgcatgttctgcacatgtatcctagaacttaaagtataataaataataataataataaaagactaggagaccaccttatggcctgtgatgatgtctgagatacacctaggcagagaatcagagattcttagaattactgattcagagtaccttgtagtttcagtactataaagttctggaatctcagattgggaagaggcattaaaggtcatccagcatccagacccagaccctggcataaaaaaaagattatagcagaaaagagagggacaaggagtctagccaaattgcagtagctccaccaagaggggtttaatccatttcacttaaatttaatttacaactgctttggattggtaactttgttggtaaggaaagcctaaaatatgacttagtctttgattccaaatatcaagtttcttcatcccacagagtagtgggtttattttttgttgtaattgagctttgttttaacggctaaatcaaaacatagc

SEQ ID NO: 562503 - DNA, 618 bp, Homo sapiens
ggggagtgatagcattaggagaaatacctaatgtagatgacgtgttgatgggtgcagcaaaccaccatggcacatgtatgtaacaaatctgcatgttctgcacatgtatcctagaacttaaagtataataaataataataataataaaagactaggagaccascttatggcctgtgatgatgtctgagatacacctaggcagagaatcagagattcttagaattactgattcagagtaccttgtagtttcagtactataaagttctggaatctcagattgggaagaggcattaaaggtcatccagcatccagacccagaccctggcataaaaaaaagattatagcagaaaagagagggacaaggagtctagccaaattgcagtagctccaccaagaggggtttaatccatttcacttaaatttaatttacaactgctttggattggtaactttgttggtaaggaaagcctaaaatatgacttagtctttgattccaaatatcaagtttcttcatcccacagagtagtgggtttattttttgttgtaattgagctttgttttaacggctaaatcaaaacatagcacattttctttcattcttttttttgacatcagctg

SEQ ID NO: 562504 - DNA, 618 bp, Homo sapiens
ggggagtgatagcattaggagaaatacctaatgtagatgacgtgttgatgggtgcagcaaaccaccatggcacatgtatgtaacaaatctgcatgttctgcacatgtatcctagaacttaaagtataataaataataataataataaaagactaggagaccaccttatggcctgtgatgatgtctgagatacacctmggcagagaatcagagattcttagaattactgattcagagtaccttgtagtttcagtactataaagttctggaatctcagattgggaagaggcattaaaggtcatccagcatccagacccagaccctggcataaaaaaaagattatagcagaaaagagagggacaaggagtctagccaaattgcagtagctccaccaagaggggtttaatccatttcacttaaatttaatttacaactgctttggattggtaactttgttggtaaggaaagcctaaaatatgacttagtctttgattccaaatatcaagtttcttcatcccacagagtagtgggtttattttttgttgtaattgagctttgttttaacggctaaatcaaaacatagcacattttctttcattcttttttttgacatcagctg

SEQ ID NO: 562505 - DNA, 583 bp, Homo sapiens
ggggagtgatagcattaggagaaatacctaatgtagatgacgtgttgatgggtgcagcaaaccaccatggcacatgtatgtaacaaatctgcatgttctgcacatgtatcctagaacttaaagtataataaataataataataataaaagactaggagaccaccttatggcctgtgatgatgtctgagatacacctaggcagagaatcagagattcttagaattactgattcagagtaccttgtagtttcagtactataaagttctggaatctcagatygggaagaggcattaaaggtcatccagcatccagacccagaccctggcataaaaaaaagattatagcagaaaagagagggacaaggagtctagccaaattgcagtagctccaccaagaggggtttaatccatttcacttaaatttaatttacaactgctttggattggtaactttgttggtaaggaaagcctaaaatatgacttagtctttgattccaaatatcaagtttcttcatcccacagagtagtgggtttattttttgttgtaattgagctttgttttaacggctaaatcaaaacatagc

SEQ ID NO: 562506 - DNA, 583 bp, Homo sapiens
ggggagtgatagcattaggagaaatacctaatgtagatgacgtgttgatgggtgcagcaaaccaccatggcacatgtatgtaacaaatctgcatgttctgcacatgtatcctagaacttaaagtataataaataataataataataaaagactaggagaccaccttatggcctgtgatgatgtctgagatacacctaggcagagaatcagagattcttagaattactgattcagagtaccttgtagtttcagtactataaagttctggaatctcagattgggaagaggcattaaaggtcatccagcatccagacccagmccctggcataaaaaaaagattatagcagaaaagagagggacaaggagtctagccaaattgcagtagctccaccaagaggggtttaatccatttcacttaaatttaatttacaactgctttggattggtaactttgttggtaaggaaagcctaaaatatgacttagtctttgattccaaatatcaagtttcttcatcccacagagtagtgggtttattttttgttgtaattgagctttgttttaacggctaaatcaaaacatagc

SEQ ID NO: 562507 - DNA, 639 bp, Homo sapiens
gaaatcacaaataaaaatcttaaaaattaaatcaaacttcagcacacacaccagccatgctattctttgataaaaatgtgctgcaagctagttccggtggtatacacctatagtccaagctactcaggacacagaggtggaaggactgctttgagcccaggtgttcaagactgtagtatgctacgatcacatctgtgaatagccactgtgctccagcctggrcaacacagtgacacccctctctaaaaaaataaaaaaaaatagtgatgcagtaggacttttgataaactgctaatatatgcaatcattgcaaatgtttaaataaaagataaagatatgtctagttcagtctgaaaaaaatgtggaaacagaaataatatgtaaaatcagctaaattaatccacatatttgatatctcagagtagatgttctctctttccacctccacacaaaagcataatggttaatgttaatatgctggacatactttatggtcaattccagtgaccatgttgttgctctacttctttgctcctactcaacaaagcatatatctaagacatttataattgaataaaaacagctgatagaattaataagaaaatttggtgagttggccagatatggactacataacaa

SEQ ID NO: 562508 - DNA, 639 bp, Homo sapiens
gaaatcacaaataaaaatcttaaaaattaaatcaaacttcagcacacacaccagccatgctattctttgataaaaatgtgctgcaagctagttccggtggtatacacctatagtccaagctactcaggacacagaggtggaaggactgctttgagcccaggtgttcaagactgtagtatgctacgatcacatctgtgaatagccactgtgctccagcctgggcaacacagtgacacccctctctaaaaaaataaaaaaaaatagtgatgcagtaggacttttgataaactgctaatatatgcaatcattgcaaatgtttaaataaaagataaagatatgtctagttcagtctgaaaaaaatgtggaaacagaaataatatgtaaaatcagctaaattaatccacatatttgatatctcagagtagatgttctctctttccacctcyacacaaaagcataatggttaatgttaatatgctggacatactttatggtcaattccagtgaccatgttgttgctctacttctttgctcctactcaacaaagcatatatctaagacatttataattgaataaaaacagctgatagaattaataagaaaatttggtgagttggccagatatggactacataacaa

SEQ ID NO: 562509 - DNA, 595 bp, Homo sapiens
ttcgatacttgatcaactttgatatctaaycaagttcctcatcccccacctttaatttatgtccttggcctgacttcagaagaatccctttaccattgatgactcctcttagtaactttccatccactgacccctcactctgaaactgggctacaatccccagctgtctttgctgtattcagagttgagcccaatctctgtcctatattgcaatagtcatgaataaagtcttccctactgttttaacaagtgtcagaactttttctttgtctatggctattctggacagaattagggttctattagctgagaaggaaaaaagggatgggtaatggagaagtaactgtgtctgtgacaccaaagatctccttattctaaaagctagtcattgccatttgagaagcaaatgctggcacagggcataaatccttgtgagctcagaacttacatttaactgccatctctgtcagcgatacacctgggaactcagtgaaacaaagcttgtaaaactttctacctacatattttgtaggagtattgtgaagttttaattagccaatagttataaagtcatttgaagatagtcactgcaagc

SEQ ID NO: 562510 - DNA, 549 bp, Homo sapiens
ggaagtcattatgttaagtgaaataagccagacacagaaacaaacaaacaaacattgcttgttctctcacttatttgtggaaactaaaaatgaaaataattgaactcattgaaatagagagtagaaggatggttaccagtagctgggaagagtagtgagggtggtggggggaagtgggggaagtgaggatggttaatgggtacaaaaaattgttagaaagaatgaataagacctagcgtttgttagcacaacwgggtggatggtaaaaaataatttaattggacacttaaaaggacacttaagaataactaaaagagtataattggattgtttgtaatacaaaggataaatgcttgaggtgatggatactctatttatctgaatgtgattatcatgcattgcatgctgataccaaatatctcatataccccataaatatatataccctactatgtacacacacacacacacacacacacacacacacggctgtttcagcaaaaaacagtgttatccagccttttatttgaatggggaattctgtttttt

SEQ ID NO: 562511 - DNA, 546 bp, Homo sapiens
cggggtttcaccgtgttagccaggatagtctcgatcgcctggcctcgtgatccgccctccttggcctcccaaagtgctgggattacaggcgtgagccattgcacccgcactcagatatattttttaaaatttctttagagatggggtctcactgtgttgcttaggctggtctcaaactcttggactcaagtgatcctgtcaccttggcttcccaaaatgacgagawtacaagcgtgagttaccatgcccagttgaacaattacttcttgaatgaaagaatgcatgaaagggacacagaaaaaaaaggggggaggtgagaaaacatgaaaaggagggcaggatatgaaacacagcgctgtcagacatactatagctgtacttatttactgactgccttgcctcattcaaatgtgagacctctgagggaaggactcagacggaattattcactgctgtatctccagtgtctgtaaatcagtgcccagcacatagtgagcactctataaatatggctaaataaaacaatacgtgaaaagtctaatatct

SEQ ID NO: 562512 - DNA, 606 bp, Homo sapiens
atagcatcaaaaatattaaaatacttaggaattaacttaaccaaggaggtgaaagacttatacagtgaaaactacaaaacattactgaaataaattaaagaagaaataaataaagggaaacatcctatgcttatggattaggagacttaatattgttaagatgttaatacaacccaaagtaatctgcaaattcaatgcagtccctatcaaaatcccaatgacattttaaaagaaatagtaaaacctatcctcaaattaatacagatatttaagaggccccaaataaccaaaacaatcttgaaaaagtacaaagcagaaagacccatatttccaaatttcaaaacttacaataaagytacagtaatcaaagcaatgtcatatataaaaattaactcaaatggataaaaaaatgtaaggcctaaaactataaaactcttagaaaaagaataggacaaaaatgtcacaacattggatttggcaataatttcttagctaggactctaaaagcacaggcaacaaaagaaaaaatagacaaattaaatttcttgaaaaatttaaaaaatattgtgcatcaaaatacagtgtaaacagagtaaaaaaggcagc

SEQ ID NO: 562513 - DNA, 526 bp, Homo sapiens
ttgtataagtgctaagtattattatgtcattattacaaacaacayaaaagtcacagaacctcataaactaaataagtagagaatgaccttcttactcagcactcaggagaggatggcagagggtcagtcttggtggagtcagctggcatggacacctctgtaggacaggtgggctcaaggggggtgatagcaggagggcttgccattacttctcaggttaattttctaaaaggaccaaatttgtaaaaataacttaatttgtgttttaaagttcttgaaaatgagttgcttgcttaatatttttgtggaaacagaagcactataaatcctaaataaaagaaaaacaaaagtaattaagataaattttaattattagtgtctgtttggctgattcatttttgtgagtaatctttcaatcacaattagagcattcatgtaaagtgtgtatgtacctgctgaaacttcaagatgtttaagggatttcttttttattatttttgtgcttttattttaggttcagtgatac

SEQ ID NO: 562514 - DNA, 545 bp, Homo sapiens
gacctctgcctcctgggttcaagtgattctcctgccttagcctcctgagtgtagctggaattacaggcacgtgccaccacgcccagccaatttttgtatttttagtagagacggggtttcaccatgttggtcaggctggtctcaaactcctgacctcatgatctgcccacctcggcctcccaaagtgctgggattacaggtgtgagccactgtgcctggccaattactccttatattatactttattcattcattcattcattgagtgtctaatttgagtgaagagctgttaggtgctagatatacagcactggaacaaaaaggcccagacctttttctcatggtgcttgctgggaagacagacactaaaatacattagacaaatacctatctaattatagttgtggtgctatgaagaaaagtttaaggactttgggtaatcaagataaatggaaacaaccatcaytgaaaacatttactctgtggaaatctcagtagagcaaaaggtagtctttactgaaaactacaaaccttccaatccaaaa

SEQ ID NO: 562515 - DNA, 545 bp, Homo sapiens
caggcacagacaggctgtgacacaggagctggcaatgcrgtctccacgtggccggaactgagcggctatctggaataaagggagggattgcagcggctggagccatgtggaaggtgccaagtcctgatggaagggttggaactgagactgcacaggcaagaagcctggcttctgatgtgctctggatctttaggcagaatcacttcatccctccagggctctgcttcattcagctgtaaatgaagtggtaagaccagctgatctctgagaactattccagctctaattaattctaagcccccatttactcaacagaaagactgtggtactttcatagtgtttgtgtctctcataaaatatttatctcttcctactctgcagggtaatttcagtgtctgtgctagactgtgtctgtgctagactgtgtccatgctaggactatcatttgggaattgtagactaaaaccatcataacgtattagctaaatgacctggggcggggcttttggctactttctttctttcttttttgtagagacagggtc

SEQ ID NO: 562516 - DNA, 599 bp, Homo sapiens
gctttagctgtgtcccagagattatagtatgttgtgtctttgttctcattggtttcaaagagcttatttatttcttccttaatttcattatttacccagtagtcattcagaagcaagttgttcagttcccatgtggttgtggggttttgagtgagtttcttttcttctttttttcttttttctttgagatggagtcttgctctgtcatcaggctgaagtgcagtggtgcaatcttggctcactgcaacctctgcctcccagattcaagccattctactgcctcagcctcccaagtagctgagactacaggagcacatcaacatgcccagctaatttttgtatttttagtagagatgggatttcacygtgttggccaggatgatctcaatctcttgacctcgtgatccacctgcttcagcctcccaaagtgctgggattagaggcatgagccaccgcacccgaccttaaatgagtttcttagtcctgtgttctaatttgattgcaatgtgatctaagagactgtttgttatgacttccattcttttgcatttgcttaggagtgttttacttccacttatgtggtcaattttagaatatgt

SEQ ID NO: 562517 - DNA, 574 bp, Homo sapiens
gtttttaaaacgcaaattctgtaaatttcttggtaagtttttcttcaaatttaatatatattgctaatattattttcccccattattattctcccatacattattatatgttccaaaggtttaagataagtatatatatayatatatatatatatagagagagagagagagagagatttatgtataataaatcttatatataaattgttttagatatttatgtataataaatcttatatgtatacacatatataaattatttttaggtattctgttgcatcagggtttttgtacaagaattttttttctttttcttgcataaaacaaacttctcatatctacttatttgtctgacagattatgaccactgagtttttggcttactaaaccttttcaccaataattctttcttgactcgtaaagtttgggcaaggcctatctcttctactttatttcatttctcataatatgcaactcacctaattgtaattctctgtattcctcaggagcagtggttaatgattgattagttatacgtaaagtaattatttgtaaaggttttatttgcttccaa

SEQ ID NO: 562518 - DNA, 571 bp, Homo sapiens
agttccacaatatatttaagcagacagaacaaagaatcagtgagcttgaaaataggtcaaattaaattacccagtttgagaagcataaaaaaataagaatttaaaaaaattaacagaacttaagagtacccattgacatctcagaaaatgaggagggaggccacgcatggtggctcacacctgtaatcccgcactttgggaggccaaggcaggaggatcacttgagctcaggagttcaagaccagccttggtgacatagtgagaccctgtctctattaaaaaaaaattaattgaaaaaaagaaagtgaggacagaaagaggcagaaaaatatttgaagaaataataattgaaaacattccaaatttgataaaagacatgaatctacacatccaagaaacctgatgaactcaaagtaaggtaaattcaaagagttccacatcaaaacagcttgatattatcaaattgtcaaaagagcaaatcttgaaatcaacaagagagaagcaaaacatacaagtaaccttcaataagattttcagcygatattgcttcaggaaccatgcaagttaaaag

SEQ ID NO: 562519 - DNA, 534 bp, Homo sapiens
caaaaataaataaatacatatcartgatgacacaattataattatttttcaagttgttggattaagtacttcaattaaaaggcagagagacaaaaaaagcaagacccaactctatactgtctcaagaagcatgttataaaaataaagatccagataggttaaatgtaaatggagagtgtgatacttcagtttatgtatcagcttgtctgggttaagggatacttagatagctggctaaacattatttctggatgtgtctgtgagaatgtttccggagagattagcatttgaatcagtacattaagcaatgaagatctgccctccccacagtaggtgggcatcagccaatctgtgagggcctgaataccttcccccatctccactccccaccagcactacccatccccaggctcatgtcttcagactcagactgaaccacaacacctgctttcctggatcaccagcttgcagatatcagacagtgggacctctcagcctccataatcacatgagctaatttccatactaaatcct

SEQ ID NO: 562520 - DNA, 534 bp, Homo sapiens
caaaaataaataaatacatatcaatgatgacacaattataattatttttcaagttgttggattaagtacttcaattaaaaggcagagagacaaaaaaagcaagacccaactctatactgtctcaagaagcatgttataaaaataaagatccagataggttaaatgtaaatggagagtgtgatacttcagtttatgtatcagcttgtctgggttaagggatacttagatagctggctaaacattatttctggatgtgtctgtgagaatgtttccggagagattagcatttgaatcagtacattaagcaatgaagatctgcmctccccacagtaggtgggcatcagccaatctgtgagggcctgaataccttcccccatctccactccccaccagcactacccatccccaggctcatgtcttcagactcagactgaaccacaacacctgctttcctggatcaccagcttgcagatatcagacagtgggacctctcagcctccataatcacatgagctaatttccatactaaatcct

SEQ ID NO: 562521 - DNA, 534 bp, Homo sapiens
caaaaataaataaatacatatcaatgatgacacaattataattatttttcaagttgttggattaagtacttcaattaaaaggcagagagacaaaaaaagcaagacccaactctatactgtctcaagaagcatgttataaaaataaagatccagataggttaaatgtaaatggagagtgtgatacttcagtttatgtatcagcttgtctgggttaagggatacttagatagctggctaaacattatttctggatgtgtctgtgagaatgtttccggagagattagcatttgaatcagtacattaagcaatgaagatctgccctccccacagtaggtgggcatcagccaatctgtgagggcctgaataccttcccccatctccactccccaccagcactacccatccccaggctcatgtcttcagactcagactgaaccacaacacctgctttcctggatcaccagcttgcagatatcagacagtgggacytctcagcctccataatcacatgagctaatttccatactaaatcct

SEQ ID NO: 562522 - DNA, 641 bp, Homo sapiens
aaagtcataatatgtttttatgaaaagaccaacaaaattgatacaccagattgatcaagagaaaggacacaaactatcaacatcaataatgaaaaagaggttatcaatacagatcctacagacattaaaagataataaatgatattaccaaaaacaactttataccaccaaatatgaaaactttgatgaaatacracctttccttgaaaaatacgtccttcaaaaattgaggcaatgaaacagaaaatatgagccaccctacagctattttagaaaatgaatttgttatcaaaaccctttctataagaactccaggttcagatggtttcactggtaaattctaaaccaatcttatataaactttatttctgaaaatagagaagaggagatactttccaactcattagataaggtcattccaaagtctggcaaagattacaaaagaaaaaaagaaattgcagaccaataccttttatgaaaatggatgcaaatatacttaacaaaattagcaaattagacctggcaattattactaaatagggctaaccccagtattgcaaggctggtttaatatttgagaatcaatgtaatccatcccattaatagaataaaaattgaaactacatgatcattttaataga

SEQ ID NO: 562523 - DNA, 549 bp, Homo sapiens
  misc_feature 541, 542, 543, 544, 545, 546, 547, 548, 549: n = A,T,C or G
cttccagtttaatggaattgttgtgtctcctggtggcagcattcctccctctggagctaagacctctaggccagcagaacataatgttgtgggaacaggaagcaaatttttgctagtggatcactaggggtgatggtgagtggcgccacttccacttccgccccttgattcctgaacctgtgcatcttggctatgggagaaacggtaccrtatattggacattgatttagagcatgcacagctttctggagaactttgccccagccctgcaaagtattgttgcttagttggcattgtaattgtgacttcaaaaggccattccaccgttctatcaatccagctgcgttaggatgatggggaacatggtaagaccagtgaattccatgagcatgagcacactgccacacttctttagcagaaagtgagtgcctcggtcagaagaaattctgtgtggaataccatgatggtggataaggcatgctgtgagtccatggatggtagtcttggcagaagcattgcttgcaggataggaaaacccatnnnnnnnnn

SEQ ID NO: 562524 - DNA, 538 bp, Homo sapiens
tacagtcccaatatataaattcactagcagactttctaagatagattaaatctggataacaaagcattcctgcattcaatatgaacttaaaaattgtaagcaacacaartctgttgctagttttggcttctcctagcaatatgtttaactcagttatgtcacaaggtctaggagcagaatgaaatccatcaaatgtatttgttattttgcttgtcttgtgaagaatatttaaaccaagatctgtggttggggaaaggtaaggaggaggaggagggaggaggatggggaaagggagtgaattctggtaatcattctcaaaataactgaggacagagctgacagtataaagtttcaaggatattagtggagaatatatacagtgggtcctttccaaaaactcaaacattcaactttattttatttttgagatggaatctcgctctgtcacccaggctggagtgcgatggtgcggtcttggcttattgcaacctctgccttccgggttcaagcagttctcctgcctcagcctcccaagtag

SEQ ID NO: 562525 - DNA, 538 bp, Homo sapiens
tacagtcccaatatataaattcactagcagactttctaagatagattaaatctggataacaaagcattcctgcattcaatatgaacttaaaaattgtaagcaacacaaatctgttgctagttttggcttctcctagcaatatgtttaactcagttatgtcacaaggtctaggagcagaatgaaatccatcaaatgtatttgttattttgcttgtcttgtgaagaatatttaaaccaagatctgtggttggggaawggtaaggaggaggaggagggaggaggatggggaaagggagtgaattctggtaatcattctcaaaataactgaggacagagctgacagtataaagtttcaaggatattagtggagaatatatacagtgggtcctttccaaaaactcaaacattcaactttattttatttttgagatggaatctcgctctgtcacccaggctggagtgcgatggtgcggtcttggcttattgcaacctctgccttccgggttcaagcagttctcctgcctcagcctcccaagtag

SEQ ID NO: 562526 - DNA, 514 bp, Homo sapiens
acagacactcaggcctacctgagggcggaggttgggaggagagagaagatcaggaaaaataactaatggctactaggcttaataactaggtgatgaaataatatgtacaacaaacccccatgacacaaatttagctatgtaacaagcctgcacatatacccctgaacttaaataaaagttataaaaatagaaaaaacctatttttgttctttctcttttctttcctttccttctttccttccttcctttcttcctaatgaaaaatggcatagaaagtctccagaatgctagaatcctacactggaaaacacaataaaagttwggaaatgtaatcaaaatgactagagttggttcctaaaacagggaaatttgctttcacataatcacctttggggagtgttttttgttttgttcaaaatctacaaactacaaatgaaaaatcttacagagtaaatatgttcaccaatagaattcctgatgcttcataaatattcaaagagtattgcatttgatg

SEQ ID NO: 562527 - DNA, 514 bp, Homo sapiens
acagacactcaggcctacctgagggcggaggttgggaggagagagaagatcaggaaaaataactaatggctactaggcttaataactaggtgatgaaataatatgtacaacaaacccccatgacacaaatttagctatgtaacaagcctgcacatatacccctgaacttaaataaaagttataaaaatagaaaaaacctatttttgttctttctcttttctttcctttccttctttccttccttcctttcttcctaatgaaaaatggcatagaaagtctccagaatgctagaatcctacactggaaaacacaataaaagttaggaaatgtaatcaaaatgactagagttggttcctaaaacagggaaatttgctttcacataatcacctttggggagtgttttttgttttgttcaaaatctacaaactacaaatgwaaaatcttacagagtaaatatgttcaccaatagaattcctgatgcttcataaatattcaaagagtattgcatttgatg

SEQ ID NO: 562528 - DNA, 544 bp, Homo sapiens
aatttaatagaagcgatggtagtatgactgagagagaccactgtgaaagcaaagactgtttaggaggagacggaaaggtggttttgcattcaaaatttctttctgcttccaggggaagaaagcgtggcatggttggtccagagaatgccatgcaggcaaagacttccaccctattcactgtgcccttctccttctttccatggggctggaggtctcactggaaacctcccacctactcattcccacacaaaagatgagagtcagatgatgatagaaaaaggaagaaagagatggaagaaggataagacagatatttactgaatgctcaatacaggcctggcaaatcctctgttcttgactactctaagatttttatttcctctatttaaaaaaaatagggcacttgtatacatatttatgttttttaaaaaatctacaaatataacataggaaacaagttaatactagggagagagttgggggaaagagaacagggccaaattatttcctgcrggctttggaagattggttagtaagaatataa

SEQ ID NO: 562529 - DNA, 345 bp, Homo sapiens
aagacaatgtaccagactattaattctagcactttctataatagcaaaagattaaaaacagcctaaatatctatctgtaggggaatgataaaataaattagtacctcatacaacagaatactacacaacatttaagatgagataacgagttgttctcacgtagagtgattgacaagtcatattagaaagaatgggaaaagaggccaggcatggccgctcacacatgtaatcccagcactttgtgaggccaaggtgggcagatcacttgaggtcaggtgttcaagaycagcctagccaagatggtgaaacctcgtctctactaaaaatagaaaaattagccaggtg

SEQ ID NO: 562530 - DNA, 600 bp, Homo sapiens
aagcaccgcctcccaggttcaagcgattctcttacctcagcctccctagtagctgggattacaggtrtgtgccaccagacccggctaatttttgtatttttggtagagatggggtttctccatgctggccaggctggtcttgaactcccgacctcaggtgttccgcccgccttggcctcccagagtgctgggattacaggcgtgagctactgcacctggctggttttttttttttttctattttcattactaagactaaacaatagttatgtgactgaatacagctgatcattttaccaactcctttcagcaaattcattttgtcattttaattaagtacaaatttaagaagtgaataaatatagatactatagcacatatatttcccaaaacataatatgtgtgtgtgtgtgtgtgtgtctgtgtgcatttgggaaataaaagagtattatattttactcaaacaacatcaaacatgcggtcaggtaagtttgatgaagaaggtaatatttcagcctaagaatgaaaattctgtaagacaatgtgttactttatagtatcagttatgtgacccttccacattgatattttgggtgcaat

SEQ ID NO: 562531 - DNA, 600 bp, Homo sapiens
aagcaccgcctcccaggttcaagcgattctcttacctcagcctccctagtagctgggattacaggtaygtgccaccagacccggctaatttttgtatttttggtagagatggggtttctccatgctggccaggctggtcttgaactcccgacctcaggtgttccgcccgccttggcctcccagagtgctgggattacaggcgtgagctactgcacctggctggttttttttttttttctattttcattactaagactaaacaatagttatgtgactgaatacagctgatcattttaccaactcctttcagcaaattcattttgtcattttaattaagtacaaatttaagaagtgaataaatatagatactatagcacatatatttcccaaaacataatatgtgtgtgtgtgtgtgtgtgtctgtgtgcatttgggaaataaaagagtattatattttactcaaacaacatcaaacatgcggtcaggtaagtttgatgaagaaggtaatatttcagcctaagaatgaaaattctgtaagacaatgtgttactttatagtatcagttatgtgacccttccacattgatattttgggtgcaat

SEQ ID NO: 562532 - DNA, 600 bp, Homo sapiens
aagcaccgcctcccaggttcaagcgattctcttacctcagcctccctagtagctgggattacaggtatgtgccaccagacccggctaatttttgtatttttggtagagatggggtttcwccatgctggccaggctggtcttgaactcccgacctcaggtgttccgcccgccttggcctcccagagtgctgggattacaggcgtgagctactgcacctggctggttttttttttttttctattttcattactaagactaaacaatagttatgtgactgaatacagctgatcattttaccaactcctttcagcaaattcattttgtcattttaattaagtacaaatttaagaagtgaataaatatagatactatagcacatatatttcccaaaacataatatgtgtgtgtgtgtgtgtgtgtctgtgtgcatttgggaaataaaagagtattatattttactcaaacaacatcaaacatgcggtcaggtaagtttgatgaagaaggtaatatttcagcctaagaatgaaaattctgtaagacaatgtgttactttatagtatcagttatgtgacccttccacattgatattttgggtgcaat

SEQ ID NO: 562533 - DNA, 600 bp, Homo sapiens
aagcaccgcctcccaggttcaagcgattctcttacctcagcctccctagtagctgggattacaggtatgtgccaccagacccggctaatttttgtatttttggtagagatggggtttctccatgctggccaggctggtctygaactcccgacctcaggtgttccgcccgccttggcctcccagagtgctgggattacaggcgtgagctactgcacctggctggttttttttttttttctattttcattactaagactaaacaatagttatgtgactgaatacagctgatcattttaccaactcctttcagcaaattcattttgtcattttaattaagtacaaatttaagaagtgaataaatatagatactatagcacatatatttcccaaaacataatatgtgtgtgtgtgtgtgtgtgtctgtgtgcatttgggaaataaaagagtattatattttactcaaacaacatcaaacatgcggtcaggtaagtttgatgaagaaggtaatatttcagcctaagaatgaaaattctgtaagacaatgtgttactttatagtatcagttatgtgacccttccacattgatattttgggtgcaat

SEQ ID NO: 562534 - DNA, 474 bp, Homo sapiens
attgctataaatacctgaaactgggtaatttatttaaaaaagaggtttaattgcctcacagttctgcaggctgtgcaggaggcatagtggtttctggggaagcctcaggaaacctttactcatggcagaaggcaaagtgggagcaggcatctttacagggggccaggacagggagaagagmgagaaggggaggctacatacttttcaatcaccagatctcttggtaactccctcttgccacgtcaacaccaagggggatgatgctaaaccatcagaaggtgcccccatgatccaatcaccacccaccaggccccacctccaaaactgtggattacagttgaacacgaaatttgagtggggatacagagccaaaccatattacatgatacagattttttccattacttcactttcaacttatctatcctgttatgtttgcagtgagtttcatgtaggcagcatattgttgattcg

SEQ ID NO: 562535 - DNA, 586 bp, Homo sapiens
ttctttgatgcttttggtgttgatgccgttgcttgccttgtaccatttgtgtttcttgagtgctgtctacttcatgtccaagtctaggatatacgaggcaataaatacctacctacatacatacattcacatgaaacttaccaccatgtacttccttgggactcaaagtccctaactgctctgccttcctttctccacatttcaaagtcttctatttgttttgcaaataatttccagggtttttgtttatttagtgagaggaataggaaaaattaaatctattatattggaggctatttttaaaaagcaagtactgaacacctttttttcttgtcggttttaagttactaaaggagtatgaatccctttaccaaattgttttgatggtaaaatctaaaaatcattttggtcatratacattaatcaaaatagatgcaaatgcaataattgcaagtgagaaattcacattaatttatttatatcaataatgtattcatattattttgtcttgaaatggcgataattttagtaatattttaatatttgatatttaacctgaaaattagaaataaaaataagtccgacc

SEQ ID NO: 562536 - DNA, 543 bp, Homo sapiens
taaaatgattaaaaagtctctcctgaattgatttatgcatatacatcactcattacttagtagatgttcattcatctcaatttgccctggagtaatgaaaactgctaactaaaaatattatcaattgaactatttgcgaattacacaaaatatttgcatcagattcctttcaactggtgttgaattttttaaaaatcctgtataaatatataaggctagttggccatataaatgcaaagtgttacagacactttggaaggaagtttcttacaaaactaaacatatgtataccatatatacaatccagcaatcttcctcctttttatttaccctacaacattgaaaatgtatgtatacacaaaaaaamtacacacagatgtttatagcagctttattcataattcccaaaacttggaaacaactgagatgaccttcaggaggtgaatggacaaatagtggaatgttgttcagggctgaaaaggaatgagctatcaagccatgaaagatggaggaaacttaaatgcctattataagtaaaagtaa

SEQ ID NO: 562537 - DNA, 433 bp, Homo sapiens
tcatcttttatgggacaagctcttcctggacaactttaatttcaaacaactatttctaaaatgaaattttagacagaatcattacattaagaaggccctcagatttcatctatttagatccattttaaaaaatagaggatactgagtctcccagaacttaagtgatattttttcaaggtcataagcctagtcaatgacagatttgtgacaagaagctcggctttctgacaatagtgtttatacccccttcctgctcaaaatggaataatctgcctttattctgttgttactatatattactaaaagacctcttagatctttgttgacattaaatgggctactaaccagttattttaaaagaatctttccaaaagtcaygtttttattcttatttacaattttatttgaaattctaacagtgaatgtttttaaa

SEQ ID NO: 562538 - DNA, 551 bp, Homo sapiens
gcaacagaacatgtatatttcccttttttgtattaattaggaatctcctttaattagtttattttttccataggttatttcataataattatgactcaattttatggacacagaaaattatttataatggaagattaagccttgtgatgacattagatcccttccaccatggagggaacagtaatttgtcctgtgggatactgatttgcctttcctgttggcaatgtttctgccaaaactaccacctatgagctgatacaaaattatcttcacctcttacaattctaacaacattgcctccaaamaacaacaaaaaaacacttattttataatgaaagaggaggtgtatcaggcttacccctcacagatggtattggttttagtgcatattgcatcacccaaaaataattggccttatagaagagtggattggctcactgaaggccaatttctatatcaataatcgatagctgccgaacaagtcactcacaaaattttaattaaaacaattaattttctcataattcagcacgttggataggcagttctaa

SEQ ID NO: 562539 - DNA, 568 bp, Homo sapiens
gatgttgagtgagccaatcttcagtatccactagacactgaagactgcaaaacagaattttatataaggctgaaattcatcagatatgtactggtacagccatactaattgttggaaagttgaatactttcattccatatggtaagtaaaccctgcctcagaactcttaaatgccccattttcgccctgtccattctgtcttctcacttggaatcctttaaatttctcaattatccagcaatgtaaggactaaattaatcctggcacagagctatgggctggcatctgttgtttgttggtgccagatatggtttggctctgtgtccccaagcaaatctcatcttgaattgtacttccataattcccacatgttgtgggagggacccagtgggagataattgaatcatggggatggtttcccccacactgctcttgtggtagtgaataaatctcacattaggaaaaacccgttttgcttggctctcattctctttcttgccgccgccatgtgagacattcctttctccttctgccataattgtgaggsctccccagccactggaactgt

SEQ ID NO: 562540 - DNA, 618 bp, Homo sapiens
tcacccactactgaaaaccaaagattgctacagataatgatacacatttctttgctttcacatcatataattagaaaaattagaaactagataacattttgatttgatgtttctaactgtgtgcccctaccacatgctacaagagggtgagaaatgtgatacaggcaggaaaaagcggaagaccaaagcttcatgttgcaaagaatgtatcatgttcttggcctatgaaacactgtacttttggatggactaaatccctgaagatgtcctgggttattcaaaatcaaaaagtttttcttcccatttaaatataggtgtcttttcttcttcttgttcttcttcttcttcttcttcttcttcttcttcttcttcttcttcttcttcytcttcttcttcttcttcttcttcttcttcttcttcttattattattattattatttcgtggttaggagatgctactgtttgtcaataacacttttgaatattttaaaaatgggatttgcatatgtatgaatttaagagcatataggaattgtaatttataccttgtggacaactttattttaaattatttatttatttatttatttattggagacagagtcttactctgttac

SEQ ID NO: 562541 - DNA, 547 bp, Homo sapiens
catccttgccaaactttaaccaaagcagaactggtcaactttgcctcttctatataaaagttgaattgtgctattcctgacacatacaaaactgtctacttggcagggaacaggttgtagcccttagttaaaccacagggcacaattgaaaggggtgggatgtgcaccacatagagagggtaaacatttttagccttaatatatcaggctttgacaatttatttttctgttatcccaagaagccacctactggtagcattcaccacattcggtttcttagaaaccttctgctccacataatttttatttcagcctatattcttttctattgtgcattgaattttataatatggtgacttgtaatgacactgaagagaattggaaagtcataataatgagcattacggttagttaataggtcagagactagaagagactgggtaataaaaattatttgggcattatggtacactgwtttttcttcagaattttcttaaaaacatagctaacatttattgagccctaaatatgtcccaggagttgcagt

SEQ ID NO: 562542 - DNA, 620 bp, Homo sapiens
gggacatacttcaatgtaataaaagctatctaagacaaacccacagccaacataatattgaatggggaaaagttgaaagtattccctctgagaactggaaaaagacaaggatacccacttttaccactcctcttctacatagtactagaagtcctagagctatcagacaagaaaaagaaataaagagcatccaaatcagtaaagaaaaactcaaactgtcactgtttgttgatgatatgatcgtttacctcgaaaacgctaaagattcctccagaaagctcctagaactgataaaagaattcagcaaagttcctggatacaaagttaatgtacaaaaattagtagctcttytatacaccaacagcaaccaagtggagaataaaataaagaacttttacagtagttgcaaaaaaaaaaaaaaatacttaggaatatacctagccaaggaggtgaaagacgtctacaaggaaaactacaaaacactgttggaataagtaatagatgacatataaaaaatggaaagacatcccatgcttatggatgggtagaatcaatattgtgaaaatgaccatactgccaaaagcaatctacaaattcaatgcaattcctatcaaaatacc

SEQ ID NO: 562543 - DNA, 570 bp, Homo sapiens
gagaaactgtcttatgtgtttatccatctcacagagttaaatgtttcttttcattcagcagtttggaaacacattttggtacaatctgtgaagggatatttgggggtgcactgaggcctatggtgaaaaagagaatatcttcagataaaaactagaaagcagctttctgagaaactgctccatgatgtgtgctttcatgtcatggagttaaacctttatttagattcagcattttggaaacactgtttttgtccattctatgaatggacacttagcagctcattgatgtcaatggcaagaaagtgaatatcaaaggataaaaactctaaggaagctatctgacaaaccacttggttatgtgtgtattcatcttgcacagttaaacctttctttatatttagacctttagaaacactgtttttktagattctgcaaagggacatttgggagctcattgaggccaaaggtgaaaaagcatgcacccgggataaaaactagaaggaacctatatgtgaaaaagcttagttatgtgtgctttcatcacacagttaaatctttcatttcattcag

SEQ ID NO: 562544 - DNA, 623 bp, Homo sapiens
aagaaagatttaattctgtgagatgaatgcacacacaatgaaatagtttctcagaaagcttctttgtagtttttacctgaagatatttcttttttcaccataggcctcaatgcactcccacatatcccttcgaagattctaccaaaacagtgtttccaaactgctaaataaaaacaaaagtttaactctatgagatgaatgtgtacatcacaaagcagtttctcagacagctgtcttctcgtttttgtcctacgatattcactttgtcacctttgacctcaatgggttcccaaatgtccattcccagaatgracgaaaggattgtttccaaattgctgaatgaaaagaaagatttaactctttgacatgagggcacatatcactaagcagtttctcagaaatctactttctagtttttatctgaagatgtttactttttcactataggcctcaatgcactccaaaatatctcttcacagtttcaacaaaaacactgtatccaaagtgctgaagaaaaagtgaggtttaactttgcaagatcagtgcacacatcacaaagcagtttcaatgatagcttttttctagtttttatcctgggatattcacgttttcaccattggccg

SEQ ID NO: 562545 - DNA, 555 bp, Homo sapiens
  misc_feature 519, 520, 521, 522, 523, 524, 525, 526, 527, 528, 529, 530,531, 532, 533, 534, 535, 536, 537, 538, 539, 540, 541, 542,543, 544, 545, 546, 547, 548, 549, 550, 551, 552, 553, 554,555: n = A,T,C or G
ctgccttgtgatgtttgtattcatctcacagagctaaacctttttttgcttttagcagttttcaaacatggttgttgtacaatctgcaaagggaattttgggagctcattgaggccaatggtgaaaaagagaatatcccaggaaaaaaactagaaggaagctatttgagaaactgctttgtgatgtgtgcattcatcccacagagataaatctttaatttcattcaacagtttggaaacactgttttcacagtatctgtgaagggataactgggtgcrcattgaggcctatggtgaaaaaggaattatcttcagataaaaactacaaagaaactttctgagaaacagctttgtgatgtgttcattgacttcacagagttaaacatttctgtggaattcagccgtttgcaaacactgtttttgtccattttgcaaatggacatttgggagctcaccgagaccaaaggccaaaaaaacaaatgtcccaggataaaaactggaaaaaatctatctgagaaannnnnnnnnnnnnnnnnnnnnnnnnnnnnnnnnnnnn

SEQ ID NO: 562546 - DNA, 480 bp, Homo sapiens
tgccagtctttaatctcttaatcccatcatcttcataagctgaagatgtatgttgcctcaggaccctgtgatgattgtgttaactatayaaattgttcataaagcatgtgtgtttgaacaatatgaaatctgggcaccttaagaacaggataacagcaatttttagggaacaagggagataaacttaaagtctactgccagtgtgcagggcaggacagagccatatttctcttattactgaaaatgtataagagaaatgtcattgaattctttccagagtaagaaatattaataattaatagccttgtgaaaagaaagcattcccagaggggacttctaaaatggccactctcagtgtgtctgcattatccagttggcgataagggatgaaaacacttcctgacctcctgcagagaccgcaggcttgctaggagtaggaaattccagactggagaattcgagtcagacctcttatatgct

SEQ ID NO: 562547 - DNA, 573 bp, Homo sapiens
ggataacagcaatttttagggaacaagggagataaacttaaagtctactgccagtgtgcagggcaggacagagccatatttctcttattactgaaaatgtataagagaaatgtcattgaattctttccagagtaagaaatattaataattaatagccttgtgaaaagaaagcattcccagaggggacttctaaaatggccactctcagtgtgtctgcattatccagttggcgataagggatgaaaacacttcctgacctcctgcagagaccgcaggcttgctaggagtaggaaattccagactggagaattcgagtcagacctcttatatgctcttgaaacctgttaagatgtttatcatgacaatgggtgcatagcgggacatgaaacttcaatagtaattctagctttgtcctgaccttgtgatctctccttgattttctgccttgtgatctgtttttgcctttgaagcatgtgatttctgtgacycaaaacctattcgtaaactacctctagtttgaaaattgctaataaaaacttgctggttttacacctcaaggggcatcagggaacc

SEQ ID NO: 562548 - DNA, 544 bp, Homo sapiens
aaaggacatttgggagctcactgaggccaatggcaaaaaagtgaatatcccaggataaaagctagaagccagctatgtgagaaactggtttgtgatgtgtattttcatctcacggagttaaccccatctttgggttcatcaagttgcaaacactgtttttgtagaatccatgaagtgatatttgagagctcacttaagccaatggtaaaaaagaaaatatcccaaaataagaactagaagraaactatctgagaaactgctttatgaagttcatcttgaagaggtaaaccttacttttcattctgcagtttggtaacactgctttaccagaaaatgttagggcatatttcggagtgcatggacatctatggtgaaaaaggaaatattttcagataaaaactagaaattagctttctgagaaactgctttgtggtgtgtgcattcacctcacagagttaaaactttttttagattcagctgtttggaaacactgtttttgtccattctacaaagggaggtttgggagctcactgaggccaaagga

SEQ ID NO: 562549 - DNA, 544 bp, Homo sapiens
aaaggacatttgggagctcactgaggccaatggcaaaaaagtgaatatcccaggataaaagctagaagccagctatgtgagaaactggtttgtgatgtgtattttcatctcacggagttaaccccatctttgggttcatcaagttgcaaacactgtttttgtagaatccatgaagtgatatttgagagctcacttaagccaatggtaaaaaagaaaatatcccaaaataagaactagaagaaaactatctgagaaactgctttatgaagttcatcttgaagaggtaaaccttacttttcattctgcagtttggtaacactgctttaccagaaaatgttagggcatatttcggagtgcatggacatctatggtgaaaaaggaaatattttcagataaaaactagaaattagctttctgagaaactgctttgtggtgtgtgcattcacctcacagagttaaaactttttttagattcagctgtttggaaacactgtttttgtccattctacaaagrgaggtttgggagctcactgaggccaaagga

SEQ ID NO: 562550 - DNA, 607 bp, Homo sapiens
acatcacaaagaagtttctctttctagcttttatcttaagatatttcctttgtgaccatagtcctcaatgcrcagccaaatatccttccacagtttctacaaaaaacagtgtttccaaactgctgaatgaaaagaaagtttaactctgctagatttatgcacacatcacataggggtttctcagagagctttcttctagtttttatcctgggatatttcctttttcaccattgacctcaatgaggtcccaaatgtccattccaagaatagaaaaaatagtgttaccaaactgctaaatgcatagaaaggtttaactctctgaggtgtatgcacacatcccagtcagtttgtcattaagcttctttctagtttttatttgaagatattttcttttcgccataggcctaaatgcactacctcatatctcttcacagattctaagaaaacagtgtttccaaactgctgaatgaaaggaaagtgttaagtctgtgaaatgaatgcaaacatgacaaatcgttttctcagataacgtctttctgttttttatcctgggatttttgctttttcaccattggcctcagtgggctccccagtgtacgttcacaga

SEQ ID NO: 562551 - DNA, 605 bp, Homo sapiens
ctagtgtggaaaaggaaatatgttcagataaaaactaaaaagtatttttctgagaaactgctttgtgatgtgtacattcatctcacagagttaaatagttctttggattcatcagtttagaaacactgtttttgtataatctgtgaagggatatttgggagcacattgaggccaaaggtgaaaaagtgaatatcccaggataaaaactagaaggaaggtatctgagaaaccactgagtgatgtgtgcattcatcttgcattcatcttgcatcagcagtttggaaaacctgttttggtagtatctgtgaaatgatattttgacacacatttaggcctttagagaaaaaggaaatatcttcagataaaaaatagaaagaatctttcagagaaactgctttgtgatgtgtacattcatctcagagagttaaacaattctttggattcagcagtttggaaacattatttttgtccattctgtgaattgacattatggagcacattgaggccaatggtgaaaaagagaatatcccaggataaaaactagaaggaagctatctgagaaaccrcttggtgatgtgtgaattcatcttgcagagttaaacctt

SEQ ID NO: 562552 - DNA, 627 bp, Homo sapiens
tggtttattcatttgtctattgatgagcacttaggttgtttccaaatcttggctattgtgaatagtgctgcaataaacatgaaacagcagatatttcttcaatatattgattttcattctcttgagtatatacctagcagaaggattgctggatcatatggcagtcctatttttagttttttgaggaacctcaaaactgttctccacagagactatactaatttacattcccaccaacagtgtacaagggttccattttcttcacatttttgtcagcacttgttattgcctgtcttttgaataaaagccattttaactggagtgagatgatatctcattgcagttttgatttgcatttctctgatgatcaatgatgttgagcacctttttatatasctgtttgccatttgtatgtcttcttttgagaaatgtctattcagattttttgcccattttttaattgcattattatatttttttcctgtagagttgtttgagctccttatatattctggttattaatcctttgtcagataaatagtttgcaaatattttctcccattctgtaggttgtctcttcactttgttgattgtttattttgctgtgcagaagctttttaacttgat

SEQ ID NO: 562553 - DNA, 624 bp, Homo sapiens
cgtttcttttaattcagcaatttagaaacactgttttcacagtatctgtgaaggaatttctgggagcacttggagacctatgttgaaaagagaatatcttcagataaaaaaaagaaagaagttttctgataaactgctttgtgacgtgggcattcatctcactgtgttaaaactttctgttgattcagaagttcgcaaacactgtttttgtccattctgagaaaggacatttgggaattcattgatgccaatggtgaaaaaatgaatatcccaggaaaaaaactagaaagaacttatctcagaaactactttgtgatgcgttcattcacctagcagagataaacttttctttacatacagcagtctggaagctctgttttggcagaatccatgaacagatatttgggagtccattgaggcttatggtgaaaaaggaaatatcttcagataaaaactaaaaagaagctttctgagaaactgctttgtgatgtgtgcattcatctcacagactttaacctttctgtgtattcagtagtttgcaaacactgtttttttccattctgtgaatggacatttragagctctttgaggtcaatggcaaaaaagtgaatatcccagattaaa

SEQ ID NO: 562554 - DNA, 508 bp, Homo sapiens
ataattttgactaagtaaaataaactcaatcctctattagtgtactatttctcagattaaaaagtgrtctggatttctgtcatcttctattttatcagttgccatcagagttgtgaaaaattatattagagaatctttaggaaattggttgactacatttagcaaaattaccattactgtatatttccaacaattttacatatagttcatggtgaagatggtactctagatttgttggtagtcagatggtatataactggttgacttattcaatagtcaccatttcctaaagtttattccatggaactctggctttgtaggatatcaacagctgctgatttaaagttctgatttaaaggcttcgatgtgctgatgtacactatgacacacagaaggaatttaatgtgtaccatctcccaaacatatttgaccaatgagtttctcctgggacagttttgaggacttttactttaaaaacacactttggaaaattttggtctagaggtaa

SEQ ID NO: 562555 - DNA, 422 bp, Homo sapiens
atacctatatatacacctatatatacctatatatacacctatatatacctatatatatctatatatacacctatatatacacctatatatgcctatatacacacctatatatacctatatatacacctatatatacacctatatatacctatatatacctatatacacacatatacatatatatacctatatatatacatatacctatatatacatatacctatatatatacatatacctatatatatacacctatatatatatatatatataggtttcaccacatcccctttagtaaatttccatatggtctagcmaatcctttatcacatggcatcactcttatgtggtaactcaactgaaactaacaacttaatatttcgataggactattacaaaaaaattgtgctggaaataaaatg

SEQ ID NO: 562556 - DNA, 638 bp, Homo sapiens
gcccacttctcacagttctattaggcagtgtcccagcagggaccctgtgtgggggctctgaccccacatttcccatctgcgctgatctagcagaagttctccatgagagccccacccctgcagcaaacttctgcctgggcatccaggcatttacatacatgttccaaaatctaggttgaggttcccaaaccctgattcttgacttctgtgcagtcgcaggctcaacaccttgtggaagctgcccaggcttcaggctcgcaccctctgaagccatggcccaagctctacattggctcctttcagccayggctagagtggctaggacgcaggcaccaagtccctaggctgctcatacagggaccctgggcctagcccatgaaaccactttttcctcctaggcctctaggcctgtgatgggaggggctgctgtgaagacctctgacatgacctggagacattttcctcattgtcatggggattaacattcagctgctcattacttaggcaaatttctgcaactggcttgaatttctcctcagaaaacgggattttcttttctatcacattgtcaggctgcaaattttccaaacttttatgctctgcttcccttataaaactgaatgcctttaacagcaccc

SEQ ID NO: 562557 - DNA, 541 bp, Homo sapiens
gacaatcatgttagataatttgattgatcttttcatcagttgttttaaaataaattcctcattttttcaagagaagaagcattccattctcagacccagcttcctccaacacccagagaatctaaccatgttgggttccagagcctatcttttcagttccatccgtaaagaaagtcaggcacacagtgcagggtgggggtgtccggagatccagtgccggaggggaactgggatttcagagcactcgctgcagccatccctttcccaagtctgcacrtcctcttgcccttctagtgctgtttccccttcctgtcacactgctgaggctctccgggagaagtggcaatgaagggagcctgggttgctgacaattactctcaggctgtgtccctgcaaatgcagagcactgggtaggctgcagggggagccctggtgctgacctggtgggtatctgccaggaccccaggtgacttatccaggtaaggtcaagcagctctacagagctttctttccaagcactggttgagacaattataattat

SEQ ID NO: 562558 - DNA, 589 bp, Homo sapiens
tgtgaaaatgatcttactaccaaaagcaatctacagagtcartgcaatccctatctaaataccaataacattctcaacagaaattaaaaaatcctaaaatttacatgcacccacaaaagaccctatagccaaagcaatcctgaatgaaaagaacaaagttggaggcatcacactgccaggtttcaaaagatactataaaggtatagtaaccaatacagcatgttacttgtgtaaaatacagattcatataccaatggaacaaaatagagaacctagaaataaattcgtgtatgtatagcctactgatccttgacaaaggcaccaagaacatttattgaggaagagacagtcttttcaataaatggtgctgggaaaattggatatccacatgcataaaaatgaaacccaaacctgtatctctcaccatatataaaaatcaactcaaaatgggttaatgacttaaatataagacctgaagctatgaaactcctgaaagaaaacataggagaaatgcttcagaacattggtctgggcaaagattttatggagaagacctcaaaggcacaggcaacaaaagcaaaaatagaca

SEQ ID NO: 562559 - DNA, 403 bp, Homo sapiens
caccatctaatcagctgccagcacagctagaataaagcaggcagaagttggaasgacttgacttgctaagtcttcaggccttcatttttctcccatgctgggtgcttcctgcccttgaacatcagatttcaagttcttcagcttttggactcttggacttacaccagtggttttccagggtcccttgggcctttggccacagactgaaggctgcactgtcggcttccctacttttgaggttttgggacaaggactgatccacctttggcttccttgctcttcaacttgtagacggcgtatcatgggactttaccttttgatcatgtgagtcaattttcctaataaactcccctttttatatacatatatcctattagttctgtccctttagagaatcctgact

SEQ ID NO: 562560 - DNA, 613 bp, Homo sapiens
tcttggtcatgaaatctttgcctaagccaatgtctagaagggtttttccaatgtcatctcctaaaatttttatagtttcaggtctttgatttaagcccttaatccaccttgagttgatttttgtataaggtgagagatgaggatgcagtttcattctcctacatgtagctagccaattatcccagcaycatttgttgaaaagggtgtcctttccccacttatgtttgtgtttgctttgtcgaagatcagttgactgtaagcatttgggtttatttctggattctctattctgttccattggtctatgtgcctatttttataccagtaccatgctgttttggtgactatggccttatagtatagcttgaaatcaggtagtgtgatgcctccaaatttgttctttttacttagtcttgctttggctgtgagggctttttttgtgggggtggggtggttccgtatgaagtttagaattatttttctaattctatgaagaatgatggtggtattttgatgggaattgtgttgaatttgtagattgcttttggccgtatgggcattttcacaatattaattctgcccatccatgagcatgtgtttccatttgtttgtg

SEQ ID NO: 562561 - DNA, 613 bp, Homo sapiens
tcttggtcatgaaatctttgcctaagccaatgtctagaagggtttttccaatgtcatctcctaaaatttttatagtttcaggtctttgatttaagcccttaatccaccttgagttgatttttgtataaggtgagagatgaggatgcagtttcattctcctacatgtagctagccaattatcccagcaccatttgttgaaaagggtgtcctttccccacttatgtttgtgtttgctttgtcgaagatcagttgactgtaagcatttgggtttatttctggattctctattctgttccattggtctatgtgcctatttttataccagtaccatgctgttttggtgactatggccttatagtatagcttgaaatcaggtagtgtgatgcctccaaatttgttctttttacttagtcttgctttggctgtgagggctttttttgtgggggtggggtggttccgtatgaagtttagaattatttttctaattctatgaagaatgatggtggtattttgatgggaattgtgttgaatttgtagattgcttttggccgtatgggcattttcacaatattaattctgcccwtccatgagcatgtgtttccatttgtttgtg

SEQ ID NO: 562562 - DNA, 625 bp, Homo sapiens
ttattgacttgcatatgttaaaccatcctgcatccctggcatgaaacccacttgatcatggtgaattatctttttgacatgttgttgaattcagttagctagtatttggttaaaaattttagcatctatgttyatcagggatattggtctgtagttttgttttttggttatgtccttttttggttttggtagaggaacagtcaggacagtaaacagacaacccacagagtgggagaaaatcttcacaatctgcacatctgagaaaggactaatatctagaaactacaacaaactcaaacatatcagcaagaaaaaaatcctatcaaaaagaggcctaaggacatgaatagacaattctcaaaagaagatatacaaatggccaagaaacatataaacaatgctcaacattgctaatgatcagggaaatgcaaatcaaaaccacaatgtgataccaccttactcctgcaagaatggccataatcaaaaaaaaaaaaaaaaacaatagatgttggcgtgaatatggtcatcagggaacacttctacactgctggcagtaatgtaaactagtacagccactatggaaaactatatggagattccttaaagaactaaaagtagaactacc

SEQ ID NO: 562563 - DNA, 625 bp, Homo sapiens
ttattgacttgcatatgttaaaccatcctgcatccctggcatgaaacccacttgatcatggtgaattatctttttgacatgttgttgaattcagttagctagtatttggttaaaaattttagcatctatgttcatcagggatattggtctgtagttttgttttttggttatgtccttttttggttttggtagaggaacagtcaggacagtaaacagacaacccacagagtgggagaaaatcttcacaatctgcacatctgagaaaggactaatatctagaaactacaacaaactcaaacatrtcagcaagaaaaaaatcctatcaaaaagaggcctaaggacatgaatagacaattctcaaaagaagatatacaaatggccaagaaacatataaacaatgctcaacattgctaatgatcagggaaatgcaaatcaaaaccacaatgtgataccaccttactcctgcaagaatggccataatcaaaaaaaaaaaaaaaaacaatagatgttggcgtgaatatggtcatcagggaacacttctacactgctggcagtaatgtaaactagtacagccactatggaaaactatatggagattccttaaagaactaaaagtagaactacc

SEQ ID NO: 562564 - DNA, 526 bp, Homo sapiens
ctatcttacctataatgataaaacctgcwtatattaaaacatagggcatattgggagggccaagtgcattaacatttgtaaagcacacagatcaatgtctgattcatagttagtattataaaagaattagttattatcaatggtagtgataacacattgggtatctgagttttcctgcaatgtcttacttatagtaagttctcaataaatatttgactaacgactgcagttcttcaaataactgctcttctctctaagaagtcttgatccatgaagagtaagggtaagttcataaatggatttgaaaatagaataatcaagaagaaaacaagacagtaactgaaggaaaacactggcattgataatttgaagggaagtttgagagagagcagtggagtcaaataaagctcaaatcagaaaagcagactggtgtaaagaaaggagatcagagctaacaggatataataatcgaaggtgatgtggaacatcagagaggtacttaaaagaagaaactcaagggctaggg

SEQ ID NO: 562565 - DNA, 526 bp, Homo sapiens
ctatcttacctataatgataaaacctgcatatattaaaacatagggcatattgggagggccaagtgcattaacatttgtaaagcacacagatcaatgtctgattcatagttagtattataaaagaattagttattatcaatggtagtgataacacattgggtatctgagttttcctgcaatgtcttacttatartaagttctcaataaatatttgactaacgactgcagttcttcaaataactgctcttctctctaagaagtcttgatccatgaagagtaagggtaagttcataaatggatttgaaaatagaataatcaagaagaaaacaagacagtaactgaaggaaaacactggcattgataatttgaagggaagtttgagagagagcagtggagtcaaataaagctcaaatcagaaaagcagactggtgtaaagaaaggagatcagagctaacaggatataataatcgaaggtgatgtggaacatcagagaggtacttaaaagaagaaactcaagggctaggg

SEQ ID NO: 562566 - DNA, 533 bp, Homo sapiens
cttacctgggcatgataaattcgctatcatgtctcacctggattatcactgtaatattcttctaactggtctgcttctacctttgtcctcctgcattctatgatagcagccagagtaaagttgttaaagcttaagcaatatatcaaaaaactctcttgtgcttaaaaccctgcaatggcttcccatttcatgcagagtgtaagccaaggtctttgcagtagcccataaggcccttcatgaacttgtcccatgatatctttgacctcctcttactctatttattctagcagtatgtccacaccagccataatggcctcctgccattcatcaaacatgtcagatttgctattgccttagggcccttgccatgtcttttccttctgcttcaaatgsttttcccacacatacttgcatttttaatttttcaaccccttcaagtctgagtaataattaccttctcaatgaggcttattctaaccaccactaacatcccgtctaagtattcactatttttgtacttaacatcttattta

SEQ ID NO: 562567 - DNA, 583 bp, Homo sapiens
aagttctttcctcattcattgcttgtttttgctgattttgttgaaggccagatagttgtaggtgcgtggcataatttctgcactgtcttttctgtttcattagtcttcgtgtctctttttgtgccagtatcatgctgttttggttactatagccttgtagtgtagtttgaagtagggttatgtggtaccaccagcttagaagtgttcttttggttctttttgcttagaagtgccttcgctatttgggctcttttttagcttcatatgaattttaaaatagttttttctaaatctctgaagaacatcattggtggtttgataggaattgcattcagtctgtaaattgccttgggcagtatggacatttaaacaatagtgattcttcctatccacgagcatggaatgtttctccatttgtttgtgtcatcactgatttcttttagcagtgttttgtaattytcattgccgttttttacctccttggttagctgtattcctaggtattttattcttcttgaggctattttaagtgggattgtgttcttcatttggttctcagcttggatgttgctgatgtatagga

SEQ ID NO: 562568 - DNA, 434 bp, Homo sapiens
cacttgaacctgggaggtggaggttgcrgtgagcccagatcacaccactgcactccagcctgggtgacagagtgagactctgtctcaaaaaaaaaaagaagaaaaaaaaaatgccgggcgcggtctcacacctataatccttgcactttgggaagcctacgtgggtggactgcctgaactcaggagttccagaccagcctggtcaacttggtgaaacccaatctctactaaaaatacaaaaaattagccgggcgtggtagctcttggctatagtcctagctacttgggaggctgaggcagaggagaaccacttgaacccaggaggcagagattgcagtgagcagggatcctgccactgcattccagcctggacgacaaagccagactgtctcaaaaacaaaaacaaaaaaacatgatgcagttaaaaagtgacc

SEQ ID NO: 562569 - DNA, 434 bp, Homo sapiens
cacttgaacctgggaggtggaggttgcagtgagcccagatcacaccactgcactccagcctgggtgacagagtgagactctgtctcaaaaaaaaaaagaagaaaaaaaaaatgccgggcgcggtctcacacctataatccttgcactttgggaagcctacgtgggtggactgcctgaactcaggagttccagaccagcctggtcaacttggtgaaacccaatctctactaaaaatacaaaaaattagccgggcgtggtagctcttggctatagtcctagctacttgggaggctgaggcagaggagaaycacttgaacccaggaggcagagattgcagtgagcagggatcctgccactgcattccagcctggacgacaaagccagactgtctcaaaaacaaaaacaaaaaaacatgatgcagttaaaaagtgacc

SEQ ID NO: 562570 - DNA, 558 bp, Homo sapiens
caaatttaattttaatttcaattttaaaaattgtcctacaataaaatggcagtcactgacttctaagccaagaggatgcaaaaggagagactttaagtctaatatgtaacattattaagaaaaattggaatgagtataaataaaacggggacagggcagaaaagcacaggagattaaagttgtagacagatgtgcttgttagcagaaaatccacttgtttattgagagacagcctcaattagctgatggtggaagtagataatgtgtttattgtttccactttgaggaatggttttcttacgcatttccaacgaaaataatggccccagtggtgttgactttgtctctggggcagctcctgccacctgtaccgttccctataatctccactcccggatctmaggcttgccaatcattcctccagcaccattagaaagaggcctggacttctgggttaagagacttaggttttggaaaggctggtgcaatcagatcagaaaatgactacacttaaaaacaaacaaaaaatatagcttgcaaaggagtaagcaaggctgt

SEQ ID NO: 562571 - DNA, 476 bp, Homo sapiens
gttttaatagacgttgtactatttgcagcaacagtatataagcatttcctttttaccacatctgcaccaacaattttttttttttttttacttttaatagtggccattctggctggagtaaggtggtatctcactgtggtttaaattttaatttccctaatgattggtgatgttgagcattttttcatatgtttattgcacatttatatattttattttgagaaatgcctattcatgtcatttgcccacttttaagtgacattatttgatttttattttcacttatttgagttccttgaagattcttgatataagttctttatcagattcatgtcttgtaaatattccttcccattctttargttgtcttttaaaagtgattgttatttcttttgctgtgcagtagtttttttttttcaattttatttagtccaatttatttatttttgtatttgttgcatttgcttttggggtct

SEQ ID NO: 562572 - DNA, 473 bp, Homo sapiens
tctaatcaataccacccctgaactcccccaaactttcaaatctccattgtctgtcattccacactatgtcctacacatttatttcattttacttttctgagacggagtctcgctctctttcccaggctggagtgcagtggcgtgatcttggctccggctcactgcaaactccgcctctcgggttcaagcaattctcctgtctcagcctcctgagtagctgggactacaggtgcatgccaccatgcccgactaatttttgtatttttattagagatggggtttcaccatattggtcaggttggtctcgaactcctgacatcaggtgatgcatctgcctcatcctcccaaagtgcggggattacaggcrtgagccaccgtgcccagtctgtacacattatttagttctcatttataagtaagagcatgtggcatttgcctttctatgtctgagctgtttaacttaagataatggc

SEQ ID NO: 562573 - DNA, 541 bp, Homo sapiens
gctgaattcaaggaagtactagaaaacaaaacttcagaattatccaagtcacttgtgacacagcagtttcctaggtcagccctaactaaagtaacaaaccatccaggactgaggagtytcccaggacacagggctctttcagtgctaaaactgaggcagtcccaggcaaaatggaatggttggtcaccctaatactaacttcactagccagattcaacagcctaaggcaaaagtccaaagcaaaattcagttgttctgaggagctaaggaaggcccattatattactggctggtctagagcagcagattatatactaaggaaaaaagggggaaagaggaaaggtaaaaccaaagaaatagagtgggattagagtggggagagggcattaggaagagtaagacaaaaagtgatggtgatgagaaggggctgaccagtcactgaccatacatacactgccctggattgagcaccactgtgcaccagtgccaagcaggctcacacaacagggatgtccagagggtgaactctgtattcaacata

SEQ ID NO: 562574 - DNA, 568 bp, Homo sapiens
atgtacaataacaaatttcattcatgagagacatttctgatatatcatcccaacaacagtgaatgaaattccccattaccttatggcttcggtaacagatattttaaaactttgaaattgttgccaatttaattaaaaatgcattttcttactagtgatgtacaaatatttagtacatactttatattagggcttagggcaattgtgtatggtggcagatccaagacttggccaacacatactcttttatttaaattatctctcttgaaacttggtttatttcccctattaggtaattcaactaatacaactttttcttattgaatgatgaaagaattttacattttaattatattaatcctttattttcatctaattacaatattttcctagtttactatctttgtttttgatgcttttaatcaccaagtttttaaagtcttacataataaatgtatgaacattttatcattttctgtttggacttggtcgtagattttcacacctaacatcagayaactatccacctttgtttctaattattttatgttcttgttttatgacttta

SEQ ID NO: 562575 - DNA, 410 bp, Homo sapiens
atttaaatactaaataaggaagacataatataagaaggtatggaagagtataatgagaaatgaatctggaaagattgaccattaaaagggaaaggatgactgaatcaagaaagaaacaatgcaatgtattgggaatgcttatttaactggttaaattacatgtgaaagatgtggctatcttgaccaaagaatttccctaggacaaaatatggaataacattttcttcttttttatttgtcatatgtacstctttggttctaagacatggcaatatatttattaataaccaataacgtcaagctgaatcattttatttaatctgaggatgactcaccatacagaagtagaaaaagcgtcaccttcagagtctgaaatcctggcctccagccttgagaccatgcttccaatt

SEQ ID NO: 562576 - DNA, 410 bp, Homo sapiens
atttaaatactaaataaggaagacataatataagaaggtatggaagagtataatgagaaatgaatctggaaagattgaccattaaaagggaaaggatgactgaatcaagaaagaaacaatgcaatgtattgggaatgcttatttaactggttaaattacatgtgaaagatgtggctatcttgaccaaagaatttccctaggacaaaatatggaataacattttcttcttttttatttgtcatatgtacctcttyggttctaagacatggcaatatatttattaataaccaataacgtcaagctgaatcattttatttaatctgaggatgactcaccatacagaagtagaaaaagcgtcaccttcagagtctgaaatcctggcctccagccttgagaccatgcttccaatt

SEQ ID NO: 562577 - DNA, 372 bp, Homo sapiens
agttttataaagtgtctatgctacaaatactatcagaagaagaacttatcatgcaaaaatggttgcatgtttattcttccttggagaattgttcttcaccaaaaaccctgttgcaagaagcagttaggtacagttaagagcttgttgtgcagaactcaggttacttcatatccctttcaagaagctgtggtctgcytcatcaaaatgctttctaacgactgtgaacagtagatttctccacacaacatcttaagaaaacttatacttacttggaaatttgctgtaagaggattgctggtgtggatttgctgaacggaaaccatttctgccttctagaaaagaaaagaaaataatgaagaaaatttgccttaa

SEQ ID NO: 562578 - DNA, 590 bp, Homo sapiens
taaaatattaaaatatctctgaatgatgagattgtgggtaattattatttctttctttagaatcttctgcaaatgttttaccatgcagaagagttgttttttacatcagaaagaaaaatacaagtgctatttttaaagatgtcttaggtcacactcagcaaaattgttttgataataaagtgatatctggttagtttgacagaaagcaaatgagggcattgcaagtcttcctttaaatgtgaaatacatacttcacttgttctttaaacccmagcaattttttttcttttagacacgaagtttaataggaatttgatttctccttgaggaactcaatcctttcagaatttaagcacacaccttacaaaatacattaggttaaaggaaaaagagaatgagaaagaaataagtaatatatgaactagagacacagcagcatatttcttaaagtcttttaatataaaattttattatgacagatttaatctagttatctagttacgaggcttggctaaaatcttttagaattaggtaaaatgatgaaattctacctaagagccatctttttaaaagattgctttctaaaagca

SEQ ID NO: 562579 - DNA, 585 bp, Homo sapiens
acttctgcaccaccgctgattcatcagtacctgctcaggattttcactcattcctcacgcacttaactaaattaaggaatgaaagtgcaagaaaactaagtggtttggaaaatacagcttggtgccactaaagaaaatatgtctaaatggcctacatgaggaggggggaggtagtttgggggaacaataataatcagtctgtttttttaaaatacatacatatagactatgtgagtagggtaactcagaagctaccctacttagcttgtgagttaagtagggtattatcacgtccactttatagaaatggaaaacgagagtcagacttgcccaagttcacccatttctaagtagcagaagcgagatttgaacccaaggcccaggtctctttccaatcccatcatcctcactagtcccacacttcaaatgagttaactaatcaaattcccattgcagagtgacatattcattattatttggagttgttcgaataatataagttcctcccccaaataatytgaaaagtcgttactctccatttgtaatttaatgggtagacatgcatttgagtatatataaatttag

SEQ ID NO: 562580 - DNA, 706 bp, Homo sapiens
ggagttttcctgtatgttttctcctagtagatttccagtgtcaggttatatttttaagtctttaatccattttgagttggcttttgtatatggtgtgagattagggtcctatttcgttcttctgcatgtgaatattccgtttcctyggcaacagttattgaagagactgtccttgctctactgtgtgttcttagcacctttgtggaaaattaattgactgtaaatgtatgggtttatttttttgctctctattttgttctattactatatgtgtctggttttatgccagtaccatgctgttcgatatagctttgtggtatattttaaagtcacttagtgtgatacctccatccttgttctttttgcttaagattgctttggctatttggtcttgtgtagttccatacaaatttttggattcttttttctacttctgtgaagaaaaaatgtcactgggattttgataggaactgcattgaatatctagatcgctttgggtagtttggacattttaacaatattaattctaatccaggaacacaagatatctttcaattcatttgagtcttcttcaatttctttcatcaatgttttatacttttcagtgtgcaagtctttcacttccttgattcaatttattcctaagtaatttttgtatccattataaatgaaaatttttaagatttctttctcagattgctacact

SEQ ID NO: 562581 - DNA, 706 bp, Homo sapiens
ggagttttcctgtatgttttctcctagtagatttccagtgtcaggttatatttttaagtctttaatccattttgagttggcttttgtatatggtgtgagattagggtcctatttcgttcttctgcatgtgaatattccgtttccttggcaacagttattgaagagactgtccttgctctactgtgtgttcttagcacctttgtggaaaattaattgactgtaaatgtatgggtttatttttttgctytctattttgttctattactatatgtgtctggttttatgccagtaccatgctgttcgatatagctttgtggtatattttaaagtcacttagtgtgatacctccatccttgttctttttgcttaagattgctttggctatttggtcttgtgtagttccatacaaatttttggattcttttttctacttctgtgaagaaaaaatgtcactgggattttgataggaactgcattgaatatctagatcgctttgggtagtttggacattttaacaatattaattctaatccaggaacacaagatatctttcaattcatttgagtcttcttcaatttctttcatcaatgttttatacttttcagtgtgcaagtctttcacttccttgattcaatttattcctaagtaatttttgtatccattataaatgaaaatttttaagatttctttctcagattgctacact

SEQ ID NO: 562582 - DNA, 582 bp, Homo sapiens
attttcagcatcacaacattttcagttcattgttttccatcccacataaaaacaaggatctagactgtcttgttctgtgcactgtgtcgggctagaacaaggagtgctatarcattcattcaatgaatatttactgaataagctaattaatctatatttcaaaattttaacaaagttgtatgtaaagcatacccaaacactggtaaatcattccaaattgagatgtacagaggaagaaatctgagaggaatttttatctgatgatgcaggaaagtatttctttcaagtgtttttcaatttacatgttaattgaaaaacatttcccaatccatttgagcatttggcaatccctctgagacacagttcatctaccttatttccacagcgcctcaaatacaaccttgcatttgcctaagatggtgctgtattataacttcatgttacctttcatagttccaggaatctgtaaaagtaatagtatcatctttattcaggtctagtttatagtggacacaccttgactgtttattgaaaagatgtttaaataaatgaatattgaaatatttaattaagagtagctgc

SEQ ID NO: 562583 - DNA, 582 bp, Homo sapiens
attttcagcatcacaacattttcagttcattgttttccatcccacataaaaacaaggatctagactgtcttgttctgtgcactgtgtcgggctagaacaaggagtgctatagcattcattcaatgaatatttactgaataagctaattaatctatatttcaaaattttaacaaagttgtatgtaaagcatacccaaacactggtaaatcattccaaattgagatgtacagaggaagaaatctgagaggaatttttatytgatgatgcaggaaagtatttctttcaagtgtttttcaatttacatgttaattgaaaaacatttcccaatccatttgagcatttggcaatccctctgagacacagttcatctaccttatttccacagcgcctcaaatacaaccttgcatttgcctaagatggtgctgtattataacttcatgttacctttcatagttccaggaatctgtaaaagtaatagtatcatctttattcaggtctagtttatagtggacacaccttgactgtttattgaaaagatgtttaaataaatgaatattgaaatatttaattaagagtagctgc

SEQ ID NO: 562584 - DNA, 585 bp, Homo sapiens
tggccgcctgtgcctgctgcctctgcaaggcacaggcctcctgtgctgcaaccacagtcaagggctccaggaagtctactgcagaggctgtggaaacagagcactggagacttgatttattttccttccctttcctgttgtctccttcttattacttgagaaattgtataaaataatgaacacccatttcctcaccaccagctttagcaagtttgaatatgttgtccgttggcttcagatttttaagcaatctgaggatctcgcatacccctccttgagggcatccgtgtccctcatccagagataggaacatttgtgtcaagtatcaataaacaattgttctgcatctattcccatcctcaaaacataaagtgctaatttgtagagttttaaaatgttactctaaataatatttagtaacatgwtactctaaatatgattatgcaatttgcttttgacacagaattgaatatttttggaatttaaatatatttataaatgtattaggctgaaatccttgaaactgctgttattgtaggtttgaagcagttgagcattaggatttgtacatcactcaattgcaca

SEQ ID NO: 562585 - DNA, 585 bp, Homo sapiens
tggccgcctgtgcctgctgcctctgcaaggcacaggcctcctgtgctgcaaccacagtcaagggctccaggaagtctactgcagaggctgtggaaacagagcactggagacttgatttattttccttccctttcctgttgtctccttcttattacttgagaaattgtataaaataatgaacacccatttcctcaccaccagctttagcaagtttgaatatgttgtccgttggcttcagatttttaagcaatctgaggatctcgcatacccctccttgagggcatccgtgtccctcatccagagataggaacatttgtgtcaagtatcaataaacaattgttctgcatctattcccatcctcaaaacataaagtgctaatttgtagagttttaaaatgttactctaaataatatttagtaacatgatactctaaatatgattrtgcaatttgcttttgacacagaattgaatatttttggaatttaaatatatttataaatgtattaggctgaaatccttgaaactgctgttattgtaggtttgaagcagttgagcattaggatttgtacatcactcaattgcaca

SEQ ID NO: 562586 - DNA, 545 bp, Homo sapiens
tttttgcactgccctagcagaggttctccatgagggccccaccccctctgcctggtcatccaggcatttccatacatattctgaaatctaggtggaggttcccaaacctcagttattaacttctgtgcacccgcaggctcaacaccacatggaagctgccaaaatctggggcttgcatcctctgaaaccatgggccaagctgtaccttggccccttttagcaacagctggagcagctgggatgcagggcaccaagttccaaggctgcacacagcatggggaccctgggcccggcccacaaaattattttttccttctaggcttccaggtctgtgatgggtgggtctgccgtgaagacctctgacataccttggggacattttccccaatgtsttggggattaacattcgcctccttgttacttacgcaaattgctgcagacaacttgaatttttcctcaaaaaaatgggtttttcttttgtactgcatcatcagcctgcaaattttttgaacttttatgctgtttccttttttaaatgtaatgtt

SEQ ID NO: 562587 - DNA, 584 bp, Homo sapiens
ttcaatgctgtaaaatatctctgagwtttcctttaatttgaagggtttttgtctgtttttctgttgctttttttattacacacatatatttaacagtacagttttacatagaatgctaagagcatttcttcatattttacaaaaaggctggaaacatatggactttgtattagtaattatacaatagcacatccaaatctaattcctaaatagatgatggattataatttgcttagaattcaaaggcttaatgacaataatctggggaggaaaaagagtaagtttattttacataactgaccaaaaaataaacacaagaaatagtaaatagaatttaatgtggtctcatgtgccctgaaggaggtggtgcccgatgcggaggggtaattgctatgtccaagtaatctacctggaacttctgcgacggcagggtcatggaatcatcagtcccctttctgccagacttggtgctaccaacttccttaactcgatagccaggtcttttaacatctgtaaaaacgactgcaaaattgaagagagtgcccttctttctagcttctgggtagacttcttttaccaagctt

SEQ ID NO: 562588 - DNA, 626 bp, Homo sapiens
tccccctgcccccccagagtcggggttttgccatgtttcccaggctgatcttgaacttctgggcttaagcaatctaccttccctggcctcccaaagtgctgggattacaggtgtgagccaccacacctggccaaaatccactctcaaggttggaaaagatttaggtaaaggaaaactatagcaaatcacgtgttatggactgacttgtgttcccctaaaatatgtttaagccctaacccccagtgtgactgtatttagagacagggccttaaatagggtaattaggttaaatgaggtcatagcatagggtcctaatccaataggactggtgttcttacaaggaagacaccagagatctctatccatgcaggcaaaaagaaaaggccacgtgaggatgctgtatgaaggtggccacctgaaagccaggaagagaaccctcttcagaaaccaaccccaatggcaccttgattttggacttctagcctcaagaactgtgagaagataaatttctgttcaagcctcccaggctgyagtattttgctatggcagctgtagcagactcctatactatcctgccttgacttatcttcagttttaatttctactttagcatctctgaattttct

SEQ ID NO: 562589 - DNA, 604 bp, Homo sapiens
actatttacataacatttacaytttattaggtattataagtaatctataagtgatttaaaatattcaaaaggatgtgcacaggttatatgcaaatactactccattttatgtaagagacttgagcatctgtggattttggtactttctatgagtcctggaaccaatcctctgcagataccaagggatgactataatttagtctgagtctgaaggactgagaactggggataggaggaaaggctggtgtaagtcctagagtccaaaggcctagggaccagaagttccaatatcccagggcagaagaagatggatgtcccagctcaaaaagagagagagagaatttacccttcctctgccttattgttctatttaggccctcaacaggctggtgagggtggtcttctttacttggtctacttacaaaaatgctaatctcttctggaaataccctcacagacacacacaaaaataaagttttaccagctatctgggcatcctttagcccagtcaagttaacccataaaattaatcatcacaagcaccctatttttaaacttgtgtttctgcagggaaaatacatacacaggccaagaagcaaaacac

SEQ ID NO: 562590 - DNA, 594 bp, Homo sapiens
tgtgatcaggtgcctgaaatgaggtaatttaatttgaacaaagcccttgtgaatcccagggggtgaaaagggcacagccaccacctgttgtttcatcagctcaactggactgaaggacagcctgcccatgcccttggtgtggccagggtttctaattggacttccatcatttcagccacattacagaaaaggaaagaaaagattccaacagatgctaatagttgagagacaaatagtaacacacactcttaataagttttctgtgaaaaggctctaaaatgtatttttgttgttgtctaaaaagataatgaaaaggtaacagtataagggaaagtttcaggaggcctgagctttgtcccagctgcataactgactggttgtgtaaccttggtcaagtcacttaatctttctgggcctccatttctcatctgtaacatggaggtgctcactttcagcactgagattgctgactgaactctaagattatgcttttactgtattctaccccagattgtatcaccttgtrttagtccattctcacattgctataaagaactacttgagactgggtaatttataaagaaaagaggttta

SEQ ID NO: 562591 - DNA, 500 bp, Homo sapiens
gtttttaaataaaagagatttaattggctcacaactctgcaggctgtacaggaagcatggttgggggaggcctcaggagacttacaatcatggcagaatggcagaaggtgaaggggaagctggcattgtcctacattgctgaagcaggaggaagggagagtaaagggagaagtgctacacacttaaaaaaaaaaaacagaycttgtgggaacttactcactattatgagaacaacaagagggaaatccacccccatgatcaaattaccgcctaccaggccccagctctaacattcaggatcacaattcaacataagatttgggtggggtcaaagagtcaaaccatatcatacctcttggatgagaattgcacctttcatttaagttttgtcaggaaaatgatgcaatgagaataaaaaatgaaaccataaataatttttactttatgttttcttattcaagctgaccctagatttatttctcaacaactgagatagaatc

SEQ ID NO: 562592 - DNA, 596 bp, Homo sapiens
ggcaggccaggcatagtagctcatgcctataatcccagcactttgggagcccaaggtaggaggattacttaagcccaagaattcgagaccagcctaggcaacatagtgaracagtatctctaccaaaaaaaaaaaaaaagaaagaaagaaagaaagaaaagaaaaattagtcaggcatagtggcatgtgcctgtagtcccagctacttgggaggctgagatgggaggatcgcttgagcccaggaggttgaggctgcaaagagctttgtttacactactgtactctggcatggaagacagagtgagaccctgtgtcaagaaagaaaggaaggaaggaaggaaggaaggaaggaaggaaggaaggaagggaggaaggaaggaaggaaagaaggaggaagggaagggaagggaagaaaggaaggaagaggctacttgagtttcactcgggttacaggattggcttcaagagaaagatagaaaaaataataatagactcttgtaagtgtctgaaagagagaattaatccaaaagtactttaaacactctagaaatgcaaataataaaatgtcggtgtgaacagttcttgtttggctttgg

SEQ ID NO: 562593 - DNA, 274 bp, Homo sapiens
aatttaaataggaaacatatttcaggacaatttttttcmataagatatctcctttcaaaaattttcatggttctaacctaaataaaagctgaatttaccacatgatcatagacttagtttcatacatgagcctccttctccccaaagtcaataatgataaaagcgaccatctatttagagtctggttttaaaaattttaatccccttaaatttactttatgttctccacacaaaaatattgcacaggggaaaaaaaaccggatgtcctgagctg

SEQ ID NO: 562594 - DNA, 585 bp, Homo sapiens
agcatttaagtattgttaactttatgtaatagcatttgggttggagattggtgcttttctggttgtaggaaggatagttgtattatgttaggcataattatgaccttactattgtctttatttgaagattatatatgatcttaaaagatgtgtatgagttcaagttgacaaggggtgagcttgtgatggttaatactgagtgtcaatttgattggattgaaggatgcaaartattgatcctgggtgtgtctgtgagggtgttgccaaaggagattaacatttgagtcagtgggctggggaaggtagacccacccttaatctgggtgggcaccatttaatcagcttccagcagatacaaagcaggcagaaaattgtgaaaaggctagactgacctagcttcccaggctacatctttctttcatgctggatgcttcctgcccttgaacactggactccaagttcttcagttttggaactcagactggctctctttgctcttcagcttgcagacagcctattgtgggaccttgtagtcatgtaagttaatatttaataaattcatatatatatatatatatctcctat

SEQ ID NO: 562595 - DNA, 585 bp, Homo sapiens
agcatttaagtattgttaactttatgtaatagcatttgggttggagattggtgcttttctggttgtaggaaggatagttgtattatgttaggcataattatgaccttactattgtctttatttgaagattatatatgatcttaaaagatgtgtatgagttcaagttgacaaggggtgagcttgtgatggttaatactgagtgtcaatttgattggattgaaggatgcaaaatattgatcctgggtgtgtctgtgagggtgttgccaaaggagattaacatttgagtcagtgggctggggaaggtagacccacccttaatctgggtgggcaccatttaatcagcttccagcagatacaaagcaggcagaaaattgtgaaaaggctagactgacctagcttcccaggctacatctttctttcatgctggatgcttcctgmccttgaacactggactccaagttcttcagttttggaactcagactggctctctttgctcttcagcttgcagacagcctattgtgggaccttgtagtcatgtaagttaatatttaataaattcatatatatatatatatatctcctat

SEQ ID NO: 562596 - DNA, 516 bp, Homo sapiens
atagacttgcaccaactcagttctccccactttttcacttgcagttttcaaggataacattgcagcatgctctgggagtgtagcatcctgagctagagagggactgttgaaacagctccagctctgctccagtgccctgtgtaacaccacgcctttcaacattgcagcccagtgcactgtctcagccttcagatataaaacccagggcacgctgcttttcagggtccctaagctgtggtgcaagtagtgcatgcacagacagtctctgtctatgccaagcagctttcmtgagccttgaggagctggctggtaatgaattctaatcttttgttgtcccttgtgcctatttgtgagtaatcaatctacttcatgtcacttgttgtagaggaagtgttctgactcaccagagtcaaacaggttggtaaccagtgaacctgcttcacacatactttaattaaaaattcttcatgtacatttcacaataattaaaagatgaattaaaaataaaaattcaag

SEQ ID NO: 562597 - DNA, 516 bp, Homo sapiens
atagacttgcaccaactcagttctccccactttttcacttgcagttttcaaggataacattgcagcatgctctgggagtgtagcatcctgagctagagagggactgttgaaacagctccagctctgctccagtgccctgtgtaacaccacgcctttcaacattgcagcccagtgcactgtctcagccttcagatataaaacccagggcacgctgcttttcagggtccctaagctgtggtgcaagtagtgcatgcacagacagtctctgtctatgccaagcagctttcctgagccttgaggagctggctggtaatgaattctaatcttttgttgtcccttgtgcctatttgtgagtaatcaatctacttcatgtcacttgttgtagaggaagtgttctgaytcaccagagtcaaacaggttggtaaccagtgaacctgcttcacacatactttaattaaaaattcttcatgtacatttcacaataattaaaagatgaattaaaaataaaaattcaag

SEQ ID NO: 562598 - DNA, 616 bp, Homo sapiens
tacagtgattacataaaaatatcatggtattactccattcttgcactgcagtaaagaaactatctgagagtagaaaatttataaagaaaataggtttaattggctcacaattctgcaggctkcttcttctggggaggcctcaggaaacttaaaatcatggcagaacatgaagaggaagcaagcacatcttcacatgacaagcaagagagaaagagcgagagagagagagagagcaagtgagcgtgggaagagggaagtgctacacactttcaaacaaccagatattctgggaacttactcgctattatgagaacagcaagggggatatttacattcgtgatccagtcacctcctaccaggcccctcctccaacctgatgattcaacatgagacttgggtggggacacagagccaaccctcatcattccacccctggccactcccaaatctcatgtcctcacattacaaaacataatcatgtcacaccaacaatcctccaaagtcttaacccattctggcattaactgagaagtccaagtatctatttctttaagtatctataagaaacttaaacaaatttacaggataagacaactaccccattaaaaagtgggca

SEQ ID NO: 562599 - DNA, 616 bp, Homo sapiens
tacagtgattacataaaaatatcatggtattactccattcttgcactgcagtaaagaaactatctgagagtagaaaatttataaagaaaataggtttaattggctcacaattctgcaggctgcttcttctggggaggcctcaggaaacttaaaatcatggcagaacatgaagaggaagcaagcacatcttcacatgacaagcaagagagaaagagcgagagagagagagagagcaagtgagcgtgggaagagggaagtgstacacactttcaaacaaccagatattctgggaacttactcgctattatgagaacagcaagggggatatttacattcgtgatccagtcacctcctaccaggcccctcctccaacctgatgattcaacatgagacttgggtggggacacagagccaaccctcatcattccacccctggccactcccaaatctcatgtcctcacattacaaaacataatcatgtcacaccaacaatcctccaaagtcttaacccattctggcattaactgagaagtccaagtatctatttctttaagtatctataagaaacttaaacaaatttacaggataagacaactaccccattaaaaagtgggca

SEQ ID NO: 562600 - DNA, 616 bp, Homo sapiens
tacagtgattacataaaaatatcatggtattactccattcttgcactgcagtaaagaaactatctgagagtagaaaatttataaagaaaataggtttaattggctcacaattctgcaggctgcttcttctggggaggcctcaggaaacttaaaatcatggcagaacatgaagaggaagcaagcacatcttcacatgacaagcaagagagaaagagcgagagagagagagagagcaagtgagcgtgggaagagggaagtgctacacactttcaaacaaccasatattctgggaacttactcgctattatgagaacagcaagggggatatttacattcgtgatccagtcacctcctaccaggcccctcctccaacctgatgattcaacatgagacttgggtggggacacagagccaaccctcatcattccacccctggccactcccaaatctcatgtcctcacattacaaaacataatcatgtcacaccaacaatcctccaaagtcttaacccattctggcattaactgagaagtccaagtatctatttctttaagtatctataagaaacttaaacaaatttacaggataagacaactaccccattaaaaagtgggca

SEQ ID NO: 562601 - DNA, 616 bp, Homo sapiens
tacagtgattacataaaaatatcatggtattactccattcttgcactgcagtaaagaaactatctgagagtagaaaatttataaagaaaataggtttaattggctcacaattctgcaggctgcttcttctggggaggcctcaggaaacttaaaatcatggcagaacatgaagaggaagcaagcacatcttcacatgacaagcaagagagaaagagcgagagagagagagagagcaagtgagcgtgggaagagggaagtgctacacactttcaaacaaccagatattctgggaacttactcgctattatgagaacagcaagggggatatttacattcgtgatccagtcacctcctaccaggcccctcctccaacctgatgattcaacatgagacttgggtggggacacagagccaaccctcatcattccacccctggccactcccaaatctcatgtcctcacattacaaaacataatcatgtcacaccaacaatcctccaaagtcttaacccattctggcattaactgagaagtccaagtatctatttstttaagtatctataagaaacttaaacaaatttacaggataagacaactaccccattaaaaagtgggca

SEQ ID NO: 562602 - DNA, 610 bp, Homo sapiens
tctagctttttataagacatgtttactgggcaactatcaaacaaatttcattactgtccttttcagccaaataaaatggatttattaaaaaattacaatgatcarccattttagtaatgcaatgtaaattagtttttatataaatgaggactttcacaaggccagaattaaactctttataaaatttatgtaaagtgatttggtaatgtaaaaattgtatcatcttaattttttaaaatgtggaattaatttgaattttacaaattatatttcttttggaagataatttttctatttactagttttatcagtacatgcagatatactttacaatgaagtaaataacatcgcatacagtttttgacataaggaaataaaaagctgtttccattgctccctaattattattgttgtgattctaactccaagtatggtcaacaagaacattgtcataatattttaggaacattgcaatgtaacttttcagtatcagtcttaaataagactgccttaaatagacatattcttagcttcaggttttgatggtagtggtggtggtagttgtgtttgtgtgtttgtgtgtgtgtgtgtgtgtgttttgaacaaaatt

SEQ ID NO: 562603 - DNA, 596 bp, Homo sapiens
ttttatgaaatacgtatgtatgaagatctttatcaaaacactatttttgctttacatcacgcaaacatgtggagccagaaccatatttgaacatgtttrtgctgctgaaagctaatcaaaagactcagaaaagttgatacacaatgtggtgtgttgtttttaattttcatttcctttaacgtaattatttatttaccatagtatttattctctaactttcaaattttccacagtgtttcatatatatttattgtgtaaaatacataatactagtaagaattgtttagatatattaaatacttcaaaattaaatttatcaatgtttttaatgaaaatacatttttattactaaaatagtctatgttgagccattgctgagcttcaacttaaaaagaaaaaacatttcatctgcatacacaatttataatctaaacatatattatacttgttatgtcacttggaacacgttctgtagtgcgacatttagcatgtgtcctttagagaatgagaaatactaagtctgggcacagggatgcacgcctgtaatcccagcactttgggaggcccagatgggcagattgcttgaggccaggagt

SEQ ID NO: 562604 - DNA, 596 bp, Homo sapiens
ttttatgaaatacgtatgtatgaagatctttatcaaaacactatttttgctttacatcacgcaaacatgtggagccagaaccatatttgaacatgtttgtgctgctgaaagctaatcaaaagactcagaaaagttgatacacaatgtggtgtgttgtttttaattttcatttcctttaacgtaattatttatttaccatagtatttaytctctaactttcaaattttccacagtgtttcatatatatttattgtgtaaaatacataatactagtaagaattgtttagatatattaaatacttcaaaattaaatttatcaatgtttttaatgaaaatacatttttattactaaaatagtctatgttgagccattgctgagcttcaacttaaaaagaaaaaacatttcatctgcatacacaatttataatctaaacatatattatacttgttatgtcacttggaacacgttctgtagtgcgacatttagcatgtgtcctttagagaatgagaaatactaagtctgggcacagggatgcacgcctgtaatcccagcactttgggaggcccagatgggcagattgcttgaggccaggagt

SEQ ID NO: 562605 - DNA, 535 bp, Homo sapiens
tatatttttcacatcctctgataatagtaaaaattcttgtgttgtgtwaatatttataatacatttatttgcttaaaatactttcatagcctttctgtccatggatgccgccgaagaagcatggttaaaatctctcttctctctgccatcaggtctaagtctgagtctcctaaagagcctgaacagctgaggaagctcttcattggagagttaagctttgaaacagctgatgagagcctgaggagccattttgagcagtggggaatgctcatggactgtgtggtcatgagagatccaaacaccaagtgctccaggggctttgggtttgtcacatatgccactgtggaggaggtagatgcagccatgaacgcaaggccacacaaggtggatggaagagttgtggaaccaaagagcgatctcaagagaagattctcaaagaacaggtgcccatttaactatgaaaaagatatttgttggtggcattaatgaaaacactgaagaacatcatctaagagattattttgaacagtttgga

SEQ ID NO: 562606 - DNA, 593 bp, Homo sapiens
cctgttctttacagagattattatttcttgattcaaactggcataggctaatatttttattggttagatttatgttcttccccttgtctgcctgccttcttgcctcttgcgagcacataagaacatctatcttcatgaccatcagagcattaataacattgccggtatgaccccaaaggagcatccagctgtaacatctgcttccctgtttattttcatacttatttaattgcaaatcccccccarcacacacacatctttaaagagtatcccccaaagagtaaacacactaagtatgtgcacgtgccactgatgagtaagaactttcccatttaagaaccatctcagttttcaaagacgttttcaaatattagccttagtgagtatattatttatggtaatgctatttataggaccatttcacccattatgaaactaggaacatgtctattaacacctaagcattttaccttctgagatatcagatgaggcatgtaaataaagtctggagccaaactctctgggttcagggcatgatgctgaaacttactagtcttatgacgcgtaggtaggttactgaaactcaggatatc

SEQ ID NO: 562607 - DNA, 593 bp, Homo sapiens
cctgttctttacagagattattatttcttgattcaaactggcataggctaatatttttattggttagatttatgttcttccccttgtctgcctgccttcttgcctcttgcgagcacataagaacatctatcttcatgaccatcagagcattaataacattgccggtatgaccccaaaggagcatccagctgtaacatctgcttccctgtttattttcatacttatttaattgcaaatcccccccagcacacacacatctttaaagagtatcccccaaagagtaaacacactaagtatgtgcacgtgccactgatgagtaagaactttcccatttaagaaccatctcagttttcaaagacgttttcaaatattagccttagtgagtatattatytatggtaatgctatttataggaccatttcacccattatgaaactaggaacatgtctattaacacctaagcattttaccttctgagatatcagatgaggcatgtaaataaagtctggagccaaactctctgggttcagggcatgatgctgaaacttactagtcttatgacgcgtaggtaggttactgaaactcaggatatc

SEQ ID NO: 562608 - DNA, 473 bp, Homo sapiens
tatagcaactgtaccttttctatgtctttacagtaaaaataaaatattaaaatcttatgggcctactgtcatacatgtggtctgtccttgactaaaatgtcatttttagtgcatgaccatacttggcttgaaagcttcaggaaaccaactctcttctcttaaaatgtaagagttccaataaactcctcttagtttctttgaatttaggaacaggtagtcttatgaacaacctttgagaacataactaattcataggcaggggtgattttacatgcagaaggtccatgttactagtagtcagtccagtagtaacaaaggtataaataattcatttagggctgggcacggtggctcatgcctataatctcagcacttcgggaggcagaggcaggtagatcacargaggtcagcagttctagaccagcctggccaacatggtgaaaccctgtctttactaaaaatacaaaaattag

SEQ ID NO: 562609 - DNA, 657 bp, Homo sapiens
ttttcctgactcaaccaggaaatcctgtgaaaggaactgaaaaatattgcctcaaaaatactattatgttgcccatgtttaagactgaatgcagagtctacagtgaaatgttcaattcctacatggcctaattagcctcgctccctggccttgggctgcaacttaaatccttaccagtcatttcataaagtagcattactttgtcacaatatgaataagtgaaaagagcatatttaggttagtgtataaggacttaccctactagaaaaaaggacttgaggtttttaatttatttatggtgagttcaggaatgtcattttcatacttcatctagaagtagagcatgattcatgcataggcaggtagcaaggcgctttagaggcttggccagaagcccccatcccttttgcagctacagtaagatgtattccaaaaagcctaaaagggtttatcctggcttcctctttagctccacttaggacctttattaagtggccctaycagaagaattatgccacctttgtccagagatccaaataatttctgtgtatctgaaaacacttatcttccaaaattggattatgttacctattgacataagaattaaatctgatcaatgtattctcacctaagtttttttttttcctggattcgtat

SEQ ID NO: 562610 - DNA, 533 bp, Homo sapiens
gtctgaatgcagtactcttaatacccatgctgtgctatgttatacaagctttagagtatagggagctaacactagccaagatgtggatgcaggacagttaggcagggaccctcattaaccccataatgtgctctttcccacaaacttcactgccaaatttgatgtggatctctaagtgtctcttttacttcccccaaaactctatggatagctgtaattactcttaaatatgcacctatacaattacttgcaaatagtcaaatttatgatgattgtaataataaataacaagaagagatgctagtatctcaccctatagctaagatattggtttttggagaaaagagagtaacaaaaacatgaccccaaaacttaacaggtccctgttaagttttgacaatagtagacttcaattaaaaaatatcaaaaggagcacgttaaaaataattcttgttgcaatagtgttttaggtttgtgtatacttactgtcaaatagtatcaaataygcttcattgcaggtaaatattttatgg

SEQ ID NO: 562611 - DNA, 577 bp, Homo sapiens
tttctgaacactaaaacttaagttataagtattcttattaaaatcaagataaagacaatttctatttttcagagtaataaaatgtaagtggctgggcatggtggctcaygcctgtaatcccaacattttgggaggctggggtatgtggatcacctgaggtcaggagtttgtgaccagcctggccaatgtgatggaaccccatctctactaaaaatacaaaaattagctaggcatggtggcgggcacctgtaatcccatctacttgagaggctgaggcgagggaatcgcttgaacccaggaggcagaggttgcagtgagccaaggtcacgccattgcactccagcctgggtgacaacagtgaaactccatctcaaaaaaaaattaaagtaaaactgtttgccaagttacatatatatgtgtatgtgtgtgtgtgtgtgtgtgtaagagagagagagtgtgtgtgtgtgtgtgtgtgtgtgtgtgtgtgtgtatttaaaagttggctgggcacagtggctcaagcctgtaatcccagcactttgggagaccaaggctggaggatcacttgaggccagga

SEQ ID NO: 562612 - DNA, 577 bp, Homo sapiens
tttctgaacactaaaacttaagttataagtattcttattaaaatcaagataaagacaatttctatttttcagagtaataaaatgtaagtggctgggcatggtggctcatgcctgtaatcccaacattttgggaggctggggtatgtggatcacctgaggtcaggagtttgtgaccagcctggccaatgtgatggaaccccatctctactaaaaatacaaaaattagctaggcatggtggcgggcacctgtaatcccakctacttgagaggctgaggcgagggaatcgcttgaacccaggaggcagaggttgcagtgagccaaggtcacgccattgcactccagcctgggtgacaacagtgaaactccatctcaaaaaaaaattaaagtaaaactgtttgccaagttacatatatatgtgtatgtgtgtgtgtgtgtgtgtgtaagagagagagagtgtgtgtgtgtgtgtgtgtgtgtgtgtgtgtgtgtatttaaaagttggctgggcacagtggctcaagcctgtaatcccagcactttgggagaccaaggctggaggatcacttgaggccagga

SEQ ID NO: 562613 - DNA, 577 bp, Homo sapiens
tttctgaacactaaaacttaagttataagtattcttattaaaatcaagataaagacaatttctatttttcagagtaataaaatgtaagtggctgggcatggtggctcatgcctgtaatcccaacattttgggaggctggggtatgtggatcacctgaggtcaggagtttgtgaccagcctggccaatgtgatggaaccccatctctactaaaaatacaaaaattagctaggcatggtggcgggcacctgtaatcccatctacttgagaggctgaggcgagggaatcgcttgaacccaggaggcagaggttgcagtgagccaaggtcacgccattgcactccagcctgggtgacaacagtgaaactccatctcaaaaaaaaattaaagtaaaactgtttgccaagttacatatatatgtgtatgtgtgtgtgtgtgtgtgtgtaagagagagagagtgtgtgtgtgtgtgtgtgtgtgtgtgtgtgtgtgtatttaaaagttggctgggcacagtggctcaagcctgtaatcccagcactttgggagacyaaggctggaggatcacttgaggccagga

SEQ ID NO: 562614 - DNA, 577 bp, Homo sapiens
tttctgaacactaaaacttaagttataagtattcttattaaaatcaagataaagacaatttctatttttcagagtaataaaatgtaagtggctgggcatggtggctcatgcctgtaatcccaacattttgggaggctggggtatgtggatcacctgaggtcaggagtttgtgaccagcctggccaatgtgatggaaccccatctctactaaaaatacaaaaattagctaggcatggtggcgggcacctgtaatcccatctacttgagaggctgaggcgagggaatcgcttgaacccaggaggcagaggttgcagtgagccaaggtcacgccattgcactccagcctgggtgacaacagtgaaactccatctcaaaaaaaaattaaagtaaaactgtttgccaagttacatatatatgtgtatgtgtgtgtgtgtgtgtgtgtaagagagagagagtgtgtgtgtgtgtgtgtgtgtgtgtgtgtgtgtgtatttaaaagttggctgggcacagtggctcaagcctgtaatcccagcactttgggagaccraggctggaggatcacttgaggccagga

SEQ ID NO: 562615 - DNA, 564 bp, Homo sapiens
cccaacctctggctagctcccacaatggctgctgcttggcctgttgatatagcactgtctctgcagacactctggtgtgtgtgctaggtcaacatcttcctttctgtcccatttccttcatccttggagtataggggtctgtgtgtgtggatatttagaggaaaaggctgctttccacaagaccattctgtactatggaaatcctgacttctaaggcttccacccactgtgggaggggtggttttggtatgygtgagtaccatcccaagctccaccaccctctaatgcaacctgtgggtaccttgcaggactttaggcacaactatcaatttgtctgtgttgcatcccattcttcccaaaatctgtttccattccaaggtgtcccttgtctgtagctggtgcctttcctctgcccgtacctgctgagagtaaaggattagtcactgacactttagcatgaatttaaaaagcctctttttcaaagaacctttatttttcagtgttgaaggaagcaccatgtcccttgaaaaggaaatgtagggccaatcatctctctctagagac

SEQ ID NO: 562616 - DNA, 564 bp, Homo sapiens
cccaacctctggctagctcccacaatggctgctgcttggcctgttgatatagcactgtctctgcagacactctggtgtgtgtgctaggtcaacatcttcctttctgtcccatttccttcatccttggagtataggggtctgtgtgtgtggatatttagaggaaaaggctgctttccacaagaccattctgtactatggaaatcctgacttctaaggcttccacccactgtgggaggggtggttttggtatgtgtgagtaccatcccaagctccaccaccctctaatgcaacctgtgggtaccttgcaggactttaggcacaactatcaatttgtctgtgttgcatcccattcttcccaaaatctgtttccattccaaggtgtcycttgtctgtagctggtgcctttcctctgcccgtacctgctgagagtaaaggattagtcactgacactttagcatgaatttaaaaagcctctttttcaaagaacctttatttttcagtgttgaaggaagcaccatgtcccttgaaaaggaaatgtagggccaatcatctctctctagagac

SEQ ID NO: 562617 - DNA, 266 bp, Homo sapiens
taaaaatacaaaatattagctgggcataatggtgggtgcctgtaatttcagctactcaagaggctgagacaggataacagcctgaaccccagaggtggaggttacagtgagctgagatcatgctactgcactccgggrtgacagagtgagactgtctcaaaaaaaaaaaaaaaaaaaaggagtaatttcaaaaattgtacctctcagaattaagtgctggttacacctaacggaatcattgtagtaagtagtggctcatttaattg

SEQ ID NO: 562618 - DNA, 600 bp, Homo sapiens
aaatatcgtcgacactagggcaacctgtaaacttttcaaatgcatggttgagatgtaagacagaagacaaaaggtaacataaaatgtccaattaaagctaagggaaaaagctaacagaaataaaaatgcgcaaatagaaaatatgaccaatatgacagatattaacctaactaaatcaatgataacatttaatgtgaattatctaaatacatcaattaaaagacagagactatcacagtggatataataacaaggcccaactatatgttgtctatttgacattcactctatagataaagattcagataggttaaaataaagggatgcagaaagatatatgatgttaaccctaagtaaaagaaaagtggagtgacatattaatttcagacaaaacagacttcagatcaagaaaatttatgagacaaagagatacattatatattgataacatggttatcccaaaaaagactaacaaccctaaacatgyatacaactaaaaagggaccataaaaatatatgcatcaaaaactcacaggatgacatcaaacaatagacaaatccactatttgggtagttcaactccaatctttcattaattga

SEQ ID NO: 562619 - DNA, 641 bp, Homo sapiens
tttttgcacactatagacatttttaagatacactagcaatacagaaaacacaggggactagttcagaagcctctcaggaaagcttgctaaatcacaatagagtatatttctgttttaagcaggaaaacagttctagcatcacagtagtatcttttatgatccagtcaatttgccatcccttcaaagtcactgtccattatgtcrtattccagtgacttggtcttgttgattagtaaagttctatctctgcgtctttaactgtgtttcttccaccactcttgccttccagtattaagaccatcttcttggccatctgcttaaaccttttgttgtctatgtgtccataacacatgactaatttttttttaaatatttaatatgtttactattgttaacatcttcttttttttatttttttgggagacagagtcttactctgtcacccaggctgaagtgcaccagtgcaatctcggcttaattcaacctccacctcctgggtttgagcaattctcgtgcctcagccacctgaatagctgggactacaggtgcgccaccacatctggctatttttttttttttttgtattttttgtagaaacaaagttttgccatattggcctggctggtcttggactcctgccc

SEQ ID NO: 562620 - DNA, 641 bp, Homo sapiens
tttttgcacactatagacatttttaagatacactagcaatacagaaaacacaggggactagttcagaagcctctcaggaaagcttgctaaatcacaatagagtatatttctgttttaagcaggaaaacagttctagcatcacagtagtatcttttatgatccagtcaatttgccatcccttcaaagtcactgtccattatgtcgtattccagtgacttggtcttgttgattagtaaagttctatctctgcgtctttaactgtgtttcttccaccactcttgccttccagtattaagaccatcttcttggccatctgcttaaaccttttgttgtctatgtgtccataacacatgactaatttttttttaaatatttaatatgtttactattgttaacatcttcytttttttatttttttgggagacagagtcttactctgtcacccaggctgaagtgcaccagtgcaatctcggcttaattcaacctccacctcctgggtttgagcaattctcgtgcctcagccacctgaatagctgggactacaggtgcgccaccacatctggctatttttttttttttttgtattttttgtagaaacaaagttttgccatattggcctggctggtcttggactcctgccc

SEQ ID NO: 562621 - DNA, 494 bp, Homo sapiens
acctgtagtacataatggcttacccttccagctcccctgcctcttgggagagagctgctgtgacatgtgccttagctstgactcctgatcagaagaagaagggacattctcagcccatgagggttgggagagaaggaaaatggggtgtggggtaagagtaggggctaaagaaaaagcatttctttattcaaagttgacataagttcctaacaagagaaatatccaaggcaaacgttttggtatcagcaacctttttttaggcagttgaaagagataaaagtgactctatgtgtttattagcatcaactaaggaaagagattaatcaagggaggaattttgtttgtttgtttctgagatggagtcttgctctgtcacccaggctggagtgcagtggcgcgatctcagctcactgcaacttctgcctcccaggttcaagcaattctcctgcctcagcctcctgagtagctgggattacaggcgcctgccaccgtgc

SEQ ID NO: 562622 - DNA, 494 bp, Homo sapiens
acctgtagtacataatggcttacccttccagctcccctgcctcttgggagagagctgctgtgacatgtgccttagctctgactcctgatcagaagaagaagggacattctcagcccatgagggttgggagagaaggaaaatggggtgtggggtaagagtaggggckaaagaaaaagcatttctttattcaaagttgacataagttcctaacaagagaaatatccaaggcaaacgttttggtatcagcaacctttttttaggcagttgaaagagataaaagtgactctatgtgtttattagcatcaactaaggaaagagattaatcaagggaggaattttgtttgtttgtttctgagatggagtcttgctctgtcacccaggctggagtgcagtggcgcgatctcagctcactgcaacttctgcctcccaggttcaagcaattctcctgcctcagcctcctgagtagctgggattacaggcgcctgccaccgtgc

SEQ ID NO: 562623 - DNA, 494 bp, Homo sapiens
acctgtagtacataatggcttacccttccagctcccctgcctcttgggagagagctgctgtgacatgtgccttagctctgactcctgatcagaagaagaagggacattctcagcccatgagggttgggagagaaggaaaatggggtgtggggtaagagtaggggctaaagaaaaagcatttctttattcaaagttgacataagttcctaacaagagaaatatccaaggcaaacgttttggtatcagcaacctttttttaggcagttgaaagagataaaagtgactctatgtgtttattagcatcaactaaggaaagagattaatcaagggaggaattttgtttgtttgtttctgagatggagtcttgctctgtcacccaggctggagtgcagtggcgcgatctcagctcactgcaacttctgcctcccrggttcaagcaattctcctgcctcagcctcctgagtagctgggattacaggcgcctgccaccgtgc

SEQ ID NO: 562624 - DNA, 537 bp, Homo sapiens
aaattaaagttgagtaaagctttctacttggtgggtgccaaaaccattgcacccagattagctacatgtaacagcagagttatcaatggaaattttaaataagcaaggtcaagattctgaagaatttcttcaaagaactgtaacaggagataaaatgtggcttttgtactcataagtacaatcctgaaaacaaagcacagtcaaaacaatggctaccaagaggtggaagcggtccagccaaagtcaaagcagaacagtcaagagtaagagtcacagcaatagtttctggggatgatcaaggtatwttgcttgttgactttccggggggccaaagaatgatagcagctgcttattatgagagtgttttgagaaagccaaagctttttaaaaaaaaattttttttattatactttaagttatgggatacatgtgtagaacatgcaggtttgttacataggtatacatgtgccatggtggtttgctgcacccatcaacccgtcatctacattaggtatttctcctaatgctatccctccc

SEQ ID NO: 562625 - DNA, 537 bp, Homo sapiens
aaattaaagttgagtaaagctttctacttggtgggtgccaaaaccattgcacccagattagctacatgtaacagcagagttatcaatggaaattttaaataagcaaggtcaagattctgaagaatttcttcaaagaactgtaacaggagataaaatgtggcttttgtactcataagtacaatcctgaaaacaaagcacagtcaaaacaatggctaccaagaggtggaagcggtccagccaaagtcaaagcagaacagtcaagagtaagagtcacagcaatagtttctggggatgatcaaggtattttgcttgttgactttccggggggccaaagaatgatagcagctgcttattatgagagtgttttgagaaagccaaagctttttaaaaaaaaawtttttttattatactttaagttatgggatacatgtgtagaacatgcaggtttgttacataggtatacatgtgccatggtggtttgctgcacccatcaacccgtcatctacattaggtatttctcctaatgctatccctccc

SEQ ID NO: 562626 - DNA, 519 bp, Homo sapiens
tattcctttaccttgaccagctgattcaataatttctcaagagaagttatgttggaataacaaatattttttggacaagaaaacaaaaaaaaaataytaatgtgggtgggctaactgtaatcctaactctgaccctgaccctgaccctgaccctgaccctgtgtgcctatgtgtatatgtgcatgtgtgtatatatattgaaggtggcatttaatggtatttaagtaatgagatattcatcaagcaaataaagttagatccttacctagcaccatacacaaataaataatttcaggcaaatagatattaaaaatttaacaaagtatttgtggtgatcactgtttttttgttttgttttgtttgagacacggtcttggtctgttatagtcatggctcactgcagcctcaacctcccaggctcaagtgatcctcctgcagcctcccacgtaactggtactacaggtgtgtgccaccccacccagctaacgtttttgtttttgttttttggtagagctgagg

SEQ ID NO: 562627 - DNA, 519 bp, Homo sapiens
tattcctttaccttgaccagctgattcaataatttctcaagagaagttatgttggaataacaaatattttttggacaagaaaacaaaaaaaaaatackaatgtgggtgggctaactgtaatcctaactctgaccctgaccctgaccctgaccctgaccctgtgtgcctatgtgtatatgtgcatgtgtgtatatatattgaaggtggcatttaatggtatttaagtaatgagatattcatcaagcaaataaagttagatccttacctagcaccatacacaaataaataatttcaggcaaatagatattaaaaatttaacaaagtatttgtggtgatcactgtttttttgttttgttttgtttgagacacggtcttggtctgttatagtcatggctcactgcagcctcaacctcccaggctcaagtgatcctcctgcagcctcccacgtaactggtactacaggtgtgtgccaccccacccagctaacgtttttgtttttgttttttggtagagctgagg

SEQ ID NO: 562628 - DNA, 519 bp, Homo sapiens
tattcctttaccttgaccagctgattcaataatttctcaagagaagttatgttggaataacaaatattttttggacaagaaaacaaaaaaaaaatactaatgtgggtgggctaactgtaatcctaactctgaccctgaccctgaccctgaccctgaccctgtgtgcctatgtgtatatgtgcatgtgtgtatatatattgaaggtggcatttaatggtatttaagtaatgagatattcatcaarcaaataaagttagatccttacctagcaccatacacaaataaataatttcaggcaaatagatattaaaaatttaacaaagtatttgtggtgatcactgtttttttgttttgttttgtttgagacacggtcttggtctgttatagtcatggctcactgcagcctcaacctcccaggctcaagtgatcctcctgcagcctcccacgtaactggtactacaggtgtgtgccaccccacccagctaacgtttttgtttttgttttttggtagagctgagg

SEQ ID NO: 562629 - DNA, 519 bp, Homo sapiens
tattcctttaccttgaccagctgattcaataatttctcaagagaagttatgttggaataacaaatattttttggacaagaaaacaaaaaaaaaatactaatgtgggtgggctaactgtaatcctaactctgaccctgaccctgaccctgaccctgaccctgtgtgcctatgtgtatatgtgcatgtgtgtatatatattgaaggtggcatttaatggtatttaagtaatgagatattcatcaagcaaataaagttagatccttacctagcaccatacacaaataaataatttcaggcaaatagatattaaaaatttaacaaagtatttgtggtgatcactgtttttttgttttgttttgtttgagacasggtcttggtctgttatagtcatggctcactgcagcctcaacctcccaggctcaagtgatcctcctgcagcctcccacgtaactggtactacaggtgtgtgccaccccacccagctaacgtttttgtttttgttttttggtagagctgagg

SEQ ID NO: 562630 - DNA, 476 bp, Homo sapiens
gagcatctcgtgcccaggctgataagagtcccagaggcactgagtggtrggagagcctgtgatgtggtattcgaccttggtatgttctcttccggcttccattcacaaaggcttattgaaccagtgcatcatagagaagacgtgtgaaacaggtactaacatgtgtgtgcgttgggatgatcccacaattggatgatgatgatggtagggatgatgatggggatggtgatgatggtagggatgaggatggagacagtgatggggacgatgatgatggggatgatattggtgataattagcatctcctttatttttcagatcagaagtatgaagtagcgtcagtccttgacctcaagttccaattatgcatccaagcagggtccactgctgcctctaattatgaaagtagtaggaaaattcccagattaattcaactgaagctgaccttcttgagaccagaagaaggaggccctagg

SEQ ID NO: 562631 - DNA, 520 bp, Homo sapiens
agggagggggaacatcacacacaggggcctgtcagggggttgggggataggggagggatagcattaggagaaatacctaatgtaaatgacgagttgatrggtgtagcaaaccaacatggcacatgtatacctatgtaacaaacctacacgttgtgcacatgtaccctagaacttaaagtataataaaaaaatttttttaaagatgtatactataagtcacatgttttaatttttctaatcactacatttacaaaataaggaaaagaagatcaaaacaatttcaataatatttaacccatatatccaaaatattatcatttcaacatgtaatcaatataaaaaatgttaataggacatttcattttttttgttctaagtcttcaaaaagccagtgtatattttatattaataccacatctgagttcagactatccacaaggaaagtgctcagtagccagatgtgactagagcctaccttactggacagcacaaatctaaaacatgcttttcaagtcctata

SEQ ID NO: 562632 - DNA, 520 bp, Homo sapiens
agggagggggaacatcacacacaggggcctgtcagggggttgggggataggggagggatagcattaggagaaatacctaatgtaaatgacgagttgataggtgtagcaaaccaacatggcacatgtatacctatgtaacaaacctrcacgttgtgcacatgtaccctagaacttaaagtataataaaaaaatttttttaaagatgtatactataagtcacatgttttaatttttctaatcactacatttacaaaataaggaaaagaagatcaaaacaatttcaataatatttaacccatatatccaaaatattatcatttcaacatgtaatcaatataaaaaatgttaataggacatttcattttttttgttctaagtcttcaaaaagccagtgtatattttatattaataccacatctgagttcagactatccacaaggaaagtgctcagtagccagatgtgactagagcctaccttactggacagcacaaatctaaaacatgcttttcaagtcctata

SEQ ID NO: 562633 - DNA, 520 bp, Homo sapiens
agggagggggaacatcacacacaggggcctgtcagggggttgggggataggggagggatagcattaggagaaatacctaatgtaaatgacgagttgataggtgtagcaaaccaacatggcacatgtatacctatgtaacaaacctacacgttgtgcacatgtaccctagaacttaaagtataataaaaaaatttttttaaagatgtatactataagtcacatgttttaatttttctaatcactacatttacaaaataaggaaaagaagatcaaawcaatttcaataatatttaacccatatatccaaaatattatcatttcaacatgtaatcaatataaaaaatgttaataggacatttcattttttttgttctaagtcttcaaaaagccagtgtatattttatattaataccacatctgagttcagactatccacaaggaaagtgctcagtagccagatgtgactagagcctaccttactggacagcacaaatctaaaacatgcttttcaagtcctata

SEQ ID NO: 562634 - DNA, 520 bp, Homo sapiens
agggagggggaacatcacacacaggggcctgtcagggggttgggggataggggagggatagcattaggagaaatacctaatgtaaatgacgagttgataggtgtagcaaaccaacatggcacatgtatacctatgtaacaaacctacacgttgtgcacatgtaccctagaacttaaagtataataaaaaaatttttttaaagatgtatactataagtcacatgttttaatttttctaatcactacatttacaaaataaggaaaagaagatcaaaacaatttyaataatatttaacccatatatccaaaatattatcatttcaacatgtaatcaatataaaaaatgttaataggacatttcattttttttgttctaagtcttcaaaaagccagtgtatattttatattaataccacatctgagttcagactatccacaaggaaagtgctcagtagccagatgtgactagagcctaccttactggacagcacaaatctaaaacatgcttttcaagtcctata

SEQ ID NO: 562635 - DNA, 445 bp, Homo sapiens
atatttttgaaccacagttgactgtaggtaactgaaaccatagagagtgaaattgcagataaggggggaactactgtattggttacaattaatgagccaatattgatacattattcttaatgaatgtccatactttgttcagattttcttagtctttatctaaggcttttttctgttccaggattccatagaagataccacactacatttagtagtcatgtcgctttaggctcctcttggctatgacagttactcagactttattttcatgacatttgcagctttagagagcactggtcgggtattttggagaatgtccctcaactgggatgtgtctratgtttttcttatgattatactgggattatggattttgagaggaaggctgcagagataaaatgtcattttcatcacatcatatcaaaattacatgctatagacatgg

SEQ ID NO: 562636 - DNA, 601 bp, Homo sapiens
ttatttactcaaaagtcattcrggagcagattgcttaattcccttgtaattgcatggttttgagtgattttttttaaagtcttgatttctatttttattatgctgttgtctgagagtgtgtttggtatgattttggttattttgcatttgctgaggattgttttatgtttgattgttggtcaattttagagtatgtgccatatggcgaagagaagaatgtatattctattgttttggggtagagagttctgtagatgtctgttaggcccagttggtcaagtgtcaagctcaggtcctgaatatctttgttagttttctgtcttgatgatctgtctaatactgtcagtggggtgttgatgtctctatttattgtgtgtgtgggttctaagtctcttcataggtctctaagaacttgctttgtgaatctgggtcatcctgttttgagtgcatatgtatttaggataattaggtcttcttgttgaattgaaccttttaccattatgtattgcccttctttgtcttttttgaccattgttgtaatgcccttcttgtctttttgaccattgttggcttattgtctgttttgtctgaaattacaatg

SEQ ID NO: 562637 - DNA, 362 bp, Homo sapiens
taaagtttaaataacttgagaatgggtgacaaggctaaaatttacctaagcatctttgtaaatgttcaaagatcttaccacagcaagtctggcaatcattccattctttgagtgtgtatttaatgagacaactctgatttctagtgatcttagcagggaaaagtcacatcagcttactcattgtgcttcgatttgtgacaagatgcaatctacctttcctgaaacttcttcttactttaatagtctttggtatttatattggcaggaaaataacagaaaattgtctgtgaaaaggcaatgctaatctatgcawataatacacaattgatgtgactatacctctggactgcaatcatatactt

SEQ ID NO: 562638 - DNA, 484 bp, Homo sapiens
ctttgccagcatttgggattgtcattaatttttttttttttttttttttttgagatagagtctcattcttgtcgctcagggtggagtgtgcaatgatgcgatctcagctcactgtaacctctgcctcccgggtacaagtgagtctcctgcctcagcctctaragtagctgggattacaggcgcccaccaccatgcctggctaatttttgcatttttagtagagacagggtttcaccacgttggccaggctggtctcaaactcctgacctcaggtgatccacccgccttggcctcccatagtgctgggattacaggcgtgagccactgcgcccggccctaaagttggttgttctaatacacgtatcttcatatccaattatggtctgaatttctatttccctaatgactactattgtggaagctcttttcatgtaatttttggccatttttatatcttttcatgttaactgtgttaactcttatt

SEQ ID NO: 562639 - DNA, 484 bp, Homo sapiens
ctttgccagcatttgggattgtcattaatttttttttttttttttttttttgagatagagtctcattcttgtcgctcagggtggagtgtgcaatgatgcgatctcagctcactgtaacctctgcctcccgggtacaagtgagtctcctgcctcagcctctagagtagctgggattacaggcgcccaccaccatgcctggctaatttttgcatttttagtagagacagggtttcaccacgttggccaggctggtctcaaactcctgacctcaggtgatccacccgccttggcctcccatagtgctgggattacaggcgtgagccactgcgcccggccctaaagttggttgttctaatacacgtatcttcatatccaattatggkctgaatttctatttccctaatgactactattgtggaagctcttttcatgtaatttttggccatttttatatcttttcatgttaactgtgttaactcttatt

SEQ ID NO: 562640 - DNA, 587 bp, Homo sapiens
cctgagaaagtccatccaaagaattcytaatatactaatgggtcggtgataagaataattttcaagattgtgttgagacaggttttaagtcattcattcagcaaatacttctttaaaagcttttatatggtaggcacacttctaggtgctgagtgaaaataaggaggaggaccctgccctttatcacttacagttgaggaatttctcttctgctcccaggttgctgagtgtttttatcatgaaagagtgttggattttgccaagtgccttttcagagattatctttttttgccctttacttgtcaacgtggtatataacattgattgattttcatatgttgaacacatctttgctttccttgaataaatactacttggtcatagtgtataattattttcatgagccactggatttggtttgcttgtattttgttgaagatttttgtgcctatattcatgaagtatgttgagtagttttcttataataactttgtctgcttttcatatcagtgtaattttggctttgtagagtgaattgcaatgtgttaactccttttctgtattttttgggggaggggaaagaattt

SEQ ID NO: 562641 - DNA, 552 bp, Homo sapiens
atttgaaacttttcttatttcttggtcaatcattctagagggttgtaaattttaaaaaatcttttccaaaaaccaaatcttgcctttcttattgtttctctattctctactgatttcctctttaatctktattacttgttctttatttgggcttagtttgcctttctttttatagtttcttacagtggaagatttggctattgattagagactttttttattaatataggtgtttggagctatacatttccctatattcactgctttatctgcaaaccatacagtatgttatgtagtgttttcattttcaacatttcatttttaatttctcttgtgacctctttgactcattggttatttaggagtgtattgtttaatttcctcaaatttgtggatttcctaaatttccttcagttattgatgtctcattttatgctgtcagagaacgtatgttgtataactttaatcattttaaatttattgaagcttgtctatgacctgctatattgtgtattctggagaatgtcttgtgggcacttgattcttctattt

SEQ ID NO: 562642 - DNA, 552 bp, Homo sapiens
atttgaaacttttcttatttcttggtcaatcattctagagggttgtaaattttaaaaaatcttttccaaaaaccaaatcttgcctttcttattgtttctctattctctactgatttcctctttaatctttattacttgttctttatttgggcttagtttgcctttctttttatagtttcttacagtggaagatttggctattgattagagactttttttattaatataggtgtttggagctatacatttccctatattcactgctttatctgcaaaccatacagtatgttatgtagtgttttcattttcaacatttcatttttaatttctcttgtgacctctttgactcattggttatttaggagtgtattgtttaatttcctcaaatttgtggatttcctaaatttccttcagttattgatgtctcattttatgctgtcagagaacrtatgttgtataactttaatcattttaaatttattgaagcttgtctatgacctgctatattgtgtattctggagaatgtcttgtgggcacttgattcttctattt

SEQ ID NO: 562643 - DNA, 479 bp, Homo sapiens
ataataatagacatcaaagaacttttagagatgggatcctgaaattgatcaacactcttttggaaacatgtgacagaaacctaattcaaattaccttgagcagaaaggaaacatggtggctcttgcagctccactagttcacatgcctgaaggaattgttggggaaactaggatgctgaaagggtctcagtacctctggactctctctttctatctagcttttatcatgctggtctctgattggctttgttctgcacacaagcttttttcaaatgatgcagaagatgcctgctggtagcaccagagacctagctccagactcagcagtccctgaggagtgggaactcctttctaccagtcctgttctaaggaagaactctggccttcctcgtaccctatgcccaaatgcttggagaaaaaaatttctcttgccatgggtgtactatgagttaaaastgctggcttcattttcctcgagc

SEQ ID NO: 562644 - DNA, 536 bp, Homo sapiens
acttttaaagagatgttcaatgmccagtttttatatctctcagaggttggaagtgacatgaattggttatcactgttaaatgtgattgtctagattaaagtatgctcatgaagaaaatgaggaaaagtttacatttctgccagagttatataaattattttatatgtgtttaagttctttttctttttacacatttaggatgcaaagtatatgacagagtatccaatactgaaggttgggaattatcctatgccactttcctatcttgacctgcactatgtgtcttagcctctggtaaagatctgttgtgtgggaagctctcaataaacagccattgagaagacagtgatagttcttaaaattaatacctctagaagagttcacaagtgtaataatcatgctataattgtcaccaacacattcaaagaactagaaactttgaatgattaagctagccatgcccatgaccatggggccactgatccaaaccatgaaagcaagtatatcatgaaagaaaaccattttgcaaggggaaa

SEQ ID NO: 562645 - DNA, 536 bp, Homo sapiens
acttttaaagagatgttcaatgaccagtttttatatctctcagaggttggaagtgacatgaattggttatcactgttaaatgtgattgtctagattaaagtatgctcatgaagaaaatgaggaaaagtttacatttctgccagagttatataaattattttatatgtgtttaagttctttttctttttacacatttaggatgcaaagtatatgacagagtatccaatactgaaggttgggaattatcctatgccactttcctatcttgacctgcactatgtgtcttagcctctggtaaagatctgttgtgtgggaagctctcaataaacagccattgagaagacagtgatagttcttaaaattaatacctctagaagagttcacaagtgtaataatcatgctataattgtcaccaacacattcaaagaactagaaactttgaatgattaagctagccatgcccatgaccayggggccactgatccaaaccatgaaagcaagtatatcatgaaagaaaaccattttgcaaggggaaa

SEQ ID NO: 562646 - DNA, 536 bp, Homo sapiens
acttttaaagagatgttcaatgaccagtttttatatctctcagaggttggaagtgacatgaattggttatcactgttaaatgtgattgtctagattaaagtatgctcatgaagaaaatgaggaaaagtttacatttctgccagagttatataaattattttatatgtgtttaagttctttttctttttacacatttaggatgcaaagtatatgacagagtatccaatactgaaggttgggaattatcctatgccactttcctatcttgacctgcactatgtgtcttagcctctggtaaagatctgttgtgtgggaagctctcaataaacagccattgagaagacagtgatagttcttaaaattaatacctctagaagagttcacaagtgtaataatcatgctataattgtcaccaacacattcaaagaactagaaactttgaatgattaagctagccatgcccatgaccatggggccactgatccaaaccrtgaaagcaagtatatcatgaaagaaaaccattttgcaaggggaaa

SEQ ID NO: 562647 - DNA, 578 bp, Homo sapiens
gaacggcactttaaaggccacgggctcccacaggcttccgtcctctctcgcgagatcggactgacaacccccgcccgctcgccccgctcccggcatccccaccttccttctggcgcccctccccttcacccacacgccccttcttgccttccttctgagggagcgcctccgagtcaggtgattccgtcaggcttaaggagaagaaggcgggtcttcggcagggcgggtagaggggacgggcatcaaagagcactcgggcgctcatgattggacaaggagcccgaagggcgggaagcagttctggagggggcgggaccagagggcccaaggagcgttacttctgtaaacycggagctgtggaagactgtgattggctgtcggctggaggagggcgcgggtgcaggcggcggtgaagggctaggcagggctttggcggtgtgaggggaggaaaggtggtgagctccggaaaggctgctagagggaaagcaggatgggtcctccgagcccagccccaggagccgggtgtctccgtttccgtcacttcccagcactaggtagggaggtgggtaaaagtaggc

SEQ ID NO: 562648 - DNA, 569 bp, Homo sapiens
agtgtttgattgattagttggtacaggtttagaattatctctcatcacctttttcacacttatcaaatgaattgacacatttgacctgtgacttggggatgtcccaaacacggtcaagatrtacagcatatcataagagcaatcatcctacataagagttgctgctttgacattgacaaggcgtgtgcactgattatgctgtaggatgtggatgtactgatttatgtatatggctacaggatttgacagcaaacaattctatcaactggaaattagcaagtactgtgaattacaaattacaagacagaaaaagaaagagagggaaaggcagagaggtgaagttatgtagaaacttcatatgcatctcaagtttgagcatttgagaagttataaggccaaaaagtaactcaaaaatgatgcctgatccctagtagtgcacttaaatacatgaacttaagaacagctgacaaactaaatatgttgcttcatgtttattaaatgatgagagagagagtattttattaaagaagggaatctgtactaggaaggaaagcacacccctttcttct

SEQ ID NO: 562649 - DNA, 464 bp, Homo sapiens
aacagttttttttttttggtgaartcttcaggttttcaatatatgatcatgtcatttgcaaagaagaataaattgactttttcctttcctatttggatgttctttatttctttctcttgactaattgctcaggccagaacttccagaagtatactgaataaatgtggtgaaagtgggcattcttctcttgttccatatcttagaaaaaaggctttcagtttttccccattcagtatatattagctgtgggtttgtaatacatggactttattatcttaaagtatgtttcccctgtactcagttttttgagtttttgacatacaaggatgttgaattttgtcaaattatttttcagtctctattgaaatgatcatacggcttttgttcttgattttgttaatgtgatatattatgcttatttatttgcgtatattgaaccatccttgcatatctggaatgaattc

SEQ ID NO: 562650 - DNA, 539 bp, Homo sapiens
gaatgaaaaggatttttcctgtttggttcatggaaggaaaactttgttttagaaaatgaataatttcatgagaacatttaagactacagctaagaacatgtcaaactagcaagaaaaaaatctttgatgaggaactcagttatcaatttccatacaaaggcttatccagcacaggcatgcaggtagtttacacatggagaagtcaaaagcagcttttcagtgtctggaagccaaggcgagttctaatcatttaatcacttctgctccatatctttgtcctcattatcaaaagactcagaaaaagcctagcagtgagagaaacaagaagctgggtcacacctctaggacttattcccagaccccagtttygccccacagggttaagatggcatcacacagccaggtgcggtggctcacatctgtaatcccagcattttgggaggctgaggagagcggatcacctgaggtcagcctagcaaaaatggtgaaaccccatctctactaaaaatacaaaaaaattagctgggcatggtggtgag

SEQ ID NO: 562651 - DNA, 646 bp, Homo sapiens
ttgccttctgcacacccacaggcccaataccacgtgaaagccttgaaggcttggggcttacaccctctgaagcaatggctcaacagctaccttggccccttttagccatggctggaactagagcagctgggacacaggatgccatgtcctgaggctgcacagagcagcagggcccacaaaacccttttccctcctaggctttaagyctgtgatagggagagctcccttgaaaatctctgacatatcctggagacattttccctgttgtcttggccattaacatttgtcttctctttacttatgcaaatttctgcagctggcttgaatttctcctcagaaaatgggagaaatgggtttttcttttctaccacatggtcaggctgcaaattttccatacttttatgttctgtttcccttttaaacagaagttcccatttcagaccatctttttgtaaacacatatgactatatgcttttggaaacagagaggtcacagatcaaatgctttgctgcttagaaatttcttctaccagataccctgaatcatctctctcaagttcaaagttccacagatctctagggatctgtggggaagaagcaaaatgccaccagtctttttgctaaagcatagcaagagtgaccttta

SEQ ID NO: 562652 - DNA, 589 bp, Homo sapiens
tcattttcacaagagctatttatcatgactgtttatttattatgactgtgtgagagcagagttctcacctgaaatcatgtaacttattttctacatagttgatgaatagagtagacaaaacatggactatatcataaagaaaaaattttatagctgatatttaccaaaagtgttggacacagatgcatctcttttagtaatcaacaatcatgagcttaaaactgacytccagagtcaagacatcaatcacctctgtaattctctgccccatgtttcccataaaattgctacccatggcatcaggagctagccaaaacagaagaggaagaagggacaagctgtatgaaaataataataatggtatcttacacatacaccatgctttgtagttcacaaagcagttacatgtgtatttattacctcatttcaacttgaacacaacttcgttgtgagcaagactggtggtgttatcttcattttattcaagaatgaaacaaaactgaaatattaagtgacttgtccaaggccatccagctttttagatataatattaccatccagtaaaactcatatggcagaaatgccctgt

SEQ ID NO: 562653 - DNA, 521 bp, Homo sapiens
cagtactcactacagtcacatgytgtacagatttgtagcctaagagcaacaaactatactatatatcgcaggtatgtagtaggccataccatctaggttagtataagtacacactatgatgttacacaacaataaaacttcataacaacacatttctcagaaagtattgccattgttaagtgacacctgactgtatatcaaaaatccagactaggacaatctatagaggcaggaggtagattagagatttcctaggactgagagtgggagattgagtgattgctatgagtatgggttttttgggaagagagaaagatgaaaatgttctaaaattgatcatagtgatagttgtaaaactccttgaataatgtaaaaaacattaaactgtgtactttaaataggtgagttctatggtatgtaaattatatctcaataaaggtctttttttaatatcctgcaggtcagaggacagtttcgtactgtgtgagactatattgtcatcttctttatgctttgcaaga

SEQ ID NO: 562654 - DNA, 546 bp, Homo sapiens
aaaaaaaaaaaaaaaaaaaaaaaaaaaaaaattaactgggcttggtagtgcacacgggaggatcacttgagcaccggagattaggctgcagtgaactgtgatcattccactgcactccagcctgggcaacagagagagcatgccttaaaaaaaaaaaaaaaaaaagaattttttacaatttgtaccgcatgctttgagttgaatagagtcattgaraaagttggcatgacttttagttaataaaatataaacatctgagcagttttggaaagtagcaatatggagaaagatttttcaatctttcatcctcaaattaaattgtgagctctatcgcaaatcatggtaggtgctataaggtcattaaaactaaccagggggccatttactgtacttgattatgcactattatgcactaatattaagcaagacaagtgagaagcaggagcacattctaagataatgcagacttttttatggcattgactgatgctaaaagaggaaaatggatgcattcatcagccacgtgaaactgtaggtgacagaaaa

SEQ ID NO: 562655 - DNA, 574 bp, Homo sapiens
tattgataatgatttagaatctgatggtatgtatatctatctacacacacacacacacacacacacacacaactctgactcaaaaggagatgactgctgtttctgtcctctttcargggaccaggtgctattttctgccacctttccagtcccctatcattccctgacactcttgacctcaagctcatcaacaaggaaataaacttacaaatttgtttagaaaataaactgcttgtatttcctaagtttttctgtcctgaatatgaacagctttttgttcttatgttttggtttttgtaacacacatatctataaagatatgtgtgtgtatgtatatgtatatacttttttaaaacattttgctagatggaaattaatcacagaaatggccaagatggataatggaataaaatgggtgaaagactgtggcactcaaaaccagatgaaactcagggctgtcaatgtcttgtgaataaactgaaaactaatttttaatccaatcagtgctattgcctgactgagtgaccaagtgggagtccccgtataaccttgtttctcatttataaaatggcat

SEQ ID NO: 562656 - DNA, 567 bp, Homo sapiens
aataaaatttatctatgttatatctaaagaaaacaggataataaatgaatataaaaataacaaaaaaataaggaattttttttttaacttacagccctagtactgagaaactgctcatacacyaatttcattaccaatttctctcttcctttataggaaaacctacaggattcacatattatcctttttggctataataaaaacatgcatcttgtgtgtttatcatatgccatgcattctactaaaagcttcacatagcatttaatcttcacagtaactctatgtggtatattttctactatccttgttttacagagagaaaagtgaagtttcaacagatgaagtagcttatagtctcaaaataggaaatgataacactataactcaaaacagacgcttaagccttatttaatagaattaatttgatatttatagaaaaattgagaagatggtactgagaggcttcatatatctcatactcagtttcccctattgctaatatattactgtcatgtgtttgttacaattgatggactgatattgttacatttttattgacaaaagttc

SEQ ID NO: 562657 - DNA, 567 bp, Homo sapiens
aataaaatttatctatgttatatctaaagaaaacaggataataaatgaatataaaaataacaaaaaaataaggaattttttttttaacttacagccctagtactgagaaactgctcatacactaatttcattaccaatttctctcttcctttataggaaaacctacaggattcacatattatcctttttggctataataaaaacatgcatcttgtgtgtttatcatatgccatgcattctrctaaaagcttcacatagcatttaatcttcacagtaactctatgtggtatattttctactatccttgttttacagagagaaaagtgaagtttcaacagatgaagtagcttatagtctcaaaataggaaatgataacactataactcaaaacagacgcttaagccttatttaatagaattaatttgatatttatagaaaaattgagaagatggtactgagaggcttcatatatctcatactcagtttcccctattgctaatatattactgtcatgtgtttgttacaattgatggactgatattgttacatttttattgacaaaagttc

SEQ ID NO: 562658 - DNA, 567 bp, Homo sapiens
aataaaatttatctatgttatatctaaagaaaacaggataataaatgaatataaaaataacaaaaaaataaggaattttttttttaacttacagccctagtactgagaaactgctcatacactaatttcattaccaatttctctcttcctttataggaaaacctacaggattcacatattatcctttttggctataataaaaacatgcatcttgtgtgtttatcatatgccatgcattctactaaaagcttcacatagcatttaatcttcacagtaactctatgtggtatattttctactatccttgttttacagagagaaaagtgaagtttcaacagatgaagtagcttatagtctcaaaataggaaatgataacactataactcaaaacagacgcttaagccttatttaatagaattaatttgakatttatagaaaaattgagaagatggtactgagaggcttcatatatctcatactcagtttcccctattgctaatatattactgtcatgtgtttgttacaattgatggactgatattgttacatttttattgacaaaagttc

SEQ ID NO: 562659 - DNA, 505 bp, Homo sapiens
aaaaagttcacagaaaatgtgtattatgaagaaactgtgcatggatttcatttttttgcaccaaaataaacttgtactaacttgttataacatgtctgaaggggatctagtttgaggtactaagaaggataagacatcrgtttgaaaagagcctctatcagagcaacataagttctgaaacaagaacaaacaacaaatttttggtgaagcttgggtggagaagggtgaaatcattgatactttatgaaaagttcatggatactatgcccaaagtaaatcagtatttacaaatgaataactcattttaagaaggcataagacaatgttgaagatgaagcctgtagcaacagatcatctacatcaatttgtgagaaaaaatttcatcttgttcatgctgtaatcgaagatgatcctatggttaaaagcagaaacaatagccaacactatagacatctcaattgattcagcttacacatctcaattgattcagcttacacaatgctga

SEQ ID NO: 562660 - DNA, 528 bp, Homo sapiens
aaactgaaagaagaaaagatgtttatttgtaacccacccattcccatccccagattcagattccactacaccacaaaaactcttaacatgatttgggagattccctcatttcatacacacacacacacacacacacacacacaaacgcacacacacacacagagcagaggcaaattatatcgcgctggaggtgattccctgccctccagggctggatggtaaagaagttttattytattttatttattttattttgaaacagggtcttgctctgtcactcaggcttggtttgcagtggtgcaatcgtggctcactgcagcctcaacatcctgggctcaagtgattctctcacctcttcctcccaagtagctgggactacaggcatacatcaccacatccagctaacttttaaattttttgtagagacttggtctcacaatgttgccccagctggtctcaaactcctgagctcaggtgatcctcccaccttggcctcccaaattgctgggattacacacctgaccagta

SEQ ID NO: 562661 - DNA, 576 bp, Homo sapiens
gctattcccaaaataattgttttccttcacttacatactcttaaaaatcttctaactgaatttcatatctccagaactaaacactttaacattacgaatattttggttccaaaggggggaaatacgatgaaaatgaatttacccgaacttcagacttaaacatctcacccttaccagtcagtatcaataaacatttattgagtagctacagtggccaagtcactatggcatacagaaatgaagagtcaatgcacatagcagtgaggagatacatgccaaacgaaaaayctggaacataagtgacaaaagctatgtttctgatttaaaacaatttgcacatctctacctatccttcacattaatttataagcatagacagatagatacagtatgtaatatcgttttatgttacaccagcaagaaaattagtgccattaaagagatggaaaaagagatatttttaagctgcaaaatagtaggagagaagaaggatagagtgtatgtggccagggagaatgtcgtcatccaagcaggaaattttattaattctgagcagaaaccatgagcttatgagtt

SEQ ID NO: 562662 - DNA, 635 bp, Homo sapiens
agtgattgtgggactttgcattggaattaagcactgctttgtcacagcagaaagcaatatagggcagaattcaacctgagcccatggagagagtgtttaaaccagccctagcaagaggcaaatcatccatcctaggttggaacctgagtttgaataagccctgactgacactgtgggttaaagtggtctggggtcataaacttgaaaggcaatctaggctacaaggactttaattcctgggcaagttctggtgctgtgctgggctcagggccagtggacatggagtgcactgacctactgagagacacgagccagggcaacaaagggagggcttgtgtcacccctccgccaagcccaggcagtgcagctcgcaggtccaggagagactccttccttccacttgaagagaggagagggaagaataaaggggactttgtcttgcaacttggataccagctcagccacagtagaacaggttaccaggcagagtcctgaggcccccattcaaggccctagctgaacatttctaaacataccgtgggccagaagggaacctactgccttgaagagaagaacccaatccwggcagaatttatcatctgctgattaaggagcaatttgagccctaaaaaatc

SEQ ID NO: 562663 - DNA, 569 bp, Homo sapiens
gaattgactcacacgatcacaaagtgaagactcacaatatatacaaacatatatatacatatgtatatgtattkataacctcagcttgcagatggcctatcatatatatgaaaggcttttcatatatatatatatgaaaagggtttattaaggagaattgtctcacacaatcacaaggtgaagtctcacaatatataaaaacatatttgtaaatatatgtatacacatatatacatatatatatataatgtgtgtgtgtatatatatatatatatatatatatatatctcctattagttttgtccctctggggaatcctatataccatgtaaagttaaatcatcccatgccctgcccaagttatagacaggtgacccaagctatgtcaattggagtctccctccctggaattttaatctttaagtatagaatgactacattcattcatgaactcaaacatatttacaagaaaaaaaaaaccccatcaaaaagtgggcaaaggatataaacagacacttctcaaaagaagatatttatgcagccaaaaagcacatgaaaaaatgctcatg

SEQ ID NO: 562664 - DNA, 569 bp, Homo sapiens
gaattgactcacacgatcacaaagtgaagactcacaatatatacaaacatatatatacatatgtatatgtatttataacctcagcttgcagatggcctatcatatatatgaaaggcttttcatatatatatatatgaaaagggtttattaaggagaattgtctcacacaatcacaaggtgaagtctcacaatatataaaaacatatttgtaaatatatgtatacacatatatacatatatatatataatgtgtgtgtgtrtatatatatatatatatatatatatatctcctattagttttgtccctctggggaatcctatataccatgtaaagttaaatcatcccatgccctgcccaagttatagacaggtgacccaagctatgtcaattggagtctccctccctggaattttaatctttaagtatagaatgactacattcattcatgaactcaaacatatttacaagaaaaaaaaaaccccatcaaaaagtgggcaaaggatataaacagacacttctcaaaagaagatatttatgcagccaaaaagcacatgaaaaaatgctcatg

SEQ ID NO: 562665 - DNA, 569 bp, Homo sapiens
gaattgactcacacgatcacaaagtgaagactcacaatatatacaaacatatatatacatatgtatatgtatttataacctcagcttgcagatggcctatcatatatatgaaaggcttttcatatatatatatatgaaaagggtttattaaggagaattgtctcacacaatcacaaggtgaagtctcacaatatataaaaacatatttgtaaatatatgtatacacatatatacatatatatatataatgtgtgtgtgtatatatatatatatatatatatatatatctcctattagttttgtccctctggggaatcctatataccatgtaaagttaaatcatcccatgccctgcccaagttatagacaggtgacccaagctatgtcaattggagtctccctccctggaattttaatctttaagtatagaatgactacattcattcatgaactcaaacrtatttacaagaaaaaaaaaaccccatcaaaaagtgggcaaaggatataaacagacacttctcaaaagaagatatttatgcagccaaaaagcacatgaaaaaatgctcatg

SEQ ID NO: 562666 - DNA, 612 bp, Homo sapiens
ctgtattctaaagaatgtcttcagtaagattacttgcagtcatcacatgaattgaggctggaaattttattcctggggagcattttaaatattacgaagattctacatccttttcagttaactataaaagagatcaagcctttgcagatgtgaattaaatacgcccttttctttgcttgccacaacctctaacagtgtcttttttatcttatctgctcagtgtattaaggattcataatatttagtctgtaagattatttttaagattcttaaaatacaaataccacctatggaatgtttcaattttaaacaaggtgaaatcaatttttttcatatttataatttctatttccattttgttcaaagaaaggtatgaataaggcaaaacatcactaaagtcagtatttccaggtaatcataagttgtataacggatcttagtatgagtattataagagggaacataatcataggaaatatgtataaataggtcaattgaagaaaaattataaaaacagtatgctgtctcctttaaacaatagaaatacatgaagatacatatttttaagaaagattattcttgtatactayattaaatagcatattatttaga

SEQ ID NO: 562667 - DNA, 557 bp, Homo sapiens
aaagagagttttcagtagtcctttatagagacctaatacaaaatccaaatatcatatttaaaacatggataatgagcccattacaaaataaagatatgacagttataatactttatgtccaaaagcatgaaagagacaaaataaaatatactaccctgaaatcaagatcaagataaaaaggatctgaaaatattatgagtgtgtatattatatgaaactctgtagtcttcaaacaaggaatgcaaacttctttacaggtgcccatggactattacaaaattgaccttacaktaggctataagaaaatccccataaattctatcacaatgcaaaaactgttgggccacattttctgttcacagtacaaataaactagacatcaataagaaaagaacaaagaaaaatccataatcacttaaaaattcataaaactctttccaaataagttcctgagctcaatgaggaaaacaaagctatcaatacagacttctttttttttttttttttttttttttttgagacggagtctcgctgtcacccaggctggagtgcagtgg

SEQ ID NO: 562668 - DNA, 612 bp, Homo sapiens
ccaaataaacctcttttctttaaaaattactcagctatccctgtatagcaacatgaacagaactaagacagaaattcggtactaagagtggggaggttaggccgggcgcggtggctcacgcctgtaatcctakcactttgggaggctgaggcaggtggatcatgaggtcaggagatcgagaccatcctggctaacacggtgaaaccccgtctgtactaaaactacaaaaaaaagtacccgggcttggtggcgggcgcctgtagtcccagctactcaggaggctgaggcaggagaatggcgtgaacccgggaggcagagtttgcagtgagcggagatcgcgccactgtactccagcctgggctacagagagagacccatctcaaaaaaaaaacaaaaagaaagggagttgggaggttattctggactgtctaaataagcccaatgtaatcacaaagattcttataagaggaagattaagggtgtgatgagacaagcggagaacagagactaaggcaaagactttaagatgctccactgctggcctagagttccagagggaggaatgcttctaccaggagacgcaaccatgatgttacgaaactggaagttagg

SEQ ID NO: 562669 - DNA, 573 bp, Homo sapiens
tggcaggcttgtgacagcacccaggcttagccacaactttgctccaaaatcatagttgkcaccaggagcagggagaggccagggagctagagcagacacttacgagcctacggggacagggggtcttcctgggcccccaagagtgcatggattccctcgtcctggtccagagtctgggctgggctgctgcagatgtccctgggagtgtgggattcccacccttttaactcagtagggggcagggctcctgcttgttcctggcccaggccagctctggagcacacagccctcactgcagctggtgtgtgtcagtggctgctgcaaacatcagttaggttaaattggagaactattggagattctgctgggcttaagcataaaacactttttgaggacaagattgattagtactggcctatgtttttgagggtgttctttctcatatagagatgaatgctttatttacaaatgtgtttgagttctgaaattgatattttcattaaaatgtgctataaaacctttaatctttctatacattatttttcttgatctctaaataaaataatttaaaac

SEQ ID NO: 562670 - DNA, 573 bp, Homo sapiens
tggcaggcttgtgacagcacccaggcttagccacaactttgctccaaaatcatagttggcaccaggagcagggagaggccagggagctagagcagacacttacgagcctacggggacagggggtcttcctgggcccccaagagtgcatggattccctcgtcctggtccagagtctgggctgggctgctgcagatgtccctgggagtgtgggattcccacccttttaactcagtagggggcagggctcctgcttgttcctggcccaggccagctctggagcacacagccctcactgcagctggtgtgtgtcagtggctgctgcaaacatcagttaggttaaattggagaactattggagattctgctgggcttaagcataaaacactttttgaggacaagattgattagtactggcctatgtttttgagggtgttctttctcatatagagatgaatgctttatttacaaatgtgtttgagttctgraattgatattttcattaaaatgtgctataaaacctttaatctttctatacattatttttcttgatctctaaataaaataatttaaaac

SEQ ID NO: 562671 - DNA, 597 bp, Homo sapiens
gctaacgtgctaagtataaaaagcgaaactattaacaagtagaagaaaaatcagtgggagaatgggcatacatttacatgatctggttgaaatacattcttaagcaagttacaaattccagatgtccaaaaggaaaaataacaacataagtattttcattatttttattagggaaaataagatacacacatttaaatactacctacatacttggagaatatattgagcttgtagatatgcaaakaaataatacctagattttacaaagcacttttaaaaattaacaattaaaagactaacagaaaagtgaacaaaatatatttttattcaattccaaagagtaaaaaggaaaacaaatatgtgaaaatatgttcaaactgaaataacaattatgagcatacaaactacaaataaatcttttctccataatattgcacatattttaaagattgataatcaaatcatattcaagcttttccttgaaacatgatgaaaactttgatgaataagggaattaattaaacttcaagggaaaatgtaaaagagtcagagaaaagtggatacttttttcacataagaagaagcaatcagatgcct

SEQ ID NO: 562672 - DNA, 609 bp, Homo sapiens
cacaacaaaattctagaatttagacattttataagtttcttccagtaattttattctgctcaaaatacaatttcccagcaattgctcatacacacaaatacatatacatctatataggtatatattgatacacattattatgtgccactgcactccatcctgggcaacacagcaatatttcatctcaaaaaaaaaaaacacaagtaaacttattaaagtgaaattcaaactttgagttcctggcatacataggataaatatctaggtaaaagcagtgtagcctagaatagataatactgagacttgaagagttagctatacttttaaataatttaaagggaaatgctaaaaaatagtcatgggaaataggatctgtctttacctgtaaggtatctatttaagctttgttggtgaaccaktatatagaaaataatttcaactttcctagtactgtattactttacaaattaaattttaaaaaatcataaaccataattattcactaaaacacagaacaagaaaacaaatacaaacacagaggtctctgtacccacatgtttctctcaaggagtgaatattttctcagtgagagtaattttacaggctaag

SEQ ID NO: 562673 - DNA, 338 bp, Homo sapiens
tctatggaaagtgcattacaagaaggagaaaaaaaaaagcaaggcatgagaattcttggtagtttcaaaacaaggaaacaagtgtagctagagtggaagaacaraagagagtgcaatagaagataaagtcaagaaaatggcaggaaacttttttctgtaatgtcttgtaggcctaggtaagaatttgagattttattccatgtaagatggaaagctattaacagattgttttagaagtatcactagtgttatgtatagaatagattatttagacaaaggtggaatgaagaagatcaatcaaaagcctgttgtaaaagaccactctaagtaattatgat

SEQ ID NO: 562674 - DNA, 648 bp, Homo sapiens
tatttattttctcatcacaatagtcctatgaaatattttttattatcaattcagttttaaagatgaggaaacaaatgtcttgtatacccatttgaaagtcacataataagtgtcaaagttatcatttaaactctaagagtagttacatttcaaatactttttaccttggagttagaaatacgaacagaaacacaagaaaaggtackgttttaatatcaaaaacactaaaacatggcattattttaaacattgtgggtttttttaaaaaggaaacatttattctgagtaaaatggaggtgacaaaactagaaatataaaaataaatatgcactcagtacacgttatttgctctgtacagaacactttacataatcataatataaattctgattattgttcaattataaaattgccccacgatataataccaaagactaaattttaattatggagctaaatttaaatgctagcagtctatgaatatgtgaacacttgttacataatgagggtagtattactaatcaattagcaacatgtactcttcaataaatgttactagggaacttggttgtccatatgaaacaaaaataagtccaaataaaattggacttaaaagagatgaagataaagtggattaagtacttaaat

SEQ ID NO: 562675 - DNA, 474 bp, Homo sapiens
gccagccaactgtacttggctatgttggtgatattactctttaatagcattttaaccacctttccttccttaatttttacctctctactgtccatttcctataaagaarttatggaataatttaaaattcaagtcagatcaagtaattcctccaaaaacttcccatctcattcaggtaaaattcaaagtgctaactatgtcttgcaaggcccttggtgattgggactatagagcatatctcttgtcattcctcctgtctcccactttgctacaggcaccctagcctctctgctgtccttaaaaccactgccatgctctcccttcagggcatttgtgtatgtggtccttttctgaaacattctgccttagatagcagcataactttttccatgctcttttccattctttttttctttttgcctctcacttagtttacattttattttaaaaaggtaattttttaatattttatga

SEQ ID NO: 562676 - DNA, 411 bp, Homo sapiens
tccttgtcaacgctgttgtcctgggacaccaatggggccrttgccatgagtgaccaacagggggcagagctgccctcggccaagcggggacgacgtctcagctcagagttgggaagaatattcaaggcatctgcttgtgcctgggcttgctctgggtccttatatccttcctatatcatcttcttttcttctttcttctttcttcctcctcctcctcctccttcttcttcttttttcttcttcttttccgtcctcctcctcctcttcctcgtcttcttcttcctcttcctcttcttcttccccttccccttccgctccttctccttcttcctcctcctcctccccttccccttcctcttcttcttccccttcccctccttctccttcttcctcgtcctcctcttccccttc

SEQ ID NO: 562677 - DNA, 411 bp, Homo sapiens
tccttgtcaacgctgttgtcctgggacaccaatggggccattgccatgagtgaccaacagggggcagagctgccctcggccaagcggggacgacgtctcagctcagagttgggaagaatattcaaggcatctgcttgtgcctgggcttgctctgggtccttatatccttcctatatcatcttcttttcttctttcttctttcttcctcctcctcctcctccttcttcttcttttttcttcttcttttccgtcctcctcctcctcttcctcgtcttcttcttcctcttcctcttcttcttccccttccccttcygctccttctccttcttcctcctcctcctccccttccccttcctcttcttcttccccttcccctccttctccttcttcctcgtcctcctcttccccttc

SEQ ID NO: 562678 - DNA, 411 bp, Homo sapiens
tccttgtcaacgctgttgtcctgggacaccaatggggccattgccatgagtgaccaacagggggcagagctgccctcggccaagcggggacgacgtctcagctcagagttgggaagaatattcaaggcatctgcttgtgcctgggcttgctctgggtccttatatccttcctatatcatcttcttttcttctttcttctttcttcctcctcctcctcctccttcttcttcttttttcttcttcttttccgtcctcctcctcctcttcctcgtcttcttcttcctcttcctcttcttcttccccttccccttccgctccttctccttcttcctcctcctcctccccttccccttmctcttcttcttccccttcccctccttctccttcttcctcgtcctcctcttccccttc

SEQ ID NO: 562679 - DNA, 588 bp, Homo sapiens
cagtttcttgagttttctctgcttttttgatacttcatctgttggcactgtcagggaacatctggtatctcggaactataagcatcgtatgtacccctcacgtatataaaactcttatgttttaattgttttgagtaaaacaattaaaatgtaaaaaatccttagcattctccctctctctgaatcatactaactttgagactaatagtaggtttttttttttaatttttttttacttttaattttgtgggtacatagtagatgtatgtatttatgggatacatgaaatgttttgatacagtcatgcaatgtgacataatcacatcatggagaatggggtatccatcccctcaagcatttatcccttgytttacaaacaatccaattacactgtttagttattttgaaatgtaaaattaagttattattgactgcagtcaccctgttgtgctatcaaaatatagcttcaatgtatattttaaaacaagatagtatggtgcatccaactttgtttttttattcagagttgctttggctatttggggtcttttgtgatttctaggtattttgttgtagctattgtaagtg

SEQ ID NO: 562680 - DNA, 509 bp, Homo sapiens
caatgtcctataaaatacacattgctctgtagtttgtaaggtaaaaacccaagctttcaatttaataattatgcctttaaaaatgatgagggaggtggcccagttaaataaaatattaaaytgcagttcaaacaaaagttctcctcctattgcttaccatgaaaacaggacttgtctgcattcaacaattctgaaaaattttcaccacataaaggaagtataataatccaaagttcaagaaatgtctcacacagaaatgaaaaatgatttcagtgctgtggagttggacaattgcctctcagcaatgcaaaatgtgcttaggacttaactgtttcataatatggtgaccttcaataaaaataatgactataataattataatacctgaaatacgaatactacataacagtacccatcaaaaacaagaaagctcatatcattttgttttactcatgcatacacatttgcaaaagaggcatcccaaaacttcatatttatttttctaaaat

SEQ ID NO: 562681 - DNA, 584 bp, Homo sapiens
gtgcaagtttttgtgtggagatatgtttttatttctctttagtatctacccagaagtggaattactgggtcactaactttatgtttaacattttgatgaatagccatgctgtttccaaagtgtgagcaccattttatattctaccagcaattcatgagtgttccaattgctctcaccaacccttgttattatctacctttattatagtcattctagtgggcgtgaagtggttcttttctttcaagatgattttgactattctgggtcttttgaatttccatatgaattttaggatcatcttatcaatttctgcacaataaacaactgggattttgacagtgatagcagtcaatctgcaactcaatttgggaaatacagctcttaccaatattaagtcttctgatacrtgaacatgggttgtcttttcatttatttgggtcggctataatttctttaaacaatattttataattttcagagtctaaattttgaacttctttgatcaaatacaatcctaagtattttaatctttttgatgctattataaacaaaaatcttttaaaattccaattttatattgttaa

SEQ ID NO: 562682 - DNA, 584 bp, Homo sapiens
gtgcaagtttttgtgtggagatatgtttttatttctctttagtatctacccagaagtggaattactgggtcactaactttatgtttaacattttgatgaatagccatgctgtttccaaagtgtgagcaccattttatattctaccagcaattcatgagtgttccaattgctctcaccaacccttgttattatctacctttattatagtcattctagtgggcgtgaagtggttcttttctttcaagatgattttgactattctgggtcttttgaatttccatatgaattttaggatcatcttatcaatttctgcacaataaacaactgggattttgacagtgatagcagtcaatctgcaactcaatttgggaaatacagctcttaccaatattaagtcttctgatacatgaacatgggttgtcttttcatttatttgggtmggctataatttctttaaacaatattttataattttcagagtctaaattttgaacttctttgatcaaatacaatcctaagtattttaatctttttgatgctattataaacaaaaatcttttaaaattccaattttatattgttaa

SEQ ID NO: 562683 - DNA, 578 bp, Homo sapiens
gtatttttagaagagacagggtttaaccgtattagccaggatggtctcgatctcctgacctcgtgatctgcctgcctcggcctcccaagagttcaacttttttagatctcacatataagtgagatcatgaagtatttgtctttctggkcctgacttattcacttagcatatgtcctcctggttcatctatgttgtcacaaatgacaagatttccttcttttttaaggatgaataatattttattttatgtgtagatacatacatatgccacattttatttattaattcatgtgtcaattgacacatagattgattccatgtttaggctactgtgaataatgctgcaatgaacatgagaatgcaggtatgtcttgaacacactaatttcatttcgtttggctatatacccagtaaagggattgttggatcatatggtagttttgaaggaatctctatagtgttttccataatatgaagtaatttatatttctagcaacagtgttcaaatgttcccctttctccacatcctcgccaactttgttatctttcatctttttgattaatagtcattttaacag

SEQ ID NO: 562684 - DNA, 409 bp, Homo sapiens
acataatgataaagtgttcaattcaagaagaagacttaactatccaaaatatatacatgcctaacagtgtagcacccagattcctaaaacaagtttttcttgacctatgaaaatatttagacagcacacaataatagtgagggactttaataattgagacagaaaactaacaaagaaattgtgaacttaaacttgtcagttgacaaatkggacctaatagacatctacagaataccacacctaacaaccacagagtatacagacttctcatctgcacatggaacttattctaagattggccacacgctcagtcataaagcaagtctcaataaattcaaaaaaactgaaatcctaccaagaacagtctcagaccacagtgcaataaaaatggaaattaataccaagaagg

SEQ ID NO: 562685 - DNA, 409 bp, Homo sapiens
acataatgataaagtgttcaattcaagaagaagacttaactatccaaaatatatacatgcctaacagtgtagcacccagattcctaaaacaagtttttcttgacctatgaaaatatttagacagcacacaataatagtgagggactttaataattgagacagaaaactaacaaagaaattgtgaacttaaacttgtcagttgacaaattggacctaatagacatctacagaataccacacctaacaaccacagagtatacagacttctcatctgcacatggaacttattctaagattgrccacacgctcagtcataaagcaagtctcaataaattcaaaaaaactgaaatcctaccaagaacagtctcagaccacagtgcaataaaaatggaaattaataccaagaagg

SEQ ID NO: 562686 - DNA, 648 bp, Homo sapiens
ttataatatgcactaaagacatcaaaattttaaaactgtttaattttttaatttctaaaatttattctaaaaagacaatcatggatatgcagaaagatataggcataagaatgttcatcttaaatagtaaactaccaagctatttaaaatattgaaaaagaatatttaaggaacttcaagatggctgactagcatttcatgcttgcctcctccattgagaagaaccaaaatggtatacagacaatcacacttcaaatacatcatccaagagaacacyggtatgcaacagaaaagtgacagaaaacaccaaatgcaagaaaggagaaggaagagaagtagcctacttagccaggattggctgggagccgagaatgacttcccaacacagggaaagggtaagcatgagacttccagcagcccacattgccatccaatcctggccacgagagggcccctcgaccatcccaagtcctgaaatgaacacaggagctgctggaagactgtgagacagaactagtccagcggggagctcatgcagggtcccacaccctctctgagacctaagtggctacagcaaggttctatttttaaacctagcctttaacagacactatacagtcttgggccccagtcaggactgaaggataa

SEQ ID NO: 562687 - DNA, 605 bp, Homo sapiens
ttccttgctatgtagaagctttttagtttgatgtaatcccatttgtctatttttgcttttgttgtctgtgcttttgaagtcttattttaaaaaaaaatccaatccaattttatgaaatgtttccccaatgttttcttctaattgtttaatagttttgggtcttagataggcttaagctttagttcatttgatttgatttttgtatatggtgataaaaggtatctagtttcattcttctgcatgtggatatccaattttcctagcactatttactgaggagagtatccttttcccaatgtgcatgcttggcatatttgttgaaaatcaattggctgttgggttctctgttctttttcattggtatrtttgtctgtttttatgccagtgccacgctgttttgttttctgtaggtttgtagtatattttgaagtcaagtagtttgatatctccagcctgttctttttgctcaagattgctttaccatctgggtcttttgtttccatatacattttaagacttttcttttctatcatgtgaagaatgtttgtggtattttgatagggattgcattgaatctgtagatcactttggatgatatagaaatt

SEQ ID NO: 562688 - DNA, 605 bp, Homo sapiens
ttccttgctatgtagaagctttttagtttgatgtaatcccatttgtctatttttgcttttgttgtctgtgcttttgaagtcttattttaaaaaaaaatccaatccaattttatgaaatgtttccccaatgttttcttctaattgtttaatagttttgggtcttagataggcttaagctttagttcatttgatttgatttttgtatatggtgataaaaggtatctagtttcattcttctgcatgtggatatccaattttcctagcactatttactgaggagagtatccttttcccaatgtgcatgcttggcatatttgttgaaaatcaattggctgttgggttctctgttctttttcattggtatgtttgtctgtttttatgccagtgccacgctgttttgttttctrtaggtttgtagtatattttgaagtcaagtagtttgatatctccagcctgttctttttgctcaagattgctttaccatctgggtcttttgtttccatatacattttaagacttttcttttctatcatgtgaagaatgtttgtggtattttgatagggattgcattgaatctgtagatcactttggatgatatagaaatt

SEQ ID NO: 562689 - DNA, 572 bp, Homo sapiens
ccaaacctaagagaaatctaaaagtttggaaaacattttggagaataattgaggaaaacttccctggccttgctagagacctagacatccaaacacaagaagcacaaagaacacctggaaaattcatagcaaaaagagcatcgcctaggcacattgtcatcaggttatctgaagttaagaatcttttttcttttttttttttttttgagacraagtctcactctttcacctaagctagagtgcaatggcatgatctcagctcactacaacctctgcctcccaggttcaagtgattctcctgcctgagtagctgggactaaaggcatgtaccaccatgcccagctaatttttatatttttagtagagatggggtttcaccatgttggccaggctggtctcgaactcctgacctcttgatccacctacctcggcctcccaaagtgctgggattacaggcatgagccaccgcacctggcctgaaagaaaaaatcttaagagctgtgagacaaaagcaacaggtaacctataaaggaaaacctatcagattaacagcagatttctcagcacaaacc

SEQ ID NO: 562690 - DNA, 571 bp, Homo sapiens
gtctgcagtcactgtcttgacaattataataatttttctttgaatttctattttaaaagtgaagtccagtgggataatggagtatgcatggtggtgagaggaagaggagaacttggagcctgggtcacatgtagtccctgcctcctaccacctctctgccwgcttggatggattctcagctgcctgctctctgactcccagctctccagaccctgcctgttttccagctctctgttctccatcagagactgctacaaccctctctttggcatgggtttaggaaccagacaagaagggctgggactggatacctgagccccatggcatcttggggcagggcttggcagctggttggcaatatcatagtgcttttgggcacatgactcctggaagcaagcttttttccaccccatccagttttgagttagatctgttagaggcaagggttgcaatcctcaggttcattcatctgcgattgattagagcagcagccttacggtaaagggagattcctagctttacttcccttctcctaaggaaggaggatatgaagcctctgtctggctgctgg

SEQ ID NO: 562691 - DNA, 571 bp, Homo sapiens
gtctgcagtcactgtcttgacaattataataatttttctttgaatttctattttaaaagtgaagtccagtgggataatggagtatgcatggtggtgagaggaagaggagaacttggagcctgggtcacatgtagtccctgcctcctaccacctctctgccascttggatggattctcagctgcctgctctctgactcccagctctccagaccctgcctgttttccagctctctgttctccatcagagactgctacaaccctctctttggcatgggtttaggaaccagacaagaagggctgggactggatacctgagccccatggcatcttggggcagggcttggcagctggttggcaatatcatagtgcttttgggcacatgactcctggaagcaagcttttttccaccccatccagttttgagttagatctgttagaggcaagggttgcaatcctcaggttcattcatctgcgattgattagagcagcagccttacggtaaagggagattcctagctttacttcccttctcctaaggaaggaggatatgaagcctctgtctggctgctgg

SEQ ID NO: 562692 - DNA, 462 bp, Homo sapiens
tagcagggtagtaccactgcagagcaagtggcagagaagcttttggttgccctgggatctccacctctgagaaatgtggagttgctgttagtgggtgggttcagtcagtggggtagggtggctgcactgctgacatgagcttgaggctccactcgttggggggcagggggttgaaggctcactagaaggagagactggttttctctctgtaggatgactctggcatgctgtaagcttggatataaccctcaggctctttgtttcttccccagactaagggaagcaggaatagaaccgccrtcgtggcagtggcagagggccggttatatgcctctggggaaactctgggaaccagggaatctctgggccactcccagtgggtatgctgagccatgggtagggcgacttttctgtggtctgagcttggggtgcttcttggtgaagatttgggtgtgggggttc

SEQ ID NO: 562693 - DNA, 560 bp, Homo sapiens
gagtgaagacttgggcctggcctattagaataacagtaacagattaagaaatattacctaatgcaagctggctcarttaaagtcagtacagtcagctctgagcctttgtaattcttgggaaagaaatgtggggtttttttgttttgttttgttttgtttttgtattggcacctaaactggcaaatgtaaacctggagcaattggtggttattgtgatcaacaccctggaaaagtacttataaaaagaaacttagccaggtacagcagctcatgcctgtaatctcagcattttgggaggctgagatgggaagatcacttgagcccagaagttggagaccagcctgggcaacacaggaatacccgtgtctctacaaatactaaaaaaaaaattagttgggtttggtgtcatgcacctatggtcccagctacttgggaggctgaggtgggaagatcgcttgagcccaggaggtagaggctacaatgagtcatgattaagccagtgccctccagcctaggtgacagagtgaaaccctgtcttaaaaaaagggaaggaaggaagg

SEQ ID NO: 562694 - DNA, 558 bp, Homo sapiens
ttaatcaggcagtaaagagattgagaaagaaaatgataattttagatgagggaaaaagtatattctatacaaagcaaaaatcttttagatttgaaggcataaagtaacatattctaggaagtataagaagcatgtagctgttgagagagctagccagacaatctgrgtgtaaaatttactctaccacttactagctataagactaagactataattgaagctatatataatttatcatattatattatatcatattatatatatataatgaggcatacctcattttattgcactttgcttcactgcacttcacagatactttgtttttgttgtttgtttttcaaattgaaggtttgtggcaactctatattgagcaagactattgtgagatctacctcagtgcccaaatctttttttttttttaatctctgtgtctctaaagccagcaaagtattttgtacatagtacatgtattcatcaggtgactgcagagtgtaaaagtaaatgaatatacggagaaattctgaagtcgagaggcagataaggtgattaaaagga

SEQ ID NO: 562695 - DNA, 609 bp, Homo sapiens
ctttgtttaccaaactggaagcttcagttactaatttttgagcttttctattttctaacataggcatttaatgtgatacatttccttttaagcactgctttttgttgcatgcaatatttttatgggttagatttttatttagttcaaaaatatttaaacatttttcttagtacttctttgacttttgttttactkagaagtgtatctttaaaatatctgaagattttccaggtatctttcagtttttgattttaactttgagtgctttgtattctaagaatgtttattgttcgatttctcatactttaatttttttacatgtagttcatggcactgaatgttgtctgtcctggtaaatgtttcttgtaaacttgagaagaataggtattcttttgtttatggattaagtatttctagaatacttaattagatcaagttgattgataatgttgctcaggacaattacttctttccagattttctggctttttgatttgtaaattacaagctgttgttgaagtctctatgttctgtattgaatttgtctctttctcctgctactgttgtcagtgtttacccctggttgtttgatgattttttgttagaacc

SEQ ID NO: 562696 - DNA, 582 bp, Homo sapiens
gaatgataactttatcttataccatgcaaaaacaactcaaaatggactaaagccttaaatttaagaaccgaaactgcaaaaccactcgataaaaaaataggggaaaggctccataacatttgtctgagccatgatttttttggatatgacccaaaagcacagacaagaaaagcaaaaagacacaaataggattgcatctaactaaaaagtttttgcacagcaaagggaatgatcaactaagtgaagagacaactgatggaatgagagaaattatttgtgaatcacatatctgataagggatcaatatccagaatacacaaagaactcaaactactgaattataagaaaacaaataattctatttaaaaatggcaaaaaacttgaatagacatttctcaagaggacaaatgcccaacaatatatatttacatatatatacacacacatatttagtatgtatatacacagtatatatacatacatatgtatgtattatatatacatcatatacatgatgtatgtattyatgtgtatatatgatgtatatatgaatgtatatatacacacatatatagtatatat

SEQ ID NO: 562697 - DNA, 380 bp, Homo sapiens
ctccacacctgtgggtgtttctcgttaggtggaacgtgagacttggaaaagaaaaagacacagagacaaagtatagagaaagaaataagggggcccaggggaccagcgttcagcatatggaggatcctgccagcctctgagttcccttagtatttattgatcatttttgggtgtttctcagagagggggatgtggcagggtcataggataatagtggagagaaggtcagcagataaacacgtgaacaaaggtctctgcatcatagacaaggtaaagaattaagtgctgtgctttagatatgcatacacataaacatctcaatgcgttasagagcagtattgttgcccgcatgtcccacctccagccctaaggcggttttc

SEQ ID NO: 562698 - DNA, 379 bp, Homo sapiens
tagggaaaaccgccttagggctggaagggggacaggcgggcagcaatactgctctttaagrcattgagatgtttatgtgtatgcatatctaaagcacagcacttaattctttaccttgttcatgatgcagagacctttgttcacgtgtttatctgctgaccttctctccactattatcctatgaccctgccacatccccctctccgagaaacacccaagaatgatcataaatactaagggaactcagaggccgacgggatcctccgtatgccgaacgctggtcccctgggcccccctacttctttctctatactttgtttgtgtctttttcttttccaagtctctcgttccacctaacgagaaacacccacaggtgtgg

SEQ ID NO: 562699 - DNA, 379 bp, Homo sapiens
tagggaaaaccgccttagggctggaagggggacaggcgggcagcaatactgctctttaagacattgagatgtttatgtgtatgcatatctaaagcacagcacttaattctttaccttgtycatgatgcagagacctttgttcacgtgtttatctgctgaccttctctccactattatcctatgaccctgccacatccccctctccgagaaacacccaagaatgatcataaatactaagggaactcagaggccgacgggatcctccgtatgccgaacgctggtcccctgggcccccctacttctttctctatactttgtttgtgtctttttcttttccaagtctctcgttccacctaacgagaaacacccacaggtgtgg

SEQ ID NO: 562700 - DNA, 379 bp, Homo sapiens
tagggaaaaccgccttagggctggaagggggacaggcgggcagcaatactgctctttaagacattgagatgtttatgtgtatgcatatctaaagcacagcacttaattctttaccttgttyatgatgcagagacctttgttcacgtgtttatctgctgaccttctctccactattatcctatgaccctgccacatccccctctccgagaaacacccaagaatgatcataaatactaagggaactcagaggccgacgggatcctccgtatgccgaacgctggtcccctgggcccccctacttctttctctatactttgtttgtgtctttttcttttccaagtctctcgttccacctaacgagaaacacccacaggtgtgg

SEQ ID NO: 562701 - DNA, 597 bp, Homo sapiens
tgaaggctagaagcttgttcatatttaccaacatatccttccctgtcctcctgctaatctcccagcaaatgctctgcaccatcagacatctcattttcctcaccatgactgctaatatgcagggccttcggtataaatgtacaccctctacccagcctccagcaaactcacatgcacccatctacacacatgggcacatgctcatgcataatgcatgggaccaccatcttaaatcctgctaaattgagattcagctagctgtttggtctggagacacctcagtgcctgcgtcattagctgagctctgaaagccatcattactgcagccactgtggctgagtcactgagaccatgagcaggtaatagaatttcagggacacataataaaagggaatggaatgggattcaggtcggaaaagactatctgttatccagtcctgaagggtggatatgtaaacaaggagctccaggcccccaggatggcgattcctctgagtccctcagcagaggataataaaaggcccaatcacaacctccactctctgagatttcaaaggaaaggragaaaaaatctcaatgatattaatttaatgtggc

SEQ ID NO: 562702 - DNA, 531 bp, Homo sapiens
  misc_feature 1, 2, 3, 4, 5, 6, 7, 8, 9, 10, 11, 12, 13, 14: n = A,T,C or G
nnnnnnnnnnnnnnggtatttttatttatttatgttttggagacagtgtctcattctgttacccaggttaaagtgcagtgacacaatcacagctcactgaagccttgacctcctccttgagcgcttgatgcgctcaagcgatcctcccacctcagcctccagagtagctggatgacaggtgtgcaccaccacaccaggccaattttttcttttcttttttttttttttgagacagagtcttgctctgttgcccagactggagtgcaatggtgcgatcttggctcactggaaccactgcctctcgggttcaagcgattctcctgcctcagcctcctgagtagctgggattataggtgcatgccaccamacccaactaagttttgtatttttagtagagatggggtttcaccatgttgtacaagctggtcttgaactcctgacctcatgatcagcccgtctcggcctcccaaagtgctaagattacaggtgtgagtcaccgcacttggcctaatttttctttcagaaatggtg

SEQ ID NO: 562703 - DNA, 246 bp, Homo sapiens
gttgtatgttccttttttgtagctaagtcatatttcatcatatggatgtgccatggtttgtttaaccacttatctattgagagatagctaggctgtttccagtttttggctattacaaataaagctactgtaaacattcctgttctagtttttgtgtgaacctgtctttatatctytggactacatgccctggagtgaaattgcttggttgtattgtagttgtatgtttagtcttataagaaactg

SEQ ID NO: 562704 - DNA, 595 bp, Homo sapiens
tcacagactggtgagggatgcattaaccaaaataagctaacatataaaggcccaggcaccacagaagcatgaatgaatgctacgggagaccacaggggtgcaaagttatttcgggatatgggtcaggaggtttggagaggaaatgagatttgataagtggaaataatcagagcaaagcaacaacaaaatggttaaagatgtgaagagaagaaaccataggttggatgagtaaatagttccatttgacagaggcacaaagtccatgaagggaagtaataagaacagaggttggaaactgttgcaagggccaaatcaccaaggatcatggatgatttactggatttgttcccacagataatcaagaattcttgaaggttttaatcattgagtaacctgatcaaagctgtgggcatcgactctgtcctctggagccaagagaatacctktaagccctttgaaaagaatagtccctaaaatgtttaattaaggtggtctcaggctgggcatggtggcttacgcctgtaatcccagcactttgggaggctgaggtaggtggatcacgaggtcagaagtttgagaccagcctgaccagtat

SEQ ID NO: 562705 - DNA, 337 bp, Homo sapiens
aggtttattggctgggaaggagcatgagggagctttctgggtactataccttcatctggttcgttgcttaccaggatatatacatatttaaaaatccatcaagctaagcatttaaaattggtgccttttactgtacatatattatacatgtattttacctcaattttttttcttttttaagacggagtctctctctgttgcccaggctggagtgcagtggygccatctcggctcactgcaacctccacctccagagttcaagtgactctcctgcctcagcctcccgagtaggtgggatcacaggtgtgagccaccacgcccagctaatttttgtatt

SEQ ID NO: 562706 - DNA, 387 bp, Homo sapiens
gaggtttattggctgggaaggagcatgagggagctttctgggtactataccttcatctggttcgttgcttaccaggatatatacatatttaaaaatccatcaagctaagcatttaaaattggtgccttttactgtacatatattatacatgtattttacctcaattttttttcttttttaagacggagtctctctctgttgcccaggctggagtgcagtggtgcmatctcggctcactgcaacctccacctccagagttcaagtgactctcctgcctcagcctcccgagtaggtgggatcacaggtgtgagccaccacgcccagctaatttttgtatttttagtagtgacggggtttcaccatgttggtcaggctgatctcgaattc

SEQ ID NO: 562707 - DNA, 387 bp, Homo sapiens
gaggtttattggctgggaaggagcatgagggagctttctgggtactataccttcatctggttcgttgcttaccaggatatatacatatttaaaaatccatcaagctaagcatttaaaattggtgccttttactgtacatatattatacatgtattttacctcaattttttttcttttttaagacggagtctctctctgttgcccaggctggagtgcagtggtgccatctcgsctcactgcaacctccacctccagagttcaagtgactctcctgcctcagcctcccgagtaggtgggatcacaggtgtgagccaccacgcccagctaatttttgtatttttagtagtgacggggtttcaccatgttggtcaggctgatctcgaattc

SEQ ID NO: 562708 - DNA, 631 bp, Homo sapiens
tggaaaacagtttggtagtttcttataaagttaaacatacaattaacataagacccaggaatttcactcctcagtattcatccagaagaaataaaaatatatttgacacaaagattgtaaatgtagacagttttaattgtagtatcagaaactggtggggaggaaacaaattgtggtatattcatacaatggaaaactcttcagaaataagaaggaacaaaccactgaatcacacaacatggacaaatctcaaatcattatgctgatggaaagaaaccattcataagaatacacagtacatgacgccgctttcatgatgttctggaacaaagaaaactaacctatagtgatagaattcctatcaatggctgccaacaatygggagtgaaaggaactgactgagcaggtatacaagagaaccttctggggtgatggaaatattctgaagcttgactggagtgttggttacatgggtatatcaatttatcaaaactcactgaattgtatatttaaagtaggaacattttattgtaaataaattacacctctataatgttcgttttaaaaaatattagatacatcagctggaaatcacttggttttaacaaaaaattttctctgtaatcttatt

SEQ ID NO: 562709 - DNA, 456 bp, Homo sapiens
ggagctaaactatgagggacaaaagactacactttgggtacagtgtacactgcttgagtgatgggtgcaccaaaatctcaraaatcactgctaaagaacgtatttatgtaatcaggcaccacctgctccttaaaaaactattgaataaaaaataaaatttaaaaagatagataataacaaatgttgatgaggatgtgaaaataagaacccttaatatgttgctggcagaaatgtgaaacaatttggtggctcctcaaacaggtaaagatagaattaccttatgacccagtaattccgctcctaggtatatactgatgagaattgaaaacacatattacacaaaaccttgtacacaaaaagtttattacagcattattcctaatagccaaaaggtggaaacaactgaaatgttcatcacctatgagtggacaaacaaaatctggcatatccatacaa

SEQ ID NO: 562710 - DNA, 490 bp, Homo sapiens
catatttgctaagaagatccaaaaccattcataccctacaatggagtatctgaatttgggtggagactgtttttatatcaggctgttgagcttacagcacaaagctagagaaatgaaggaaacaaccttctaagtcatcctgccatactgagagaccattgttagcataaaagatggaaaattggctttaattttttctaggcagagaagagtactcattatgtatcatctgaggtatagatgagagggagaattaacactgtctccayttcgagttggctctgcctagatgaaagggagagaggcgcttagtcctgggctcacctattccagggaatgtttctctgtagtgttccctttataacaagtttccatgtgttctgtgttcatattacaaaagagttgtcattgaggttttttctttgtttatttttaccccatttgtgattgttcttgacattatactctaattctgtgatttgtgattatc

SEQ ID NO: 562711 - DNA, 473 bp, Homo sapiens
aaagttctccctttgcattttttttcctaatctaaactttctgggagtgaccatgcttttttctttcagatggagactattttacctttacaagacatgaacccattggagtgtgtggacagatcatcccagtgagtgtatttcctcgcacctcgtatttattttcatttgacccagttctcttaaagacacataaaacatggtcctcagcgatgtgtgttttccattactggaggaaaaaaaactgagctcatgttgttgacatatctttaacagcctccctgcaaatgcttatttgaacaggttaatagggtttcagctctgttaccaggagttgaattctcaagtcatggaattctcatgattaaaataagcaaagcacagtgtattaataacctgcccttggttattatgtccrttctgcttatggaaaattaatgctttgttatagttgtttattttttagaactgtg

SEQ ID NO: 562712 - DNA, 601 bp, Homo sapiens
gtgattcaaacctgctctatgatagggaatgttcaactctgtgtcctgaatacaaacatcacaaagatgtttctcagaacgctgcagtctgcaatttgtatgaattcccgcttccaacgaaatcctcaaaactagccaaatatccacttgcagattccacaaaaagagcgtttcaaaacttctctatgaaaaggaaggttctactcctttagttgaggacacacatcacgagtaagtttctgagaatgcttctgtctagtttttatgggaagatatttcctttttcaccttaggccggaaagtgctccaaatgtccacttacacacactacaaaaagagtgtttcaaacctgctctgtgaaagggaatgttcaattctgtgacttgaatgcaatcatcacaaagaactttctgagaatgctgctgtctgctttttatatgtaatcccgtttccaacgaaatcctcaaatctagccaaatagccacttgcagattccacaaaaagagtgtttcaaaactgttctgtctaaagaaaggttcaactgtgtyagtagagggcacacatcacaaacaagtttctgagaatgcttgtgtctagttgt

SEQ ID NO: 562713 - DNA, 601 bp, Homo sapiens
gtgattcaaacctgctctatgatagggaatgttcaactctgtgtcctgaatacaaacatcacaaagatgtttctcagaacgctgcagtctgcaatttgtatgaattcccgcttccaacgaaatcctcaaaactagccaaatatccacttgcagattccacaaaaagagcgtttcaaaacttctctatgaaaaggaaggttctactcctttagttgaggacacacatcacgagtaagtttctgagaatgcttctgtctagtttttatgggaagatatttcctttttcaccttaggccggaaagtgctccaaatgtccacttacacacactacaaaaagagtgtttcaaacctgctctgtgaaagggaatgttcaattctgtgacttgaatgcaatcatcacaaagaactttctgagaatgctgctgtctgctttttatatgtaatcccgtttccaacgaaatcctcaaatctagccaaatagccacttgcagattccacaaaaagagtgtttcaaaactgttctgtctaaagaaaggttcaactgtgtcagtagaggrcacacatcacaaacaagtttctgagaatgcttgtgtctagttgt

SEQ ID NO: 562714 - DNA, 620 bp, Homo sapiens
ctgggtctcagtattattatctataaaattagactaattaccagtttggggtttttgtgattgtgaagcaggtttactgtgcactggttactaacttttctgaatctgataagaaagaacacagttaaatgaaacaagttacatgaggcagatttattacttacaaataggcatcaaacaacaaccgaagcctaggatttactgtgaactggtsccctaaggctcaggaaagctgcttggggtttagaccacacattccccacttgcactatagctgagggacccccaaaagcagcctaccttgggttttaacccctgggggcaacatgaccccctgggctaaagctttgaaggatatcttgtttctacagggggactggtaattggcgtgcactgttgtggccagttcccccttacctcaggatgttgtattcccagcatgctctacagttattcttgagaacaagcatgaaagtgggaagaactgagttgattcaaggccacccagagaattgtcctacggcgatgactgtaattaatataagggcttatgcatgtgtggcatttggaaacttaatacatttataattcatattattttatatgctaatttgtttctg

SEQ ID NO: 562715 - DNA, 291 bp, Homo sapiens
atgagccaccatgcccagcctatcacattcctttttaaagaattaaattacaattaaattttcttttaaaaatatggcattataacgcaatgtcattttaaaaagtttctttttttaatcattatactttaagttttagggtacatgtgcacaacatgcaggtttgttacatatgtatacatrtgccatgttggtgtgctgcacccatcaacttttggaggcctagatggatggatcacttgagatcatgaattcaaggctaacataatgaaaccctgtctctagagaaat

SEQ ID NO: 562716 - DNA, 514 bp, Homo sapiens
aatgaaaccctgtctctagagaaataccaaaaagaattaactgggcggggtggtgcatgactgtaattccagctacttgggaggctgaggtgggaaaatcccttgaacttgggaggaagaggttgcagtgagggtggacaacagagtaacactctttcaaaaacaacacaaaacaaaaaagtttgcttctttttcttcttatagttttcttcacttctttttctttgctcctttactttcttccttccatcttatgtctgcaagtctgtacgtatccaaggagaaatgactagaacaatattcgttattcctgtgaaggtaatttctagctagtgaggttttctatttttttagctttctttgtccttgttgatatgcttgaaaatgttacaaataatatgtaatacattcttataaaatatccaaaaccaaataatgctgaaataaccaatcatctagaagaaaaytaagttggaattttttctctcttacacaaatacacgcacatgaattc

SEQ ID NO: 562717 - DNA, 599 bp, Homo sapiens
cccaggttcaagccattctcctgcctcagcctcctgactagctgggattacaggcacctgccactacgcccagctaatttttgtatttttagtagagacggggtttcaccatgttggccaggctggtctcgaagtcrggacctcaggtgatccacccacatcagcctcccaaagtgctgggattacaggcgtgagccaccatgccgggctggtttcatttttctgttttttttattatgttcatcatcagtagcagcatagggtttagcacttaattgcatgatgaggtttagcctggttcccgaacccaggtaaaagccctgagagtgaaagcttcatgctttgttcctttaaatgcatcacattttctcactcattgtcatatgagcttattatatgccaatcactttccctagaggattttatatgtagtaccttatttaattcacacaatagccctgtgagatggatattttatatctatttttccaaatgaaaaacctgaggcacagtcaaatcaggagttaattctaaaccatctgactacaaaacctttcctgtttgattgcatacaaccacatagtagatatccaacaagc

SEQ ID NO: 562718 - DNA, 599 bp, Homo sapiens
cccaggttcaagccattctcctgcctcagcctcctgactagctgggattacaggcacctgccactacgcccagctaatttttgtatttttagtagagacggggtttcaccatgttggccaggctggtctcgaagtcgggacctcaggtgatccacccacatcagcctcccaaagtgctgggattacaggcgtgagccaccatgccgggctggtttcatttttctgttttttttattatgttcatcatcagtagcagcatagggtttagcacttaattgcatgatgaggtttagcctggttcccgaacccaggtaaaagccctgagagtgaaagcttcatgctttgttcctttaaatgcatcacattttctcamtcattgtcatatgagcttattatatgccaatcactttccctagaggattttatatgtagtaccttatttaattcacacaatagccctgtgagatggatattttatatctatttttccaaatgaaaaacctgaggcacagtcaaatcaggagttaattctaaaccatctgactacaaaacctttcctgtttgattgcatacaaccacatagtagatatccaacaagc

SEQ ID NO: 562719 - DNA, 580 bp, Homo sapiens
atttttattttgttttgaattaaatsaaccatgattattcacagtgcagtaagtgtgtatcatctgtttgatattttcatattacagttttgatagtgctcttcagtctgcgaaatcttctttgggtggaaatgatgaactgtcagctactttcttagaaatgaaaggacatttctacatgcatgctggttctctgctcttgaagatgggtcagcatggtaataatgttcaatggcgagctctttctgagctggctgcattgtgctatctcatagcatttcaggtaagtcttccacttggagcaattgacatttcacggagtcttgatgtgttttaaatgaaggtgtgctctggtatgtaatgacaatatgtgaacaaacctgtggaattaaagttgaaatgaaatagtcaatttgatacagtggaaaataactaagcatacacaatactggtgaggctggtgaaacagggatgttgagtgcactcttgtcgaaagcctgcattgccatgatttgtttgtagacaaatttgaagagtttgatctttttactctgccatttttgggaacatgataaagatg

SEQ ID NO: 562720 - DNA, 580 bp, Homo sapiens
atttttattttgttttgaattaaatgaaccatgattattcacagtgcagtaagtgtgtatcatctgtttgatattttcatattacagttttgatagtgctcttcagtctgcgaaatcttctttgggtggaaatgatgaactgtcagctactttcttagaaatgaaaggacatttctacatgcatgctggttctctgctcttgaagatgggtcagcatggtaataatgttcaatggcgagctctttctgagctggctgcrttgtgctatctcatagcatttcaggtaagtcttccacttggagcaattgacatttcacggagtcttgatgtgttttaaatgaaggtgtgctctggtatgtaatgacaatatgtgaacaaacctgtggaattaaagttgaaatgaaatagtcaatttgatacagtggaaaataactaagcatacacaatactggtgaggctggtgaaacagggatgttgagtgcactcttgtcgaaagcctgcattgccatgatttgtttgtagacaaatttgaagagtttgatctttttactctgccatttttgggaacatgataaagatg

SEQ ID NO: 562721 - DNA, 580 bp, Homo sapiens
atttttattttgttttgaattaaatgaaccatgattattcacagtgcagtaagtgtgtatcatctgtttgatattttcatattacagttttgatagtgctcttcagtctgcgaaatcttctttgggtggaaatgatgaactgtcagctactttcttagaaatgaaaggacatttctacatgcatgctggttctctgctcttgaagatgggtcagcatggtaataatgttcaatggcgagctctttctgagctggctgcattgtgctatctcatagcatttcaggtaagtcttccacttggagcaattgacatttcacggagtcttgatgtgttttaaatgaaggtgtgctctggtatgtaatgacaatatgtgaacaaacctgtggaattaaagttgaaatgaaatagtcaatttgatacagtggaaaataactaagcatacacaatactggtgaggctggtgaaacagggatgttgartgcactcttgtcgaaagcctgcattgccatgatttgtttgtagacaaatttgaagagtttgatctttttactctgccatttttgggaacatgataaagatg

SEQ ID NO: 562722 - DNA, 429 bp, Homo sapiens
gcctgaggactcaaacctgccagaggaaaaaggctctagstattattaacagcagttgtactatgaattacataattgctattcttcgagcctgcagccaagtgccaagattcctcacacgaaccacgtgaagagggcaacaatatccccaccttacagctggaagaaaaaacagctcagaaagtgacctgctttaaaaaaagaaagacggcgatttgctgaaggtcacagagtgcatcctggactaggatgagacgggagaggcactcgcgtaaggggcaaaatctaagaggcgccaaaaaaactcaggaaccaaaaccaataatattttaatacattttaaaaaccaaaatgtaaaaattcatgatggataaaatatcaacattttaaataacatcttatgtgacctgcctcatctccttcacctta

SEQ ID NO: 562723 - DNA, 457 bp, Homo sapiens
cctttacctagattctgccaccaccagtctttggcccatctgtgttctatctacgcatgcccacgcacacacacacatatgcaagcacatttttctgaaccatctgaaagtaggttgcaaacatcatgacaatttaaccctaaatactttaacacatacctcctaagtaaaaggacactgatctacataaccacaccaccattatcacacctcagaaatttaatgctgaatagcattttytaataaacagtccatattcaaattctccaactgtacctaagatgtttttttttttttttttttttttaaaagatggggtctcattctgctgcccaggctggagtgcaggggcacaatcactgctcactgcagcctcaacctcctgggttaaagtgatgctctggcctcgacctcctgagtagctggacaaccagaggtaagttccgccacacccagc

SEQ ID NO: 562724 - DNA, 457 bp, Homo sapiens
cctttacctagattctgccaccaccagtctttggcccatctgtgttctatctacgcatgcccacgcacacacacacatatgcaagcacatttttctgaaccatctgaaagtaggttgcaaacatcatgacaatttaaccctaaatactttaacacatacctcctaagtaaaaggacactgatctacataaccacaccaccattatcacacctcagaaatttaatgctgaatagcattttctaataaacagtccatattcaaattctccaactgtacctaagatgtttttttttttttttttttttttwaaagatggggtctcattctgctgcccaggctggagtgcaggggcacaatcactgctcactgcagcctcaacctcctgggttaaagtgatgctctggcctcgacctcctgagtagctggacaaccagaggtaagttccgccacacccagc

SEQ ID NO: 562725 - DNA, 457 bp, Homo sapiens
cctttacctagattctgccaccaccagtctttggcccatctgtgttctatctacgcatgcccacgcacacacacacatatgcaagcacatttttctgaaccatctgaaagtaggttgcaaacatcatgacaatttaaccctaaatactttaacacatacctcctaagtaaaaggacactgatctacataaccacaccaccattatcacacctcagaaatttaatgctgaatagcattttctaataaacagtccatattcaaattctccaactgtacctaagatgtttttttttttttttttttttttaaaagatggggtctcattctgctgcccaggctggagtgcaggggcacaatcactgctcactgcagcctcaacctcctgggttaaagtgatgctctggcctcgacctcctgagtagctggacraccagaggtaagttccgccacacccagc

SEQ ID NO: 562726 - DNA, 564 bp, Homo sapiens
ggggtgtgcaaggaacagtggggactggggctgagggacctgttgtgttragggacgtgagatggtagatgccacagggcccggctagtctggaggggctccatggtctatgcaggggataatggaaggacttgtctttagctttgggccatgcatggaaagtaagggctaattcttaggcaaatttttgtcttcagccctaagcatagtatctgggtcatagaggcaaatgataaatacatgctaaataaatgaataagcacaggaacaggttttgtcaactgtgaaagagatttaaggcattaggggttaggtggatccaagaggccattttgtaatccatggaatcccactctgtagacatctaccttaaggtcagctctgggttaaaaaagggctgtctctgctccccactgggcaatccctggggaccagagctgactgagcccacaggacctggactggtgaggcccatcagcctgcaagcccctgagggagttagcctgctttattcagcattgtatctccagccccagcacacatggggctttaggagttcgtgaa

SEQ ID NO: 562727 - DNA, 564 bp, Homo sapiens
ggggtgtgcaaggaacagtggggactggggctgagggacctgttgtgttgagggacgtgagatggtagatgccacagggcccggctagtctggagggrctccatggtctatgcaggggataatggaaggacttgtctttagctttgggccatgcatggaaagtaagggctaattcttaggcaaatttttgtcttcagccctaagcatagtatctgggtcatagaggcaaatgataaatacatgctaaataaatgaataagcacaggaacaggttttgtcaactgtgaaagagatttaaggcattaggggttaggtggatccaagaggccattttgtaatccatggaatcccactctgtagacatctaccttaaggtcagctctgggttaaaaaagggctgtctctgctccccactgggcaatccctggggaccagagctgactgagcccacaggacctggactggtgaggcccatcagcctgcaagcccctgagggagttagcctgctttattcagcattgtatctccagccccagcacacatggggctttaggagttcgtgaa

SEQ ID NO: 562728 - DNA, 473 bp, Homo sapiens
tgggaagactgcttgaccccaggagtttgcaaccagcctgggcaacacagtgagactccctatctacaaaatatraaaaggaaattagctgggcattttgacacaagcttacagtcccaactacttcagaggctgaggtgggaggatcacttaagcccgggaagttgaggctgcagtgagccatgattgtgccactgcactccagcctgggtgatagaggaagaccctgtctcaaaaaagaaaagaaaagaatggattttctcaaatccatctgcatggatttgagagtgaatcttcccccacttttaatccgaaaatccagttatcatttggagctctttcacattgccttaattgtactcttaaatttttaaaatttcactgcaactctttaatttatgcatctctgtattaccctactgagatttccagcttctctcttctcttcttatgcattaccaccctggtttctt

SEQ ID NO: 562729 - DNA, 473 bp, Homo sapiens
tgggaagactgcttgaccccaggagtttgcaaccagcctgggcaacacagtgagactccctatctacaaaatataaaaaggaaattagctgggcattttgacacaagcttacagtcccaactacttcagaggctgaggtgggaggatcacttaagcccgggaagttgaggctgcagtgagccatgattgtgccactgcactccagcctgggtgatagaggaagaccctgtctcaaaaaagaaaagaaaagaatggattttctcaaatccatctgcatggatttgagagtgamtcttcccccacttttaatccgaaaatccagttatcatttggagctctttcacattgccttaattgtactcttaaatttttaaaatttcactgcaactctttaatttatgcatctctgtattaccctactgagatttccagcttctctcttctcttcttatgcattaccaccctggtttctt

SEQ ID NO: 562730 - DNA, 473 bp, Homo sapiens
tgggaagactgcttgaccccaggagtttgcaaccagcctgggcaacacagtgagactccctatctacaaaatataaaaaggaaattagctgggcattttgacacaagcttacagtcccaactacttcagaggctgaggtgggaggatcacttaagcccgggaagttgaggctgcagtgagccatgattgtgccactgcactccagcctgggtgatagaggaagaccctgtctcaaaaaagaaaagaaaagaatggattttctcaaatccatctgcatggatttgagagtgaatcttyccccacttttaatccgaaaatccagttatcatttggagctctttcacattgccttaattgtactcttaaatttttaaaatttcactgcaactctttaatttatgcatctctgtattaccctactgagatttccagcttctctcttctcttcttatgcattaccaccctggtttctt

SEQ ID NO: 562731 - DNA, 612 bp, Homo sapiens
atactattcagccttgagaatgaaggaaattcttccatctgcaacgacataggtgaacttggagaacattacattaacgaagtcagctaggcacagaaagacaaacactgcatgatctcgcttatatgtggaagtgaaaaatgttgaactcatagaagcagagaatagaatagtgattrccaggggccggggtaaagtggggcagaatgaggagatattggtgaaagcgtacgaagtttctgttcgacagggggaataaattctggagacctattgtacagcttggagactacagttaataataatatagtttataacaatttgttggatccttgaaaattgctagagaatagatgttcaattctcaccataaaacaatactaagtatgtgaggtactgaatgtattaattggctttgtctagcctttacaatgtatacatatatcaaaacattacattgtataccatagatctatatgatttttatttggcaattataccttaataaatctggggaaaatattgaggtgactaactgtgggacagggaaagggagaggcaaaataagattagaagaaatttttctttttttttttttttttgaaacatagt

SEQ ID NO: 562732 - DNA, 572 bp, Homo sapiens
cctgtgaaatctgggcagaggctaacaagcctcacatcttgcactctatccacctacaggcttaacaccatgcagaagctgccaaggcttatggtttgcacactctggagcagtggccctagctgtacctgggctccagttagccaaggctgaagctggaacaccctgtatgtcaggagcaatgtcccaaggctgcacaggtcagtagagccctggggatggcccatgaaaccattmttccctcctagccatctggaaatatgatgggaagagctgccaccaagatttctgaaatgcgtttgaggtctctccattctcttggctactaaaattcagctcatctttacttatgcaaatttctgcagctagattgaattcttcccctgaaaacaggtttattttctgccacatggctgggctgcaacttttccaaacatttaccctctgcttccttgttaaatataagttccagtttcaggccatttatttgcttatgcatatgagcacaggcagttagaagcagccaggtcacatcttgaatgctttgctgcttagaaatttcttccaccaga

SEQ ID NO: 562733 - DNA, 327 bp, Homo sapiens
atttcctatgcctgtctttactttaatctcttaatcctgtcagctgaggaggatgtatgtcacctcaggaccctgtaataattgcattaactgcacaaattgtacagcatgtgtgtttgagcaatatgaratgtgggcaccttgaaaaaataacaggataacagcaattgttcagggaataagagagataaccttaaactctgaccgctggtgagctgggcggaacagagccatatttctcttctttcaaaagcaaatgggagaaatatcgctgaattctttttctcagcatggaacatccctgagaaagagaatgtgtgcctgcgg

SEQ ID NO: 562734 - DNA, 327 bp, Homo sapiens
atttcctatgcctgtctttactttaatctcttaatcctgtcagctgaggaggatgtatgtcacctcaggaccctgtaataattgcattaactgcacaaattgtacagcatgtgtgtttgagcaatatgagatgtgggcaccttgaaaaaakaacaggataacagcaattgttcagggaataagagagataaccttaaactctgaccgctggtgagctgggcggaacagagccatatttctcttctttcaaaagcaaatgggagaaatatcgctgaattctttttctcagcatggaacatccctgagaaagagaatgtgtgcctgcgg

SEQ ID NO: 562735 - DNA, 327 bp, Homo sapiens
atttcctatgcctgtctttactttaatctcttaatcctgtcagctgaggaggatgtatgtcacctcaggaccctgtaataattgcattaactgcacaaattgtacagcatgtgtgtttgagcaatatgagatgtgggcaccttgaaaaaataacaggataacagcaattgttcagggaataagagagataaccttaaactctgaccgctggygagctgggcggaacagagccatatttctcttctttcaaaagcaaatgggagaaatatcgctgaattctttttctcagcatggaacatccctgagaaagagaatgtgtgcctgcgg

SEQ ID NO: 562736 - DNA, 440 bp, Homo sapiens
gtacgttttatagcaatgtaagaacagactaatacactatactactcaacattaaaaaattcaaaatatagaggtggaatgctagtctcactcatataccacacaagcaaacaaaaaacatcagaaaaaaagatgacaaccataatggttttatcttctgcacatgttagtattttaaacaccaaaggatatcaagaacaaaggaaactagctccgaataccaggttaactttatatctataatttcaattatgagtgtttctgaattatattgaatgactgataagttagaaagtctttgaagaaaagtgaccattccttctagccaatctacaaaagatctatgaataccaaataacgaagatygtattggtcatgtatatgtgtgtatgtgtgtttgtgttgtgtgtgtatgtgtacacaaactcagtgtattgaaa

SEQ ID NO: 562737 - DNA, 440 bp, Homo sapiens
gtacgttttatagcaatgtaagaacagactaatacactatactactcaacattaaaaaattcaaaatatagaggtggaatgctagtctcactcatataccacacaagcaaacaaaaaacatcagaaaaaaagatgacaaccataatggttttatcttctgcacatgttagtattttaaacaccaaaggatatcaagaacaaaggaaactagctccgaataccaggttaactttatatctataatttcaattatgagtgtttctgaattatattgaatgactgataagttagaaagtctttgaagaaaagtgaccattccttctagccaatctacaaaagatctatgaataccaaataacgaagatcgyattggtcatgtatatgtgtgtatgtgtgtttgtgttgtgtgtgtatgtgtacacaaactcagtgtattgaaa

SEQ ID NO: 562738 - DNA, 432 bp, Homo sapiens
cattcattatactgttggtataaaagacgatgtggtacatagttatgtcttttttttaaagacaaaagagataaytgcagtttcaagcgggtcgtagtttataaaatacttctctatcacttattgtgtacctgttgcccactgtcttgtgcatattggttgcccccgttttaggaaggaaaagacctattcggaaaggttaagtaacttgtcagaatccctgcatcagttcacgaaaacagcagctcagtcttctaattctcatcatatgtttccatgctttgctgattacacctgcagtggagtgtgaggggcttagcattcaggttcctgacagctgcaggtgggactgggctttccagcttcctaacatgcagagggcttagagaacttgaggtcattttgaataattttccccaccactctctttta

SEQ ID NO: 562739 - DNA, 380 bp, Homo sapiens
ataataaattattaattagaattgtcaaaaaccattaatttgaaatctgtagagcaagtcttcagcctcttgactgtaccatgagattcatttagaaattatttaaacacattaattaaaactaagtttaaatattctaaaattaatactgataaagaaggaaaattaaatcttcaagttatgtyctgcttgtatttcatgatggagcagttatttgcacctggaataatttaaatagtaaaggtatatgaataaaacaaactttataattattatgtggtattttggggtggacatttccaattacagagtaaaaaagattaaaaaattctctcattactattagaattagacaaagatagaagtctagcttgagctat

SEQ ID NO: 562740 - DNA, 387 bp, Homo sapiens
taatattcaattttcaaaaaaatgctcatcccataaaactgagattatatttataattaccaaataagcaagataaacctaacctgatttattatttttatttgatttactttatcactggactggkgatgtttggaccaaaatgatccacactatatcaagttagaatggccgccagagttccctgctctgtttcccagaaaccgaatgctcaacatgatgaagtcattttttgaataccaaacagaaatagtcccaaactcatcaccccaggttctagaacgaacattccactgatgtgtgtggggatgcgtgtacatgcttgggtctagcttttggtcaaactacatcatgtaatataataaatctaggattcctgttagcaga

SEQ ID NO: 562741 - DNA, 468 bp, Homo sapiens
ttttttttttttgagatggagtttttgctctgttgcccaggctggagtgcagtggctgaatgttggctcactgaaacctccgcctctggtttcaagcaattctcctgcctcaccctcccaggtagttgggattacaggtgcccaccaccacgcctggctaatttgagtatttttagtagagatgaggtttcaccatgttgcctaggctggtctcaaactcttgacctcaggcgatccacccacctcggcctcccaaagtgctaggattatgggcatgagccactgtgcccagccttactgcagctatttttctatgacagtaacccttcaacccttttattttcttcatacaccgaacagtgtctaaaatggctttcaaaaatgttaggtctctgctgccagaatataaggacatgcaatawtgtattctggcaatacactgcatgtttcgttttccttgttgtctcg

SEQ ID NO: 562742 - DNA, 567 bp, Homo sapiens
aggtggaaggaaaaggaaagtggactctcttgcatctgggcttttccaaggtaaataagcccatcgtggaaacacagaaacgtcatcacatgtacaaacaatatcattatgaaatgagtatagaaacaaaatgaagacattcaraagttaaaaaatggtgatactggaagagaaaaaagtgaactcttaattcttattttatagaatttaaaatgtggtgatttgaagcctattttatatttttaagtttgctctttgatatggtttgactgtgtccccacccaaatcttactttgaattgtaataatccccacatgtcaatggtggggccacatggagaataagtgaatcatgggggtggtttccccatactgttattgtggtaatgagtaagcctcatgagatctaatggttttataaatgcaagttcccctgcacacactctcttgcctgccaccgtgtaagatgggcctttgcttcccctctgccttcaccgtgactgagtccattaaacctgtttcctttataaattacccagtctcggatatgtctttattagcagtgtga

SEQ ID NO: 562743 - DNA, 567 bp, Homo sapiens
aggtggaaggaaaaggaaagtggactctcttgcatctgggcttttccaaggtaaataagcccatcgtggaaacacagaaacgtcatcacatgtacaaacaatatcattatgaaatgagtatagaaacaaaatgaagacattcagaagttaaaaaatggtgatactggaagagaaaaaagtgaactcttaattcttattttatagaatttaaaatgtggtgatttgaagcctattttatatttttaagtttgctctttgatatggtttgactgtgtccccacccaaatcttactttgaattgtaataatccccacatgtcaatggtggggccacatggagaataagtgaatcatgggggtggtttccccatactgttattgtggtaatgagtaagcctcatgagatctaatggttttataaatgcaagttcccctgcacacactctcttgcctgccaccrtgtaagatgggcctttgcttcccctctgccttcaccgtgactgagtccattaaacctgtttcctttataaattacccagtctcggatatgtctttattagcagtgtga

SEQ ID NO: 562744 - DNA, 571 bp, Homo sapiens
agtgctttgggtagccaaggtaggaagattgctcggggccaggagtttgacaccagcctgggcaatatagctagactctgtctctataaaaaactaaataataataataataaattaaatgcttgttttatatgtccttctgttcraaaacaccttatttaatacatatttttggactcgttaacattggaatcacagccaacaaccctgcgcctcatttctgaacacagcttatctaacacatgcactctcttcataaggtacatcacactcctgttgtgtttacaaacactgggcactatgcacgatgcttgggggccattttaaacagtgaagtcatccaccaggagcacaagatgcaaaaaaagtgtgatactaaatataccatgaaaaaatgtacttgtttacagtatgtaaactgaaacaaggtagaatgtctgcctcattcaacctcatctgggaatatgcacatcagataattacaacattttaatattaatactctacacaggcacatgtctacaaatgactgtaatggatccccaagtattgatctttgtgtttcaaataa

SEQ ID NO: 562745 - DNA, 571 bp, Homo sapiens
agtgctttgggtagccaaggtaggaagattgctcggggccaggagtttgacaccagcctgggcaatatagctagactctgtctctataaaaaactaaataataataataataaattaaatgcttgttttatatgtccttctgttcgaaaacaccttatttaatacatatttttggactcrttaacattggaatcacagccaacaaccctgcgcctcatttctgaacacagcttatctaacacatgcactctcttcataaggtacatcacactcctgttgtgtttacaaacactgggcactatgcacgatgcttgggggccattttaaacagtgaagtcatccaccaggagcacaagatgcaaaaaaagtgtgatactaaatataccatgaaaaaatgtacttgtttacagtatgtaaactgaaacaaggtagaatgtctgcctcattcaacctcatctgggaatatgcacatcagataattacaacattttaatattaatactctacacaggcacatgtctacaaatgactgtaatggatccccaagtattgatctttgtgtttcaaataa

SEQ ID NO: 562746 - DNA, 597 bp, Homo sapiens
ttctttgtacctccctctccttccctttggaacttccttatttcatttttctgttcatcttccttttttctcctcctccttctgctcctcctcttcttccttttaacccatctctttctcctcttcctctttctttttttttttcttttgcttataaatgaaggatgatcctttcaatagtagtgtggtggatggactaggattgggaaagawgattagtgtattgaataattagaaattttagtaatacattatgagggaactaatgagggccttccataagaaagtagctgataaaagcagatacaaccttgtatggcaaagacaggcaaaatctctggttccctgcctaagcctggtgtaccacaccaacgcctgacaccaaacaggcagactgtgaagttttattatttgcaaacaaacacttgtgaataatgcgtagcttctattttgtgatgctgaatgaattggtgatgcctttcccaaggccaaaaacaaagcttgtgtaaaatagtagtgaggaaaaaaggaagacaagttccacttttgttttgctaaattcggtatatgtctccaggataaaataatgtctgtatt

SEQ ID NO: 562747 - DNA, 609 bp, Homo sapiens
tgtatatatatacataaaaataaaatcatcatgttgtacatcttgaatatattcaatctttatttgacaatgaaatattttatatacatatatatacatatatatatgcaagtgctagggataagcagaaatgtatctggggacatggaaggtggctctgtaggattactaaacattttgagaaaaatcacatttcaacttcacctttgtaagaggttgtgctgggcttcctttccaaatgaaatgcggtgtgacagaaaatagactcatgtagctctctttagtgggatagctttctttctcaacatcaactaacacatctcctaggtgtccttaaagtttcaacctataaatattctacctcattaagcataaggaccagccatggacatatgccgctagtgtccactttccttcagagatttagggtgatgagaagataaagggtctgcttaccagatggagcttgtcagattagcaattggagcagagtaaatatcgctgtcatattgttgttttgaagcacaaagaaccccttttgtataacrcatgtgcatatttaatagtttaaaacaaaaaaagctcagcagaaggttggctggtcgttgt

SEQ ID NO: 562748 - DNA, 609 bp, Homo sapiens
tgtatatatatacataaaaataaaatcatcatgttgtacatcttgaatatattcaatctttatttgacaatgaaatattttatatacatatatatacatatatatatgcaagtgctagggataagcagaaatgtatctggggacatggaaggtggctctgtaggattactaaacattttgagaaaaatcacatttcaacttcacctttgtaagaggttgtgctgggcttcctttccaaatgaaatgcggtgtgacagaaaatagactcatgtagctctctttagtgggatagctttctttctcaacatcaactaacacatctcctaggtgtccttaaagtttcaacctataaatattctacctcattaagcataaggaccagccatggacatatgccgctagtgtccactttccttcagagatttagggtgatgagaagataaagggtctgcttaccagatggagcttgtcagattagcaattggagcagagtaaatatcgctgtcatattgttgttttgaagcacaaagaaccccttttgtataacgcatgtgcatatttaatagtttaaaacaaaaaaarctcagcagaaggttggctggtcgttgt

SEQ ID NO: 562749 - DNA, 597 bp, Homo sapiens
gcgtgagacaccaggcacccggctatgtcattgatttttgagggttaatggagctaatacatgtagagtgctaagtatggtagttggcataaagcctcaataaaggatagttactatttggaggtgaagctctgaaaaagatgcttaattttcaaagtcataaaattagaaaagagacttccctttgaaagcctatgtagcaaggagcaaagactgcaagattcagaacaaatgggcatttcagcttcagttacttgtcattaactgatttaggctgttagaaaatgcattggcacttaagatttccattcttctgtgaagaaaaagatgcgwgttttttcacattatttggataaactacaattattttaaaatatgaagagaaattcagtaaaattttggtaagacaataagatgctaatgtgatggtggtaatgtctttttcttcacagctttatttttgtttggtcaaaaaaaaaagaaaacacagttgtttatagtgtatttgcaaacaatcaactaggaaatcatgcattaattgttcagatgaaagcatgatgctgctcatatttatctgtgtttatcacggcaccagac

SEQ ID NO: 562750 - DNA, 436 bp, Homo sapiens
tggctcatgcttgtaatctcagcactttgggaggccgaggctggcggatcacgaggtcaggagatcaagaccatcctcgctaacacagtgaaaccctgtctctactaaaaatacaaaaaattagccgggcgtggtggcaggtgcctgtagtcccagctactcgggaggctgaggcaggagaatggcgtgaacccgggaggcggagcttgcagtgagctgagattgggccactgcactycagcctgggagacagagcgagaccctgcctccaaaacaaacaaacaaacagacaaaaaatcttgtatacataaaaaattttgcatgactgaaagtttaaaaaatatctttccacatacaaagtcaataccaagatggatttggccttcttccactagttagcaaaattaaaacttttgtgtttcaaaaaatgacttag

SEQ ID NO: 562751 - DNA, 417 bp, Homo sapiens
gctggtttctgctaaaatattttaaaatgcackactgtcatggtaacaacaattagctggagctaagtggaggctgctccgtttcagtgggatggtgttccgccatggcctcacaggcacttagtgagttaaccctatgatttgcttggctttctggcaactgtggaacccatggcaagtctacatctagcctccagaacatttctatgctctcctaggtccagtccctgtgtaattggtccgccctttactacccaagcatagaaagagaagtaaaaatcaatttgacactttgggaggctgaggcatgtgaatcacctgaggtcgggagtttgagaccagcctgaccaccatggagaaacgccgtctctactaaaaaatacaaaaaaattagccaggcatggtggtacacacctg

SEQ ID NO: 562752 - DNA, 417 bp, Homo sapiens
gctggtttctgctaaaatattttaaaatgcacgactgtcatggtaacaacaattagctggagctaagtggaggctgctccgtttcagtgggatggtgttccgccatggcctcacaggcacttagtgagttaaccctatgatttgcttggctttctggcaactgtggaacccatggcaagtctacatctagcctccagaacatttctatgctctcctaggtccagtccctgtgtaattggtccrccctttactacccaagcatagaaagagaagtaaaaatcaatttgacactttgggaggctgaggcatgtgaatcacctgaggtcgggagtttgagaccagcctgaccaccatggagaaacgccgtctctactaaaaaatacaaaaaaattagccaggcatggtggtacacacctg

SEQ ID NO: 562753 - DNA, 571 bp, Homo sapiens
tatatcagattaaataaccaatgaaatggatagtacctgccacatttttcagttgartaagattctccattgtctttaagaaatatgcagtacaaaatgtgtaattataataacatttattacatctctgtttcttaaaatccctaaggtaaaataggtgaataatcttaatttccatttttatgaaaaaatatgcatagtgtttatcaatgaaattgttcattcttttaactatcctgtatgaatcaacagccttatatgtgcctgactgttcacaacatattatattgcagaggcagtttaaaaggaattcattattttgagaagttttgtctctgtgatattttcatgttcaaatcatttattagaactgtattgatgaaactttgattaatactaactagaattattttttaagggcagactaaaacaaataataaacagctctaagaaaaaaaaaacctgattaataaattctatgtacagttgacctgtttagaagttgtattgccatttagttatatttcctcccacacttaaagacactttagttaaaaacaaacaaacaaac

SEQ ID NO: 562754 - DNA, 321 bp, Homo sapiens
gggggtttcaaatgatacctctattcagtggtaagtctgtgctggtgagcagggccaggcctcctcataggtgttgatcctaacagatttccatgattctccactgagtggcagaggctgatttttttttttttttttttttgagacagggtcttgctctgttgaccaggctggagtgcagkggtgcgatcttggttcactgcaacctctgtctcctgggctcaagtgatcctcccacctcagcctccctaagtagctgggactacaggtgtgggccaccttgcccagctaattttttgtatattcagtagagacagggtt

SEQ ID NO: 562755 - DNA, 321 bp, Homo sapiens
gggggtttcaaatgatacctctattcagtggtaagtctgtgctggtgagcagggccaggcctcctcataggtgttgatcctaacagatttccatgattctccactgagtggcagaggctgatttttttttttttttttttttgagacagggtcttgctctgttgaccaggctggagtgcagtggkgcgatcttggttcactgcaacctctgtctcctgggctcaagtgatcctcccacctcagcctccctaagtagctgggactacaggtgtgggccaccttgcccagctaattttttgtatattcagtagagacagggtt

SEQ ID NO: 562756 - DNA, 580 bp, Homo sapiens
ttgcagtgagctgagatcgcaccactgcactccagcctgggtgacagtgcgagactctgtctcaaaaacaaaaaaagaaaaaaacatgtagacgaacaaaacaaaatagggagccaagaaataaacctacatctctatggtcaactaagctttgacaagattgccaagaacacactatggagaaaggaaagtcagttcaacaggtggtgttggggatgctggttatccacatgaaaaagcatgaaattggaaycttgtcttgcaccatataggaaaattaatttgaagcaaaataaagacttaaatgtaagatctagaaccataaatctcctagaagaaaacaaaaagaacaagatccttgatattggtctctgcaatatttttttttgatatgacacaaagagcgcaggcaacaaaaacaagtgagaatacatcaaacaaaaaagtttcttcacagcaaaggaagaaatcaacaaaataaaaaaaaaaaacccaaaatgggtaaaagtatttacaagccatatatctgataagaagttagtatttaaaatacataagaaaccaaagcaactcaatagct

SEQ ID NO: 562757 - DNA, 571 bp, Homo sapiens
tctaaagatacaatttacataatacagttgtgactggagttagctagttcattttaaaatatattggtatcaatgaagtctactatgggtgcagcacttcttccctatgccctrcctcccacaccagcactccctttctccaaccaaactcccacacacagacaaacccttagataacaatctctaaacaaactcccctgagtaagtgcctttgtaagagatgctttttattcatctattcattcttgtatcctttgaacccaaataggtatgtaaatacaggttgttgattcaattaattgtttactgagtgaaaataagataaatgagactgcgtgcatgatcaaggctaaaacaaacgctaggaaaagaaatcagaaaatatttttaaaaatcaatacccatgttcaaagccagagtctagaaatcacatttctaattgtcttcttgatttttcttttattctggaaaagattaaaacacaactttttatatgtatttaatcctctgttttccacccatttcatttaacctctgaaatatagatatcttgcttattcaaaacagcaca

SEQ ID NO: 562758 - DNA, 340 bp, Homo sapiens
caggttgcattacaaatgtaaatcattttcttcttctttttcatggatttttaggtgaagaatgcccaattttgtaatacacaagccaatagcctgcttagaaaaatcaacttatcatttatcrtagcagccaagacaaaattatagatgtaacaaagacacaataccagtcactcctctcggtatctgagttttaacctagaaaaagagacaaaatggtttcccgcaaatcaggcctgttgagcatcagctagtgactccttcaagactccccacacataaatggaacaagaacaggcatgcagtcttacaagtctgaattctgaaactagatttcaga

SEQ ID NO: 562759 - DNA, 610 bp, Homo sapiens
taaagtatatgcttttctcagattttaagaagtatcaagattggggaaatgtcacatgaactttaatgaaagctaatcatatatagttattttcaaaaaatgaaagtaatcaacgctgacctgtaagtagttgttttgactaaatataatagtcaaaccaatctgttgtgtactctacaatatgatactgtaaaattgacagtgatttcattaaccaatatggaatttttaactttaaaaatgtattactcgaaaatattggctgggcacagtggctcacgcctgtcatctcagcacttttgggagcctgaggcaagcggatctcctgaggtcaagagtttgagaccagcctggtcaacaaggtgaaaccctgtctctactaaaaacacaaaaattagtcaggcatggtggtgcacaccagtggtttcagttgctctggaggctgaggcaggagaatcacttgaacccgggaggcgaaggttgaagtgagctggtkccactgcactccaccctgggcaacagagcaggattccatctcaaaaaacaaacaaacaaacaaacaacaacaaccataactatatatctgattatttcttcacttaactgtctt

SEQ ID NO: 562760 - DNA, 512 bp, Homo sapiens
ggctagaaaatagcatacagagagatagtgactaaaagtagaggagaatacagtatctcaaagactagagatgagtgctacaaaggcaattcacattcctaggaaggaaagagtgatgtacagttgatgctgctgagagatccagtagtctgaggcctggaatatttgcttgatttagagatcttgaagtcactagcagagtaaggagtgtgcagaagccagcttggtgtgagagatattagagaagaggaaaagactaaagagatgttcaaaaagccgtgagaaatttgactgtgaagggtaagagaactctagcaaaagggcaaggtggaggaaaagagacatctttttgctttgcttgtttaaggcagaagatagttgaacatatggcaaggcagatgggaaagactgaggttgaaagggagaagctgaatatacaggagagagaaaagatcaatggcagaggaaaattttctagcacrcagccaggacattaactaaaggggattggc

SEQ ID NO: 562761 - DNA, 582 bp, Homo sapiens
gacaggagtttaagaagagcagaagaggggctgggcatggtggctcatgcctgtattcccagcactttgggaggctgaggcgggtggattgcttgaactcaggagtttgagaccagcctgggtgacatggcaaaaccctgtctccrccaaaaatacaaaaaaaaattagctgggcatggtggcatgtgcctgtagtcccagctactcatgaggctgagatggtaagatagcttgagcctgggaggcggaggttgcagtgacctgagatctcacaaccgcactccagcctgggagatagagccagatcccatctcaatagcttcctggctgctgtaatgaattaccacatacttggtagattcaaacaacagatatttattctcacacagttctagaggtcagaagtccaagactagtttcactggtctaagatcaaggtgtcagcagggccattttccctctataggctctcagggagaatctgattattctctacctctcctgggtttgggtggctgccaagatgcattggcttttggcctcatcactttattctctgcatccaacttcatagtgacttct

SEQ ID NO: 562762 - DNA, 530 bp, Homo sapiens
gcctccacttcgccttctcccatgattgtaagtttcctgaggcctctccagccatgcttcttgtatagcctaatacacactcctattctcatttgacaggtaagaagacgaaattacaagcaggatgaaaaatttgttcaatgaaacacagctattaagtggctgacctaataagtgttatgtataagtgactcatccaytgtagcttctgggactcaactttaggatcatcgtcatatgcagcctggagctagccatatttgaagagctaggaaggaggcacagtgattgacaatctcctttctcctcaactagaatgtcatttccttttttaaaactaatttaaatcccatctacattcaattgcttgtctaaaataaaacccaactcctctcttaaagactttaaaaatattatatagcagagttcatcctttctttcttcagagaaagcatcatgaaaacatgttttcaggacattaataacttgatattcacaaccaacctttaaatttggaaacaaggaattca

SEQ ID NO: 562763 - DNA, 424 bp, Homo sapiens
agtggtacactccttactgtctcccccttctttttgtttaactaattgagttttgagtgttctattagttctttmaactatggcctgtccttgggaattataaggaattcctgttgtatgtgaaattttccactgacttaagaatttttggaaagctttactacaatatcctggtccattgtcagttttgattttttctggaactcccattacagcaaaacaagacaataaatgttttttaacatgggaagtactttctcctgtttggcaagttgcccatatgaaatgtgaataagtatcaactgttacatgaacatacgataatcttccaaatgaaggtacatgcgtgacatccatttgccataatgcattaggacacagacctctgggattaactcctgcctcttgagtgggcaggtgtaag

SEQ ID NO: 562764 - DNA, 413 bp, Homo sapiens
agtggtacactccttactgtctcccccttctttttgtttaactaattgagttttgagtgttctattagttctttaaactatggcctgtccttgggaattataaggaattcctgttgtatgtgaaattttccattgacttgagaatttttggaaagctttactacaatatcctggtccattgtcagttttgattttttctggaactcccattacagtacaacaagaaaataamtgttttttaacacgggaagtactttctcctgtttggcaacttgcccatatgaaatgtgaataagttttaactgttacatgaacatatgataatcttccaaatgaaggtacatgtgtgacatccatttgccataatgcattaggacactgaccgctgggattaactcctgcctcttgagtgg

SEQ ID NO: 562765 - DNA, 424 bp, Homo sapiens
agtggtacactccttactgtctcccccttctttttgtttaactaattgagttttgagtgttctattagttctttcaactatggcctgtccttgggaattataaggaattcctgttgtatgtgaaattttccactgacttaagaatttttggaaagctttactacaatatcctggtccattgtcagttttgattttttctggaactcccattacagcaaaacaagacaataaatgttttttaacatgggaagtactttctcctgtttggcaagttgcccatatgaaatgtgaataagtwtcaactgttacatgaacatacgataatcttccaaatgaaggtacatgcgtgacatccatttgccataatgcattaggacacagacctctgggattaactcctgcctcttgagtgggcaggtgtaag

SEQ ID NO: 562766 - DNA, 622 bp, Homo sapiens
cctggctaacacggtgaaactccatctctactgaaagtacaaaaattagccaggtgtggtggtgcgtgcctgtagtcccagctactcgggaggctgaggcaggagaattacttgaacycaggaggcagaggttgcaatgagccaagatcgcaccactgcactccagcctgggtgacagagcaagactttgtctcaaaaaaacaaaacaaataaacaaacaaagtattctggtagcaatagaccatcaatcagcactagagataatcaaaaaatattttaaaaatagaaaggaaagaaggaaggaaggaagaagaaggaaagaagaaaatatttcactgggaaatatagagatagagaagaatggactactctaaggaaagtgatcaagatactatgcaccctcttcagagaggaggtttctgtctagggtcagtatgagctgacttcagcacactgctacatacatccacataggaagaactgtagtgtctggtggtcagtttaacacccaagaatgactggaaaaactctaggacttacataatatatcattgtgagagcctggagtaacacaccaaaagaagttttgcgggtatggtgatgagaaagaataaagctctgc

SEQ ID NO: 562767 - DNA, 622 bp, Homo sapiens
cctggctaacacggtgaaactccatctctactgaaagtacaaaaattagccaggtgtggtggtgcgtgcctgtagtcccagctactcgggaggctgaggcaggagaattacttgaacccaggaggcagaggttgcaatgagccaagatcgcaccactgcactccagcctgggtgacagagcaagactttgtctcaaaaaaacaaaacaaataaacaaacaaagtattctggtagcaatagaccatcaatcagcactagagataatcaaaaaatattttaaaaatagaaaggaaagaaggaaggaaggaagaagaaggaaagaagaaaatatttcactgggaratatagagatagagaagaatggactactctaaggaaagtgatcaagatactatgcaccctcttcagagaggaggtttctgtctagggtcagtatgagctgacttcagcacactgctacatacatccacataggaagaactgtagtgtctggtggtcagtttaacacccaagaatgactggaaaaactctaggacttacataatatatcattgtgagagcctggagtaacacaccaaaagaagttttgcgggtatggtgatgagaaagaataaagctctgc

SEQ ID NO: 562768 - DNA, 361 bp, Homo sapiens
tttcatgatgcaatacattttttttcagagaatgaatttaaatggttaccttaaggagagatttgtccatcattcagacagtattttgagatataaaaatttaaatgaaaagatctggtctttaaagtctaaactctaattataatttgagagacaaaaaaaattacctgaaattagtaatagtagtcattagagcaaacatctactsagcaccccataaaaaccattataaggtaggtacaatactcattgctatgttacagataaaaccaaatgtcttattccaggtcaaaggaccagtaagtggagaagcaagatttgaacttgggtctcctgtgttcctcctgctgatggggactgt

SEQ ID NO: 562769 - DNA, 458 bp, Homo sapiens
aaaaacagaaatagtggggaaaaataacagtgaccttcaggtttgtaggagctctgtcttagtccatttgtgttgctataaaggaagacctaaggctgagtagttataaagaaaagaggcttatttagctcacagttctgcaggctatacagaaagcatggcactagcatctgcttctggtgagggctcaggctattctcagtggaacactaatggcagagagtgaagaggagctagcatgcagagatcacatggcaagagaagaagcaagagaaaggggagggaggtgccaggctttaccaaccagttcttgtgggaattaatagagcaaaaactcacttattcctgagataatggcaccaagccattcatgagggatccacccccatgatataaacacctcccactargtcccatctccaacactggggatcaaattttaatatgaagtttgtagg

SEQ ID NO: 562770 - DNA, 618 bp, Homo sapiens
attaaagacgtatggtcattctagtgaatgtgattgtgatacatcaacatcaccaaaatactaacgtaatctttctgagagggttatttagcttaaatttagagagacccccgctgctgacaaactttcattagtaataaatttaaggtatagatattggaaacaagtgttatgatcaaagtgaaaatacaaaatagcccagaaagcaatttacattcatctgaaatattttcaataatagttaatgcatacgttattayactagactcattactgtttagctctgaaaggctaactataagtttaaaggtagtgcaaccaaagcgaattcagtacacaacttgcaacaatatattaatgaattgaagcaggtgtacagcacttaattgggcaaaaatatgaatcaatactagatgaatcaataccagagctgtagtaacagtactgactagaaaagacttcttccattcaccatgggcacctttgacaaacacaaaacggctttaatgaatattaaataatattctttaattaatatcaataatattctatcatccttcatttacaagaaaatgaaaaggcatataattcttttatacacacattagaattcataca

SEQ ID NO: 562771 - DNA, 560 bp, Homo sapiens
attatccgtttgaataaactttctaccycatctctttctctacctcctctttaaggccaattacagatttgcccttttaaggctattttaaagctattttgaggctattttctatatagatcctgcaggatcttttttctcctctgactgtgtattttcaaatatgttgtcttcaagcccactaattctttcttctgctattaaaggggtttgatacattcctcggtatgccaattgcattttttggctccagaatttctgcttgattctttttttttaattatttcaatgtctttcttcaatttagctgatagaattctgaattcctttggtgttatcttgaatttctttgtgttttctcaacacagctaatttgaattctctgtctgaaaggtcacgtatctctgtttctccaggatcggtccctggtaccttatttagatcatttggtgaggtcacattttcttggatggtgttgatgctagaagatgttctttggtgtctgggcattgaagggttaggtatttattgtagtctttactatctgagcttatttatag

SEQ ID NO: 562772 - DNA, 501 bp, Homo sapiens
gtattattaaaatgtctgctattacaataaggtgaatgtgtccagtgaccaatagttctaaggtcaggatttacacagaatataaaaatgatttatctattatcacccatcccatgctctcatctgcagatacagcctggggaatgtgtgccctctcaaagcttcatatatgttcttctcaaaaaaggggaagaatcaccttatttaagaatctctttagagtatctcagaaggaattatttcaataactttttttgaagaactgattatttttataaagaaattgctttacctcatatctactttaatcaatgctagttcatagaggatatctaactgaattaataagaaacttttttwaaaaaattaaaaattgtagcacagtttgtcactgttcttgggggatgacctcccaaatgcaagtgttggatcttgctgcaaataagcctttttaagaactgctaaacacacacacacacaaacacacacacatgcacacac

SEQ ID NO: 562773 - DNA, 604 bp, Homo sapiens
gccatcgttctcagcaaactaacacaggagcagaaaaccaaacaccgcatgtcctcatacataagttcagtcatcttaaaatgctgttctgcttttggtttttgctaggtcttttcatgttgtcttgaaccatgtttagagaggggggtgacttgatttaaagcaggtgccttacattcatccagagagtggtagatagctatgacctctccagtctctcttgagcatgtgtataaccttttacaagtgtgcatccttccaaaccaccatgagtatgtggaagcttattcagactcactatggccacctcattttctttgttaaatttctagtctagtctactagaaactagctagtctactagtctgtygcttaccccaacctaatggcaacctcaagctagctgtgagggtggccttttctgattgtttgccactgagattgctactgtttgcaatgccgctgacttgcacctgctctaaatcaaatcattcccctcaagtagttcccatagcttgccctaccctgttagaatttccataccaatagagctgaagggctaaaatgccacagactcacacttttacttgaatttcagttgttt

SEQ ID NO: 562774 - DNA, 604 bp, Homo sapiens
gccatcgttctcagcaaactaacacaggagcagaaaaccaaacaccgcatgtcctcatacataagttcagtcatcttaaaatgctgttctgcttttggtttttgctaggtcttttcatgttgtcttgaaccatgtttagagaggggggtgacttgatttaaagcaggtgccttacattcatccagagagtggtagatagctatgacctctccagtctctcttgagcatgtgtataaccttttacaagtgtgcatccttccaaaccaccatgagtatgtggaagcttattcagactcactatggccacctcattttctttgttaaatttctagtctagtctactagaaactagctagtctactagtctgtcgcttaccccaacctaatggcaacctcaagctagctgtgarggtggccttttctgattgtttgccactgagattgctactgtttgcaatgccgctgacttgcacctgctctaaatcaaatcattcccctcaagtagttcccatagcttgccctaccctgttagaatttccataccaatagagctgaagggctaaaatgccacagactcacacttttacttgaatttcagttgttt

SEQ ID NO: 562775 - DNA, 430 bp, Homo sapiens
tttttttttttttttgaaactgacaaagacaatgactgaaattaagaattaaatgtatgagtttaaacagtagattagacacagcagaagtatagattaataaactggaaatatcaatacaataaaaataaacaacctgaaacataaagcaacatgaatggtaaacacagaaaaaagtaatgaggtatatggaacaatttaraaaaatttaatatatatgtatttgagatcccaaaagaaaaagaagagagagtgaggcagaagcaatatttgaagagaaaatgaccaaaactgacaaaagatactgatacatagattcaaggatcttcgtaagccccaaatagatgaaatataagtaaaagcatgcatgcagaaaataggaaaactacttgctatggtttgaatttttgtgtctgtctaaaattcatgt

SEQ ID NO: 562776 - DNA, 596 bp, Homo sapiens
aaggacattatttcagtcctaacaatcatctgttttkttttgttttgttttgttttgttttgttttgttttgttttgttttgttttgaaaaggagtctcactctgtcacccaggctggagtgcagtggcgcaatcttggctcgctgcaacctctgcctcccaggttcaagcaattctcctgtctcagcctcctgaatagctgggattattaggtgtgtactgccatgccagctgatttttgtatttttcgtagagatccggtttcactatgttggccaggctgttcttgaactcctgacctcaggtaatccacctgccttggcctccaaagtgctgggattatagacgtgagttaccacacctggcctaaaaacaatcctatatgttcggtttttattactcttgttttacagatgagtaaacaggaacttaacgattttaagaaacttgcccaagataaatcagggcacagaactgaaagctgagtctatcttaattctaaaatccctgttttttaatacaattatgattttaatagtattatttttctcaggcatttttggggagatatttgtaggcaattactagatggaaaa

SEQ ID NO: 562777 - DNA, 586 bp, Homo sapiens
agacaatcatataatatatacatactaataaatttctccctgacttctaatatccatagtctttttagctactagcttgagaaaatgatgtattttattaaatatgtgctgtaacttcactaacagattttgctgaaaagatgttttataaatcactgacaggcattatcatcgacgcttgatatacattgatgcttgataaagttctgtgatataccasagaactttatattgtggttctcaaaagtgtatttcataaaagaacatgacataatagaacaattcttaacctggaggttgggaatactttatcctaatcaagccctgccattaattagccgtttgacctaggacattttatcaaaccatatttgtctcaattatttctctcaaaatgagataattgactgattcttactgagtttcaatccttcttgcatcataaaccctttgggaaaatgaatggaagctgtagatatccaatgataaattaatatgtcatatataaatgatatttgcattaaagtatagttttatgtttcattagattatttcataggatcctggtaaacaaaacacacaaaaa

SEQ ID NO: 562778 - DNA, 646 bp, Homo sapiens
cactaatcatcagagaaatgcaaatcaaaaccacagtgagataccatgccacaccagtcagaatggctattagtgaaaagtcaaaaaacaacagatgttggccaagctctggcaaaaagagaatgcttataaactgttggtgggaatgtaaattagttcagttcctgtggaaagcagtttggaggtttctcaaagaacttaaaacagaactaccatttgattcaggartcccattactggatatatatccaaaagaaaatacatcattctgttaccagaagggggtcccaatccagaccccaaaagagggttcttggatctcatacaagaaagaaagaattcagggtgagtccatagaataaagtgaaagcaaatttattaagaaagtaaaggagtaaaagaatagctacttaataggcagagcagccttgagagctgctggttgcccatatttatgattagctcttgattatatgctaaacaaggggtggattatccatacctcgcctttttagaccatattgggtaacttcctgacattgccatggtatttgtaaactgtcatggtgctggtgggagtgtagcagtgaggacaaccagaggtcactctgatcaccatcttggttttggtggattttggccagct

SEQ ID NO: 562779 - DNA, 344 bp, Homo sapiens
agtctgtggccaaaggcccgagcgctcctggcaaaacactggtgtaagttcaagagtccaaaggctgaggaacttggagtctgatgttccagggcaggaagcatccagcatgggagaaagatgaagggaagagagacaagaaggcaagaaagatgaaggcaagagatgaaggcaaagagtcagcaagtctgctctttcatcttctcctgcctgctttattctagctgtgcgggcagctgattaggtggygcccacccagattgagggtgggtcagcgtctccaagtccactgactcaaatgttaatcttctttggcaacaccctcacagacacacccaggaaca

SEQ ID NO: 562780 - DNA, 583 bp, Homo sapiens
atgataaagtagtatgtggtttttagcagatatctgtaaaggyattcatagacttgaataacattgcccttaaaaagaaaaaaacaaacaaacagaaaactgacagagaattgatgctgcatcatctctcattccaacaataagtaatctttattaatacatgagctaattaaaaaggaaaccagcctcaatcatctaattaagagattcgaatataaagatttccaatataattattttatatttagtatttattgaaatgtgtattaggtgttattttgaccagttgtcaactaattgaaacaaacaacttaatccagaagaaagttttttaacatttggaccttacggccttaaaaaaacttcgatccttttaaaatttcaatttatatgcatacttttatggtagcgaagtagacagaatactaaaaaactttcaacacgtgtgccatgttggtgtgctgcacccattaactcgtcatttaacattaggtatatgtaactaacccgcacgttgtgcacatgtaccctaaaacttaaagtataataaaaaaaaaaaaagaaaaaaaactttcaacacaaa

SEQ ID NO: 562781 - DNA, 583 bp, Homo sapiens
atgataaagtagtatgtggtttttagcagatatctgtaaaggtattcatagacttgartaacattgcccttaaaaagaaaaaaacaaacaaacagaaaactgacagagaattgatgctgcatcatctctcattccaacaataagtaatctttattaatacatgagctaattaaaaaggaaaccagcctcaatcatctaattaagagattcgaatataaagatttccaatataattattttatatttagtatttattgaaatgtgtattaggtgttattttgaccagttgtcaactaattgaaacaaacaacttaatccagaagaaagttttttaacatttggaccttacggccttaaaaaaacttcgatccttttaaaatttcaatttatatgcatacttttatggtagcgaagtagacagaatactaaaaaactttcaacacgtgtgccatgttggtgtgctgcacccattaactcgtcatttaacattaggtatatgtaactaacccgcacgttgtgcacatgtaccctaaaacttaaagtataataaaaaaaaaaaaagaaaaaaaactttcaacacaaa

SEQ ID NO: 562782 - DNA, 583 bp, Homo sapiens
atgataaagtagtatgtggtttttagcagatatctgtaaaggtattcatagacttgaataacattgcccttaaaaagaaaaaaacaaacaaacagaaaamtgacagagaattgatgctgcatcatctctcattccaacaataagtaatctttattaatacatgagctaattaaaaaggaaaccagcctcaatcatctaattaagagattcgaatataaagatttccaatataattattttatatttagtatttattgaaatgtgtattaggtgttattttgaccagttgtcaactaattgaaacaaacaacttaatccagaagaaagttttttaacatttggaccttacggccttaaaaaaacttcgatccttttaaaatttcaatttatatgcatacttttatggtagcgaagtagacagaatactaaaaaactttcaacacgtgtgccatgttggtgtgctgcacccattaactcgtcatttaacattaggtatatgtaactaacccgcacgttgtgcacatgtaccctaaaacttaaagtataataaaaaaaaaaaaagaaaaaaaactttcaacacaaa

SEQ ID NO: 562783 - DNA, 591 bp, Homo sapiens
gcccagcatacacaggcccagcatctacactttctcacatcaaaataactttcacatttgcctccattttgctttattcattcacagagagctttgagtgctgccaagttcaaaatgtgttgctaagagacaaacttgccctgtggataaggaaaaggaatcaaaagcaacttgccaatggtttcgttactgactcatttatcaatcttggaagacatagggctgctctgcctcttggtttccccaaatggtaatcagaaaaaaattatctgatggatgctctgtgcagagacgtgatcctattaatttccatcaccccctcctgttttgcttctgttgaatccatgctgcaccccagtgccaggtggactttcgcacagcacacctctgctcgcctctctgcccycacacgcatgctgaagcccttcagtgatcctccagtgcattagagacccattcaagctgttcagtgagagccttttaggatctggcctcacctttctgctgtggctccctgcgttttccctgcatgttccttgctctgcagccacctgcctcaccagctaacccatgccttcccatcccaacttc

SEQ ID NO: 562784 - DNA, 338 bp, Homo sapiens
tattttcagcaggttagtagatgccttgctggctagctgtggacctggcttagggaattctgcctcttagttcttagtgcaggatggacgataaagaacagatagttaagagattgtaggcagttattttttacatctacttatacctgtatgcctaatacttagcatttcagctggcaggtagaacgtgttcagtagatatccattggatgaatgaattaatgaaaatgagactgtatttctataatttgactttcaaccaagcatsttaaagtgttattatggtcatcccttgattgctcaaggctagttgtggttttcaggaatatcagcaggaa

SEQ ID NO: 562785 - DNA, 628 bp, Homo sapiens
  misc_feature 592, 593, 594, 595, 596, 597, 598, 599, 600, 601, 602, 603,604, 605, 606, 607, 608, 609, 610, 611, 612, 613, 614, 615,616, 617, 618, 619, 620: n = A,T,C or G
ggtgtggcatttgccttgtaatctctaaaggactatatacaaataatagttaatgttatggccattactactcaatttgtaggtttcttcttccaacagttccaaagaaagacaaatattgaatgagcagccactgtgttgcaaagatgtcactgtgccacacaaggtcatttatgaagtgagggaagagggactcagctctcaagctaycccactggccagcgagtttgatatgtttttagtttcctatttttctttccttccatcctgccttcctgaatttcttttttctttaagatacaaaaacaatagaaatttttaaatggttattaattctgcatatttttaaatgacattagcacatcctgaggctaaatgggaccaggttttcatggcttttacgaatataataaatacataaaaatgcatccccacagagctgggaatagacacctatgttcacaaaccctcttaggaactaagggaaattaatgcttttcatcatacgaaccctgggcacaatgtataggctagatcctgaactacacaatggtttgctagattttcttatccttctttatttgatatacannnnnnnnnnnnnnnnnnnnnnnnnnnnnaggaagca

SEQ ID NO: 562786 - DNA, 628 bp, Homo sapiens
  misc_feature 592, 593, 594, 595, 596, 597, 598, 599, 600, 601, 602, 603,604, 605, 606, 607, 608, 609, 610, 611, 612, 613, 614, 615,616, 617, 618, 619, 620: n = A,T,C or G
ggtgtggcatttgccttgtaatctctaaaggactatatacaaataatagttaatgttatggccattactactcaatttgtaggtttcttcttccaacagttccaaagaaagacaaatattgaatgagcagccactgtgttgcaaagatgtcactgtgccacacaaggtcatttatgaagtgagggaagagggactcagctctcaagctatcccactggccagcgagtttgatatgtttttagtttcctatttttctttccttccatcctgccttcctgaatttcttttttctttaagatacaaaaacaatagaaatttttaaatggttattaattctgcatatttttaaatgacattagcacatcctgaggctaaatgggaccaggttttcatggcttttacgaatataataaatacataaaaatgcatccccacagagctgggaataracacctatgttcacaaaccctcttaggaactaagggaaattaatgcttttcatcatacgaaccctgggcacaatgtataggctagatcctgaactacacaatggtttgctagattttcttatccttctttatttgatatacannnnnnnnnnnnnnnnnnnnnnnnnnnnnaggaagca

SEQ ID NO: 562787 - DNA, 628 bp, Homo sapiens
  misc_feature 592, 593, 594, 595, 596, 597, 598, 599, 600, 601, 602, 603,604, 605, 606, 607, 608, 609, 610, 611, 612, 613, 614, 615,616, 617, 618, 619, 620: n = A,T,C or G
ggtgtggcatttgccttgtaatctctaaaggactatatacaaataatagttaatgttatggccattactactcaatttgtaggtttcttcttccaacagttccaaagaaagacaaatattgaatgagcagccactgtgttgcaaagatgtcactgtgccacacaaggtcatttatgaagtgagggaagagggactcagctctcaagctatcccactggccagcgagtttgatatgtttttagtttcctatttttctttccttccatcctgccttcctgaatttcttttttctttaagatacaaaaacaatagaaatttttaaatggttattaattctgcatatttttaaatgacattagcacatcctgaggctaaatgggaccaggttttcatggcttttacgaatataataaatacataaaaatgcatccccacagagctgggaatagacacctatgttcayaaaccctcttaggaactaagggaaattaatgcttttcatcatacgaaccctgggcacaatgtataggctagatcctgaactacacaatggtttgctagattttcttatccttctttatttgatatacannnnnnnnnnnnnnnnnnnnnnnnnnnnnaggaagca

SEQ ID NO: 562788 - DNA, 552 bp, Homo sapiens
catggattataatgcaatgtcaataaaccatttatcatgcatttatctatgtttcagaactcgggaggctacattctgtaacagatctgtaaagcaggtgaatgctaatatatgctaaaacaagaaattaaaaagcaaacttcacctaaaaagacctttagaacaaatggatcccttggtcactaaagtattgaattttacagatagggtttaacttttatctctattctgtactttgagccaaaacaagagagaataaatgtttttctgacttcayccatataatttcatcctgaattaaatattaatcagagctctattcatgagttaaagatactttcattgttcccagaaacatatgattctaaatgatcatatgattctacaatggaatttgctttatctccagattggcttaacccaaaatagatgttcagcataattttttaaaattaaatacaatatttgaataacctgacattagtgctgaaatgaatcattcggggaactattattttgtaacttaaaaataaattttaagtaagcattgtg

SEQ ID NO: 562789 - DNA, 605 bp, Homo sapiens
ccctgtgctgtacaagtgcacagaagtcaagaattggggtttgggaacctctgcctagatttcggaggatgtatggaaatgcctagatgtccaggaagaagtytgctgcaggggcagggctctcacagagaacctctgctacagcagtgcagaagtgaaatgtgggatcagagctctcccagagtccctactggggcatcacctagtggagctgtgagaagagggccactgtcctccgaccccataatggcagatccaccaacagcttgcaccaagtgcccggaaaagcttcaggcactcaatgccagccagtgaaagcaaccaggaagaaggctatacccctgcaaagtcacaggtacagagctgcccaagaccatgggaacccaccttttgcctccatgtgatccggatgtgagacatggagtcaaaggatcattttggagttttaagagtaagtattacaattattaccattttatgtttttagacagggtctccctctgttgcccaggatggaatacagtggcacaatcacagctcactgtacacttgaaccctgggctcaagcaaccctcttgtctcagcctccccagtagctgggacta

SEQ ID NO: 562790 - DNA, 605 bp, Homo sapiens
ccctgtgctgtacaagtgcacagaagtcaagaattggggtttgggaacctctgcctagatttcggaggatgtatggaaatgcctagatgtccaggaagaagtctgctgcaggggcagggctctcacagagaacctctgctacagcagtgcagaagtgaaatgtgggatcagagctctcccagagtccctactggggcatcacctagtggagctgtgagaagagggccactgtcctccgaccccataatggcagatccaccaacagcttgcaccaagtgcccggaaaagcttcaggcactcaatgccagccagtgaaagcaaccaggaagaaggctatacccctgcaaagtcacaggtacagagctgcccaagaccatgggaacccaccttttgcctccatgtgatccggatgtgagacatggagtcaaaggatcattttggagttttaagagtaagtattacaattattaccattttatgtttttagacagggtctccctctgttgcccaggatggaatacagtggcacaatcacagctcackgtacacttgaaccctgggctcaagcaaccctcttgtctcagcctccccagtagctgggacta

SEQ ID NO: 562791 - DNA, 548 bp, Homo sapiens
gctgaggcaggagaattgcttgaacccgggaggaggaggttgcagtcagccgatattgtgccactgcactccagcctgggtgacagggtaagattctgtctcaaaaaaaaaaaaaaaaaaaaaaaccaagaaataattcttgattcagggttaaaaacaaataaatgtttgccagagttgaagcagagcaggcytgaagtcagccaagccaaccagtatccttaatagaaggccagctggcggagtgtgaagtttactctctggagtcagaagcgccagggtttgaaatctgacgatgtcaccaaccagctgtgtcaccttgggaaagttcatgcttctttctacagcctcgtttccaaatccataaaatggggataataataggtcctatctctgtgtttattacaaagcagggcccttcaaaaatggtagatggtacatctattgtgataaaagaaggtaggtgctatagattagctgtaacattaaggtaaaaggcgtgtatttttaacattagggataagttatttaccactccgagctcccca

SEQ ID NO: 562792 - DNA, 548 bp, Homo sapiens
gctgaggcaggagaattgcttgaacccgggaggaggaggttgcagtcagccgatattgtgccactgcactccagcctgggtgacagggtaagattctgtctcaaaaaaaaaaaaaaaaaaaaaaaccaagaaataattcttgattcagggttaaaaacaaataaatgtttgccagagttgaagcagagcaggcctgaagtcagccaagccaaccagtatcyttaatagaaggccagctggcggagtgtgaagtttactctctggagtcagaagcgccagggtttgaaatctgacgatgtcaccaaccagctgtgtcaccttgggaaagttcatgcttctttctacagcctcgtttccaaatccataaaatggggataataataggtcctatctctgtgtttattacaaagcagggcccttcaaaaatggtagatggtacatctattgtgataaaagaaggtaggtgctatagattagctgtaacattaaggtaaaaggcgtgtatttttaacattagggataagttatttaccactccgagctcccca

SEQ ID NO: 562793 - DNA, 553 bp, Homo sapiens
ttaagtcatattttcttcatctgaaaagtggtaatagtaatgtttcctctgtgtacctcagagggttatgaacatcaatgatataatcaatatcaaaggtagacaacayatgtgaaagcaacttttaaaccctgaagtgctacgcaaacaccataatgttaatgttatcataattagtagtatacaaaacatgttttcatggatgaaacagagagagcagagaaattgtgaattctgtgccctcatctttagtggaagcaagactaaatgtcagaaagtctgttaacccaatttccctgctggccaaaaagaaccatgttggtccatcaggaagggcactagagaaaatagtgtgagcgtgagctgcccacttccaagatgttggaaccgcaactcctgaaattcaaaataccacagctttgggtaccattccttaaaacaaaaacaaacacagacatagctaaggtccatgaaggcttatataaggcaggacaggtaaaatattgaagaatatttgtaaagatcagacacctttaaactctaagcaaaacag

SEQ ID NO: 562794 - DNA, 553 bp, Homo sapiens
ttaagtcatattttcttcatctgaaaagtggtaatagtaatgtttcctctgtgtacctcagagggttatgaacatcaatgatataatcaatatcaaaggtagacaacacatgtgaaagcaacttttaaaccctgaagtgctacgcaaacaccataatgttaatgttatcataattagtagtatacaaaacatgttttcatggatgaaacagagagagcagagaaattgtgaattctgtgccctcatctttagtggaagcaagactaaatgtcagaaagtctgttaacccaatttccctgctggccaaaaagaaccatgttggtccatcaggaagggcactagagaaaatagtgtgagcgtgagctgcccacttccaagatgttggaaccscaactcctgaaattcaaaataccacagctttgggtaccattccttaaaacaaaaacaaacacagacatagctaaggtccatgaaggcttatataaggcaggacaggtaaaatattgaagaatatttgtaaagatcagacacctttaaactctaagcaaaacag

SEQ ID NO: 562795 - DNA, 567 bp, Homo sapiens
tgtgtttgtgtcttagtttttagctaaaaatttcaatagtaaaaaaaataacaatttaaaaaacataaaaagcttataaaataagggtataaagaaagaaaatacttttgtacaattgtataatgtgtgttctaagctaagagttattacagaaaagttaaaaactatttgaaaattttaaagtttataacattaaaaagttacagtaagtgaaggttaatttgttattgaaggaaaaatattttaaaatacatttagtgtagcctacatgtacagtatttataaagtctactttataaagtgaatgttctaggccttcacattcactygccactcactccctgactcgtacagggcaactcccagccctaaaagctccattcctgtaagtgttctctacaggtgcaccactttttattttttatgctgtatttttagtgtaccttttctatgtgtagatatgtttacatacaaaaatgtgtattattgtgttacaattgcctacagtattcagtagagtaacatgccacacaggtttgtagcttagagcaataagctataccatat

SEQ ID NO: 562796 - DNA, 567 bp, Homo sapiens
tgtgtttgtgtcttagtttttagctaaaaatttcaatagtaaaaaaaataacaatttaaaaaacataaaaagcttataaaataagggtataaagaaagaaaatacttttgtacaattgtataatgtgtgttctaagctaagagttattacagaaaagttaaaaactatttgaaaattttaaagtttataacattaaaaagttacagtaagtgaaggttaatttgttattgaaggaaaaatattttaaaatacatttagtgtagcctacatgtacagtatttataaagtctactttataaagtgaatgttctaggccttcacattcactcgccactcactccctgactcgtacagggcaactmccagccctaaaagctccattcctgtaagtgttctctacaggtgcaccactttttattttttatgctgtatttttagtgtaccttttctatgtgtagatatgtttacatacaaaaatgtgtattattgtgttacaattgcctacagtattcagtagagtaacatgccacacaggtttgtagcttagagcaataagctataccatat

SEQ ID NO: 562797 - DNA, 567 bp, Homo sapiens
tgtgtttgtgtcttagtttttagctaaaaatttcaatagtaaaaaaaataacaatttaaaaaacataaaaagcttataaaataagggtataaagaaagaaaatacttttgtacaattgtataatgtgtgttctaagctaagagttattacagaaaagttaaaaactatttgaaaattttaaagtttataacattaaaaagttacagtaagtgaaggttaatttgttattgaaggaaaaatattttaaaatacatttagtgtagcctacatgtacagtatttataaagtctactttataaagtgaatgttctaggccttcacattcactcgccactcactccctgactcgtacagggcaactcccagccctaaaagctccattcctgtaagtgttctctacaggtrcaccactttttattttttatgctgtatttttagtgtaccttttctatgtgtagatatgtttacatacaaaaatgtgtattattgtgttacaattgcctacagtattcagtagagtaacatgccacacaggtttgtagcttagagcaataagctataccatat

SEQ ID NO: 562798 - DNA, 464 bp, Homo sapiens
aacagggtggggcttctatcttcagccttacccttggacctgaggcctgaagataagcctgcttcttatcacagatttatttttactatcttccaagcctgggacaacagctgtttataggggatggttgagttgagtgttgattctgctgtggaggaggcaaagtccctgcagtctgcacattcgacagtcttcatccataakgcatgaggccggagacccgtaaaaagagtacattcctgcgatggcccacagttgattatccacacaggaaaaatgaagaacatttcttcctccaagagtcagtatttatcatctccctgtttctgtcatcatcctgggcttttattcctagacaattttgtaccattgagtgctttatgattagaaataaatcagtccaagtgtggtggctcatgtctgtaatctcagcactttgggagcccaaggtggtagggatgctt

SEQ ID NO: 562799 - DNA, 649 bp, Homo sapiens
tgcccagcaactgcctgtctaatcttggactggcaccactcttattattgattcttggagctaaggacaagtatcccgaaacaattatgtaattatcctcattttttctttaaaaagtttgtccgtctttacttccctaaatatacacatagtttactatggcacacatgttcccattgcagtgccctattcccaaataaacatttttctcttagagcccccctctttgttatttagattaataaaaatgatatctcagaagtgggacccaagtgtacccacctcaaaggaatcagcagcccctggtatcaagtgaggtaatcggcagctgctggtatcaagtgaggcatcaactgagccctttgcgctctatgctgccatgagttacattttctgctctagtaaataccctttttaattcttggactcccttccctcagtgaattctttgtcagtttctgagataataaaagatgttttgtcttttctggcaggtggtatctagaataagaacaatgtttttctgatttgagtcctytagtttccaaagaatttacattttgtctgggtctgcatgcctggtatagtattttgtgtggtctgcatgcctggcttaaaatttttgtgaacacttttattttttgtttca

SEQ ID NO: 562800 - DNA, 563 bp, Homo sapiens
ctcgggaggctgaggcacaagaattgcttgaacccaggaggtagaggctgcagtgagcccagatcaaaccactgcactccagcctgggcaacagagtgagactctcttccaaaaaaaaaaaaaaaaaaagccaggcatagtggtacatgcttgtagtcccagatactcagcagactgagatgggaggataacttgatcctgaaagtttgaggctgcagtgagctatgattgcactgctgtattcctgggtgacacctgggtgacagagtgagactctaccyctaaataaataaacaaataaatccataaacacagatttataaaaattataaatatttaaaataatttgagccccaaaaagcaagctgcataataataatacaagataatgatttatatacaggttgaaaaatactatatagtactacatactattttatgagctcttcatatgcattaatactgtaaacagccatggtaatgataaatgtttaattcaggatagtggttatccttcagtagggagcaaagggaatggtgtctgtgagaagtatatacatata

SEQ ID NO: 562801 - DNA, 563 bp, Homo sapiens
ctcgggaggctgaggcacaagaattgcttgaacccaggaggtagaggctgcagtgagcccagatcaaaccactgcactccagcctgggcaacagagtgagactctcttccaaaaaaaaaaaaaaaaaaagccaggcatagtggtacatgcttgtagtcccagatactcagcagactgagatgggaggataacttgatcctgaaagtttgaggctgcagtgagctatgattgcactgctgtattcctgggtgacacctgggtgacagagtgagactctacctctaaataaataaacaaataaatmcataaacacagatttataaaaattataaatatttaaaataatttgagccccaaaaagcaagctgcataataataatacaagataatgatttatatacaggttgaaaaatactatatagtactacatactattttatgagctcttcatatgcattaatactgtaaacagccatggtaatgataaatgtttaattcaggatagtggttatccttcagtagggagcaaagggaatggtgtctgtgagaagtatatacatata

SEQ ID NO: 562802 - DNA, 409 bp, Homo sapiens
gtggcactgaaattttgtcatgtttcagagtgttggaaaagaatggtggtctcccattattggtggcaatataaatcggcacaacctttgtggrgaaaaatttggaaatctcaaaattacaaatgcaagtgccctatggtgcagcgattctacttatagttgattctatgcagatgctggtgaaattgtattccagtattggctgtaacttaagcaaaagatgagaggaaggaaggatccaccttttttttttttttttttttttaagagagtgagtcttgctctgtcacctaggctggagtagggtggaacaatctcagctcactgcaatctccgcctcctgggttcaagcgattctcttgcctcagcctcccgagtagctggggttacaggcatgtgccaccacacc

SEQ ID NO: 562803 - DNA, 409 bp, Homo sapiens
gtggcactgaaattttgtcatgtttcagagtgttggaaaagaatggtggtctcccattattggtggcaatataaatcggcacaacctttgtggggaaaaatttggaaatctcaaaattacaaatgcaagtgccctatggtgcagcgattctacttatagttgattctatgcagatgctggtgaaattgtattccagtattggctgtaacttaagcaaaagatgaraggaaggaaggatccaccttttttttttttttttttttttaagagagtgagtcttgctctgtcacctaggctggagtagggtggaacaatctcagctcactgcaatctccgcctcctgggttcaagcgattctcttgcctcagcctcccgagtagctggggttacaggcatgtgccaccacacc

SEQ ID NO: 562804 - DNA, 550 bp, Homo sapiens
tgtcaaatagatcagcagatgcagggtttcattaatttactttcaatgactgctgctaactcttaggaagcttttctttacctaaggatgttgacctgctgtaggaccccatcagaaacagacaggaagagacactgatatattaggagattgggaaatttccctccagtggccttcacagactccacaamttccatttattctcactcatgccatcagcacaaaaacaacaacaacaacaagatttgtggtgaagacatatagctggaatctataaaagctcccaactcaagataaataaactcaccaacatatactacactatgatgtgttatttgaagatcttagaatcagctttaaggtctttcttcatgaaaatgcattatcatgaagaagagggaccttctaaacctaaaatagtataccaatttaaataatgcaattagtaatacttagtgtgcatttaattggttacctgaaaagctctaggctgagggtatttggtaaataaaaatttattatgatcacactaatcttgaaattatctagt

SEQ ID NO: 562805 - DNA, 550 bp, Homo sapiens
tgtcaaatagatcagcagatgcagggtttcattaatttactttcaatgactgctgctaactcttaggaagcttttctttacctaaggatgttgacctgctgtaggaccccatcagaaacagacaggaagagacactgatatattaggagattgggaaatttccctccagtggccttcacagactccacaaattccatttattctcactcatgccatcagcacaaaaacaacaacaacaacaagatttgtggtgaagacatatagctggaatctataaaagctcccaactcaagataaataaactcaccaacatatactacactatgaygtgttatttgaagatcttagaatcagctttaaggtctttcttcatgaaaatgcattatcatgaagaagagggaccttctaaacctaaaatagtataccaatttaaataatgcaattagtaatacttagtgtgcatttaattggttacctgaaaagctctaggctgagggtatttggtaaataaaaatttattatgatcacactaatcttgaaattatctagt

SEQ ID NO: 562806 - DNA, 547 bp, Homo sapiens
aggcatgcaccaccacacccggctaatttttgtattttgagtagagacagagtttcaccatgttggccaggctggtcttgaactcctgacctcaagtgatccaccacccgcctcrgactcccaaagtgctgggattacaggcgtgagccaccacacccagccaggattacctactcttatctctatctttctgtctatcctgctaatagtatcatactaattttttaacttttcgttgaggtttatattaaaaagtgcacaaagcataagtgtaccaccgatgaatttttataaactgaacacactatgacaccagctcccagatgccagccccccagagccctcctcaagctccatcccagtcactgcacacacacacaaacatacacagggtaaccactatattcacttccgacaactgaggttagttttgcctgtatttgtcctttatataaatggaatcgtgcagcaataccaagctattttaattataattttctagtcctttcctaactttctcatggttattctcacatatcttgtcttg

SEQ ID NO: 562807 - DNA, 559 bp, Homo sapiens
ttgatctgcttataattattatttactggtctattatgtattaaatgggactctgtgctggactggaccatgagtgattatccttatctgtatgacataagtgtccacaaagtttcaagttaccagcttcgttggtagtcactgatatggttgtgtgtctgggtattttgttcttttagcataggctgcacccctcttccctattagtcattaaggtctttgacatcagatactccgccttttgtaaaataagattaaaaagtacagaggtctatacatagtgtggcaggaaattctcactggagtttactgcwtggggcagagataagattgaggccatttagctacaaatagaatgcactgcacgccccattcccttcactgaggctctggtagaggcaaagaagtcccagctgtcaattctgaaattcccaggtgcaccaatccagattactttaactattattaattactggcacctcacaactcattgccccacaccagtgcatcttaatagcatggctgagaaccatggatttaacgtatgtgttgaaggtcg

SEQ ID NO: 562808 - DNA, 556 bp, Homo sapiens
tctaaacccctgacccatagaaaccatgctatgctaaatgtatgtccatttgaactacttaagtttatggtaatttattacacagcagtataaaactcatacyaatacaacagcattctaaaatttcagaatataaatgttagtgttgggttttcatgttcttaagttataaactttttaaaattacttcgttgatgattttctcttgttcactgtctttgttttatccttctgacactcttattattcagatgttgagcattttagattgaaactctatattttttttcctcttctactttgtgtttttcttgtcttcctggtatactatctgagaaatttgcctagctttatcttctaacccttctattgagttttccacttccactaccatgattttagtttctaaaagtttattttgttctctaaatgtccattctctttggatagcatcatgttcttgtttcacagatgctatcctacctatttcctttttcctgtcctattcttgtttcctacctgttgcctttttctgtctgcctactagcttgtttgg

SEQ ID NO: 562809 - DNA, 518 bp, Homo sapiens
aaaaaaaagaaaagaaaagaaatgccctgccattagatgacttgacctagaagttactccctaaaaattatccacaggtcatcccatctacctggggcatggtgttatggatgttccttgaacacgtagagctgtctgagtgtttgcccaaagagaacattggcatcactcacctttgaaatacaaaagagaagcygtttgctttacttaaatcctgaatctttgatcatccacatcaggtgtctttgatgttggctgcaatctgtaattgctacaaattaacacaaaggtaggaaacaggttaaagaggcacggagaaatgaaataaaagtcttacatctgaacacaggcacctttttttctaccccctttctcctccaaaatgaggcttgttcactgtctcttccttctgctagaagtttcttgaacctatgacttatctgccacatacatttaatcattttagggtccatttagactcttaaaaggagtctcgagtatagtaggccttcaataag

SEQ ID NO: 562810 - DNA, 516 bp, Homo sapiens
cagaggagattgtgagttgcctagatatgatgccttttttttttttttttttttttttttttttttttcagattcaggtcatcaggctcagagaatttgctgttattgccagtccgtcctcacaatgtagtaagtcctcactttccacatgctaggctaaaccttttagttattaccactcatgtccaaccggttggctccactgaragaccaacaggtgaagcaaagtcaaccacccaaagaattttaaaaccttcaaggatttttatcaaatctcttgccttgtcccattttttcagctacttctgcaaagacaagccagagagaggaagcaaaccttctcacatatcttctaataagggcaataatcttgttgtgaagcctccacctgataacctgattatctccctaaggccccatctccaaataccatcacattgaggtttaggggtgtattagtccattctcacacactataaataaataactgagactgagtaatttataaggaaaaga

SEQ ID NO: 562811 - DNA, 516 bp, Homo sapiens
cagaggagattgtgagttgcctagatatgatgccttttttttttttttttttttttttttttttttttcagattcaggtcatcaggctcagagaatttgctgttattgccagtccgtcctcacaatgtagtaagtcctcactttccacatgctaggctaaaccttttagttattaccactcatgtccaaccggttggctccactgagagaccaacaggtgaagcaaagtcaaccacccaaaraattttaaaaccttcaaggatttttatcaaatctcttgccttgtcccattttttcagctacttctgcaaagacaagccagagagaggaagcaaaccttctcacatatcttctaataagggcaataatcttgttgtgaagcctccacctgataacctgattatctccctaaggccccatctccaaataccatcacattgaggtttaggggtgtattagtccattctcacacactataaataaataactgagactgagtaatttataaggaaaaga

SEQ ID NO: 562812 - DNA, 614 bp, Homo sapiens
ctaaatatttaggaggaatttcttagtgggtaggtatctcagaaatcattttaagaacatggaagcatagtgcttttactaaagccgctgggagtggacatggctttgggaaaagggtagaacaggaacagaatgggaaaagataaaagcttgaatataggtgccaggtggattcgggcaagatgggggtgatgaaggacraaaggatacagtttagcattgaacagacttgtcccattgatgtccacttggtttggggtacgcattttggatcaccagttcctcaaagggaatgtccttttactgggcctccctctagcaggcacagctgtgcttgagcctcaggcattctgggctaagtggacaaacgctgcaccagagaatgggaaaactgctggttcaagtccagccacacccaaaattcacacgcctagtcagctcatcaacagcatccttccaccatccccccacctaacccagggaacctggcctggcctcccttctctcctcaggcacatggcttctctttcctttccaggttatctttggtggcttttaaaaaaacaattttattataaaaattttcaaatatacacaagagcagagagaccaaa

SEQ ID NO: 562813 - DNA, 533 bp, Homo sapiens
tttgagatgtgttttcagacttttgcatttctgactgctggacgactccaccaggaccagcaactcctgtggtccccacccagaagcggactcagtgcatgaggaccattttccacacccccatgatcatatccccaaccagtcagcaatacccattctctagccccccgcccaccaaactatatttaaaaaacactagcctccaaawtttcagggtggcttatttgagtaataataattctccattctcctgttgagccagctctgtgtgtattaactccctctctactacaatttccctgtgttgggaaatgggccctctctgggcagtgggcaagaagaacctgttgtgtggttacaacatccaccacttcattaccaaacactaatgaaacagaaaggcctcattttagagggactgacccttgagtgagcagatccatctgccggagattttccaaggctcctggcctgctccccacgcccagtagccatcaagtcaactcttgaaggcagggtggatgtctgaattc

SEQ ID NO: 562814 - DNA, 474 bp, Homo sapiens
gtgtttaatattgtggtttgtaaaaataagtaggatattttgtaaagaaaaaattcagataaatatacttaaaacttagtaaacctttatgaaggcataaaatgatgttggttgttcagagatggtttccagaaaaatacaaagcacagaatttaacccttttcctagtttctttcttctgtagcagcatctggtcagcagcaaaggggcagaatttcttctaagaaaagaatttctggctgtttgaacttactgatgctaaaatccagcttttgggaggagaaacctctaagtgcttgagggggacgcraagatggaagccacccatctgtggtggcaaactgaggcctgcaaacacagggtcctgccagctacttagcacttccatcccttggatccacccagcccttcactctccctctgtagcagtcaacacttttaaactgactccctagagaagtttaatgagcctct

SEQ ID NO: 562815 - DNA, 602 bp, Homo sapiens
cactccactggcactggaaacacaggcagaaactcagatcaatcaagtaaccaggaactaaattgttcaaaaatgttcagatctacacaggtctcccgagttcattcaaatgaaaagacttaatatggccaaataaagtgaactccttcttagcagcaacttcatttcactaggtacttgaatttcaaatggggtttgttaagtagctttgctaggaaagtcgagaaggaagatcttatcccttgtgtttctttatgggtttttttttttttttttttttttggttttcctaaaatcatctcatatgaagccactttataaaagttatattcttattcttagttatggctaaaaatttcatgccaatgttctaggttcacagaggatgttttgtagkgaaaaaaaaaatgtaacctcattttttctcaatttttaaaattctgataaaatacacataagatgtagtatcttaaccattctcaagtgtatagttcagtggcattcacattgttgtgcaactattaccaccatccatctctagagctctttatcttgccaaactgaaattctatttatgctaaacctaaatcctcatccccgta

SEQ ID NO: 562816 - DNA, 419 bp, Homo sapiens
taagatttaccaaatgccaggttgctagagaacaggcagggaagggggaaagacaggcacaggagggaaggtttccacagtgwctagcgtactagtaactctgttttagtcttaacaccataagcacctaaaagcagaattatttttaaaagatatttagatttattatctgcctatacatttatgataattgaagaaaaactcactagagtgtgaggtgcaaagtgatgatgtaacctcccaggctatggatggccagtggtcctctcagtcacataggaacaggtggtatagatcacatcagatgacagtgaacccactgcagtcatgggtgggtcataaccattttcattcatttgtatatttttgtgagtgtggtaaacaccagctattagttccttgaactctcttccttctgt

SEQ ID NO: 562817 - DNA, 472 bp, Homo sapiens
aaaatattttcttcaccccattaaataaagtcctctgatacagccttttctatgatataargtttatttgaatttttggctttcaactacatgaagccaaataattttgttttagtactcagacagattcccaaataaactattaattttagattgcaacttatttacatagtaatgataaataaaatccgaggaataaaatttgaatttgtccagaaccataaaattctccttgttgagttagtttattacactggttataatattcagaccatgaggaaattgttaattgcatgtttatttcatcgactcacaattataaagttaagcattattttcttgcattgagtctttttttttttttttttttttttttgagacagagtttcgctcatggtacccaggctagagtgcaatggggtggtcttggctcactgcaacctctgcctcctgggttcaagcgattctcctg

SEQ ID NO: 562818 - DNA, 472 bp, Homo sapiens
aaaatattttcttcaccccattaaataaagtcctctgatacagccttttctatgatataaagtttatttgaatttttggctttcaactacatgaagccaaataattttgttttagtactcagacagattcccaaataaactattaattttagattgcaacttatttacatagtaatgataaataaaatccgaggaataaaatttgaatttgtccagaaccataaaattctccttgttgagttrgtttattacactggttataatattcagaccatgaggaaattgttaattgcatgtttatttcatcgactcacaattataaagttaagcattattttcttgcattgagtctttttttttttttttttttttttttgagacagagtttcgctcatggtacccaggctagagtgcaatggggtggtcttggctcactgcaacctctgcctcctgggttcaagcgattctcctg

SEQ ID NO: 562819 - DNA, 430 bp, Homo sapiens
tgggctagtggggctggccargagctcacagccatcaaaatcaaaaggtgctgggcagtttctctttggtgtgcctggcgtcttttgtctagggtaactataactcctgcttggatccagcaggaagtcactcctggtctggctttctgatgctcctgaataatggttaggccatgagagccgagaggacacagcttcagcagaaggacttccaaacggggatttcaggtccacagaatcagttttcactcggttacatggatagcaggaaacaggagtgctttcagaaggatttgtgtcagttttagtgacgctgcttaaaagcaaacacagaaggagaaatcagttaaaagaaaaaagccaaatcccaaggcttttgttatttatagacgttactgctgagtagaaaagcgcagttagttttgaattc

SEQ ID NO: 562820 - DNA, 576 bp, Homo sapiens
tgctgaaattaggcatgagtggaggataattgctagaaagtcactggagctcatcagtgtccacagcgccatatgcaaatgcatttcgggacaagattcatagttgagtattctctaatggaagtagaagcctctctgggtaatactaggaggccagcaatatgaaaactaagcttcataatttaatttaactgcctcttttggactgcagaatgcatcagggaattctgcaatattacagttttgggctcacctaaaaatagccagactggggacctgagactgcacaagtatctttctggctatggggtgctcggctacttagccacccacattgtcagtggtaggcttgggcaggtacagattctgttcaacaggccgagactaatgtttttcctactctctgagatctgcaaacttgtgtatcaagaagcaagaragattgcagtcctaaatgtccatgatcgatcaaggtaaaggaaccgagatcaaaagccagagcaaggctaggtgtggtggctcacacctgtaatcctagcactttaggaggccgaggcaggcggatcatgaggtcaa

SEQ ID NO: 562821 - DNA, 609 bp, Homo sapiens
gctactgtacagcaaaagaagctattaggagaacctacagaataggaaaaaatattcgcaaactatgcatctgacagaggtctaatatccagaatctataagaaatgtaaacaactcaaacaaatcaaacaatcccattaaagacaggcaaaagactgaacttcttaaaggaagacatacaagcagccaatgcccatgtgaaaaaatattctacattactaatcagagaaacgcaaatcaaagccacaatgagatatcatgtcacaccagtcagaatggctattaaaaagtcaaaaaataacagatgctggcgaggctgagaagaaaaggaaatgcttatacattgtctatgggaatgtaaattagtttagccactgtggaaagcaatatggagaagttctcgaacttaaaacagaaataccatttgacccagcaatcccattactgggatctaaaggaaaatcattcaaccaaatctcaatctcaatctctctcctttatttacaacagcaaagacatggaatctacttagatgtccatcagtggtggattggataaagaaaaaatgtggtatatgtayaccatggaatactacacagtcacaaaaaa

SEQ ID NO: 562822 - DNA, 620 bp, Homo sapiens
actgccattttattgtgggagacatttggttaatgatacaccagaggtatgaacggagtgtggccatattctctcctcccccaccaaaaaaaaaaaaaaagagtctatcctggcaagtgatccagatttcgaagaatcagtagcagcaattagcagttctaaaccatgagttaattgttgaaactccaagaccaaaaggcatgtgtgttagttatctattgttacataacaatattataataccaccaactgagcagcttgaaataactcacatttattgtctcacagtttctgacagtggtttggtgtctgatcatggcttacctgggttygctacttcagagtttcacaaggctgcagttaagatgtcagccagctctgtgatctcatccaatgacttgactggggaagaagccacttccaagttcatgtggttgttggcaggattcaggtccttgtgggctgttggactgacaggcttagtttcttgctggctgttggtccctcttagttctcagctgtttgttggacaggagcctctctcagatccttgctcatgggcctccacagcatactcacttgcttcatcaaagccagaaagagagacagtctgctagcaa

SEQ ID NO: 562823 - DNA, 570 bp, Homo sapiens
aataaacataaacctccccttaagataatcactgttgatatgttaacatattacttctagaatctgcctatttttacagttaagaaaatactacaagcacaattctatatagttatatagtttttatctgacttaatattacatcacactgtttgctcacatttaaaacaattctctattaacctaattttcagtggtggcatagactggatattttgattatttgtggtagaaaataagattgtctccattttttttttgcactaaacaattctgtatataattatgtgtccatatttatatctttaggaaatacagtaataaaaacaagggtcaaatagcatgaacaaaaagcccttgattcacattacgtagcagggtggctatagcaaataacaatgttgccagattttgaatgttgttaccakaaagaaatgatgaatgtttaaagagatagatatggtaattaccctgatttgattatacaatgtataatcacccttagggtataaatatgtacaattattatgtgtcaattataaataaaaattaactaattaaaattaataa

SEQ ID NO: 562824 - DNA, 585 bp, Homo sapiens
ttaagaaatcatatcttaaaaataattttgccaatcgtatggaagaaaaaatgatatcaaattgttgcttttatttgcatttccctatcaccaagggtgagaatctttttatatgtttcatgaccatacttgatttctggtttgtcaattgactcttcacagactttaccaattttcccggagtttacttttgtttataatctgaagtagtgcattaatttttttccaattktataagtaattgtccaaaatcaattactgaatgatattctcttttcttgctgatataaaatgctatgtttctaatctctggactctctctttgattccatagatccatttgtcaatatttacaaacaatatggtcttaacatgttttaattttataatgtttttgtaagattttttaggaataatatttacgtaaaaagaatctaaagtatagacaaaatgcttttgaaaataaaaagaagaatgttgtactttcccagatcttaaaataagttataaagtcatgataattaaacagtgtagtattagcctaagacagaatacacaaattgatcaaaaggacgaaaaagaaag

SEQ ID NO: 562825 - DNA, 585 bp, Homo sapiens
ttaagaaatcatatcttaaaaataattttgccaatcgtatggaagaaaaaatgatatcaaattgttgcttttatttgcatttccctatcaccaagggtgagaatctttttatatgtttcatgaccatacttgatttctggtttgtcaattgactcttcacagactttaccaattttcccggagtttacttttgtttataatctgaagtagtgcattaatttttttccaattttataagtaattgtccaaaatcaattactgaatgatattctcttttcttgctgatataaaatgctatgtttctaatctctggactctctctttgattccatagatccatttgtcaatatttacaaacaatatggtcttaacatgttttaattttataatgtttttgtaagattttttaggaataatatttacgtaaaaagaatctaaagtatagacaaaatgcttttgaaaataaaaagaagaatgttgtactttcccagatcttaaaataagttataaagtcatgataattaaacagtgtrgtattagcctaagacagaatacacaaattgatcaaaaggacgaaaaagaaag

SEQ ID NO: 562826 - DNA, 466 bp, Homo sapiens
ggaaaataatcagaactagaaaatcccagaaccagacatagtgtttgaaacgacttcttaattgagctgttttcaggattagaagtatgtgctaaactttcrttattaccatcacctctcccaccctccaccaccaaattctcagcatatgtttaagaactaaactgagacttaaatatctgccatctggaaatgcatatgaaaacctttccacatttccaagtctggtaagagcaaatatctcttttatgtgcctttaatgctaaccaattcaaatggttttcagaacaacaggtatttaagttacagatgtttccggcagcaaggttatttttttggtcctctgatggacctctcaaattgacagagaaggcagctttaaacacgtaaacatagtttagcagtttttggtgaggatctaattcagcttataaatcaaaattacccagtacactccttgaatcct

SEQ ID NO: 562827 - DNA, 627 bp, Homo sapiens
ccagctaatttttgtatttttagtagagatggggtttcactacgttggccaggctggtcttggactcctgacctgaggtgatccacctgccttggcctcccaaagtgctgggattataagtgtgagccaccacacccagtcrcaacaaaatctttaaatatgaaatagtacaaaaaattttaagtgacatgagccaactgagatgtgctgggaggagtgcatttcccctctaaaagaacagattctactcagctctagcatattgttggcagatttctccatttttcaagaaaagctaaaactcacatgcttatctgaaatctcccaagttttgaaatactaaaataaaataaaatatttccacaatcctgtggcaatttccaccatttggtggatcatttttgagtctgggataccctctcagacatgtacatggcttgcttagcctctctgttccttgattccttaactataaaaatggggtaataataaccacacccacctaataaggttgtgggtaggaataaattaaagataaatgaaaagtgtttaaattactgctagtcacacggtaagtgctgaaaagttaccactttcccgatcagttttccgctgaaaataagcact

SEQ ID NO: 562828 - DNA, 589 bp, Homo sapiens
tgggcacttcctgctattgatctgagactcagctttgaggctcatttaatttctttcataacatttttgccttagtgaacttgataattcttttcagggaaatgcaaagtagataaaaattatgttgtcacagaaatcataactttcagaattttagataggtgaatgcttcgggattttataggtcatttttggactgtcagtaaggcatttatgcctcaattcaaagcatttcagaactttattttacttagaaatgttgtttatcttttgccattatctgtggtactgtttgggttcctactgaatatcacatattgtaattaatatgatgtatctttgacagggccatcttgtgatacatgcactgtcacaggaaaagtttccaggaaaagtcaagccagggcttcacagaagatcaaaagaaagagacaaggagaagctaagtgtattagtcaggattctctaagggacagaactaatagaatatatatacacacacaaacacamacacacacacatatatatacatataaataaaagggagtttattaaggagtattaactcacacaatcacaaggtcccaca

SEQ ID NO: 562829 - DNA, 562 bp, Homo sapiens
aaaaatatttaatggcatagaatatttttatgaaattagagatgaacatatgaacatagtccatcttcccaggttccaggttatttagcaataggtactgagcactttctgcgtgccagggactgctctaggcttggggaacttaactgtggaccaaaaatattgtctaaatgccccactcttgtggagcttactgagaagagcaaagatcacctggtaaccatcaagcagtccatccagagacaaaactccttatctaaggaattcagaagtaattagagttctctattatgtaaagccagcatctggttccaggtttccttccaaaaaatttataagtaactagaatttctatacatctccggaatgcatgcatatagaacctcattgtgcaacccttgctgacatcaaggcaccaaatgtctacaaatgtaatcattttattttttttattatactttaagttctagggtacatgtgcacaacgtrcaggtttgttacatatgtatacatgtgccatgttggtgtgttgcacccattaactcatcatttacattaggta

SEQ ID NO: 562830 - DNA, 536 bp, Homo sapiens
ttctcacagttatgaaagctgataagtccaagatcaaggcaccatcatttggtgtctgatgagggccttcttgctgcatcctcaaatagcaaaagatagaatggcaaaaaagagaagaagagaaggaaggcaaaaatggggacaaacactgggtcctcacatggcagaagggtagaagagccttttataagggtgctaattccatttatgaaggtggatctcttatgatttaatcatcttcctaacgttacacctgttaatactgttgcattggggattcagtttcaacatgaattttggaggagacaccatcattcaaaccatatcatgctcctatcactcaggaaattacaaaggtcttaggaactctgtgtcaggaactggagtcaaagaccaaatattagaacaaaaggttatcctaatacccctacctacaagggttttggagctctatgtcgggaaccaggggcagagaccaatatrtatttattatatcataatatcaaaatcaggaacaagacaaacatattcacttt

SEQ ID NO: 562831 - DNA, 632 bp, Homo sapiens
ttgatacatgtaagagaaacagaaggtagtaatgattttgcctggacttctagatatcaaagcccataggcttagacaaataagtcactaaaacaaagaatgccaagtgagaaaccgttcatcaaatagaacacatacagatatcgaactaatatggatatattgttttaaaataaaatccatactttattcagatgtccttagttttgttttttttaatctcttttctgttcaggagaccacgttacatttaatccccatgtctcyttaggctcgttgtgcctgtgacagtttctcagaccttcctggtttgtgatgaccttgacagttttaaggaggactggtcaggtgttttgtagaatgtttctcatttgggtttttttctgttatttttctcatgattatgtttgggcgatgttttttttagagagaaagaacacagaggtaaagtgtcattctcatcacatcactacaaagggtacatactatcaacatgacctattgctgttgatatccaccttgaacacttggctaaggtgatgtgtgtcctatttctctactataaagttactttttttggtctttccataggttactctttggaattaaacactacactgaggaagtgcaga

SEQ ID NO: 562832 - DNA, 511 bp, Homo sapiens
catgtcctctgagttgaaacagttttcagtaggtggatgaaaacccatcttgctaattatagttttggataacagattaaaatatgtagaaaggtttcctccttagatgattagatctttctgaatgacaacttttctatttattagctctgcatgccttaraaaaaatgtgcttgtgtgggagagctccagaatgtagctgccagattgggagcagaccttgtattcacgtgtgcctttctgaagctcagtttacagctttcctaggtttatctgttctgtgcctgggttttgcttataaagtaaggtcttgcatgcctcaagaagtggactttgttaagtgcagtgcagttaagatctgcagtgcagtggggacttttttctttatataattttttaaaaagaagctgatgggagaaataagagccccagggaatggatgcttatgtgtagattttgctgatataggagaagaaaagataactgtgttttgaaaagacatgtgcaatag

SEQ ID NO: 562833 - DNA, 549 bp, Homo sapiens
cctggcttaagtttgaatgccttgggccattcaggagtctccgtgtttgttttttccctgagcttcgctttccttgcttggatattttgtgagcatctgaccagtacattcagccactttaaaagaatctcccaggccttcctttgcataggggctttgtgattttttttttcctgttttgtttcaccatatgttccccttttgaatctgagtctccacaagcatcaggaaagactcggtgaaattctttttttttttkccagaaaagtcaagctaaatgcaattccttctcctaaagtcaatttgcagaaggtgtctttgaaacggcctataaaattgtgagcaaatgaagtttcatcttgctgttaacgaggttgctttgccaaacctgtcagaactggatctgacccttttgtgttatagtgtctgctccagctggggctattggctgttaatcagaagtgtttacactttttcatgctcacttgatttccactagcctgcccaacttggtattcagagtgggttcattacaaagaatattgttgc

SEQ ID NO: 562834 - DNA, 357 bp, Homo sapiens
  misc_feature 1, 2, 3, 4, 5, 6, 7, 8, 9, 10, 11, 12, 13, 14, 15, 16, 17,18, 19, 20, 21, 22, 23, 24, 25, 26, 27, 28, 29, 30, 31,32, 33, 34, 35, 36, 37, 38, 39: n = A,T,C or G
nnnnnnnnnnnnnnnnnnnnnnnnnnnnnnnnnnnnnnnaaatcatgtaagactatttgttgttttctttaagagtcacatctggagaataactgtcttttaccctctgacccttttgatagagataataatccaaattctttttttttttttttttttttttgaggacatgacctctgtctgtgacctaaactggagtgcagtgatgcaatcacagcttaccacagcctcaatctcccaagctcaaacaatcttytcacctcaacctcctgaatagctgggactacaggtgcatatcaccacacttggctattttttttattttttatttttatttttattttgaacaaacagcat

SEQ ID NO: 562835 - DNA, 545 bp, Homo sapiens
agtcacccactattttaagtctgcatgaggttcacttcacagggactttgactaaagctcagctagtgtgcttttggcattctcttatttttatacataattgtcacagctgagcttattaaactcagcttatgataaaactagtaaaattcttattaaaagaagccatagtttccagagcaaggaaacaaatcacccagtttaaaaatgggcaaaggacctgaatagacatgcctcaaaagaagacatacaaatggcaaacaggcatataaaaaatgatcaacatcactagtcatcagggaaatgcaaactaaaaccacaatgagataccacctcacacctgttacaatggctattaacagctgaatgtggtggctcatgtttataatcccagcagtttaggaggctgagacaggcagatggcttgagcccaggggcccaaaaccagcctgggcaacatggcgaaaccctgtctctacaaaaayacaaaaattagccaggtgtcatggcatgcacctgtagttccagctccttggaaggcagga

SEQ ID NO: 562836 - DNA, 503 bp, Homo sapiens
gcgagaccctgtctcagaaagaaaacacaaaacaaaaagataatgagagagagagaacacatgcgcacaagcaaataatgtaggcaagtgcttctcagactctgtagtgaagggccacttttccccccaataatttgtaagcgacacttgaaatatacaaaatcatakgcttgaatttagtggcaatatcaaattactttaaatgtttctaaatgtgttttgttgttgttgttgtttttgttactttctattcacaagtcatcatagcttggtagcaaacagttcatggagcagccttgatattgaccacataggaaaagagtagaaatgtaaggcaataaagatagaggtagtcacgggtatatagatgtgacgatgtttgcatgcttgtatggacagaaatacatgtaacaaatatgacaaaagtgatgccaagcatttggatcctaaaaataaatttactgattaaatttacatttataaaaatatttccagattaccta

SEQ ID NO: 562837 - DNA, 554 bp, Homo sapiens
atgaaaccatttttccctcctagagctccaggcctgtgatgggaggggctgctgtgaaggtctctgaaatgctctggagacattttccccattgtcgtggattaacattcagctcctcttcacttatgcaaatttctgcagcaggcttaatttcttcaccaaaaatgggrttttcttttctaccacatggccaggctgtaaattttccaaacttttattctctgcttcccttttaaatgtaagttctaatttcagataatctctttgtgagcatacacttttagaaataaccaggttatctcttgaacgctttactgcttagaaatgtcttccaccagacaccataaatcatctctctcaagttcaaagttccatagatctctaggtcaagggcaaaaatgccaccaggctctttgctaaagcatagcagtagcaaacctactccagtagcaagtactggagtaaacctttactccagtttccaataagtttttcatcttcaactgagaccacatcatcctggaattcatcaccactattaacatttcggtcac

SEQ ID NO: 562838 - DNA, 552 bp, Homo sapiens
tctctctctctctctctctctctctctttttctctctctccccccccccccttttttttttttaatgctttccaggattcttggctctgggaataaggttgctcaccttacaggtacagataatctatgtggtggtataagtggctttgtcaatcccagcagctcagagggaaatatcaatgatgcttcatctcaaaagtgatactgacggctctagacctaaaaagccctagctttaaayctctgggaaattaaataggccttctgggccttcattcctacctcaagtcactgcagttcagagggtccgtctgggaggctggaggtgagcgaattccctcccatcagccttgcccaggctgtggccttgctcctcctccatgattttcagtcatagcagagatcagctgagggcaggagatccaaggttgggccgactacacagttattgctgtattattttggctcatcactgaaattctctgggcctaagtgtatgcatagacatgaaaggcttggactggatcgatagatttcaaatttttgctactt

SEQ ID NO: 562839 - DNA, 447 bp, Homo sapiens
cccagcccagcctgcacctctgatgctgagttgtttagtgtacaggaagaatggtaataactttatgtaagttcccagtagccttgaagcatctggtcccatgaacaggtagatttgctaaaaatgctaaataaagaggtcattggctcagaaaaacattctgagccaaaagcagtgacaaagcactgaaggaactgagaaagtacaacctagaacatcccagatctcttcctacttgcattccgggaaaccattttaattactcatgtggaacaatatgactgttgattgaggaagataataccgtgtgatgtttagagacacttcatagaggatccccccaaaattgaataaaaatatgaaatttatttttttactccattgtgtttttattttttaacttytaaaagaatacttatttgtgttaaaaaaaaaaaaaaaaaaaga

SEQ ID NO: 562840 - DNA, 583 bp, Homo sapiens
gcttcttttttcacaggtggaaaaatcacaagtgcacagtcgacccttcactctctctccacatcttcgtcatcagtcaccttgctcttggcattgatgattccttcaacttcctggtgaaaactgctgacttaatttgcttttgtttgctttagcttggtaacagcggtgaatagagtgtagtgtaagtggagaaccaggatcctgagatgagcttgagctttaaaaacttgggactatacatggtgaacttacaggaggttaggggggaaatattacttatccatcaggtttctctttggtttttgtaaacggagaggacagttcttagtccagtaaaaatatgcagattgtatgtaatgaatttttgtaaacaaaggtaatttctgtcaaatgtattctttacttttttaatatgttgggattttattttatatctgatgactccgagtgtgtgccatccatttgttaagtaactggcctttagcagatctgtttcaaaaacaaatacaaaartgagaatgaaaagtttgcttaagactaagtccagtgtttttcattttccctttggctgaatatttca

SEQ ID NO: 562841 - DNA, 448 bp, Homo sapiens
cagttcctggtacagtgcctgcacgcaatggatgttcaataaacacaagctagcagtgtgctggtgtagggtcgcccagctccccagtgctttctttctgtgtcctgaccaaaaatcagggtgccttgactgttctgtgagccagccagctgcaggatttcccagcaggcttgaaccagaactgaagcctcgaacattctcaggcaccaataaaaatatttaggttgctcatagtgaaaccccgtctctactaaaaatacaaaaattagctgagcgtggcagygggctacctgagacaccctgtagtcccagccacttgggaggctgaagcaggggaatcgcttgaaaccaggagacagaggttgcagtgagccaagatcgtgccactgcactcctgcctgggcaacagaggagcagaggagtgagactccttctcaaaaaaagagga

SEQ ID NO: 562842 - DNA, 561 bp, Homo sapiens
gtagatttaaacccaatacagttcttatgtttattttttaaagtctgattaaaaacgttaaatgatatcatagattcaagtacacttacctctgaaaagattcaaaacacgatgctaaatgagtagcaaaaatgaagaggttttcaagggataaaataatttttctaaatcaaattatgcacttttttgcwtttctttcctcaaaagtgaagatgcttttaaatgtttattatcaataattctcagaaagaaaattttttcttgtcttgcattcttattagcttattcatcaatgtttattccaccaatatgagcacacgtggtttttaaatttctttatcatcagaaaaggttatattgagataatgagtcttggtaggaaagagtcctcctgaaatgccagcagcccattaggatttcttacttaataaccttagcaaccaccaatactttcaacagtccttcatgacctttcagtttctatggacagttttggagtagggcagatgcttatgatatggttatcacaagaaaatttgtgtatttttaagatgctgggag

SEQ ID NO: 562843 - DNA, 488 bp, Homo sapiens
tttagaattcatttctctgtgatgcrgtcgtcaaatttattctttccaaacagagagccagtcatgctgggcttttcattaagcaaatagacgttttcccacagaattggatagtaaaatgttatcatcttaaataaaaccctaaatcagtctcaaggggtgcaggggagtcatactttaaaaaatatgcttaaacttggttctggtttattttttcctctgtgtgattcacagggagttcatctatgacactgactggaaacagctacgtgaaataccgtctgacggaaaatgaaaacaaattagagatgaaactgaccatgaggctcagaacatattccacgcatgcggttgtcatgtatgctcgaggaactgactatagcatcttggaggtatgtttctccacagcgttgcatcttagtggaagactttcaaaccataaatttcattttatattcagattgttaatttgcacagataataaagta

SEQ ID NO: 562844 - DNA, 310 bp, Homo sapiens
tctctccttccaggaaaaatgaacaaccagtttgaagcattgctcaaagttctgtttcctgggagggtcttcctccatccttgtttttcagggctgtactgaattgggtctgtagtgctgcaaccatccaatttcaggtagtgtcagtaggtcatgaaaagccatgtggaaaccaggcaagaaggtttttttctttcttattcagctggtcaggggcacgtcctcatgaggccataggagcatgctgagggaatggaggcagggtggtgggaacgcrggctgtggcctctgagccacttgctcttgcatc

SEQ ID NO: 562845 - DNA, 582 bp, Homo sapiens
ctatattgatattctattgaaactaaatattgaagtcacatggtcatgatgaatagcaaacatttatayatcacctactatgtcagaatatttcaaatatttttctattttaacttatttaattctctccataagcctaaagttgggttcttttactaccagcattttacggataagaaaactaagacacagaaaggttaagtaaaattcctaatgttaaacagccggttagtcttcgactcaagtatttatccaagtatactatctctaaattccacataatccactactatcgaactgcctctaatgtaatcaaaatcatattatgagtgcaaggcatctaaaaactagtctgtttcagcagggcgtggtggctcacacctgtaatcccaggactttgggagactcaggtgggcagatcaattgaggtcaggagtacaagaccagcctggccaacatggtgaaaccccatctctactaaaaatacaaaaattagccaggtgtggtggcaggtgcctgtagtcccagctcctcgggaggccgaagcaggagaattgcttgaatctgttaggcggaggttgc

SEQ ID NO: 562846 - DNA, 592 bp, Homo sapiens
atttgtttattagttctaacaggtttttggcaaattctttaaggttttttatgtataagatcatgtctctagcaaacagggacattttcacttctttctttcctatttgggtgctttttacttctttctcttgcctacttgctctggctaggatttccattactatgttgaatagaagtgataaagagtggttactcttatcttgttctggatcttagagaaaagagcttcaattttttcaccattgactataatgtgagctgtgagtttatcatagacggcctttattgtgttgaggtgcattccttctatacctaatttgttgagagggttttttttaatcattaaaacgtatttgaattttgtcagataaattttctgtgatatgaccatactttttttgttcttcattctattgttacraggtatcacatttattgagttgtatgtattgaaccaccccagaatcccagggttaaacccacttgataatggtgaatgatccttttcaagtgctgttgaactcacttttctagtattttgctgaggatttttgcatctattttcatcaaagaaattagcctaaagtttc

SEQ ID NO: 562847 - DNA, 625 bp, Homo sapiens
tgtgtatttgtgtttactacacacagttttttaaagttttcaatttatttatttataatatacacagaaatactatttgggggatacagctctatgagttttgagaaatttatagagttatgaagccactaccaaaaccaaagtataaagcagtatcctcaccctagaaattccagcctccccaacactagctcctggcaacttytgacatactttttatatctacaactttaaaaattcttttacagaatatcatataaagtggatcatggcaaatatagcctttaaaaaatctttttcttattttaatagacaataattatattatatgtgaatggggtacaatgagatatcattatatatgtatatatagtgaaatgattaaatcaagctaattattacatatattatctcatacttatttatttgtggtgagaacatttaaaaatcttcttttttagtgattttaaaatagactttattattgattatagtcatcatgctgtgaaataggtcactaaaatttttatttctcttgatttttttttttttttttttttttgagacacactctcgctctgtcacccaggctggagtgcagtggtgcgacctcggctcactgcag

SEQ ID NO: 562848 - DNA, 625 bp, Homo sapiens
tgtgtatttgtgtttactacacacagttttttaaagttttcaatttatttatttataatatacacagaaatactatttgggggatacagctctatgagttttgagaaatttatagagttatgaagccactaccaaaaccaaagtataaagcagtatcctcaccctagaaattccagcctccccaacactagctcctggcaacttctgacatactttttatatctacaactttaaaaattcttttacagaatatcatataaagtggatcatggcaaatatagcctttaaaaaatctttttyttattttaatagacaataattatattatatgtgaatggggtacaatgagatatcattatatatgtatatatagtgaaatgattaaatcaagctaattattacatatattatctcatacttatttatttgtggtgagaacatttaaaaatcttcttttttagtgattttaaaatagactttattattgattatagtcatcatgctgtgaaataggtcactaaaatttttatttctcttgatttttttttttttttttttttttgagacacactctcgctctgtcacccaggctggagtgcagtggtgcgacctcggctcactgcag

SEQ ID NO: 562849 - DNA, 625 bp, Homo sapiens
tgtgtatttgtgtttactacacacagttttttaaagttttcaatttatttatttataatatacacagaaatactatttgggggatacagctctatgagttttgagaaatttatagagttatgaagccactaccaaaaccaaagtataaagcagtatcctcaccctagaaattccagcctccccaacactagctcctggcaacttctgacatactttttatatctacaactttaaaaattcttttacagaatatcatataaagtggatcatggcaaatatagcctttaaaaaatctttttcttattttaatagacaataattatattatatgtgaatggggtacaatgagatatcattatatatgtatatatagtgaaatgattaaatcaagctaattattacatatattatctcatacttatwtatttgtggtgagaacatttaaaaatcttcttttttagtgattttaaaatagactttattattgattatagtcatcatgctgtgaaataggtcactaaaatttttatttctcttgatttttttttttttttttttttttgagacacactctcgctctgtcacccaggctggagtgcagtggtgcgacctcggctcactgcag

SEQ ID NO: 562850 - DNA, 565 bp, Homo sapiens
gttttatatgtatgtatgtgtgtttgtgtgcaaatagtctgtttgyttattcttcaagatggtggcatgaagagggacacgcactgacatcatttgacataaaggatgcttaaaaatctaaatatttaaaacaatgattctgcttaagtatgtcatactttaactcacaaaaattaagcatgtcaatgattttaatagttggagagagattaagcaaggctgaccaagtaagtatatctttctgccaccagagacttaatcacaggcaataggtaagtgaggtttcaaagtaccttggggttgtttctgaaatatgcctataaaaggaaatccattggttgcttcaaagagctaacatattgctagttatttagtttcagtagttatgtatgcatactctgtcaactggatgtaaataatatgtgttttgtgtgcatactctgtcaactggatgtaaataatatgtgttttgtgagagaagagtttggtttcaaggtaattgtttatcatctatttttgtagtatggtagttcaggaacactgactgacccacttaataaaaata

SEQ ID NO: 562851 - DNA, 565 bp, Homo sapiens
gttttatatgtatgtatgtgtgtttgtgtgcaaatagtctgtttgtttattcttcaagatggtggcatgaagagggacacgcactgacatcatttgacataaaggatgcttaaaaatctaaatatttaaaacaatgattctgcttaagtatgtcatactttaactyacaaaaattaagcatgtcaatgattttaatagttggagagagattaagcaaggctgaccaagtaagtatatctttctgccaccagagacttaatcacaggcaataggtaagtgaggtttcaaagtaccttggggttgtttctgaaatatgcctataaaaggaaatccattggttgcttcaaagagctaacatattgctagttatttagtttcagtagttatgtatgcatactctgtcaactggatgtaaataatatgtgttttgtgtgcatactctgtcaactggatgtaaataatatgtgttttgtgagagaagagtttggtttcaaggtaattgtttatcatctatttttgtagtatggtagttcaggaacactgactgacccacttaataaaaata

SEQ ID NO: 562852 - DNA, 537 bp, Homo sapiens
taattttttcttgtatgtaaaatatttcatctggatcatccatttttcatcttaaatatatgcttgagaattatatttgggagggtttgacagttacacactcagtttctgtgtgcttgaaaatatctttgtttcaccattactactggtaaagaatatttttgctttgtatacaatctttagttgaccattttctctacatgaattgaaaataytagtccattgtcttctagtttccattgatgctatgattagtcagatgtaagtctaattacaatctctttcaagggatatatttatgttcttggagttattatctctttatcattattatatgaatttatttgcattggtttccatttattttgattgagatttatgtcacctttgggttatttgagttagtatttgtattaatttgttctcacactgctataaagaacttcctgagactgggtagtttataaagaaaagagatttaattgatgcacagttctgcaaggctggggaagcatcagaaaacttacaatcatggca

SEQ ID NO: 562853 - DNA, 285 bp, Homo sapiens
tattattttttctgactgtattatttctaaagacttggcttcaagttcagaaattctctcttctgctcaacctattctattgttgaagctgtgattgtatttttcattttattcctgaaattatttagcccaactttttgagttttgggggctttgtttgtttgtttgtttttgagatggagtctcactctattgcccaggctgaagtgtggtggtacgatcttggctcactgcaacctctgcctcmtaggttcaagtgattctcctacctcagcctcctgagtc

SEQ ID NO: 562854 - DNA, 589 bp, Homo sapiens
gtagaccatatgttaggtcacaaaacaagtcaaaacattcaaaaaattaaagtaatattaagcatcttctctgcaacaatgaaataaaactagaaatcaatagcaagaggaatttttaaaactatacaaatatatggaaattaaacaatatgctcctgaatgaccagtatgtcaataaagaaattaagaaggaaattgaaaaatttctttaaacaaatgataatagaaacacaacataccaaaatctatggaatacagtgaaagcagtagaagaaaaacttcaaataaatcatctaattatgcatcttaaagaactatacaaacaagagcaaaacaaactcaaaattagtagaagaaaataaataataaagatcagagcataaaataattttaaatgaagaaaacamtacataagataaatgaaacaaaaagttgatttttttgaaaaggtaaacaaaattgacaaatctttagactaagaaaaagcaaaagaagactcaaataaataaaatcagagatgaataaaaagacattactgctgagaccagcttggtcatggagaccttaacccagcagcactagaggaatt

SEQ ID NO: 562855 - DNA, 488 bp, Homo sapiens
tagagacagggtttcaccatgttggtcaggctggtctccaactcttgacttcaggtgatccgcccacctcgacctcccaaagtgctgggattaaagggatgggcaactgcacccggcctgatctttattctctggacagccagctttgagacttcaggaaaattattcaatcactgagtcagttgatcctcaattatttcagatgtagtaagaccaataattcaatagtactgtcctggtagcatccgttttaggtttaaaagtaattcatattgtttacarcagcacaatttgcaattgcaaaaatatggaaacttcctaaatgcccatcaaccaacgagtggataaagagaatgtggtatatgtacaccatgagatactactcagccataaaatggaacaaaataatggcctttgcagccacttggatgaagctgaaggccattattttaagtgaagtaactcaggaatggaaaaccaaataccat

SEQ ID NO: 562856 - DNA, 570 bp, Homo sapiens
cacatgcctgtaatcccagctacttgggaggctgaggcagaagaattgcttgaacctgggaggcagaggttgtggtgagctgagatcgcaccattgtactccagcctaggcaacaagagcgaaactccatctcaaaaaaacaaacaaacaaacaaacaaacaaaaaatatatacacacacacacacacacacacacacrcacacatttcagattatagaaagaatcattcatacatactcaattttttaataaggaaaagaaaaactttgtcaacaaatggcagtgaaataacttaatacgtatataggaaataaatgaaccttaacctgtacctcacctcatacacacagattaatttgagatggattagggacctaaatgtaaaagctaagactacagtgcctctggaataacacataggaaaatatatgcaaaaactctgactaggcaaaaattagtcctaagggcattattgaggaaatgaaaaaaaatcaagtcatgactgagaaaaaaacacttgggatatgtgtgtgtgtgtgtgtgtgtgtgtgtgtgtgtgtgtgtgtaca

SEQ ID NO: 562857 - DNA, 509 bp, Homo sapiens
ttggcttttctcttgacgtgggaggtgagtacctttctatgaaggtgataaggatccactgagtcttccatataaaratcatattcctgctccaagtggccattactgagctgagagatgtcattgctgcagtgaggacctataggcacatgtaggttgaatgaaactctagttctaactggaagcccagacatgggatgggtcagtgagcatggctctcttcctagtctcaggccatgcctgtggcactctgattctactctcatgacattggacctgggcagatgtgacaaattcagagaactatgattttgactcaagggtttgtagatttcctttttcactctaatttcagtgtctaaagtcctcacaaccatgaacaatctgagtatttgatgagacagggctaaatattgcagtttttctcctagaaatcatttgagggtatttgctttaaattgattggaaaaatatggcataactgtttgcacaaactcgggacaaatgat

SEQ ID NO: 562858 - DNA, 509 bp, Homo sapiens
ttggcttttctcttgacgtgggaggtgagtacctttctatgaaggtgataaggatccactgagtcttccatataaagatcatattcctgctccaagtggccattactgagctgagagatgtcattgctgcagtgaggacctataggcacatgtagkttgaatgaaactctagttctaactggaagcccagacatgggatgggtcagtgagcatggctctcttcctagtctcaggccatgcctgtggcactctgattctactctcatgacattggacctgggcagatgtgacaaattcagagaactatgattttgactcaagggtttgtagatttcctttttcactctaatttcagtgtctaaagtcctcacaaccatgaacaatctgagtatttgatgagacagggctaaatattgcagtttttctcctagaaatcatttgagggtatttgctttaaattgattggaaaaatatggcataactgtttgcacaaactcgggacaaatgat

SEQ ID NO: 562859 - DNA, 502 bp, Homo sapiens
tgcccagctaatttttgtatttttttttagtagagatggggtttcaccatgttggccaggctggtctcaaactcctgacttcaagtgatctgcccgcttcagcctcccaagtgctgcgattacaggcrtgagccaccgcacccagccagacatgctattttcaaacccttagatggtgcctccctgcctgccagcaacctccccatgtgaagagctacacaggatttgaaatggtcacaagacaaacgtcaaaagggtttgtaaaccaaacaggaaggactgggaagaacgccataaggaaatgagtgtagaagaggggaaaacatgagagaactggagaacagagaggcagtgcaggaaggtgctcttccttcagcagggacttgcatactggcgttcctctcctcatggcaaccctcctctgacctgtcagggacactaccctggcactgtgcgagccagaagtggcaaatagcctctcctctgcccggctcctgcccat

SEQ ID NO: 562860 - DNA, 502 bp, Homo sapiens
tgcccagctaatttttgtatttttttttagtagagatggggtttcaccatgttggccaggctggtctcaaactcctgacttcaagtgatctgcccgcttcagcctcccaagtgctgcgattacaggcatgagccaccgcacccagccagacatgctattttcaaacccttagatggtgcctccctgcctgccagcaacctccccatgtgaagagctacacaggatttgaaatggtcacaagacaaacgtcaaaagggtttgtaaaccaaacaggaaggactgggaagaacgccataaggaaatgagygtagaagaggggaaaacatgagagaactggagaacagagaggcagtgcaggaaggtgctcttccttcagcagggacttgcatactggcgttcctctcctcatggcaaccctcctctgacctgtcagggacactaccctggcactgtgcgagccagaagtggcaaatagcctctcctctgcccggctcctgcccat

SEQ ID NO: 562861 - DNA, 502 bp, Homo sapiens
tgcccagctaatttttgtatttttttttagtagagatggggtttcaccatgttggccaggctggtctcaaactcctgacttcaagtgatctgcccgcttcagcctcccaagtgctgcgattacaggcatgagccaccgcacccagccagacatgctattttcaaacccttagatggtgcctccctgcctgccagcaacctccccatgtgaagagctacacaggatttgaaatggtcacaagacaaacgtcaaaagggtttgtaaaccaaacaggaaggactgggaagaacgccataaggaaatgagtgtagaagaggggaaaacrtgagagaactggagaacagagaggcagtgcaggaaggtgctcttccttcagcagggacttgcatactggcgttcctctcctcatggcaaccctcctctgacctgtcagggacactaccctggcactgtgcgagccagaagtggcaaatagcctctcctctgcccggctcctgcccat

SEQ ID NO: 562862 - DNA, 604 bp, Homo sapiens
ttgcctatttttgttgtttagttttgtcctgttaacagaaatattgggcatttagttgtttgttattcaatgtgaccagagactagtaataaagttcatgctcaatcattttgctctgtgggttatctggaaagtacttttctaccaaacagattcttagcgacatacctgggaaggactgaagtggtaagtagggatctgtgtggtgtccactgcaaactaagaccccatcaaagaccaaagtctcttgtttctcttcagtctccacaacaacatcccattgtccattgatagaaaaatctgggtgcttcctcacactttgcacttcagtctgagaacaagatgatacactatcacagtcctcaggtttaatccctcctccccaaaaccccatragtctgagtaatataacttatctgagactcttctatcttcatcagaggcatttgctctctctttagttcccactcccatagtgactgcctttgccgtgtgtgcattttcaagatattgtgggtattttatttaaaaatccaattttccatagaaatagaaatagttgatacttaatggggaaaaaacagaggagtgactgaagctgcaa

SEQ ID NO: 562863 - DNA, 666 bp, Homo sapiens
caggaatgatgtgaccagattggatttttagaaagtcaactctggtggcagtttgggagatggtgtgaggtgacaagagaggctggatgcagggagaccaggaccagggcacaggggagagaagtcgggggtcgggaggctgtgattctgactcagatgaaacaaaggaataagaatcagtgtggtgagcagagggtctcccaattatgtccccagactacctcttcaggttcatcttcctcacccagtcccacattctggcatgcaggctgatctactcgcacacacacactgcatatttgatgcccttctcttttgctggaaaaagctcctaaacatcttcttgtgatctaaatcaactttcctcttctctgcaaatccttcctgatttcccttcattgagttctttgctctatcctctgagttccaacagcattttgttyatattttggttatagactgaggcaccaatgctaaattgttaattatctgtttacatgcctattatttctcattgtgagttcttcaaagacggggataatatctacttgttcatttcttcaacaaacattttttaaggaccagtttgtggcaggaactgttccagacaaaacagtgaagatccctgtccttttcgtcactttgaagaggagacagaaaaacaaa

SEQ ID NO: 562864 - DNA, 584 bp, Homo sapiens
ctcagctcttaaattgcttacttttgtattgcgttacctgttttttgttttgttttgttttgttttttaccaacatagttattgcaacagaggttactcttgggtttttaaggaagagtgtggtttagacacttaggaatgtcattgtttaaagaaaaaaatttytaagtggactctaaaggcatcatgtggcctaacctcataataattctccctttttggagatccaggattcaatgtgggctctgcccacagctcagagatcaagttaaaagatgggtcgtccctaactaaagaaaatcggtatccttacacaattctacgagagatttctataatttttatgtttcatttagcatccatctttaatctccctctagcaccaccagactttttttctctctaccttatgaagtaaattttactacttgattttcaacggagttgtttcctttaatatgcaaatttaaggctattagctgacaactgcctaggatgtaaaacaggttattaagaatctaaaagtctaagttaggaaaaaaaagcatttttataaatctataagatgtacatttatcagtatg

SEQ ID NO: 562865 - DNA, 584 bp, Homo sapiens
ctcagctcttaaattgcttacttttgtattgcgttacctgttttttgttttgttttgttttgttttttaccaacatagttattgcaacagaggttactcttgggtttttaaggaagagtgtggtttagacacttaggaatgtcattgtttaaagaaaaaaatttctaagtggactctaaaggcatcatgtggcctaacctcataataattctccctttttggagatccaggattcaatgtgggctctgcccacagctcagagatcaagttaaaagatsggtcgtccctaactaaagaaaatcggtatccttacacaattctacgagagatttctataatttttatgtttcatttagcatccatctttaatctccctctagcaccaccagactttttttctctctaccttatgaagtaaattttactacttgattttcaacggagttgtttcctttaatatgcaaatttaaggctattagctgacaactgcctaggatgtaaaacaggttattaagaatctaaaagtctaagttaggaaaaaaaagcatttttataaatctataagatgtacatttatcagtatg

SEQ ID NO: 562866 - DNA, 575 bp, Homo sapiens
taattacattatataagtgtaattagtataaagatgtgagcaattattactttctctacctaagttgatatagtttggatgtgtgtccctacccaaatctcatattgaaatgcagtctccaatgttggaggtggtacctggtggaaagtgattagattatgagggcagttttctcatatatgatttagcatcgtccctcttggtactgtcctcatgatagtgagtgagttctcataagatctagtgatttaaaagtgtgtagctctccctcctcatccctcctcactccatcttgctcctgcttttgccatgtgacatgcctgcttcccctttgccttttgccataattggaagcttcctgaggctcccccagaagcacatgcagctatgctttttgtacagcctgcagaattgtgagccaattaaacctctttttaaaataaattactcagtatcagatttttttttacaacaatgtgagaatggactaatacataaatatatttctcaaaacagaaggaatcagacacacaagattttcatcaactaygttctaaaattcagtaagttgtgga

SEQ ID NO: 562867 - DNA, 584 bp, Homo sapiens
ccctctaagcctacaatgaacagaaaaggcacttacaggtccagggcatgggtctgtactagtgctgcataaaaacaagatgtttttggctcattacacttgagtaatacagcttcattctcacgaaactgctgagccctttctaaaacgtctggaattgatgttcagcagaacatcattgttgttcattctgcagtgaagccaggggcagaataccaatgtatttaaagccatagcaccctatattttcaatgaagcgaaacagtcacacacttcctgtaggactcctctctacgattttcctgaaacaggtagagcatatgcaagccagagaaattaagcrccacccccatttagattttacccctagatatgtaaacatatgaaaaatcccattacacagatgggaaaacttgggtcacagtgttccctggtccgtagggaagccagacactgatactaatcctgtcatcacgccacccactgcctttaattagagggtgctgtcagttccaaaggcaccagaaagcatatggggtggaatacttacttgactcagagcccctgagagagcaggccacaca

SEQ ID NO: 562868 - DNA, 584 bp, Homo sapiens
ccctctaagcctacaatgaacagaaaaggcacttacaggtccagggcatgggtctgtactagtgctgcataaaaacaagatgtttttggctcattacacttgagtaatacagcttcattctcacgaaactgctgagccctttctaaaacgtctggaattgatgttcagcagaacatcattgttgttcattctgcagtgaagccaggggcagaataccaatgtatttaaagccatagcaccctatattttcaatgaagcgaaacagtcacacacttcctgtaggactcctctctacgattttcctgaaacaggtagagcatatgcaagccagagaaattaagcgccacccccatttagattttacccctagatatgtaaacatatgaaaaatcccattacacagatgggaaaacttgggtcacagtgttccctggtccktagggaagccagacactgatactaatcctgtcatcacgccacccactgcctttaattagagggtgctgtcagttccaaaggcaccagaaagcatatggggtggaatacttacttgactcagagcccctgagagagcaggccacaca

SEQ ID NO: 562869 - DNA, 573 bp, Homo sapiens
tcaatcttggtcttggatattcatccttctaataagcatgattgataacaatcttgctaataagcaatagtartatcaatcttgaatattcatgcttctaataagattggaagaataccacttgggtacttgcatataactcctactacctacatactccactccttacaagctaacaatgcctttattattattattattattattttgagacagagtcttgctatgttgcccaggctgcagtgcagtgatgcaatcatagttcactgcagccttgaattcctgggctcacgtgatcctcctgcctcagtctcttgagtagcttggatgacaggcatgcaccaccacatcttgctaatttttatagagatggggtcttgctatgttgcccaggctattcttgaactcctgggttcaagtgatccttctgccttggcctcccaaagtgctgggattacaggcatgagccaccatgctcagcctaacagtgcctttaaaaacctcctgggctacattgaaaaccttattatcacatgtcaacttattttgaagcaagtttgcttataatttagt

SEQ ID NO: 562870 - DNA, 414 bp, Homo sapiens
taatgtgctgtaaaatccatattcttcctcgccttccttagaaatatttgcaaaacaggttcttgccatagcagkttcatagcccacgctgtgggaccgttttgaaccacactgctctttaaaacaaacagaacagctacactcagagcaaggaggatggtagggatggcctctttctgggtatccacactgcctcttcctcccagactggctggactctgagaagagctgggaacacagggccctgttccatggaacaagcacgtcttgcttctcaaagcgacggttcttttgttccattgcccaaacgtaaatcatcagttggcctccgggaactaagaccctggccatttcttttattgctctgattcttctttgttttgtagaaaaatgatgtatgactgaaaaagacaa

SEQ ID NO: 562871 - DNA, 414 bp, Homo sapiens
taatgtgctgtaaaatccatattcttcctcgccttccttagaaatatttgcaaaacaggttcttgccatagcagtttcatagcccacgctgtgggaccgttttgaaccacactgctctttaaaacaaacagaacagctacactcagagcaaggaggatggtagggatggcctctttctgggtatccacactgcctcttcctcccagactggctggactctgagaagagctgggaacacagrgccctgttccatggaacaagcacgtcttgcttctcaaagcgacggttcttttgttccattgcccaaacgtaaatcatcagttggcctccgggaactaagaccctggccatttcttttattgctctgattcttctttgttttgtagaaaaatgatgtatgactgaaaaagacaa

SEQ ID NO: 562872 - DNA, 556 bp, Homo sapiens
cactgaagcaagatttgctctgatgacatttgcctaacccagatgaacttaaacttcagtttgtatgacctttctgtttgatatggtataaacatatatcaaaggagtcaaggtaatagggaacctctaactccttccacaccctcacctacacctaaaactgtggcttcgatagttttcaattctatttaagggcaacgtagacataattttgcttttgagaagacataagaacacttgtatatagttttcaattatatttaacggcaacctaaacataattttgcttttgagaagacataagaacacttgtatatcttgaattttagcactagataaaagaaaatctctcatgaatggcaaaactgaaagtgtaaaagagtaatgattgtrtaagtattgttgttcttgcgacagtttgctgagaatgatggtttccagcttcatccttgtctccacaaaggaggtgggaattgaacaatgagaacacatggacacaggaaggggaacatcacacactggggactgttgtagggtgggggaaggggggagggat

SEQ ID NO: 562873 - DNA, 554 bp, Homo sapiens
ttcatgacactatactaacaaaattctcaaaaatctgaagaaaaaggaaggcaatgataaggcaatgaaaaaaaaaacatttgtggccaatattatctcwttattaaaataatgttaaattatatgatatatttgaaaccatatgacaaaagagaagattccttagattggaatcttggccacattattaatgtgtgttttatgatgttacttaacttctctgtgtctcaatgttttcatctgtaaaactgggataactataataactacttcatgaggttattgtagtgtttgaatgggttaattcatgtaaagtgcttagaataagaagcaacacttaataagcacttaataatcaataacatttattattttataagcctgtctgtgaaaacacttccttgtgattatcaatgatatttaatatctgtataatgtttataaattcagaagtgttttttcacaaacattattacatcatataatcctctgaaattagtgttattctgactatctatgctaagaaaaatagagctgggaaatactgagtaact

SEQ ID NO: 562874 - DNA, 554 bp, Homo sapiens
ttcatgacactatactaacaaaattctcaaaaatctgaagaaaaaggaaggcaatgataaggcaatgaaaaaaaaaacatttgtggccaatattatctctttattaaaataatgttaaattatatgatatatwtgaaaccatatgacaaaagagaagattccttagattggaatcttggccacattattaatgtgtgttttatgatgttacttaacttctctgtgtctcaatgttttcatctgtaaaactgggataactataataactacttcatgaggttattgtagtgtttgaatgggttaattcatgtaaagtgcttagaataagaagcaacacttaataagcacttaataatcaataacatttattattttataagcctgtctgtgaaaacacttccttgtgattatcaatgatatttaatatctgtataatgtttataaattcagaagtgttttttcacaaacattattacatcatataatcctctgaaattagtgttattctgactatctatgctaagaaaaatagagctgggaaatactgagtaact

SEQ ID NO: 562875 - DNA, 531 bp, Homo sapiens
ttctttcttagcactacagtgtgtctaatttgatgagaaaataaaatcacaaaatttacgatctttttggctcctcagctgaccttttcccttatcaacgtttttcagtgggagttttgggcaaaacaaaagtcagaaagaaatattccattatctttcattgcattttattgaaatattattggagacatatgtcaaaataagaggaaacaggatgtataaatatctcactcctctcagaatgtaggcacagttcagaaaagatgaaatcaaaactaataagctaactagcttattattgaatcaaaaacttacactctaattaaatataaataaacatatggactgtaatgttgaactttgyccttgattgacctactttaacaggaagatgtctcatatcttcaatgcctgctaacatctttttattattgggttgctagaaatttcctttttagagttccactaactttaattaaaaatagaacttcaaaatctttcttattttcttctttatttttcattatcccc

SEQ ID NO: 562876 - DNA, 235 bp, Homo sapiens
ttttttttttaaagaactcacartattaagcttttcttacccagtatcctgtgcaaccagtaggaaggttgcagagtaattagcacctagattttcaggttaaaggaaaaacaaaacaaaacaaaacaaccaaacacttcagtaatctgattgatcatctggcttattttctcttcctttttgtggtgcctctttacacctgccttgcacagtagggtatctaaatgaagccaaa

SEQ ID NO: 562877 - DNA, 596 bp, Homo sapiens
tggctttctaactttcccttgtgcttaaatcatggagttttagagtcatgaagacattcatgtcctcatttatcaataatgatcttraaagtatagaggaagctccatcagagtgaggtaataaattcacaaattatatttatgtttccacatattttaaagtgcctcatttcacatcaggaggccagactcttcaatattattctgtgatgatgtcttcaatcaaaagaaggcattaattgaagaaactgataaggagctttgtgaattaaagtgaacataaaggcataagccattaatgtttaaacttctatttatttctatttagttgatcttagttattcagttatgcaaataatttatctaccattttggagagtgagaaagtgaaggagagagtccagtcttcattgtttccccatctaataaatcaacctgatcttaatgctgaactgcttttcatctggctcttatctttccttcctattcagtcatgctagcacttagtagcctccagtactctttcttttctcctacaacctcaaacctaatgccaagccccatctaaaattaagctccctcaacacatgcatata

SEQ ID NO: 562878 - DNA, 524 bp, Homo sapiens
aagcagaacatactagttacaagctggagtgcatggatttgaaatctgactctaccatttgcaaactacgtgacttcagacaaggtatttatcctcttgcattttcatttttctatgcatatgaatacaacaagccccacgtagctttggaattttaaaacaagttgtgctcagtgataaaggggatgtttaatcaagaaaacattcattgtcagccttaatgagatcaacatcctcatttttctatatactggagagtatataaagatagtatttccaggaagcagttaaagtattcattgaataatatagtttcaattatccaagttgctcctcaaagtcctgataattagtcttaggtaagcttgactggaattattgttgtcgttgttgcttggtttgtttgttttttactattggaaggcgtatttgctactaatttgcctataattactataggcagtttatttaaaatctctacccccagtttgcttaactrttgataccaatacctaccttgcagg

SEQ ID NO: 562879 - DNA, 571 bp, Homo sapiens
ttattgattgattgattgatccattcattcattccaaaaatacttattgagcatgtgtggcactaytgtagacactggagggaacttcattacagcagtgaagaaaatatacagaaaattactgccctcattgtgctgcctatattctagttgggagagacagataaacaaaataaataagtataatatgtgttagagcgcaataaagctataaaaaataaagcaggagatgagataggtaattgatagaagaagggagggggctatgactttaaatagaatgatcagggaaagactgacagcacagacctgagggaggtgcaggaatgcagatgtctgggtggagaatagtgtaagcagaaggcatagaaaatacaaaggcaggaatgtgcctggaatgtgcaagaaccagcaagcaggtcagtgtagctcacttatccttaattatagaagagaaattatatctcctatgtatgcatgtttgaaagcattgttaaaagttgcctatagagtcacataggcaggcagattcccaaagtaccatgtaaattttgagcagaaagatagaaaa

SEQ ID NO: 562880 - DNA, 569 bp, Homo sapiens
tgggattaaaatttaaatcagtagactttgagtagattacccaccataatgtgggtgggcttcatccaatcagttgaaggctttaacagcaaagactgaggtcccccaaagaagaaggaattaagcctccagatcataacatagaaattctgcctcagtttccagtcttttaactcaagactgcaacatcaactcttacctgaatttccagcctgtaagcctgtcctgcagattttggactcacaattatgtgagacaatttctttaagtctctgtccatctctgactgtctgtctctggctctctctctttcttccttttcaacctcacagggtcctctatattgaatcatatattttttccaatatatcaataatcttcctttattttcctcctttgccagcttagatatcatggkccttcatgcaataacactgtttcaaagagactgtcttgtacagtggaaaaaatgttcaaataccatcagcaccccatacctgtgggttctgtatctttgggttcaatcactgaccaaaattattcaaagaaaagtgaacacttccatctgt

SEQ ID NO: 562881 - DNA, 540 bp, Homo sapiens
tgtgtctgtgtctcttctttattataagaaatcagacatattrgattaagggcccaccctattccactatgaccttatcttaattaattatatttgcaatggccctacttttaaataaggtcatattctgaagtgctgggcattaggactttgatatatgttttttgagggatacaagtcaacccataaggcctggcttaacctggccctgcatttggtcctgcattggccaaagatatatgaaaggaagagacatggaccactacagagaaaatgcttacagagccgtgttttcatcctctcatctttctgttccactgctattagacatgcatgttgcagataggggctgcccctttacccttgctcctagaataaagatacagctaactctcacatggccagtaacttggactagagaaaacctattgtagggctgacaggattttcgggtacttgctatcacagcatatcctagaaaagtctgactaatgcagcccccctttgttggatgccccaaatgttagacagttccttatt

SEQ ID NO: 562882 - DNA, 530 bp, Homo sapiens
gaccctttggaggttgttagatcatgagggctctttcctcatggatgggattcatccccttataaaagaggcttcagagagctgcctgtcatcccttttaccccctctgtcatgtgaggacccctagacagtgccatctgtgagaaaaagcctttcagacactgaacctgctggttcttcatcttcgacttcccagcctccagaactgttggaaataaatttctattatttataaatgacccagtctgcgtagtattttgttacagcagcacatatggactaagatgtagtgttttggmaattactcctatggctgacaagtgagagatcaagtctgcagatagctaccactggaaagaaacctccaaaaacttcagctttcaaagtaaaaaataacatagttgctggagaagcaggcaaaggaaagagccaaagatttgcttccctttgccaagagaagaaaggagaaaaggaggattggggagtcagagtgctgattgacattagatatttaatttcctcaaatctta

SEQ ID NO: 562883 - DNA, 597 bp, Homo sapiens
aggcggtacctctacaagtctacaaaaacacagtgttagtgggcttggagtatcgcttaatgcaggtacagctgcagcgaccacaaacttaggttacaacacccaatttccttcaaatatctggaaaatcttataaaaaaggatgagtataaatgagcccagactgtgacgactacaataaatacctaattctttaatgcccagacaccaatgaacatgcacaaacattaatatcattcaggaaaacatgacatcaccacatgaaccaaataaggcaccatggaccaatctcagagaaacagagatatgtgacccttcagacagagaattcaaaatagctgtttygagtaaacttaaagaacttcaagataacacagagaatgaattcagaatcctaccagataaatttaacaaggaaattgaaataatttaaaagagtcaagcagaaattctgaagctgaaaaatgttaactggcactgaaaaatgcatcagagttctttaacagcagaactgatcaagcagaagaaagaattagtgacctggaagacagattttttgaaaacagtcaaatgagacaaaaaaaaaaaagaataaaa

SEQ ID NO: 562884 - DNA, 508 bp, Homo sapiens
ctgtactcactctttattgagtctcccacaattaccactgttcstggcccggacttcaatccagcctcccacattattcctgataccacacctgaccctcatgactgcatctctctgatccacctgaggttcaccccatttccccacatttccttcttccctgtttctcaccctgatcacacttggtttattgatggcagttccacaaggcctaatcgccacacaccagcaaaggcaggctatgctatagtacaagccactagcccacctcttagaacctctcatttcctttccatcgtggaaatctatcctcaaggagatcactcctcagtgttccatctgctattctactactcctcagggattgttcaggccccctccctttcctacacatcaagctcggggatttgtccctgcccaggactggcaaattgactttactcacattccctgagtcagaaaactaaaatatctcttagtctgggtagacactttcattggatgggta

SEQ ID NO: 562885 - DNA, 550 bp, Homo sapiens
actatttataaaattaacatataatggataatagaattaaatgtaaaacckaaagctataaagcttctaaaaaataacaaagtcttaatgaacattaattaggcaaaaatttctttaaaaactcacaaaatcataatccataaaagagtaaaaatgacaaattgtacttcatcaaaattttaaaacttttgctcttcaaaaaacacttaggaaaatgaaaaacagaccacagaccaggaagacacatttgtagaacagatatgtcataaacaacttgtattcataatatatattaaacactttcaaactaataataagtaaacaaacaacccaatttaaaaatggggcaaagacacaaacagttatttcaccaaagaagaactataaatggaagataaagacatgaaaatatactcgacaacacttattagggaaatgcaaaataaaaccacaacaagataccactagtcaacaaataatagactaatgctactatttgtcaacaaataatagactaatgctactatttgtcaacaaatagtagactaat

SEQ ID NO: 562886 - DNA, 455 bp, Homo sapiens
gaattcactttatatctctgtactagggaatgtccatgccagttgtccatcagggggatttagaaaagcattcgggggatgcttttttggaaaacaggttattctaagagtgacttagaatgtgtcctctgtcataccataaagcaagtatagtgtcctggctccacgaaatcaggagttggtgctccaaatccacaggaaagggagcatgcagggcccacaggaaactcagagtgatagggcccctacccctgcaaacacagtgcccatggtacttcgacaaagcatagaagttgaaagccagcatgtgtctcccccttgatagtagggtctatgaaaattcgcacccattacacactataaaataggattattatgtcacatatcacmccagtataatagtagagaaaatgtgtgtaatagaaatgactgggtcatcttgaaatgaagacaaa

SEQ ID NO: 562887 - DNA, 549 bp, Homo sapiens
acagctataggaagcctgacatataccaagccgtatgaagttcgtgtgtagacacgttatagttaaattactaaactccggagatagaagttcttaaaagtggcaacagaaaagaaaggaaaagaaaaggaaggaaaggaaagaaaggaagaaagagaaatcagacttaataaaatgtaaacctattgtgcaccaaaaaacatcattaagaaagttaaaaagacaaccaacctagagagtgggcaaaaatagctgaagttatatacttgataaaggtttggtatccacaatatatacaactcatcaacaaaaagacacataatctaattttttttttttttttgagatggagtcttgctctgtcgcccaggctggagtgcagtggcacgatcttggctcactgcaagctccgcctcccgggttcacgccattctcmtacctcagcctcccaagtagctgggactaaaggcgcctgccaccacgcccggataattttttttgtatttttagtagagacacggtttcaccgcgttaaccaggatggtatag

SEQ ID NO: 562888 - DNA, 549 bp, Homo sapiens
acagctataggaagcctgacatataccaagccgtatgaagttcgtgtgtagacacgttatagttaaattactaaactccggagatagaagttcttaaaagtggcaacagaaaagaaaggaaaagaaaaggaaggaaaggaaagaaaggaagaaagagaaatcagacttaataaaatgtaaacctattgtgcaccaaaaaacatcattaagaaagttaaaaagacaaccaacctagagagtgggcaaaaatagctgaagttatatacttgataaaggtttggtatccacaatatatacaactcatcaacaaaaagacacataatctaattttttttttttttttgagatggagtcttgctctgtcgcccaggctggagtgcagtggcacgatcttggctcactgcaagctccgcctcccgggttcacgccattctcatacctcagcctcccaagtagctgggactaaaggcgcctgccaccacgcccggmtaattttttttgtatttttagtagagacacggtttcaccgcgttaaccaggatggtatag

SEQ ID NO: 562889 - DNA, 558 bp, Homo sapiens
agtattttagaaatattttcttccastatgtggcttctcattttcttgacaatgtttttcatcatctaatatttttgtgtctaattgtttttgtacatattgtatgttttttccaaatagaaaataaactccatgattatggagatgttttttgtgcctggcaaatagtaggtatcaaataaacagtgattgaattgtttgaatgaatttgagtgattttttttttgtatttttaaggcttagctacaaggagaccttattatatggagataacaacaatgaaaacaaacctatgtacatatatgtagaaaataagttgtgtaaaccatatacctgcaagttggtgctttacttggttagcaattcagtttttgagtacagttgttatgcatgtaattatgcataacttgccattttcaaagcattttaattcattaaaatataattcgctgtctatgaaaatataccaattaaaatagtgaaaaagcaagccatgaagttgaagaagatatttgcagtgtgtagttgacaaagcactcctcctatgcagaatataaa

SEQ ID NO: 562890 - DNA, 630 bp, Homo sapiens
tcattggtatgttctgtttagatttgttgtcattaatggattaataaattacagtgatgggcaatgaaaaggagggtgtaggtgtatgcagagaggaacctaattcctttagaggctttaatctgttttagagagctgactatccatataaatgaataaatgaatcaactgcatatakatgtaaaatgtgaacagctgaagatagatataaacatgatggagatgtctgtgtctggtaatataatgaaacaaaatattttgagaatctgtcctgtgcaccagaaaatgctggataaaatgtttaaatatatgtaatccatagctaagctagcaaaaatagaaggaaaatactgaaggccaaaagtaataaagcaattattcccgaaaggtgagaaatgagccaatggccaccatggatatctgcctattccagacaaattagagcttcaatttttggggctgatcctgggaacaaaggcaaaacttaatattacatgttggaaagtcagatcagaaatccctgtctaaatcgttgtttcccaagaaatggcactcagagaaaagataaattggagaagggaggataaggaagttgccctacaaagggggggaaaaaaaaaggaaaatttt

SEQ ID NO: 562891 - DNA, 588 bp, Homo sapiens
aggaatgatagttagacaggtgttggattagggttagacacaacaggttcacagagwgtaaaatttaaggagatactctccagttcaacaccaataaggacccaaaactcttatgagagaggagtggctttctcctttaagaacagaaaattactccttctcaatttaaaaatgatacttatagcaactggtattgccaaagagctataaaattttgtcccttgtaccttctgccaagtcatccttaagaaaaagtgtctaaaatcatttagagaaatacttttatggttgtgggaatgagaagatgagacaatgtgtagcaatcactgtgaaggaaactacaaggtttgtagatccaaatttgatacaaaatttgttagatttcccagaatcagaaaaacttcaccaagccacaaaaataaaagctcaaagtgaaatacacagatatgttttactccaaccaatatataaaattaagtttcttgacacatatgctgctatgttcaaattctctgtccagagacagagttcaaattcaaattctctgtccagataccactaattaactatagcactctactgagacag

SEQ ID NO: 562892 - DNA, 456 bp, Homo sapiens
aatcaggaggaacctcagcaagaatgggaaaattcatcaggttcaatgggagcccasgtgagtggcccctatagcagagacttctctggccaaaccaagagatgggcaggcaggtggtgagttccagatggagcttctggggcaagtgtctgcttctgcttgttccaaacttattgctaggtcctccaggcagtctggaatgcccaccacttgagaggacaactgaatcaggaaactcgtcactaaaaatcatgttattcattgatgataaggactaaatgcaacagatctcctaaaatgaaagagactcttcctccctccatccaacctcccacctgaaataagcggttcagctggaagatatgtgtattaatcaggattaggttcagttgcaaagtacaggtacccaactacggtcacttcaataaaacgaacttattcccttatgtgaattct

SEQ ID NO: 562893 - DNA, 456 bp, Homo sapiens
aatcaggaggaacctcagcaagaatgggaaaattcatcaggttcaatgggagcccacgtgagtggcccctakagcagagacttctctggccaaaccaagagatgggcaggcaggtggtgagttccagatggagcttctggggcaagtgtctgcttctgcttgttccaaacttattgctaggtcctccaggcagtctggaatgcccaccacttgagaggacaactgaatcaggaaactcgtcactaaaaatcatgttattcattgatgataaggactaaatgcaacagatctcctaaaatgaaagagactcttcctccctccatccaacctcccacctgaaataagcggttcagctggaagatatgtgtattaatcaggattaggttcagttgcaaagtacaggtacccaactacggtcacttcaataaaacgaacttattcccttatgtgaattct

SEQ ID NO: 562894 - DNA, 456 bp, Homo sapiens
aatcaggaggaacctcagcaagaatgggaaaattcatcaggttcaatgggagcccacgtgagtggcccctatagcagagacttctctggccaaaccaagagatgggcaggcaggtggtgagttccagatggagcttctggggcaagtgtctgcttctgcttgttccaaacttattgctaggtcctccaggcagtctggaatgcccaccasttgagaggacaactgaatcaggaaactcgtcactaaaaatcatgttattcattgatgataaggactaaatgcaacagatctcctaaaatgaaagagactcttcctccctccatccaacctcccacctgaaataagcggttcagctggaagatatgtgtattaatcaggattaggttcagttgcaaagtacaggtacccaactacggtcacttcaataaaacgaacttattcccttatgtgaattct

SEQ ID NO: 562895 - DNA, 485 bp, Homo sapiens
tcaacatcttcagctaccccaggcctgaggtccctggaggaaggttgccccaggggcaggaccagagcttcatgacaaaaacaaaaacctcagaccccaatgagtccttgttggcacyaactctggcccactggggtgtctatcttgccctctttggggccagtgtctgtagcaagtctaacttagctaaacttgtccagactcactctaccctgttattctggcactgaccacccagccactgtagaacctgcccctgctattccagccaaggattatgctatgtgattatttatccagaaatacatgatgtttgaaagcccacccttggccaaattatcctcatagctctttttcaactacttccacttaagtctcaggcttatctttgctctgtatccgtcaagttccaagcagtttccctatttttcagccttgcaggacttgctgtttacactctagtctgaaactcaggtttgaggact

SEQ ID NO: 562896 - DNA, 485 bp, Homo sapiens
tcaacatcttcagctaccccaggcctgaggtccctggaggaaggttgccccaggggcaggaccagagcttcatgacaaaaacaaaaacctcagaccccaatgagtccttgttggcactaactctggcccactggggtgtctrtcttgccctctttggggccagtgtctgtagcaagtctaacttagctaaacttgtccagactcactctaccctgttattctggcactgaccacccagccactgtagaacctgcccctgctattccagccaaggattatgctatgtgattatttatccagaaatacatgatgtttgaaagcccacccttggccaaattatcctcatagctctttttcaactacttccacttaagtctcaggcttatctttgctctgtatccgtcaagttccaagcagtttccctatttttcagccttgcaggacttgctgtttacactctagtctgaaactcaggtttgaggact

SEQ ID NO: 562897 - DNA, 560 bp, Homo sapiens
aacttgtctaacaaaaatctggaaaattccatgaaagtatgaaataacattgttattttcatgtaaaattagtcattaggcacttaaatataatatcttgtacgtgtgcagtactttgaaagagttctttccatccattagttcactcaatcctcagcacaatcctaaaacacaggtcagtctcattagctccatcctcctcatagaggagggaactgagcctctagggggcttctgagttatgcatctaaagttgagaatcagaagttaacaaccaaactattggggaggtagggaaggagtacgctcagccaccctcacaccctctccttaaccctgatcctgcctccyctgggcttcagtgaaatttagggactatgtgaatctgctattgtgttgctataaagaaatacctgaggctgggtaatttataaagaaaagaggtttattttggctcgtgattctgcaggctatacaggaatcttggtgctgccatctgattctggtgaaggccctagggaacttacaattatggcagaaggtgacaggacccagtgtat

SEQ ID NO: 562898 - DNA, 552 bp, Homo sapiens
cattgggaagccaagggcccagcctgtaagaagatagtaacacctttaaaaaatcttttttctttccttttttgttattattattttattaattgtgtatgtggcatagccctccccccatttctattagcctgacagatattttcagaattaattaactgttagctctgagaataaattgttcattatcaattcctccccccgcctttctttctttccttttatagtttttctttttctttcaggccagcaattacactccgtgcctttctccagcagctcctgttctgcacagctatccaaatggggaaagtgctttttctttcagccctattcacttctcctcttctcccttttgtgggatttaataaccatggctgataggctcactctggacagagaggttaagtttgttgtctcagcactttgctgacaggggacagcacaggaattctgtaacttctaaccagccctgcgagactgcctacggcctggcccacacagtcatagcttgcaartagtgtttagaaaccctgcaccccaaatatcctg

SEQ ID NO: 562899 - DNA, 539 bp, Homo sapiens
taatttccagtgtgtctgtaatgagaggtggagcctttaagaagtgattgctttatgagagctatgcctcctgaatggattaatccacggattaatgagtactcacagaaggggaactggtggctttataagcagagaaagaaagacctgagccagcatattagcaagctcaactcccttgccatgcaaatatctgcactgactcagggmtctgctgagagcctcaccaacaacaagaccctccccagatgcgacccctggaccatggtcttctcaaacatgcggtctctggaccttggacttagcccccataactgtaagaaataaaatctttttctttataaattacccagtttcaagtattctgttataagcaacagaaaacagactaatacaatgcatattttgtgtgtgtagcagtaaaatgtatagttcacagtagaataaacagtgcattggtcaaccctggcttctggaaaacttcagggctgctacaagtgtatttctgtgtgatttcatttctgtcattttagaaacca

SEQ ID NO: 562900 - DNA, 650 bp, Homo sapiens
tctcactgtggtttagattgaaaacacaactttcaagacaaatttagaaaataaaaaagccatcaaattaatcatctacatattcattatagaaatttagaatttagaaaaagagaatattgtacaaaatatagaatattactttttaaaaagtggaaaaaatgtgaaatagaaaacaaatagcaaaaattagcaaagccaacagttgattgtatgaagaaattaacacagtatatgaaccctggacaatgtcaagcacataaggaagagagaaggcactaaaatgcagtatcaatacaaaaagagcatccttgcaacactcacagacaaaaatgtggcatcagtaaaaagatgataaggatactagttttaaaatcatcctagtaakttagaaagtctatatgttttatgtctctacttgccaaaagtgaactaggaagaaacagagaattgaaaacatttacaatcattgcataaataaatcatatttaaaatttccagcaaagaaaacttcaggctcatatccaaactcactgagaaattctaccaaatattaaaggaagaaataggatctatcttagcaaaagtcttttaaataatagtaaagtggaaacatttcacaacatagtttgcaaggccagcataatatc

SEQ ID NO: 562901 - DNA, 496 bp, Homo sapiens
aataagtaaatcaaaagtttcaaaaagatagagcactaaagggccttcayaggtgggcacagaatacctttctaaacccacctctggccacttgcccctcaggatccagtaagttgctgggcacatgggattgctcgccttgcccagaatgtaccaaggatcttccctcctctcagccttggctcctgctgtcagctctgctaggaatgccctttccctatctccacctggcaacttgcagtctcctccttccaccatctctgaagcttcccccaccctgcccaggcaggatgaattgccctctcctctgtgctcctccaagcactttgctcaaattgctagcctagcacttccacacacagtagtgcggttagcagagtgtctgccccctccctgcctaagaggcctggggcaggggctatgacttgctcagctccgcttctgtgatggggtctggcacgttagacatgttcaatactggtttgatggatgggtg

SEQ ID NO: 562902 - DNA, 540 bp, Homo sapiens
tttggtaagtcactatccagcctgagcctccacatctcaggacctttagtggaagaggatcacccccaggcataggcactcttgggaacttcctttggcagcctcttgctccaggcatccaagaatccctgtactgtcattaattcattacacttcacaatgacaaaaaatgtccaccagtgcctgccctcctgggtccagggatgggctgaggctctgctccctggacagaacaacccccarcacacacacacccattctcctccagagtatctcaccacatagagagattttcaagttctccaaggccgctaatgtctccaccccacatctgggccgaggcagggcatgaaagcacacacccaccaggctggagggggagggcagctgtccaccctgactgtcagaaatagagcagactctgggcaggggctgggcagggtagggcagggctaggggttggaaggggcctagctgaagctcaggaaatatctcctgctggaatccatgaatgaatactgcctgcagcctccgcagagg

SEQ ID NO: 562903 - DNA, 551 bp, Homo sapiens
caggctatctggtatggtcagtcaagccaagacctcacattataaactaactcttcatggctgggcgcggtggctcacgcctctaatcccagcaatttgggaggctgaggcgggtggatcacctgagatcaggagatcgagaccatcctggccaacatggtgaaatcctgtctctattaaaaatacaaaaattagctgggtgtggtggcacatgcctgtaatcctagttactcgggaggctgargcaggagaatcacttgaaccaaggagacggaggttgcagtgagccgagatcgtgccactgcactccagcctgataatagagagagattctgactcaaaaaataaataaaataaataaaataaaataactcttcatatcaaataactaacacactagaacatcagcttcataaggagctgcatgaatccccaaggcctgcagaatccccaaggcctagagcagtgtgtggcacacagcagatgctcaataaatacatgttgaatgaatgcaagggaagtgagttcctccttatgatgaacaccacgtt

SEQ ID NO: 562904 - DNA, 552 bp, Homo sapiens
cccaaccacacatactgcgcatgagctcctctgccccgcccgctttccaagatccacgcttcctattggtgtggaagagcgctgtgagttctgggaagggtggcttagaacctcaccctggttctgcggctcttagcagatgaactacaactcccaaaaggctatgcagcggcgggcccgcggagaaaagcgttttctctttggtgatcaacgcgaggatgttgccgcaaagccttttgggggctgtagttttctggggctaaatgcacgtgcctatcctgtacagaggctaagactgccgcaaggagagccttagggctccgggaaagaggaggtgggcgtccagctggtggcaaaaattagtaggggcaagttcatggctgatgaaraggacaggtggaactctggaggaagtcgtggtgaaatcaccggcaggctgagaccctttgggggaaacgaagggccgtcttccttccaaagccctgtctgcaaacgtcctcagagttgtgagacgttgattaccagacccagagagaaccatctgtgctgaaa

SEQ ID NO: 562905 - DNA, 583 bp, Homo sapiens
atgccaccatgcccagctaattttttgtagagacagggtcttgttttgttgcccagtctggtcttaaacttctggcctcaagtgatcctctagacttggcctcccaaagtgttgggattacaggcatgagacactgtgcccggcctatattaagtaatatctttataaaatacatcacattgacaggtcaaataagaagcactgcaaaataatctcatttggatgccaaaatatttaatgaattccaatattcacttctcattaaaaagaaaataaagtcttgttcaactataagtgatacatacttaacatcagtgaacttactgtaagaggaaatgatgyctatcactgctatatgtaaaattggaaggaaagtctattaaatgtaataacaaagtaaagacaatgaagaagattcacaggataaactatctagaaaagtcaaaagtaacaactaaaaataaggactaaacaaaatccagtaaatataaaatgtacaacataaaaataacagaaatctaggaagttcctataaaccaaaacaaatagtctttttcatatttattcattttttcatattatt

SEQ ID NO: 562906 - DNA, 467 bp, Homo sapiens
tgaccctctggcctttcacaatggtttggcataacttacattaagtttgaattaaattaaaaattgatttatcacttatttgtggttggcttcgggtgaaatattatttgggaattatgatgaggtataagctttaaaaatgctatagattagtgaattttaaatattgtaaactgcatagtttgtttaagaaacataaaggaatcccaatatagaagacaaatgagacaatagtttcaccacttaaagaggattaaagccaaaaaggctgtagtttctactttccaaagcaggctcagaggcagatgtgtgcaatcctggatttctgaggatgaccattaaaaagctctgctcagtgtagagaagctactataaatgtgtgttctcatcatcaggataaaaaaggctagttcttggtgaagacaagtagagatgtcaattatmcaaaaaaactttgtatatctatg

SEQ ID NO: 562907 - DNA, 588 bp, Homo sapiens
aatcatttgcaagcagctgttgtgtggggtccttcatgtcagcaggtcatgacaagcagagacacagaggtttgttctccgttgggtttcataatttcatttccctgacttcattaacaccgaaaattgatggttatgacatttaaaagcatgtgagtgttgaagtcagacctgggtgatgttatcaagagaataaatgctttccaaaagtcaatggatgttacctcttgcttcatttcctctgccgctaccatctgctaattctagaatcatttctgactgaagcaaaggattagcacctttgcaacagtgcccttccaggccagcagggtgagtcctccctgtactctgaaggagagagatgtggtttaaatcaggttataaacccatagcctctgagctaatcagcagtgrgaaatttctgggaaggcaggtccagggttatcaaactctattagaagcaagagcatcggttatgcaaatagcatcatagtaacaaagtcaaaatccctgtggaaaaacatttttctttcacacttctcattgagatataaagcgcattaacattttaaaaacagctttattgag

SEQ ID NO: 562908 - DNA, 524 bp, Homo sapiens
ctaattacctcttaaaattccactttttaacagtgttacaatggcaatcgtattagtacactctctcattgctataaagaaatacttgagactgggtaatttataaagaaaaatggtttaattgactcatggttcttcagactatttaggaagtatggcagtggcatctgcttagcttctggggaggtctcagaaaacttacagtcatggtggaaggcaaagagggagctracacttcatatggccagagcaggagaaagagagagggggagatgctacacacttttacacaactacatcttatgagaactcaggacaatacaaagtgggaaatctgccccatgatccaatcacctcccatctggccccacctctaatattgaggaatacaatttgacatgagacttggtgggaacacagatccaaaccatatcattctgcttctggcccatcaaatctcatgtttttctcacattagaaaatagaatcatgacttcccaataatccccaaaagtattaactca

SEQ ID NO: 562909 - DNA, 513 bp, Homo sapiens
tcaatctctactaaaaatacaaaaattagccaggtgtgggggtggtcacctgtaatcccagctgctcaggaggctgagacatgagaataacttgaacccgggtggcaaatgttgcagtgacctgagatcacaccactgaactccaggctgggcaasagaacaagactctgcctcaaaacaaaacagaacaaaaagctcctgttctaatcctcagaacctgatatgaaaaagaggacttcgtagatgtgattaagagttttgagaggggctgattattctgcattatcttagcaggccaagtgtaattacaagagtcctcataacggagaggcagagtcagaaaataagatatgaaagcagaagtcacagggatttgaagatactacactgctcgctctgaaaatgaaaaaaggatccactaccaaagagcagaggtgatctttagaagctggaaaactcaaagaaatagatttgcctctagagcctccagaaggaacacagccctgcctgctg

SEQ ID NO: 562910 - DNA, 513 bp, Homo sapiens
tcaatctctactaaaaatacaaaaattagccaggtgtgggggtggtcacctgtaatcccagctgctcaggaggctgagacatgagaataacttgaacccgggtggcaaatgttgcagtgacctgagatcacaccactgaactccaggctgggcaacagarcaagactctgcctcaaaacaaaacagaacaaaaagctcctgttctaatcctcagaacctgatatgaaaaagaggacttcgtagatgtgattaagagttttgagaggggctgattattctgcattatcttagcaggccaagtgtaattacaagagtcctcataacggagaggcagagtcagaaaataagatatgaaagcagaagtcacagggatttgaagatactacactgctcgctctgaaaatgaaaaaaggatccactaccaaagagcagaggtgatctttagaagctggaaaactcaaagaaatagatttgcctctagagcctccagaaggaacacagccctgcctgctg

SEQ ID NO: 562911 - DNA, 513 bp, Homo sapiens
tcaatctctactaaaaatacaaaaattagccaggtgtgggggtggtcacctgtaatcccagctgctcaggaggctgagacatgagaataacttgaacccgggtggcaaatgttgcagtgacctgagatcacaccactgaactccaggctgggcaacagaacaagactctgcctcaaaacaaaacagaacaaaaagctcctgttctaatcctcagaacctgatatgaaaaagaggacttcgtagatgtgattaagagttttgrgaggggctgattattctgcattatcttagcaggccaagtgtaattacaagagtcctcataacggagaggcagagtcagaaaataagatatgaaagcagaagtcacagggatttgaagatactacactgctcgctctgaaaatgaaaaaaggatccactaccaaagagcagaggtgatctttagaagctggaaaactcaaagaaatagatttgcctctagagcctccagaaggaacacagccctgcctgctg

SEQ ID NO: 562912 - DNA, 513 bp, Homo sapiens
tcaatctctactaaaaatacaaaaattagccaggtgtgggggtggtcacctgtaatcccagctgctcaggaggctgagacatgagaataacttgaacccgggtggcaaatgttgcagtgacctgagatcacaccactgaactccaggctgggcaacagaacaagactctgcctcaaaacaaaacagaacaaaaagctcctgttctaatcctcagaacctgatatgaaaaagaggacttcgtagatgtgattaagagttttgagaggggctgattattctgcattatcttagcaggccaagtgtaattacaagagtcctcataacggagaggcagagtcagaaaataagatatgaaagcagaagtcacagggatttgaagatactacactgctcgctctgaaaatgaaaraaggatccactaccaaagagcagaggtgatctttagaagctggaaaactcaaagaaatagatttgcctctagagcctccagaaggaacacagccctgcctgctg

SEQ ID NO: 562913 - DNA, 473 bp, Homo sapiens
cctgtttctcatcctgttgcctggtttgactttaccctctttctctgggcttctactgtaccccatgcatgtttctactgtgacatgtattatgctatattttcatacatcgtttttctcgagcatgttcatagatgtacctttatagaaagcattcttttgtgtttaagttttgagactgtatttgacttattaaatttaaaaatgtagaaatctagttctggggacatcatttttatttttatttatttatttttagttttataatttttattttaatttttaaaatctttaaagttccgggatacacgtgtgggatgttcagatttgttacacaggtaaaggtgtgccatggtggtttgctgcacctatcagcccatcacttcggtattaagmccagcatgcattagcgatttttcctgatgctctccctccccagccctcatcaccatgggcaccattgtgtgttggtt

SEQ ID NO: 562914 - DNA, 555 bp, Homo sapiens
tgatttcctgtttttgctcaagattatgtttttgaaatgtaatagttttgatatatagagttgtggttcattcatttttacttctatatactatcgctttgtataaatacctacaatttgtattttaatgcaaatgtgcaagagtttggttaggttatatgcttagaggtggatttgctgggcataggttggccacatacttaccatctactgcaagtttgccagatggtgtatccaaatgcagccaagtaaattccagaaccttttgctctaccttctcagcaacccatgacagtgtgagactttttccccttggataaatgagtgggtaaaagttgcatttctctgcactttgaacatgttttcatatgtttattgaccaatagattttcttagttttgaattatttcttcacrgctattgattagttttctatgtgacatcttttcttaatggtgtacaagaatgccatctatattttaaatattagttatttacagttatacacaatacagttgtcttatgttatagcttgcctttaaacttgcttatagt

SEQ ID NO: 562915 - DNA, 514 bp, Homo sapiens
catggttggtttcttctgatgcttccctctttggcttgtaaatggctgtcttctcccttgctcttcatagggccttttctctgtgtgtctgtgtccaaattttctcttcttataaggacaccagtcatattgrattagggcccatcctgatgatctcattttaacttaattgcctctttaaaaaccctgtctccaaatacagtattattctaagatactagaggttaggacttgaacagatgatttgggtggtggaaggacacaatttaacccagaacattactttagtgtatattttttgttattgttattattatactttaagttctggggtacatgtgcacaatgtgcaggtttcatacataggtatacatgtgccgtgttggtgtgctgcacccattaactcatcatttacgttaggtatttctcctaatgctatacctcaccactcccccaaccccacgacaggccccagtttgtgatgttccccatcctgtgtccaagtgttctcata

SEQ ID NO: 562916 - DNA, 577 bp, Homo sapiens
agccaggtgcggtggcgtgtgtctgtggtcccagctactcaggaggagaatcgcttgaacctgggaggcggcagttgcagtgagccaagatcatgccattgcactccagcctgggtgacagagcgagactccaactcaagacaaaaaaaaaaaaaaaawttttgcttatccaacaactcagccttggtggggtagaaacaacccaccaagttgtcctacatgtgtacctataacctgaagaaatgctttccacatatgaggagataggtacacaatctttacaattatttctgataacaaagaaaaaaagtggaaatcaactgcatgtttattaacaacaaaatggataacctgtagtatattcaagaaatataagctattacattatttttaaaaagttttttaaaaaagacttttttatgaactataattcttctcctcctggaagtgttagccctgacctgcagatgcagagcaatgagaggctcagcaggaaacccacgggctttgctcatcaaagtgtaggcccagaaccagcactggatcacctgggagcttgttaaaaatgcaaaacctg

SEQ ID NO: 562917 - DNA, 577 bp, Homo sapiens
agccaggtgcggtggcgtgtgtctgtggtcccagctactcaggaggagaatcgcttgaacctgggaggcggcagttgcagtgagccaagatcatgccattgcactccagcctgggtgacagagcgagactccaactcaagacaaaaaaaaaaaaaaaaattttgcttatccaacaactcagccttggtggggtagaaacaacccaccaagttgtcctacatgtgtacctataacctgaagaaatgctttccacatatgaggagataggtacacaatctttayaattatttctgataacaaagaaaaaaagtggaaatcaactgcatgtttattaacaacaaaatggataacctgtagtatattcaagaaatataagctattacattatttttaaaaagttttttaaaaaagacttttttatgaactataattcttctcctcctggaagtgttagccctgacctgcagatgcagagcaatgagaggctcagcaggaaacccacgggctttgctcatcaaagtgtaggcccagaaccagcactggatcacctgggagcttgttaaaaatgcaaaacctg

SEQ ID NO: 562918 - DNA, 577 bp, Homo sapiens
agccaggtgcggtggcgtgtgtctgtggtcccagctactcaggaggagaatcgcttgaacctgggaggcggcagttgcagtgagccaagatcatgccattgcactccagcctgggtgacagagcgagactccaactcaagacaaaaaaaaaaaaaaaaattttgcttatccaacaactcagccttggtggggtagaaacaacccaccaagttgtcctacatgtgtacctataacctgaagaaatgctttccacatatgaggagataggtacacaatctttacaattatttctgataacaaagaaaaaaagtggaaatcaactgcatgtttattaacaacaaaatggataacctgtagtatattcaagaaatataagctattacattatttttaaaaagttttttaaaaaagacttttttaygaactataattcttctcctcctggaagtgttagccctgacctgcagatgcagagcaatgagaggctcagcaggaaacccacgggctttgctcatcaaagtgtaggcccagaaccagcactggatcacctgggagcttgttaaaaatgcaaaacctg

SEQ ID NO: 562919 - DNA, 577 bp, Homo sapiens
agccaggtgcggtggcgtgtgtctgtggtcccagctactcaggaggagaatcgcttgaacctgggaggcggcagttgcagtgagccaagatcatgccattgcactccagcctgggtgacagagcgagactccaactcaagacaaaaaaaaaaaaaaaaattttgcttatccaacaactcagccttggtggggtagaaacaacccaccaagttgtcctacatgtgtacctataacctgaagaaatgctttccacatatgaggagataggtacacaatctttacaattatttctgataacaaagaaaaaaagtggaaatcaactgcatgtttattaacaacaaaatggataacctgtagtatattcaagaaatataagctattacattatttttaaaaagttttttaaaaaagacttttttatgaactataattcttctcctcctggaagtgttagccctgacctgcagatgcagagcaatgagaggctcagcaggaaacccacgggctttgytcatcaaagtgtaggcccagaaccagcactggatcacctgggagcttgttaaaaatgcaaaacctg

SEQ ID NO: 562920 - DNA, 399 bp, Homo sapiens
tggtcatttaaaagtgtgtggcacctcctcccctccttcctgactgtgtctctcacctgttcctgcttttgtcatgtgatgtgcctgctgcccctttgccttccaccatgattgtaagccacctgaggcctccctggaagctgarcagatgcccacgccatgctcctggtaaaggctgcagaactgtgagccaattaaaccttttttcttgataaattatacagtctcaggtatttctttgtaccaatgcaagaatgacttaatacaaatgcacacagattttttaaataccttaaatcttttctgaaataagaggttcccttcagtctttcaatcactcattcttatttttttaaataataagtaggacagttataaaatgtaaagccataaagaaac

SEQ ID NO: 562921 - DNA, 399 bp, Homo sapiens
tggtcatttaaaagtgtgtggcacctcctcccctccttcctgactgtgtctctcacctgttcctgcttttgtcatgtgatgtgcctgctgcccctttgccttccaccatgattgtaagccacctgaggcctccctggaagctgagcagatgcccacgccatgctcctggtaaaggctgcagaactgtgagccaattaaaccttttttcttgataaattatacagyctcaggtatttctttgtaccaatgcaagaatgacttaatacaaatgcacacagattttttaaataccttaaatcttttctgaaataagaggttcccttcagtctttcaatcactcattcttatttttttaaataataagtaggacagttataaaatgtaaagccataaagaaac

SEQ ID NO: 562922 - DNA, 477 bp, Homo sapiens
ctcctcctcttcgttcccagggcccttctggcccacgtcgctgaggtccgggtgcggattgagcttggtgggcagggtctgctcgcgacagcccccgctagacaggagttcgcgctccttggagttccgccatttcatgcgtcggttctggaaccagattttcacctggaatgtcccggccggcgagaagaagggagaagcagaggtcagatcaggggctccgggggacgcacgggggcggggagtggagtcgggwgcaggctctgtccttcgggatgtgtcctctccccacccccagaaatgagttccggtggattcccgcattgactccgcccccgcctcagctcgcggttccgtttgcctcatccgctgccaccctgccccgaagggcggggttgggggccggtgaggccgggagagaaggcggggagtcggggtggggagagaagagggctatcctgcggagcttcgagggta

SEQ ID NO: 562923 - DNA, 477 bp, Homo sapiens
ctcctcctcttcgttcccagggcccttctggcccacgtcgctgaggtccgggtgcggattgagcttggtgggcagggtctgctcgcgacagcccccgctagacaggagttcgcgctccttggagttccgccatttcatgcgtcggttctggaaccagattttcacctggaatgtcccggccggcgagaagaagggagaagcagaggtcagatcaggggctccgggggacgcacgggggcggggagtggagtcgggagcaggctctgtccttcgggmtgtgtcctctccccacccccagaaatgagttccggtggattcccgcattgactccgcccccgcctcagctcgcggttccgtttgcctcatccgctgccaccctgccccgaagggcggggttgggggccggtgaggccgggagagaaggcggggagtcggggtggggagagaagagggctatcctgcggagcttcgagggta

SEQ ID NO: 562924 - DNA, 627 bp, Homo sapiens
aaggagaaggcaaggaaaatgaaagaggaagagaggggaagggctgggaatgagaggtaaagaataacagagagtcagagagagggtcaattgattgaccctagcaagaaaagatgaagacaaaataatacgagagaagtcatgaaggaaggagggaaaagcaaggacaagttcattctcacttgggccagtaggaagctcaatgctgaattactaaaaaatgcaaccatgtgggatgaaacacgggttgtgtttcatcaatcygtgttctctatttttacctttttttgcacatcatattttgcacatcatttccccacagtcttaatgctatactcgtttattttataattgttctttttattaaatgcagttattataagctgttatagaaataaaaggggttaattatgagctaattaattaaatataaagaaaagtgagttgcaacgaggtagagcctagattgtcctaagtagcttgcaggacctaagaattagagtatttatcttggaggcttggcacagtggctcacacctgtaataccagcactttgggaggctgaggcaggcagatcacttgagctcaggattttgagaccagcctgggcaacatggtgaaaccctg

SEQ ID NO: 562925 - DNA, 618 bp, Homo sapiens
agaatgagtaatcaaaactccatatcaatcggctcaaagagcagagttggttgcagtcattacagtgttacaagattttgatcaacctatcaatattgtatcagattctgcatatgtagtacaggctacaagggatgttgagacagctctaatcaaatatagcatggatgatcagttaaaccagctattcaatttattacaacaaactgtaagaaaaagaaatttcccattttatattactcatattcgagcacrcactaatttaccagggcctttgactaaagcaaatgaacaagctgacttactggtatcatctgcattcataaaagcatgagaacttcatgctttgactcatgtaaatgcagcaggattaaaaaacaaatttgatgtcacatggaaacaggcaaaagatattgtacaacattgcacccagtgtcaagtcttacacctgcccactcaagaggcaggagttaatcccagaggtctgcgtcctaatgcattatggcaaatggatgtcacgcatgtaccttcatttggaagattgtcatatgttcatgtaacagttgatacttattcacatttcatatgggcagcttgcgaaacaggagaaagtacttc

SEQ ID NO: 562926 - DNA, 618 bp, Homo sapiens
agaatgagtaatcaaaactccatatcaatcggctcaaagagcagagttggttgcagtcattacagtgttacaagattttgatcaacctatcaatattgtatcagattctgcatatgtagtacaggctacaagggatgttgagacagctctaatcaaatatagcatggatgatcagttaaaccagctattcaatttattacaacaaactgtaagaaaaagaaatttcccattttatattactcatattcgagcacacactaatttaccagggcctttgactaaagcaaatgaacaagctgacttactggtatcatctgcattcataaaagcatgagaacttcatgctttgactcatgtaaatgcagcaggattaaaaaacaaatttgatgtcacatggaaacaggcaaaagatattgtacaacattgcacccagtgtcaagtcttacacctgcccactcaagaggcaggagttaatcccagaggtctgcgtcctaaygcattatggcaaatggatgtcacgcatgtaccttcatttggaagattgtcatatgttcatgtaacagttgatacttattcacatttcatatgggcagcttgcgaaacaggagaaagtacttc

SEQ ID NO: 562927 - DNA, 597 bp, Homo sapiens
tgagtataaagacttagaagacataccattaaatctgtagtcgaagccagaggagcgattaatttcctgaattaataaagcagttcctacgatggcagatgaagcaacagtattcatcacttcatcctggttcccacagtcacatcgagagcagatacagctctcagagtggaaagaactttgcctggtttcttcgtattcagatgtaaagggagaagagactatgatttagttgatttaatcagcttagtccaccagaccacataattaagccctctctaccacacttctagtctcatctgctttgtccctaaattactcaattkgtatagtgacaatgattaagtatccaactacaccactgtgtatgggatacaatcattataaatcttaaaggaattgtccaaagaacttaacctgatatgatgttctaatagcatgtaaagtgaagctgagttatcagaggtttattttatgaagagttttctgggggaggagccaagatggccaaataggtacagctccggtctacagctcccagcatgagcgacgcagaagatgggtgatttctgcatttccatctgaggtaccaggttc

SEQ ID NO: 562928 - DNA, 579 bp, Homo sapiens
ctaggggttccgtctagggcttgttgcttgctgcacagaaaggcaatcactgagatgaatatttccaggaaagaaaggctttgttcaggtgacatcactaaggagataggagatgagtttcaaatccatcttcccaaccaatcaaaacttgggtttatctagcgaggaaggaatgtagctatgtgtgggaatacagagattagggaggataaggaggaggagttggccagcaggaagcaggtggtcaattaggcagtcatggtggatgagggatctggcaactcattgtctggatgtggttatttggtaagtttcagttccttgatactatctgggaggcctgaaagaactcagataagggccaggcttggtggctcacacctgtaatcccagcactttgggaggctgaggcaggtggatatcctgaggtcaggagtttgagaccagcctggccaacatgatgaaaccccatcyctactaaaaatgcaaaaactagcagggtgtggtggcacatgcctgtaatcctagctacttgggaggctgaggcatgagaatcacttgaaccctggaggcggaggt

SEQ ID NO: 562929 - DNA, 607 bp, Homo sapiens
acttgagcccaggagtttgggaccaacctaggaaacataatgagatcttgtatctacaaaacataaaaatttagcccgtgtgtggcaggcaggcatctgtggtcccagctactcaggaggctgaggcaggaggatggcttaagcccaggaggtcaaggctgcagtgagccatgatcacgccactgcattccagcaacaaagcaagaacctgtctcaaaaaacaaaaaatacagtacattagttgacaattgctgacatgaacaggtgcctggctgttggcaaaaaactgacaggtctctgtgcatttatttacctaaccacatttaagatgtatgcaaaacagctgatgtaagaacaaagaaatgttaagagaaaatgctaagaaaatagtagagcaaagctcaaacagataactagatcaaaatgagatgctatcatgaggaagaggaatcaacactgtagaagaaagagaagaatgattggttgtaagaacaaatcataaaaaggttgaaggggccactagtcaacaaactgtaatcacaatggaacagcaaatcataagaaataaaacggacttgctatgraattaggtattattctcatacta

SEQ ID NO: 562930 - DNA, 611 bp, Homo sapiens
tgtagttttttatccctcactcccctcccacgccttctctcaggtccccgaagttccttatatcattcttatgcctttgcatcctcatagcttagctcccacttatgagtgagaacacatgatgtttggttttccattcctgagttacttcacttaaaataatagtctccagttccatccaggttgctgtgaattccattaatttgttcttttttatgggctcattcttaaatgaaatcttggcaaccatagaacttcttgttttaaaggaggagaaggaggcatggggaaaggttcagaagactgcctggacttcaatggaacttacatataattttctgcattacgtataaatccatcagaaacatatggaatgcattttcattaaagttcacatgtggaattattaatagaaattcagtgggaaagaacagttttgggagtgggggggtgtggagggacaagggaagaacatgttttgtggaactcacgaaatgcacaagttcccaggaggaagtgtttgggtttgcccctagctcacaaagcctctgggatttctgtcccttcagcgtctaawgtcaaatgaaatccttcacctgcaagtgaagtga

SEQ ID NO: 562931 - DNA, 574 bp, Homo sapiens
gttgacctcattttgctaaaatctaattgcagcacacagactgggaattctgccatcctctggttcccccagtcccagccagcttccctgggttagctctgttcacctagccagccacatctgttctcctgaaacctccatggttactctgccctggctatggttactgagtgcaaggtagattctgagagctgagtttgtgtaggggttgtgcgatgcagctggccatgctctttttgtctccaggagctggcatttgccctctatatgcactttgtattgtagctccctttccayctaaaacctccctgcattctccccttttctcccttttctgcctttgctaaatacctgttctggtcagaccctgtgctaagagtatggggctacagagatataaataaaccttgtgccctggccctgaggaactcacagactaccagatggtgactgacatggaagttgaaaaataggctgggcgcagtgactctctcctgtaattccactttgggaggctgaggtaggaggatctcttgaggctaggaactcaagactagcctgggcaacatagcaa

SEQ ID NO: 562932 - DNA, 458 bp, Homo sapiens
acaactcccttggcagcagcatcttactcttgattaactgcttctcttagattaactgaaggattgaacagtgtatgaataatcattttttattcccagtttaaattttccttttcataactgctatctgctgtatgatgttaaggaaactgatcagtttagctaagataaaaattattatcaatttatgaaaaaggaaaagttgggaaactggtaacttcttggttactgaaggtgtttgcttctaaaacaggtagaggtaaaaatataataccygactcttttaactgtggtttggctttctgtggttttagttactcaaggtcaactatggtccaaaaatattaaatcgaaaattccaggcccggcatggtggctcacatctgtaattcaaggacttcaggaggccgaggcagtaggatctgctgggcccaggagtttgacaacagcctgggcaa

SEQ ID NO: 562933 - DNA, 589 bp, Homo sapiens
gtcccccgtcacaagctcagaagcaacagggacaagattcaaacccaggcagtctgtcccagccagatcttcattcctaatcacccccactgcactgtctcatattttcaggattctttacaaacagcctcctcatttttcatctcatgttcaggttcacaacaacccttagatataaaaagggggaaatcttaaaagaagaaaataaatctgtaagttaggaaacctgcttaagcaatgcaccctctaagtggtcattccaggaccccaggtcaaacagtacccaggcccagcttataagtcttagcaccaagaccagaacatctcccagaagtggcacagccggtatcaaacaactgtagtcatgggccaccaccagggatcagggaggagggcagagagtggccatgaattgaacccaacagtcagaagccagagaaggggagctggcaagccccagggagcaaatactgacgatgcttttcactccagcggagggcatgcagctcctgtgcttaccccatggctgcacattgtaagtagccaatgaaggatggagacrtagtgtgtgtttctttttttcagggtc

SEQ ID NO: 562934 - DNA, 611 bp, Homo sapiens
tgtgcaaatgtaatcaagttaagatgagggtaaactagggtggatttctgcaacacaaggcttgggaggaaaagcagggatgcagaccttgctgatgctagaggcccagtgctactcagagtggtctgtgttggggggctgtactccagctgtgaattattgatctgtggggagctaggcacagtaatggattacaaatagattcaaatcactctggggacctcttctcaatttcaatccctctttttcttccctggagttcatcaccatcctaaatgtagattatcattttcatgtacgattttaygaattttcgacatgttcaagtctctattcaattgaactagggtggattctaatcctgtaactggtatcctaataaaaggaagcaaatttgggcacagacaaatagggaaagaggccacatgaagacagaggcagagcctggagtaatgcacctacaagccaaggaacaccaagggttgatgtcaaccaacagaaactcagaggcaaaaaagaattctttcctagaccttttggagagggcatggccctgctaacacctcaattttggacttctagttgccagcactgtgaaaggaaaagggttt

SEQ ID NO: 562935 - DNA, 464 bp, Homo sapiens
caggagttgttcccacaaaggaagattcaatcccatattctcaaagctagttctcatcagtggacaatcaagaggcccacggacctcttgattagtgggcctgagctggagacagcaggttttgttttgcccagccaagtagtcagcactcctagcatccactcagtgctgcccaacctgkggagtgaaagctacaaaatcaacttgagctgcttggtaaaaatcccatgttcccagaggataagactgacaaagaagcaaagttaatcttggagctctcagcatgatcagtgaaccagcctttgcctatgagctaccgccaagcagagctgtgtgttgagtgtgatacaagatagaggaaccagtaagcaaaaggctaccaccagccctgtgggaaattcaggtagaggcaggtaatccaggcaggggttcaggcacagggcaccaggcagagaaaagtttca

SEQ ID NO: 562936 - DNA, 508 bp, Homo sapiens
cattatgattaggtaggatttattcaagaaaggcaattgttaaatgttttaacattagaaaaaactatccatgtaattctccacaatcatggatgcaaggaggaaaatcacattgttatctcaatagtttttttaaaacattttataaaattcaatatctaattataaaaaccttttgaaaaacagagatgaaagagyttccactgataaaggctatgttccattaacctatatccaatataatatcctacttaatgaaaatcctatatattgtcttcaaatcttcaaatcaagaataagccaagatttcgtatatcaccagtaccgttcaaaataatactgaaagctatgcccaatttagtaacacaagaaaaataaaagcatactattaggagaagagagacaaaactttcatattagcagattatatgattatctatctataaaacccaacagaatcaggaaacaaactaatagaatagaattcagtagggcgaccagatttcag

SEQ ID NO: 562937 - DNA, 508 bp, Homo sapiens
cattatgattaggtaggatttattcaagaaaggcaattgttaaatgttttaacattagaaaaaactatccatgtaattctccacaatcatggatgcaaggaggaaaatcacattgttatctcaatagtttttttaaaacattttataaaattcaatatctaattataaaaaccttttgaaaaacagagatgaaagagtttccactgataaaggctatrttccattaacctatatccaatataatatcctacttaatgaaaatcctatatattgtcttcaaatcttcaaatcaagaataagccaagatttcgtatatcaccagtaccgttcaaaataatactgaaagctatgcccaatttagtaacacaagaaaaataaaagcatactattaggagaagagagacaaaactttcatattagcagattatatgattatctatctataaaacccaacagaatcaggaaacaaactaatagaatagaattcagtagggcgaccagatttcag

SEQ ID NO: 562938 - DNA, 508 bp, Homo sapiens
cattatgattaggtaggatttattcaagaaaggcaattgttaaatgttttaacattagaaaaaactatccatgtaattctccacaatcatggatgcaaggaggaaaatcacattgttatctcaatagtttttttaaaacattttataaaattcaatatctaattataaaaaccttttgaaaaacagagatgaaagagtttccactgataaaggctatgttccattaacctatatccaatataatatcctacttaatgaaaatcctatatattgtcttcaaatcttcaaatcaagaataagccaagatttcgtatatcaccagtaccgttcaaaataatactgaaagctatgcccaatttagtaacacaagaaaaataaaagcatactattaggagaagagagacaaaactttcrtattagcagattatatgattatctatctataaaacccaacagaatcaggaaacaaactaatagaatagaattcagtagggcgaccagatttcag

SEQ ID NO: 562939 - DNA, 627 bp, Homo sapiens
acatatcttactattttttctaccactgttccctttctcaacagtcaatgttttattaaggactcacttcttgcattagtgagagtatctggaagtaatttttttgggtgtgttttacacatacatgcacatacacacaaacaaaaaaggaagagatcagtaagtagatttgcactttaatcttcaaagctatctatacatggatttggctgtctatagaggtagagcattccctataaccaggaggtaagattccttctgatcagtagttgaaagaacagataaagtattagatgagagaaacctccttgcttaactgctgtgatgttctgtgatgcaatgagatgcccaccttgaatagaaattgaggcaggagctggaaggaaagatgcragcagcatagttttgctgggtttatgggtatcaaaggcacactagtattcagagagcccatcattggcagtgcagggcagcatcattctcatcattgcaaacatttatccagcaacaagtgtgccaggcactgtgtgagtcctcctcacatcatacctaacagacgactattattacgttcatgttaactgaggaggaaattgaagcacagagaatttaggttacctatcatca

SEQ ID NO: 562940 - DNA, 582 bp, Homo sapiens
agtgagtgccatattgtattaaaaatacacacttttataaagacaatcatgcagtctagcaagatgctcatcctacagaaatctactaaagaaacagcagatgtgtttctcacatcatgctcattttggggcacatgttcacaattaaaaaggagggcagaatcatctgtactactgagaccattatttctctcagactttttttttttttacctgaatgcttgcagttaatttgcgtaaattatatctgcatatgatgctactccactggatttcctttaaaaaacaagcttttggaatccaacagcctcaasgaatagcataggttaaaaaatacatcctcattcatgtaattttatcattgtttaaaatgctttgttaaagtgtcagcagcatattttgatggatattttcaaaaagtctttcataaaatgttctttgattcctactcttatgtatctgggccaaatatgtcacaagtatgacttgacaagacaggccacagaactgtgtttcaatttcctactggatatcactacttacataactcaaaggtatgaaattcaacgtactaataattga

SEQ ID NO: 562941 - DNA, 587 bp, Homo sapiens
tgaccttttggtgctttcttttttccctgcmtataaggacaaaggccacagccatcctcagcaggtcacgaacttcaagaaggaagaattgtaatagcaattgtgaacttcttaggcttcctccaaaggaaagggtgaggtaaatggaaggcattgtacagttattatgtgatatcacatatattagtttttctctccaaatcattgcctagggctctgttttgaaattggtttttaccctccttgctcttattgcagccttcgatgttcccattccatatttaacttttctgcaattcagcacctgctctgttagcacacttcccttccaggcttttagcgtgaagcacctgcatttagatcagcctaagctgtgtgggatcagggtgtactcacagcccaaacttctagaacttcctctcattccaaggagggtgagggccaaggaacctggaccccagaaagactgcttctcctgccctatttagtgtagtgattgagagtatgaattctggtttgagccatagctctgccacttacctgctgtgtgacctcaggtaagtaccttaaactctctgtaccttagt

SEQ ID NO: 562942 - DNA, 602 bp, Homo sapiens
ctaggactcaggcacccatggcctgaggtttggtacacattcaatgcaatcagtaacttcagttggttttgaccaatcatttgaattggttgcagatcctttcctttaatgaagaaaagctctgatatgggtacaaagtttccatgttcgggacagattggccttgtcctttargaaattatatgaattgggatttctctcaatctagttgtttttaccattattaaaattaagcgacattcacttggattaagtggtgatgaaaaaaatgatgtgagactttctagtgatttttgaacccaagccttgtatcactgttaggccttcatgtgtgtacttgaaaacaaaacatgtacaaatattgcactggtttgaagattttagtggtgaaagtgacctaatcagtaatcagtagaaaccaatcttggaaatatgtggttatgctcttttaaaatagctgaaaagagggcccggtgtggtggctcatgcctgtaatcccagcattttgggcggccaaggtgggtagatcacctgaagccaggattttgagaccagcctggccaacactaccaaacgctgtctctactaaaaatacaaaaatt

SEQ ID NO: 562943 - DNA, 602 bp, Homo sapiens
ctaggactcaggcacccatggcctgaggtttggtacacattcaatgcaatcagtaacttcagttggttttgaccaatcatttgaattggttgcagatcctttcctttaatgaagaaaagctctgatatgggtacaaagtttccatgttcgggacagattggccttgtcctttaagaaattatatgaattgggatttctctcaayctagttgtttttaccattattaaaattaagcgacattcacttggattaagtggtgatgaaaaaaatgatgtgagactttctagtgatttttgaacccaagccttgtatcactgttaggccttcatgtgtgtacttgaaaacaaaacatgtacaaatattgcactggtttgaagattttagtggtgaaagtgacctaatcagtaatcagtagaaaccaatcttggaaatatgtggttatgctcttttaaaatagctgaaaagagggcccggtgtggtggctcatgcctgtaatcccagcattttgggcggccaaggtgggtagatcacctgaagccaggattttgagaccagcctggccaacactaccaaacgctgtctctactaaaaatacaaaaatt

SEQ ID NO: 562944 - DNA, 539 bp, Homo sapiens
  misc_feature 9, 12, 20, 175: n = A,T,C or G
gggagtttnctnactcttanaaccataataatgcttcgccgtacctaaaaaataaacaattaaaatcaactaggatgtgtgggaacaagtctctcatacagaattccaaataatttatgtagctattgccccctcaaggagttagagcacaactccatgcttgtgactgctttancttgcaagtttggcccatgggtgggatttgggaacttggattttgggaggtttcttaccaccttaactgataagagtggctcacttttttaaaactgtttgtacaaacaatgtgatttatgctgaacacttgcttttcttctgggagtctggaattctgatatgtgctaagcagagggtgcctatgtgactagccccaactaaaaacttcatcacagagtgaagatatgtgaaagtcttttgattgtttccattttcttagaggaaaaaaagagaagatgattagctgactgtgaggaaaggagacaacatatttgaggtttgmggagataggttatatgcagtaatcaactagaaaggtggga

SEQ ID NO: 562945 - DNA, 480 bp, Homo sapiens
ccactgcactccagcctgggtgacagagtgagactctgtctcaaaaaatatatatatatgtgatgctacgaagaaacattggacattgatggagtggagaactcagggcccaaccttgctctgtggaaacatatcagcaaggtaaagaataaatgtttccatcctggtttcaaggtgactgtgcagctaagcaagctgacttaaaggagatcaagactgaagctgagagcagtgaaactcggggaacaatatctccaaatacaaaggcaaggctgccagtttccttaaaaaggcataaaaactccatggactttgttcagggacagatgacataatgacaggtgatgagagatattggatctaagctaggaggcttgatagatacctcctgcacacctcctggacaaaggtractatgagtttgtcccaattgcctggggtccatgacactgggaacagggagacagaggcatcatatgg

SEQ ID NO: 562946 - DNA, 394 bp, Homo sapiens
tgatataaatgaaaatattagacacactacacatgcatcttttatgttattaaaatcatcactaacttctgctattccacctggagtgttttatacacatatgtatacaagcacacacacacacactttaaaaaatatgccatctaggctaagctgtagtcaatttcagagggaggcttctatttgamcttaccccctataattgcactataatcactcttaccacacaccttgcatcagtcaggacaatagaaacagaactgataacaagattatattgtacatacatacacacatacaaagcatataggttctgtattcctttgataattctaaatttattgagtctcaaatccattttcatttctatgatacctagaacagaggaaggaaa

SEQ ID NO: 562947 - DNA, 392 bp, Homo sapiens
tattagacaaataatctagacagaaaattaatgaagaaacattggatttaagcttaacattagaccaaatggacctcacagacatttatataacagacatttcatccaccagctacagaatacacatttttcttatcagcacatggaatattttccaggataaaccatattttagaacacaaagtaagtctcaacaaatttttcaaatatctagtatcgtctcagaccacartggaataaaatagaaattatttaacaataacaagaggaactttggaaactatataaatacatggaaattaaacaaaatgctcctgaatgagcaaagggtcaaggaagaaattaaggagaaaattaaaaagtttttgaaacaaatgaaaatggaaacacag

SEQ ID NO: 562948 - DNA, 380 bp, Homo sapiens
gcccagagacaggcattccacttgattttcagatggtgactgagctttatttatctttgtactcaaygggttaaggtactgctagctgctgtaacatttcagactttggtggcttagcacaatggaagtttatttctcactgatgtaaggtccagcttcgggaggaaaagccgcctcactagtcactggggagacacgcagacaggctcttccatcttcagctcaggctcccaggttgctctggctgttggtaggaagaggaggggagaaggtggagggtccctagtaggtttgctggatcttctctctggattgcctttccagacccctgctcccttccgcctgaccatccactcctaagcctaaagaatgtgcaggag

SEQ ID NO: 562949 - DNA, 380 bp, Homo sapiens
gcccagagacaggcattccacttgattttcagatggtgactgagctttatttatctttgtactcaacgggttaaggtactgctagctgctgtaacatttcagactttggtggcttagcacaatggaagtttatttctcactgatgtaaggtccagcttcgggaggaaaagccgcctcactagtcactggggagacacgcagacaggctcttccatcttcagctcagsctcccaggttgctctggctgttggtaggaagaggaggggagaaggtggagggtccctagtaggtttgctggatcttctctctggattgcctttccagacccctgctcccttccgcctgaccatccactcctaagcctaaagaatgtgcaggag

SEQ ID NO: 562950 - DNA, 380 bp, Homo sapiens
gcccagagacaggcattccacttgattttcagatggtgactgagctttatttatctttgtactcaacgggttaaggtactgctagctgctgtaacatttcagactttggtggcttagcacaatggaagtttatttctcactgatgtaaggtccagcttcgggaggaaaagccgcctcactagtcactggggagacacgcagacaggctcttccatcttcagctcaggctcccaggttgctctggctgttggtaggaagaggaggggagaaggtggagggtccctagtaggtttgctggatcytctctctggattgcctttccagacccctgctcccttccgcctgaccatccactcctaagcctaaagaatgtgcaggag

SEQ ID NO: 562951 - DNA, 380 bp, Homo sapiens
gcccagagacaggcattccacttgattttcagatggtgactgagctttatttatctttgtactcaacgggttaaggtactgctagctgctgtaacatttcagactttggtggcttagcacaatggaagtttatttctcactgatgtaaggtccagcttcgggaggaaaagccgcctcactagtcactggggagacacgcagacaggctcttccatcttcagctcaggctcccaggttgctctggctgttggtaggaagaggaggggagaaggtggagggtccctagtaggtttgctggatcttctctctggaytgcctttccagacccctgctcccttccgcctgaccatccactcctaagcctaaagaatgtgcaggag

SEQ ID NO: 562952 - DNA, 554 bp, Homo sapiens
aagtgacttaggtttctatacatagaagcttaagtttcatttgcttattcaacaagtatttactgaatgctagcgtcccaggcaaggttttaactgaataacagcacataccctagaaaaacagttaacaaatgctgacaacgctgttttccctggccaagaacaaagactcatttatttgaggcccttcctacttgcagatgctaaaatacgcttattttttaaaaaatcaaatagtggcaatatgcaatagtggagttttttgggttttttttaatgtccttatttagcaaaatcaaagttaggtgagaatttgaaaaaaaaaaaacaaaaactaagttagtccctacstcagctctcaacattattactgtattttagaaacttgactaatatgtgaaactgtaattttggggaactccacttctctactgacatcctttccaaaaagagacaccagctctacagtctcgggattagaaatatgatgtgaggccgggcatagtggctcacacctgtactcccaatgctttgggaagccaaagtgggtggat

SEQ ID NO: 562953 - DNA, 490 bp, Homo sapiens
ttacaggcatgcaccaccacacctggctaatttttttgtatttttagtagagacggggtttyaccatgttggccaggctgatctgaaacgtctatcctcaagcgatccacctacctcggcctcccaaagtgctgggattacaggcgtgagccaccgcacccggcctgggccatagttttcttattcaatgggtggctgcccaaaatctagctgcactctggcaagcctgctggcctgcactgcaccatccccacaaaagaacctctccctgatttctgagcttgctctccctgcccccaactttgttcaccctcttttaagaaatgcctctgtggctgccctcagatgtaaggagagcagaagagagggctttctgtgggctccctgaggaggggcacctggactcacgatagatgttgagacccagtgaaggtgggaagctgggggctgagcagagaggcctgaagagtggcaagccgggggagctgct

SEQ ID NO: 562954 - DNA, 493 bp, Homo sapiens
ttgatctgggcaacgagttcttaaacacggcactaaaaacatgaaagaaaaaactggcaaactggaattcatcaaaattaaaaacttttgccctaagacagacactattcagagaatgaaaggataagctgcaaactgggagataatatttgcaaatcacatatccaatttgtatgcataataaagaactctcaaaactcaatggtaaaaaaaaaaaaaaacaaaaaaacacccctaatttaaaaaatgggcaaaaggcatacaaagagacactttatcaaagaggacacaggatgacaaataagcatatgaaaggatgttcaacaccattagtcattaggaaaatgcaaatggaaaccatgatgatgtacaactacaaacccattagaatagcacaagttaaaatgactggcaataccaagcrctgacaaggacgcaaaacaattggaacacccacacaatgaaatgctcctaacaataaaaaggaacaaac

SEQ ID NO: 562955 - DNA, 527 bp, Homo sapiens
ttgtttgttcgtttttatatagttttaatccagaaagtcttcccacctcatcctttgctcaatgacctagcatgacaccctgtggacccccaaatcagtccatatttctttacctagtatttagtgaagacttactatgtcaagcactatgtcagggacttatatgaatggccacacgagggtctagctatctcttagtctcaatgtcctgtgtatgtgtgggttgggggtaaaggagggacagaactcctacatctgaaattcctcttctgtgcrtggtccattgcaggcctgaagcatcaggggtcctttaaaatctgttcctcagcctcgcacccagtcagtgaccaggtcctctctagtcttctgagaaatgatctctgtatttgttggtattgatgctcctcaggtatagactcttatttgactctttttttttttgagacaggatctcactctgtcacctaggctggagtgcagtggcgcgatctcggctcactgcaacctttgcctcctgggttcaagtg

SEQ ID NO: 562956 - DNA, 560 bp, Homo sapiens
cagtgtaagatccctcccaatccaggctgagagagagagaaagggaaggaatagcctttaccagtactaagccctctgggttgaatagaggtggccctagttcacagggttgggcttctgacagttgttttagttcctgttggaaatggtccaaataagttatatgtttaatcaaatcagaggtttcttagtctatcagaaaatcattggtgagaaaatgctgtccatcatctgaagggacttaaatccagctttgaaggtgtgtttctaacatgtagtagggccacgtgaagaagagttatccaggggtgatgaatctcttgagacwtttttgtgaggttccttttgataatttcatttgtcttttctacctttcctgaagattataatctccaagcacaatgaagatggtattgtatgcttagtgcctttgaagtcccctgggtgatagatgccttgaatgacaggtcattatctctctagaggtacttagggagtcaaagcaagaaattatctcattaattaattttatcacctcagaggctttcctgtccaacatg

SEQ ID NO: 562957 - DNA, 556 bp, Homo sapiens
attgataaattggtcttaggaaaattgctttacaatttgaaaatatacacttaaaacattaccttgtcatttacactaaaataaattgttaatatcttaaagagatcaatttaaaaatataaagccattaaaggacatgtaaatatatatgtaccatatctctaatgggtaaagactttataagtataaaaaatgtgtagaagcaaaaaagaggtaataacaatagactacataaaaatgcatatattgatatcaacaatagaatcagaattgaagacaaataacaatttgaggtaaaatttttgccaaaataatgcaagacaaaagacamacatactatatgacaagctcctatcgatggatgaggaaaaaaacctaatgccttgcaaaatatacacaaaatataaatataaatgttatgtttactacatttgtatagtaaatttatttcacttcatgacctatcaaaacatgtaaaaatgaagaaatcccaccttttattatcaagttagcatagacgtaagcgatggtgttctgttactcaccatggtcatgg

SEQ ID NO: 562958 - DNA, 556 bp, Homo sapiens
attgataaattggtcttaggaaaattgctttacaatttgaaaatatacacttaaaacattaccttgtcatttacactaaaataaattgttaatatcttaaagagatcaatttaaaaatataaagccattaaaggacatgtaaatatatatgtaccatatctctaatgggtaaagactttataagtataaaaaatgtgtagaagcaaaaaagaggtaataacaatagactacataaaaatgcatatattgatatcaacaatagaatcagaattgaagacaaataacaatttgaggtaaaatttttgccaaaataatgcaagacaaaagacacacatactatatgacaagctcctatcgatggatgaggaaaaaaacctaatgccttgcaaaatatacacaaaatataaatataaatgttatrtttactacatttgtatagtaaatttatttcacttcatgacctatcaaaacatgtaaaaatgaagaaatcccaccttttattatcaagttagcatagacgtaagcgatggtgttctgttactcaccatggtcatgg

SEQ ID NO: 562959 - DNA, 399 bp, Homo sapiens
ttcttatgggttcttttttgtttttatttcagtgggttttgggaaacaagtggtttttgttacatgaatgaattgtagagtggtgaagcctgggatttcagtgcattcctgagtaatgtacattgtacttactatgtcattttttttatccctcccatcttcccaccatccccacttctgagtctytaatgtccattataccactctgcatgtctttccatacccacagcttagctcccatttataagtgagaacatacggtatttggttttccatttctgagttacttcacttagaataatggcctccagctccattcaagttgctgcaaaagacatttcattctgtttttggctgagtagtgttccatggtgtaaatataagacattttctttatcc

SEQ ID NO: 562960 - DNA, 540 bp, Homo sapiens
tctctactaaaaatacaaaattacctaggcatggtggcrcatgcctgtaatcccagctactcaggaggctgaggcaggagaattgcttgaacccgggaggcagaggttgcagtgggctgagatcatgccattgcactccagctttggtgacagagtgagactctgtctcaaaaaaaaaaaaaaaaggaaatatatttaatacccaataaagccatcaggaagtcaaaaaattgtaagttgaaccatcataagtccagatgctcctcaatttgtgatggagttaagtccagataaacccatcataaagtcaaaaaatcttaagtcaaaacaccatgttgggaatcttctgcacaccaagacacattttattcaagttgtcgaaagttaaggacaaataaagaattttcaaagcagcaagagaaaagtgatttgtcatttttaagagaatttctgtaagaatattagtggatttcttggcagaaacttcgcagactaggagacagttggatgatatgttctaaatattgaacaaaacacaac

SEQ ID NO: 562961 - DNA, 540 bp, Homo sapiens
tctctactaaaaatacaaaattacctaggcatggtggcacatgcctgtaatcccagctactcaggaggctgaggcaggagaattgcttgaacccgggaggcagaggttgcagtgggctgagatcatgccattgcactccagctttggtgacagagtgagactctgtctcaaaaaaaaaaaaaaaaggaaatatatttaatacccaataaagccatcaggaagtcaaaaaattgtaagttgaaccatcataagtccagatgctcctcaatttgtgatggagttaagtccagataaacccatcataaagtcaaaaaatcttaagtcaaaacaccatgttgggaatcttctgcacaccaagacacattttattcaagttgtcgaaagttaaggamaaataaagaattttcaaagcagcaagagaaaagtgatttgtcatttttaagagaatttctgtaagaatattagtggatttcttggcagaaacttcgcagactaggagacagttggatgatatgttctaaatattgaacaaaacacaac

SEQ ID NO: 562962 - DNA, 560 bp, Homo sapiens
atcttttaaataggaacattctagcctagaacctttttccttcctacttctgtcaacccaatggacagatataagcatctatagtacttagcagggattttcacaaacaaaagaacagtcttttctatgaattttaacacaaaayagactcaatgtattagtttactaaccctacttttgtcatatgctggcgacctctttaacatctagaaggactagatgttttaaatcaggacttgcttgtcctttatgtatggtataaacatagccaagtaaaagacaatgcatggacataagggacagtagccaattgtgcctcaccatacacacactggtatcaaaccctttggaattccttctcctcctttctccctgaaccagcatgaatatagtaatgtgtactgctcagagaagtggtgtgatcattcaatttccaaaagacaatatttcatatgaattttacaaaaggatatttacaaagtgtgttctttattaccactacgtttaatatactttgtgcacttctaaacacctggacagactagatgtttcatataagg

SEQ ID NO: 562963 - DNA, 539 bp, Homo sapiens
tgcttatcagttccagtttttttgttgattgttttagaccttctacatagatgattacaccatctgctcaacaaatatcaaaaatattagcattttggtgtatatctttctagagtcttttaaaaataaattagacaccttyatatttattgtgtgtatatacacataattgtatgtaacataaatgttacataattgggattcagtgagaaagcttctagtttcttatctgagatgctagacttttattctcacaacaagaaaaatcctgcagaggccgggcgtggtggctcacgcctgtaatcccagcactttgggaggccgagacgggtggatcacgaggtcagtaaatcgagaccatcctggctcacacggtgaaacctcgtctctactaaaaattcaaaaaaaattagccgggcgtggtggcgggcacctgtagtcccagctactcaggaggctgaggcaggcgaatggcgtgaacccgagaggcggagcttgcagtgagccgagatcgcgccactgcactcccagcctgggcg

SEQ ID NO: 562964 - DNA, 539 bp, Homo sapiens
tgcttatcagttccagtttttttgttgattgttttagaccttctacatagatgattacaccatctgctcaacaaatatcaaaaatattagcattttggtgtatatctttctagagtcttttaaaaataaattagacacctttatatttattgtgtgtatatacacataattgtatgtaacataaatgttacataattgggattcagtgagaaagcttctagtttcttatctgagatgctagacttttattctcacaacaagaaaaatcctgcagaggccgggcgtggtggctcacgcctgtaatcccagcactttgggaggccgagacrggtggatcacgaggtcagtaaatcgagaccatcctggctcacacggtgaaacctcgtctctactaaaaattcaaaaaaaattagccgggcgtggtggcgggcacctgtagtcccagctactcaggaggctgaggcaggcgaatggcgtgaacccgagaggcggagcttgcagtgagccgagatcgcgccactgcactcccagcctgggcg

SEQ ID NO: 562965 - DNA, 539 bp, Homo sapiens
tgcttatcagttccagtttttttgttgattgttttagaccttctacatagatgattacaccatctgctcaacaaatatcaaaaatattagcattttggtgtatatctttctagagtcttttaaaaataaattagacacctttatatttattgtgtgtatatacacataattgtatgtaacataaatgttacataattgggattcagtgagaaagcttctagtttcttatctgagatgctagacttttattctcacaacaagaaaaatcctgcagaggccgggcgtggtggctcacgcctgtaatcccagcactttgggaggccgagacgggtggatcacgaggtcagtaaatcgagaccatcctggctcacacggtgaaacctcgtctctactaaaaattcaaaaaaaattagccgggcgtggtggcgggcacctgtagtcccagctactcaggaggctgaggcaggcgaatggcgtgaacccgagaggcggagcttgcagtgagccgagatcrcgccactgcactcccagcctgggcg

SEQ ID NO: 562966 - DNA, 448 bp, Homo sapiens
tgtgtctggggaggggcctgatagataggtgattgaaccatggggggcagacttctgctttgctgttctcatgatagtgagtgagcttctcatgagatctgatggtttaaatgtgtgtggctttctttgctctctctctctctcttctgctgccatgtaagacakgccttgctttctctttgccttcctccatgattctaagtttcctttctctccagccatgcagagctgtgagtcaattaaaccccttttctttataaattacccagtcttgggtagttttttatagtagtttgaaaacagaagaatacagaaaactggtaccaggcatggggcactgctataaagatatctaaaactgtggaagcgactttggaactggataacatgcagaagttggaacagtttagaaggctcagaagaggacagtaagatgtgggaaagtttg

SEQ ID NO: 562967 - DNA, 448 bp, Homo sapiens
tgtgtctggggaggggcctgatagataggtgattgaaccatggggggcagacttctgctttgctgttctcatgatagtgagtgagcttctcatgagatctgatggtttaaatgtgtgtggctttctttgctctctctctctctcttctgctgccatgtaagacaggccttgctttctctttgccttcctccatgattctaagtttcctttctctccasccatgcagagctgtgagtcaattaaaccccttttctttataaattacccagtcttgggtagttttttatagtagtttgaaaacagaagaatacagaaaactggtaccaggcatggggcactgctataaagatatctaaaactgtggaagcgactttggaactggataacatgcagaagttggaacagtttagaaggctcagaagaggacagtaagatgtgggaaagtttg

SEQ ID NO: 562968 - DNA, 540 bp, Homo sapiens
tttagggtcttggacattcaaatcctatctgcctttgttgctccttttgcctttttcctcattttgagtggatttcagccaccatgctggggatggtagctggtgtgataaaaaattcattgacaaagtagaagtttctttacaaccattttctgtttctccagtttttattgtagtaatgggaaggtagaatcagattgaggattttggcctctctttatctcttactctttctcttccactattattggcttggctggcttcaagatttctctgaggtatgtgaatgaggatctttaataggtagggaaacaaattatatctttataactaagccatttgaattactccattgtcatactgctataaagacatatctgatactgggtaatttataaagaaaagaggtttaattgactcacagctctgcatggctgggcaggcygcaggaaacttacaatcacagcagaaggcaagagagaatgaaagcgtgacttacatgcaagaagtggcagaaaagagagtgaacaagtgaatggg

SEQ ID NO: 562969 - DNA, 573 bp, Homo sapiens
aaataaattaaattaaaaatgaatatgaagaaattrtaatagatgcctcagaaataaaaaggaccatgagggactatggtaaacaattacataccaaaaaattaaacaatttggagaaaatgaatacatttctaaaatagcacaacctatccagattgagtgaggagaaaatagcctgaacaggccaataacaaatgaagagttttaagaactaatcaaaaatctcccaataaagacaaaccaaggaccagatggcttcactgttgaactctcccaagtaaaaatacttgggaatgaacctaatcacaaaggggaaagacctgtatgctgtaaaattataaaacattgatgaaaaaattggagaagacacaaataaatggaaagatacctcatgttcatgcactgaaggatattattaaaacatgcatactacccaaaacaatacacaaattcaatgcagcctctataaaaattccaatgtcgttctttacagaaatagaaaaaaaactcctaaattgttcatgaaaacataaaaaccctgaatagccaaaacaattctgaaaaagcaaaagt

SEQ ID NO: 562970 - DNA, 573 bp, Homo sapiens
aaataaattaaattaaaaatgaatatgaagaaattataatagatgcctcagaaataaaaaggaccatgagggactatggtaaacaattacataccaaaaaattaaacaayttggagaaaatgaatacatttctaaaatagcacaacctatccagattgagtgaggagaaaatagcctgaacaggccaataacaaatgaagagttttaagaactaatcaaaaatctcccaataaagacaaaccaaggaccagatggcttcactgttgaactctcccaagtaaaaatacttgggaatgaacctaatcacaaaggggaaagacctgtatgctgtaaaattataaaacattgatgaaaaaattggagaagacacaaataaatggaaagatacctcatgttcatgcactgaaggatattattaaaacatgcatactacccaaaacaatacacaaattcaatgcagcctctataaaaattccaatgtcgttctttacagaaatagaaaaaaaactcctaaattgttcatgaaaacataaaaaccctgaatagccaaaacaattctgaaaaagcaaaagt

SEQ ID NO: 562971 - DNA, 573 bp, Homo sapiens
aaataaattaaattaaaaatgaatatgaagaaattataatagatgcctcagaaataaaaaggaccatgagggactatggtaaacaattacataccaaaaaattaaacaatttggagaaaatgaatacatttctaaaatagcacaacctatcyagattgagtgaggagaaaatagcctgaacaggccaataacaaatgaagagttttaagaactaatcaaaaatctcccaataaagacaaaccaaggaccagatggcttcactgttgaactctcccaagtaaaaatacttgggaatgaacctaatcacaaaggggaaagacctgtatgctgtaaaattataaaacattgatgaaaaaattggagaagacacaaataaatggaaagatacctcatgttcatgcactgaaggatattattaaaacatgcatactacccaaaacaatacacaaattcaatgcagcctctataaaaattccaatgtcgttctttacagaaatagaaaaaaaactcctaaattgttcatgaaaacataaaaaccctgaatagccaaaacaattctgaaaaagcaaaagt

SEQ ID NO: 562972 - DNA, 456 bp, Homo sapiens
catccaaaactccagaaggtaacctttccccaagactaaggtcatgattccttagcatccttggttttagagtttgtacgtttctattccaaatagtcccgtcctccaaactttgaaaccctttgtacttgaggaagagaaaaaaaaatgaactactttctccaaaaattttctgggcattaatggatttatttctttcaycgtttttcaatgtgttcccctttctcaagctggtactacataccccttaatggtgtgtctttggcgatttacagttactgtcccagaggtggctagactgtcaggaatacacataggcagtcatgatctgagaaatgagaccagaaattgcagcagcccagacagtaccctcctggaagagttggctaatgaagtgacctgaaatgtcttacacctccaactttcaggatgcaagtagaaaaaacaaagtggaca

SEQ ID NO: 562973 - DNA, 343 bp, Homo sapiens
atggaataacagctctagaagttttcagattcatctttgacagtccttaacaatgtaacaaacactgcttactttggccttaacttttttatttataaaataaaagagtttatgaatttaggaacatttgttctcaattttttttcctttctacattctcattttggaaataatttgcaaatgtctggcctttgctttttgcccaaagactatcaagataaacttgatagaccctcccaaatcccacctataaaacctgtattacgctcgctttacaaaagtgaagacttgtttctcayatattctatttaatctatttcatctatgagttaattttcaatat

SEQ ID NO: 562974 - DNA, 556 bp, Homo sapiens
gaatctggatcactggctttccagttcagtctccaagaaacatggagtaacttcattatctgtcctgaagcagccacgtattttgaaaaaataaccaagaacaccaagttgggatatgcttcatactggaggccctagatttcattctggcaatttagaaaccatccatcccaaacaatcccacagccatttgttccactttgaaaatctcattggtctcttttagagaccaagaagagttgctaaaaatgttagtgttgtatcactttatatattcatttatttattcatttattcactgatttcattctattttatattttgttccagataaaatcccctttccctattgacccattttctatttatttgtacttctaggggagcccttttcaagtttttcacacttccagtaaatccccaagctaaattggaatacctagtaaaatgaatayattctgcctcttgcaaaatgtcttctgttgggtttcttttttttctaattagagttctttctgatatgttattttcggaaggcttgctggtaggagaggga

SEQ ID NO: 562975 - DNA, 474 bp, Homo sapiens
ggccctctgctgtagccagactttttattacccagtgaactgtgcatttttgcacatcattatttctgtcacctgatttgctttctygttctattctgcataacccaaatctcatccattcccctttgcctaacttacccgcctcttccccttgaaatccttccctgcctactccaacatcaagtgctccatctatgcagctcttacaagctgttctttttgtttgctaatgagcattatcatgcctgcatctatgtcttcaactgtaacatgtttgaactatacagtattgattataagcaacttttttcttcccaactcttttctgatgacataagaaagacaaaaaaaaaagtttattggctttggttcattcatagctttttgaatctttaacacagtatcaaaaaatggtgcatgtatattattttattttattatttattttagtgaagattaattctaataattaaa

SEQ ID NO: 562976 - DNA, 532 bp, Homo sapiens
tgggtttaatgtgtgccaaaaactaaagaaaaataatcctcaggcattccagattttgtcctctacctttgtggactttacagacattggagtggattactgtgatttttctgtacaatcaaaacataaaattatagagtaagtactatttataaatttcccatagcaataaaagaattgacaacaaaagatccactaatctaaagtttaaacagcacaaaacttcaacgaacttcagagctttatttttattaacatttcacccaattttagagtgatagtattttcaccataaaagtttttattaaattacataaaatttatccctaatcagtattagaggaaaagtaactaagatttcacgtatacttcatttttagaatataagttctacatagctataatcaatgtgattatactarttagaaggcttttggccagaagtgaaagaatataactcaaaataggttgatcccaagagttaaacaatgtcatgtgatattggtctcttttttcttcttagctttgccat

SEQ ID NO: 562977 - DNA, 631 bp, Homo sapiens
ttgtttctacaacagtttatttaattatacctcgattaattttggtaggggggtataattttagaattttagaattgagtttaaatttttctattaagagaaacagccaaatggtatgaaaataaactcatttagaaaataattaaatccccagtacattcatttattcattcaacaaatatttattgaggccagccacttttcttggtacttggaatacatcagtggacaaaacaaagatctctcccctcayatagcttatactctaatgggggaagggaaattttaaagatttttaaacagatgagtaaattataataaaagttaaaaattattaaatgcttaagaaaaaaaggaagagcatagcaagataaggggaatctgtagggcttagcaaggacggaaattgcattattaaagagcgtggtgagggaaagctttactgagatttgagcaaacacttaaacgagtgatggagttttcagaagagaagcagtttcccgaaactgctagaccaaaagttctaaaagggtcctaaggacatgtctggagtgttcaaggaacatcaaggagaccagtgtgactggaacagagtgaaggatgcaagtattaggggaggaagtcaggtagg

SEQ ID NO: 562978 - DNA, 653 bp, Homo sapiens
ctccatgacaaccactgtggtcagatgattgatgcgctaaagggtctctctaaatgtgtgaacttaggagcatgggaagctccaagaataatgaaagtgttgtctgtctcatgagctcctaaggcatcctatcgtggatcttattatgctcaatgtagctaccaytttttgttgccatttttggctaccattgtcagcccaggtgatagtaaactttttctgtaaagggccagacagtaaatatttaaccccaaattgtgaccaatacagtctggcacagccactcaactctaccattatacgacaaaacagccaaagacaatatgtaaatgaatgggcacatcagagttccaataaaactttatttgcaaaaacaagcagtggggcagatttggcccaagggccgtaattagccaacttctagtccaatgtattaaattataagctcactgaggtcagagatcatatcttttactaaaccagcaaaaatttactgagaatttaccatcaaaatccgtgaaaagcagccatcaggacttagtagtgattaagacaaaatatgttctctaatgtagcttagattctactacaaaaggggagatagcacataaataaaattaatatctgaaagcaaccaatcttattcaccaatg

SEQ ID NO: 562979 - DNA, 559 bp, Homo sapiens
caggctgctgaaacttttcttatttatccaaaccttttgggaattgcctttccaataggcagtggtacacattttcttttcttggcttggtaggaagtgaaaggttataagttattcccaaactgtgcctccaaggctatattcacatttcattttttcagatatttttaagtttcgtgattgcatttagagctagataaatttgagtaaattgctcaacctcttaaaggttaagttcactcacctgtaaaatgaaaataacgcccacacttgaggattaaatgagacatcacgtacacctgacagataccatgtgcttaataaaagggagctcagctgggtgcgatggcgcaggcctgtaatcccagcactttgggaggccgaggtgggaggactgcttgagcacaggagtttgagaccaacctgagcaacatagtgagactccgtctctacaaaaaagttaaaaattagccagatrtggtggcgtgtgcctgtagtcctggttactcaagagactgaggtgggaggatcacttgatcccaggaggtcaaggttgcag

SEQ ID NO: 562980 - DNA, 591 bp, Homo sapiens
agtgaagagagatagtttgaatttctcttatcctgtttggattccgtttatttctttttcttgcctgatttctctggctagcactttcaatactttgttgaataggagtggtgagagtgggcatctttgtcttgttttagttctaaaggagaatgcttacagtttttgccaatttgtgatgttggcagtgggtttgccatagatggctcttattattttgaggtatgtttcatcaatgtctastttcttaagggtttttattttcatgaagggatgttgaattttattgaaagctcttgccacatctattaagataaacagatggtttttgtatttaattctattcatgtggtgaatcacatttattaatttgcacgtgttgaaacaaccttgcatcccagaaacaaagcctatttaatcatggtgaatttacttttttatgtgctgttgaattcagttttctgatattttattaaggatttttgcatctatgtttatcagggctactggcctgtagttttcttttttccttgtgcttctgctaaaggttactcagaagcaagttgtttgatttccatgtacttgtgtgat

SEQ ID NO: 562981 - DNA, 678 bp, Homo sapiens
agtacttctctggagcccctagagaatttgcttggtatgtataaggaagggcactttgatattcacagaaactattaagaaattggtcctaaagatctagaaaacagaattcatcaaggcagctgccctccaaggaagctaaccacagatgatagcttcctctgccttccatatttcctcacctggctgaccagaacactgtatgctgaataacccwtgccttcaaactgtttgaacacagagattaagtacttctgataaggctaaagaattaacataagaccaaggaataaatcgataaaagacattctcagaaggtatttatgaaaaacaagaaactccacatttgccctttataaccacagctaacctctacaaatctccagtgcaagatgaccttatctaaccccaatttctctaattcattcttatcagtgtcctacttcttgatcctgtgacctatactggtcttgtctcaaacaggcaagaaatattggtaatagaattatgaataaattaaatgaataaatgcagcttatctacaatattaaattgtttatgtatccatattttaaaaatggaaactcatttctttttgtttctaataaaagtaatatgtgtttattcattgaaaatatgtatagaagtttaagacctctcataatcttaccctgtaac

SEQ ID NO: 562982 - DNA, 555 bp, Homo sapiens
gtctgtttttcctagtcttttagtatccagaaatcatacctagaataccaatcaggactgaaatctcagcattccagtagagagtagattgataatgaatccataattatagctctaagataattactagaatgagttgaagcactgttttgtccataactcccaaattgcaaattgtgatataaacttttattaatatataaggatattttaaatttccaaaggaaataaaaatgttgcccaccacttgttatatcctgtttkcactttaggctattgatattttcaatacattttccaataatttttattaattggtacacatagtttaaatgtttcactattgtagagtgaaatcctatttgctacagcatacttaaggaacctgctttggtctaagaattatgtatgttaatcttctccttaagttaatttctagaaatatcttcatatctcccaaatggtcattagattcttatataactaaattatttggcagctttaaaaatcatatcatattttaaatatgcgtaatctactgaacagtgggaaagt

SEQ ID NO: 562983 - DNA, 557 bp, Homo sapiens
tacttcaatctggtttctactcacattgttacaggaaacctgctccctcatcagtccttcatgactaagggatttaaatgaccctgcatttactcttcagccataaacctgctaatgaattgcaaatttatgtattcacaaaaacatttgacatattcactaaatgcttctcagtgatttctacctcaaaagtttaactaaattattggtttttctttttttgacagattttgcttgttactttttgctttgttttatggtcaggaggcagggaaatactaggtaaaaaacggtgaggtccctggygagggttgcaccctcaagccttgacctgctgcatgaaatgaaaactttacatgtctactttcccaccctaatgttgccttttggcccaccacaccccctaccctgtgcccataggaacctcaggccccagattcaggggacacatacacacagaagagagaactgtctgaatgttgcgaggagtagaaggagctggacattgaagactacagtcagggaggagtttggccagggatggttggggaggagtt

SEQ ID NO: 562984 - DNA, 518 bp, Homo sapiens
taggccctccctgattcatgggtgcaatccacattgacacccatgggtggcacctgccggggtggctgggactcagggataaaagacagaagagaaaggggacacccactttctctctycctcataccccaggttatcactgaaagaaggaagagaatgagggacgcctattccccatctttcagaatgagcaaccagcgatctccaccatcatcagtttatactcctctggagtgcagcctgaagtcactgagactgctttgatcctcagactctaaaggaacaaagctttgtagccctctgcacaaaggtttggccaaattataaaagattggcttggcttcaggaaggaacaattcattttgatactatctggcagttggaccttttctgtaaacatgaggacaaatggtctgaggccccatatttgcaggctttctttaccttgcagggcaatccagaccttcactgacagtgtagaattgatccaggtctcctgtttgccatctcaggagagg

SEQ ID NO: 562985 - DNA, 518 bp, Homo sapiens
taggccctccctgattcatgggtgcaatccacattgacacccatgggtggcacctgccggggtggctgggactcagggataaaagacagaagagaaaggggacacccactttctctcttcctcataccccaggttatcactgaaagaaggaagagaatgagggacgcctattccccatctttcagaatgagcaaccagcgatctccaccatcatcagtttatactcctctggagtgcagcctgaagtcactgrgactgctttgatcctcagactctaaaggaacaaagctttgtagccctctgcacaaaggtttggccaaattataaaagattggcttggcttcaggaaggaacaattcattttgatactatctggcagttggaccttttctgtaaacatgaggacaaatggtctgaggccccatatttgcaggctttctttaccttgcagggcaatccagaccttcactgacagtgtagaattgatccaggtctcctgtttgccatctcaggagagg

SEQ ID NO: 562986 - DNA, 563 bp, Homo sapiens
cagtgtagaattgatccaggtctcctgtttgccatctcaggagaggctgcaaggggcartcccagggggactaaagaattgaatcccagaggcacccccagcaggggagccagctgcctctctacctgctcctaagggcgagtacagatgcagaagctcatcctccctatccagattctctctcgattggcacctcctagaaatcatcaccctggacaagccccagtctcagtcttacccctccaacaaatgcctggtaaatttggccccagtaacgtccaggtctccttctctctacaggactgaaagcaaattaagggggatcttgggaagttttcagatgacactgacagatatatagaggctttccagagttaagcccaagtatctgaaatctcttggaaagacatgttactttttaatcagaccctgatgaacactgaaaagcagtcttctctacaagtggcagagagatttggggacgagctttgtatcaaatatggtgtcaggaaaaagactgaactttatccaactggaagaaaagcagtaccagtggatgaccc

SEQ ID NO: 562987 - DNA, 598 bp, Homo sapiens
aattgatccaggtctcctgtttgccatctcaggagaggctgcaaggggcaatcccagggggactaaagaattgaatcccagaggcacccccagcaggggagccagctgcctctctacctgctcctaagggygagtacagatgcagaagctcatcctccctatccagattctctctcgattggcacctcctagaaatcatcaccctggacaagccccagtctcagtcttacccctccaacaaatgcctggtaaatttggccccagtaacgtccaggtctccttctctctacaggactgaaagcaaattaagggggatcttgggaagttttcagatgacactgacagatatatagaggctttccagagttaagcccaagtatctgaaatctcttggaaagacatgttactttttaatcagaccctgatgaacactgaaaagcagtcttctctacaagtggcagagagatttggggacgagctttgtatcaaatatggtgtcaggaaaaagactgaactttatccaactggaagaaaagcagtaccagtggatgaccctaaatgggatcccgatgatgagatgggagaatggaagaggaga

SEQ ID NO: 562988 - DNA, 653 bp, Homo sapiens
tatcttatatatacataaatacaataaagtttaatttataaattaggttcagcaaaaaataaacaacaaaaacttaaaactataattataacaatatattgtaataaaagttatatgaatgtgcttgcttcctctctctctctctctctcaaaatatcttattgtactgtgttcacctactttcagaacacagttgactctgaataactgaaaccatggctaaagtgggactattgcatttaattattatttgttgaacaaataaatagattgaatggatgaacaactgaaataaactttgcttctttgtttaaatatcacaaaacagcatatgataatgcatctatgccatgtgttacatcatataaagccaataatacgtaamatttaagaattctaaatttattgtagtaaattaatgtaaccttattataaattgctcagagttatccatttacaaaataagctataaatgtgaaaatgaaagcaatgggaactgattctaattttagaggagaacattttgaatgagaatattaaaatttgcaaggacatttattttcaatttttatcaagatgactaactggcaatatgcggttttgctttgtgtatgaaggtgtagttggtagattcaatttatgcgctggaatga

SEQ ID NO: 562989 - DNA, 538 bp, Homo sapiens
aacctttctatgttttcaagctgaaattactaaacttgattttgtgtcagaaaaggccaagtgggtacctgtaaggttttacattttttgtaggtaacaagaggtctggtgggaggcagctatttgaagaatttttgttagctttctsttattaaaacaagcccctcactaagaaagttcagatgttttgcaaaaattggaagcctagctatcttgaaaatgtgaaattaggagacacattaaaggcattaaccatttatatgagcctattaatgacatacatttatcttcatgtttcagaagaacatcgggcacattctgtgtaatttaaaagtgtagtatcaaccgggcatggtggcgggcacctgtaattccaccactttgggaggatgaggtgggtagatcacgagttcaggagttcgagaccagcctggccaaggtggtgaaaccccatgtctactaaaaatacaaaaattagcctggcacggtggcaggtgcctgtaatcccacttactcgggaggctgaagcaggagagtc

SEQ ID NO: 562990 - DNA, 591 bp, Homo sapiens
ttttacattttatacatcttcagagttggtctgtttagcttttcttaagggaaaattcaataaaagtccaaataccccattaacattttattaagtagtcatgattgtttctgtgactgcaggagagaaaaaggagagagaattttgaaacgtattggtgaatatgggacagctgtcaacctatatatcaaatgttataaaataattttatctgacctggactgagacattgagtagaatgttcacagatactggcaagtatcatgaagtcaataaagcrtcccaagatttggcaaaataagcttgttttatgttctttacatcacagtaatcaatatcacgaccatctcccgcatctctaccagcatcgtgactcctgctactattattaatcatttaataataatagtactactatgactaccaccaccctaattattttacatacagtatattttgctcatttatgcctcacacatattgtgtagctggaaatttcattgtttgcatttctcagacatagtaacttagagaagttaagtaacttgtccaccaaatttagagtttcaaggttaacctaagtctgcctga

SEQ ID NO: 562991 - DNA, 591 bp, Homo sapiens
ttttacattttatacatcttcagagttggtctgtttagcttttcttaagggaaaattcaataaaagtccaaataccccattaacattttattaagtagtcatgattgtttctgtgactgcaggagagaaaaaggagagagaattttgaaacgtattggtgaatatgggacagctgtcaacctatatatcaaatgttataaaataattttatctgacctggactgagacattgagtagaatgttcacagatactggcaagtatcatgaagtcaataaagcatcccaagatttggcaaaataagcttgttttatgttctttacatcacagtaatcaatatcacgaccatctcccgcatctctaccagcatcgtgactcctgctactattattaatcatttaataataatagtactactatgactaccamcaccctaattattttacatacagtatattttgctcatttatgcctcacacatattgtgtagctggaaatttcattgtttgcatttctcagacatagtaacttagagaagttaagtaacttgtccaccaaatttagagtttcaaggttaacctaagtctgcctga

SEQ ID NO: 562992 - DNA, 574 bp, Homo sapiens
ggggtattttcattcaatcattgtttcttcatatattagatgaaatatttctattaagagataatttcttcatctagtcagatagtatttggttacccagtggagtgattagtgtaagatgggataaatgattgattctttctttttttattttaataatttcaaaataaataatgaaaaatttcaatggtaaacaatcggtggatggagttccttttttgttttattttgttttgttttttagtytcattacaaactcatgttagatgtttggtatgtttcaatctattgcagttaattctcaaactttctaaatccaagtgaaatctttttcaggattatttctgagtagtttcaatacagcattcaaaatatctttgaaaaatggttcgttctgatatgggaatattgtccatttcatcttgaagtgctggtggtacaggcttttctccaagaagccctgggtccttccagtaagaatgtgtgtgtgtgtttgtgtgtgtgtgtgtgtgtgtgtgtgtgtgtgtgtgtgtgtgagagagagagagagagagaaatggagagaatatctata

SEQ ID NO: 562993 - DNA, 549 bp, Homo sapiens
attgtttcttcatatattagatgaaatatttctattaagagataatttcttcatctagtcagatagtatttggttacccagtggagtgattagtgtaagatgggataaatgattgattctttctttttttattttaataatttcaaaataaataatgaaaaatttcaatggtaaacaatcggtggatggagttccttttttgttttattttgttttgttttttagtttcattacaaactcatgttagatgtttggtatgtttcaayctattgcagttaattctcaaactttctaaatccaagtgaaatctttttcaggattatttctgagtagtttcaatacagcattcaaaatatctttgaaaaatggttcgttctgatatgggaatattgtccatttcatcttgaagtgctggtggtacaggcttttctccaagaagccctgggtccttccagtaagaatgtgtgtgtgtgtttgtgtgtgtgtgtgtgtgtgtgtgtgtgtgtgtgtgtgtgtgagagagagagagagagagaaatggagagaata

SEQ ID NO: 562994 - DNA, 549 bp, Homo sapiens
attgtttcttcatatattagatgaaatatttctattaagagataatttcttcatctagtcagatagtatttggttacccagtggagtgattagtgtaagatgggataaatgattgattctttctttttttattttaataatttcaaaataaataatgaaaaatttcaatggtaaacaatcggtggatggagttccttttttgttttattttgttttgttttttagtttcattacaaactcatgttagatgtttggtatgtttcaatctattgcagttaattctcaaactttctaaatccaagtgaaatctttttcaggattatttctgagtagtttcaatacagcattcaaaatatctttgaaaaatggttcgttctgatatgggaatattgtccatttcatcttgaagtgctggtggtacaggcttttctccaagaagccctgggtccttccagtaagaatgtgtgtgtgtgtttgtgtgtgtgtgtgtgtgtgtgtgtgtgtgtgtgtgtgtgtgwgagagagagagagagagaaatggagagaata

SEQ ID NO: 562995 - DNA, 219 bp, Homo sapiens
tttgcttcctgcctgcctgcttgacctgggagactggtcttctactcctgaaatgtctttgtctctttctgtctgtctctctctctctctaaacacayacacacacacacacacacacacacttcctatttattctgtttctctagtgaaccctgactaatacaatcctggtccaagaaaatccaacataaattaaaatgaataggtaacagcagccaa

SEQ ID NO: 562996 - DNA, 424 bp, Homo sapiens
aaacatcttgaaataaaataaaatatttaaaatatgacatgtagacaaggagtgtctgataataacaatgattgtattagaagtaaatggagcattatatggcacaaaacatgtatgtgttggttagaagggcaaggaaattgagcaaggaatttgaatctgtcagaagtgctcatatgtagaagaatccccagcacagacaggttgtattaaaaaaaaaaaaaaaacttcaagatatccttttcccagcaggttatctgcttctaagattcaattttttctattctgtgaaactgaacggaggttttgatcctaatctttatttttatgcaggcttccatttgtcctaatcttaacaagttaccaratactttgtttatcatggagacattttttgtagcctgttttgtagctgatccacata

SEQ ID NO: 562997 - DNA, 616 bp, Homo sapiens
aaaggtaaagtaacttggtgacattcgactggtaattcttcagagtctgatttcaaatcaaagtctacatgactctacaacctaaatgctctatgactctacaagctttgctaccctgtaacctattagaatttaaagccaccttaacacagtaatcagtagttccccaaacccatattgaaaactacaaaactgcatctgaagagccttgtaaaattacaattttcaggtcctaccaacatttttaattcagtagctctgggatgaatcctgtattaggcaggattctccaggaaagcagaaccaatagcatatatacagatatatatgaacacagcacaaagacatttattagaggaaytggctcacttgattacagaggctgaaaagtcccataccatcccctctgcaagctgaagaatcaggaaagccagtggtgtaagttctggaatctgaaggccctaggaccaagagctcagatgtccaagaacaggagaagttggatatccgagctcaaggtgaaaggggcaatttgcgttttctctgcttttttgttctatcctatccttcaaagaattgaatggtgcctgcccacattgttgaggccatcttcctt

SEQ ID NO: 562998 - DNA, 457 bp, Homo sapiens
aaacaattgctgttgattatttttggcaaaatcctgagaagagggctcttcacaaacagcgagagctccaactaaggtcagataaagacaaaacctgagaatagtgctttctaacaagctgccagacacgtaaagtagtgacaaatctctgcagacaggacttctagggagttcctaccttattctgcctcacttagtggctgccaaactgctggttttaatagctattgcatttggaagactagatttctttttttaaaaaaaattatttaaatatcttttggggtacaaatgatttttcgttacatggatgaattatatagtggtcagttctgagattttagtgcactggtcacccgagtagcatacattgtgtagtaatgtagtaatgtaatgtgtagttttttatccttaactyctctcccacccttcccattctaagtctctgaagtcgatc

SEQ ID NO: 562999 - DNA, 620 bp, Homo sapiens
gctgtctgttcaggttctttctttctctattaatcaattttgtctttctgacttttttcatggaaagagaaattatttatttacctgttagtaagccctgccatttttagatgaaaatccttgctgtctatcycctgctgaaagaaagaaattgctccaaaaaaacttgaacatctttttttgggaaatactgttcatttcattttaaaagtccataactgaacaactgtattgtaaatctcaccacaaactataaatatagtaacccacttaatacaatgactgggccctgacataatagcctacctttctgtgtgtgctccagttattgatggccacacaagtctctctcatttagacctagttagaaaatgtgattatcatttctttagaattaacattcctaaaaacaatgttatctacatattgcccagaccacctcatggcttccttttcctcatgactttcctatttctagcatcatctatttatataagctaaagactttgagtctcttctcttcatcagtgcttttctatccgccaaatcccaaattcacttgggtttttggctgtacctactcaggcatttcttctttattctaaatgtaactgtcctgg

SEQ ID NO: 563000 - DNA, 667 bp, Homo sapiens
actacttatagtctaccatactttgctgtctgttcaggttctttctttctctattaatcaattttgtctttctgacttttttcatggaaagagaaattatttatttacctgttagtaagccctgccatttttagatgaaaatccttgctgtctatcccctgctgaaagaaagaaattgctccaaaaaaacttgaacatctttttttgggaartactgttcatttcattttaaaagtccataactgaacaactgtattgtaaatctcaccacaaactataaatatagtaacccacttaatacaatgactgggccctgacataatagcctacctttctgtgtgtgctccagttattgatggccacacaagtctctctcatttagacctagttagaaaatgtgattatcatttctttagaattaacattcctaaaaacaatgttatctacatattgcccagaccacctcatggcttccttttcctcatgactttcctatttctagcatcatctatttatataagctaaagactttgagtctcttctcttcatcagtgcttttctatccgccaaatcccaaattcacttgggtttttggctgtacctactcaggcatttcttctttattctaaatgtaactgtcctggtagaatcccttacaaactttaac

SEQ ID NO: 563001 - DNA, 607 bp, Homo sapiens
cctcctgggttcatgccatcctcctgcctcagcctcccttgtagctgggattacaggtgcctgcygccatgaccagctaatttttttgtattttcagtagagatggcatttcactatgttggccaggcaggtcttgaactcctgacctcaggcaatccaccctccccagcctcccaaagtactgagattacaggcgtaagccactgtgcccggctcatactaacatatttttacataacttttatttcacaagacaatcaaaccagcctttcttattgtgccttttccccttcatttaatatataccatgtttctgctggtcatcttgatgtaacattcattctgattttttcctcactcaatcatgttactatttgcacgttaaacttatatgagcatcctagttattcatatgtattcattctcactttcttactctttcacagactgtctttcccttatgccttttaccacaggtacctaaacttttcatgattttgcccgtattttggttactcctaccacatctcaaagcacccaaaacaacatcaacaattgacttaaatattaatttcttattattttttaaataactaactgggttgac

SEQ ID NO: 563002 - DNA, 614 bp, Homo sapiens
atgaatattgttttacccattwttttcccccattatattaattctactaatgaggtcagagttgacattttaaattaaatgaggctattagtgacagtagtattttggtatatattcactttgtgtatgtttgtggagtaaatcttttaaaaaatacgcactcattttacatcaagcttcaaaccaattcacaattctgtgactctgcaatgcactggaagccttcttttgtcacccagaggcttttttaaatttgtgtgtgtgtgtgtgtgtgtgtgtgtgtggtgtgtgtgtatctgtgtatgtaaagccttaagaaaaacaccacaaatgcaaatgcaataattaatatccttttgcgtgaatggtgactaatatgtttccagaatgatggatagatgaaagagcaaagagaacatagatacttggataattagccaatttgtccaaactagtttttcctactcataatctccaaattttttgttttcttccatacatcagttactgatgagtagcaattacaaaataaattgtacctagacatttgccaggtttatgattttccactaaatatacacatatatacacaatacacatacacacatatatac

SEQ ID NO: 563003 - DNA, 586 bp, Homo sapiens
ttgtttaccaggctctctaatgcttaaatttaaaatgctcattgattctcatgaatttcctcagcagtcttcctcatcaatcttttggtatctgatgtagattaagattttgccacttggaaatgcttttagcatcttacaaagaccgccatatctttatacactgttttgcctagtgtatttttcgcactgccacatgtattttcatttcctttctttcttttccttcctttctctctctttctttctttctctttttctttctctctttttttctctctttttctttttctttctttctttttctttttctttctttctctttctctctctttctttctttcttttctttcttyctttctttctttctttctttctttctttctttctttctttctttctttctttctttctttcttattttctttctttcttttttgactgtgtctggctctgtcacctaggctggagtgcagtggtgcaattttggctcactgcaacctctgactcctgagctcaagtgatcctcccatatcagcctcctaagtagcttggaccaccatgcctgactaatttttgtattttt

SEQ ID NO: 563004 - DNA, 217 bp, Homo sapiens
ctcttgagaatggcatgagatcctccacagtcagagcatgagcttatttaccagctgcatctcttttcaacagcatatactccaagatactgaacaatttcttctgccatwaaacagtggtcttcaaatatttacatgaataacaatcaccaaggtagtttgacagaagtgtagtttctttggcctcatccagagatactgttgtagatgtagtttt

SEQ ID NO: 563005 - DNA, 662 bp, Homo sapiens
atgcctacaactttgccttttccataatgtaacataaagagaatcatatatagtgttgctttctttaaaaaaatcagtggatgaatgaacaaagaaaatttagcatataggtatgcaactgagtactattcagttataaaaaagaatgcaacccagctctttgtagtaacatgaatggacactgagggtcaatgcgttatgtgaaataagctctttctttgagataaagacaaatatcacatgttctcacttatatatggaaactaaaaacttgatctcatggacatagtagagtcctgccaagcttttttttttttttttttgcgtatttttcaaaaatttttaaagttcttmctaaaatttaatcattaattttaaataagtcatcccataataaactgtctgtaaaaatgctctccagctaaatgaactcatacagacagtgttaatcatactctggtctaatgcaaattcacaaacacacagacacacacacacacaccccatttcatacactcttacagggagaagtaccactgctgttgtcatcttcatatgtgggattctttctcacagttatttcttagatttcctctctcttggtctgacacccagtgataagaggagagtacacagtagtgccagaggaggagacttcttct

SEQ ID NO: 563006 - DNA, 564 bp, Homo sapiens
tgttctgggtgtcagtgagtgagtagtgagtgaatgtggaggcacaggacattactgtacactactttaaaaaggctgtacatttaggctgctctaaatgtgtttaaaaatctatttttctacaataataaattaatgttagcttactgtaacttttaactttatgagtaattatttaacttcttgactcttttaacatggcttaaaacacacattgtacagctgtataaaaatactctctttctttatatccttattctattagctttttaattgcttctaaaactttaatgtttactttttaaactattttttaawaaaactaagacacgagctcacacattagcctaggtctcccaaggtcaggatcatcaatatcattgtcatccatctccacatcttgtcccactgaaaggtcttcaggggcagtaacatgcatggagctgtcatctgtgatatgatgccttctcctggcatatctcctaaaaaaactgcctgatgctgtttcatagtcaacttttaaaattatagataaatcaaaggaatacactctaaagtaataat

SEQ ID NO: 563007 - DNA, 564 bp, Homo sapiens
tgttctgggtgtcagtgagtgagtagtgagtgaatgtggaggcacaggacattactgtacactactttaaaaaggctgtacatttaggctgctctaaatgtgtttaaaaatctatttttctacaataataaattaatgttagcttactgtaacttttaactttatgagtaattatttaacttcttgactcttttaacatggcttaaaacacacattgtacagctgtataaaaatactctctttctttatatccttattctattagctttttaattgcttctaaaactttaatgtttactttttaaactattttttaataaaactaagacacgagctcacacattagcctaggtctcccaaggtcaggatcatcaatatcattgtcatccatctccacatcttgtcccactgaaaggtcttcaggggcagtaacatgcatggagctgtcatctgtgatatgatgccttctcctggcawatctcctaaaaaaactgcctgatgctgtttcatagtcaacttttaaaattatagataaatcaaaggaatacactctaaagtaataat

SEQ ID NO: 563008 - DNA, 573 bp, Homo sapiens
tgtgattttaaaattctacatatatgtgaacacacaaaattaaataatatcttgtatttttgatgatatttttgtttcagtgatatttggctatttgtgaagatgtatatttagatgctatatgtaccattagatgtcatctggaactaattattactaataatagctagtaaataactattgatcaaattttaataaaatgatgcaaagatatttacagaggccaacagcaaaataaaaatgaaattaaaagcttgtccttttttgtattaggaaaaaataatgatccartattaaacacttttataacacttttcttttcctcttttcgctttttatcattttttaaaatctattctttggaacagtttagaaccattgcatttgaatacattgaaattctgaaaaaatctgatttttgtacatgccaattcttcatctagaggtttttttttttggaaaaaaattacatatgtagaagttgaaaacaggtgcatatataaaacaaaaaaaaagatcattggaaatgtaaaatactttttacaaattttggcatgaatttctatgtaacac

SEQ ID NO: 563009 - DNA, 547 bp, Homo sapiens
tctagagggcttcccttgtctctttgtaactagttaggtcacaaaaaaatgagaataaacacctctctgactttcacagtctgtccattttctaaccccttcytagaattggggtgctttttatacaaaaagtagttatgcatcagtaatacattcatattttatatttctcaagaactttcactcaaaaatccatatcactatcttaaatatacatgaagagtttgacaaaaaagcctgctattttgaatggtaattttcaaggttttttttgtacattattccatttgttactcaaacttatagaagttctcatgaatatagattagaaaagatgtcctttacagagaaagaaattgaaaactcagagaaaaatggttttccaaaataaatgaagtgcagtgctctttgaaatctgtgttgttttgattttggattgaagacactgcagcagaaactttactatgccagaaatcccagtgaaactgattctccatgccaataatggagattccctctccttagaatatttttgtcaaccttagga

SEQ ID NO: 563010 - DNA, 511 bp, Homo sapiens
tttgtgttttgtaactattcagcattaactcaggatctttttcttaatgtcttgatacagatgcatgtctgtcatttcaaaagatgtttaatctkttgtttatatatgcataatttaagttaaatgatttgaattagtttccaatcactagcattggacaaaaatcatatatgtgtacttaaatatatattaataatacatagtgacttggttcatatataattatgatttaaaatgtttcatatggctccctttttagattatttattaataggcaaagtgatgagcatgaaaagcaaactttacacaaggcattgaaaaaatcatatactttagaattttgaactgctttagacgtttaatagtatccaaaatacagtgcagagatttttttaacacacagactgctacaccaataccagtctttgcttgagtgtcaccaaatgcaccaaacgacagagagcttattaccacataagacattctaccccattattgcatagctctaatc

SEQ ID NO: 563011 - DNA, 609 bp, Homo sapiens
ctaaaactcagtatgcaccattaagccagatcccttgaggctcaccatctgccttggggcactgccagggagcagggcatgtgtgcctgttactttgaaacccacaaacttttctgtttttacagcaacagctgctacaaatctgattatatttcttatgagtaaataaaattatatmttataaattatttgaagggactgaatactaaagttgcaacccaaattgctctgtgaattatatttttcttaaagtaaattaaactctccaaagtagaaaaacagatataggttaatgtcattgttttgctgtaaatctttttatgaaaagttatttcatagcatttatggaagttttatatatatatgtatatatatacacacacatatataaacatatatatgaaacaatatgcccacatccatacatatcattataaattataaattatatttatatttttataatttaaaatatataaattatatttcatatatttatattttttatatattttatatatttataattttataaatatgtttataattttataaattataattataaattataaataaacacatattaaaattaatatatagtaaatt

SEQ ID NO: 563012 - DNA, 523 bp, Homo sapiens
gtccagtttgacaagctttccatatgctgtgctacttccctagacactgatgcaataacaggaccatactacmttaatttgtagatcctgatttgccatgaaatagatccagataaactttctggccctgaaaaagtaacagaaagattaaataggcaatccaaaacatttcacaagttaaaatcctatagagacaagtgtgtgttctctcactgtttcttccagcaaaaacagacaggtggtatatatagattagagagccagaaacttggcttatttcagacttgtgagctttcattgccaatctcaattttgcaagtagcttattaaaagatgttgggcaagctattgttctctgtatgagaatattctcattatacaaagaaagtcctgaacacaaatctggctatgagttgcacagcagctccaacaattggcactggtgacttcctcccttaagaagcactctcctcaaatgcaaccttctccgtccttgattctgtgactctgtgctattctcatt

SEQ ID NO: 563013 - DNA, 561 bp, Homo sapiens
aagctttccatatgctgtgctacttccctagacactgatgcaataacaggaccatactaccttaatttgtagatcctgatttgccatgaaatagatccagataaactttctggccctgaaaaagtawcagaaagattaaataggcaatccaaaacatttcacaagttaaaatcctatagagacaagtgtgtgttctctcactgtttcttccagcaaaaacagacaggtggtatatatagattagagagccagaaacttggcttatttcagacttgtgagctttcattgccaatctcaattttgcaagtagcttattaaaagatgttgggcaagctattgttctctgtatgagaatattctcattatacaaagaaagtcctgaacacaaatctggctatgagttgcacagcagctccaacaattggcactggtgacttcctcccttaagaagcactctcctcaaatgcaaccttctccgtccttgattctgtgactctgtgctattctcatttggaataatctcatctgaccctcacctctggcactcatgggggaatttgt

SEQ ID NO: 563014 - DNA, 557 bp, Homo sapiens
ggtatttcttcaatatttaagaacttgatgatattttaagtctttatggcatgaagattgtgttataatgatagmaattagaattgtttaaactatatcactgtgagtcaatcaaaaaactcagttttaggcacatgtaaccaaattgtatttttccatccaatgacctgctcctactggcttaatgaatatcaaaaatgtactaaagacatttttataaaactttataaagttagacaagccaacaatgccaattataataatattcaaagttaaaggtaagactattctatgctaagattagatagaagacgtagaagtgtatattaacaaacagagataaaccacccaaagtaatgtactttaaataaaaattaaattatagttttctggattgatattggtggcattattactgaggtaataattaggtttgcttctgaggcactacatattttttaatatgtactttaaatacattgtgtgttttcacatttcatcaaatattatatgagtgatcaatatttataaatatttgacagccaattttgaaatat

SEQ ID NO: 563015 - DNA, 347 bp, Homo sapiens
gcagatggaagtataatgccttgttctaactgtgttgattcatattgtttcatttctacttttgaaggaggaacaacttttgtaattgagagacctagtttacaaaaatatagattgtagaatgcagtccggagacatactctcaaaaatatccacgtttaaattccatttcttagttccaatttgacagttttctgtaaaattagtagtagaagtaagaagatacaggaaccaaaatgcatttgaaagcakggaaggaattaaaacttatttaaagaaaaattaaatgatgatatttaagaaaatatattcttaatgttaaacaagttggagatcattgatgccaa

SEQ ID NO: 563016 - DNA, 608 bp, Homo sapiens
tgaccctgtatggcacaggcacctgaatgtgtgtttctagctggggaattctggaatggccaatccagacaatcaatccttgtctatgagggacatccgagcctccggcccatgccatggaatgcaggccctatagtcccccctgccgcyccctaccccgtattttaagttgcatgaaggtggccaggtggaagttgttaggaaaaagggtgttaaaagaaagttctgtataaacagcatgccttttgtaagtggttgcagtcttcctgttcaggccactgccactgcgctctctcccctatatgtaagctccaagaaaactccatgtctcatttgctggcagagcatccctaatcatggtacagattaatgagtttaaagcaaagaggaatttgctgaacacctggtaaaatgtaatacttcaacgagaatcacccttccccaaaataaggaaaaaaagaaactatataagtattagaaaaaataagataattatcttgtatccataattcataattaagaaataaaactcagaagccataaaatcacatatgcaatcatatattaatatgtaaatataataatcaatataaataatatcaaaatta

SEQ ID NO: 563017 - DNA, 608 bp, Homo sapiens
tgaccctgtatggcacaggcacctgaatgtgtgtttctagctggggaattctggaatggccaatccagacaatcaatccttgtctatgagggacatccgagcctccggcccatgccatggaatgcaggccctatagtcccccctgccgccccctaccccgtattttaagttgcatgaaggtggccaggtggaagttgttaggaaaaagggtgttaaaagaaagttctgtataaacagcatgycttttgtaagtggttgcagtcttcctgttcaggccactgccactgcgctctctcccctatatgtaagctccaagaaaactccatgtctcatttgctggcagagcatccctaatcatggtacagattaatgagtttaaagcaaagaggaatttgctgaacacctggtaaaatgtaatacttcaacgagaatcacccttccccaaaataaggaaaaaaagaaactatataagtattagaaaaaataagataattatcttgtatccataattcataattaagaaataaaactcagaagccataaaatcacatatgcaatcatatattaatatgtaaatataataatcaatataaataatatcaaaatta

SEQ ID NO: 563018 - DNA, 645 bp, Homo sapiens
tcccagctactcaggaggctgaggcaagagaatggcttgaaccagggagtggagcttgcagtgagccaagatagctctatcgcactccaatctgggtgacagagcgagactctgtctcaaaaacaaaaacaaaaaaacaaaaacgaacaaacaaacaaaaaaaatagtttacgaaagtgacatatttgaatrcatgcatgaatttaatagaaatgaacaagaccatgagaacagactaacatatgccagtgaaatttatgaattcagatgcgggggaaatctaactttgaagaagggactttgaaatgctcttaaaaaaaaaaaacagactagtagaacaactgtatatgctttagagaaaccataattactttcaaattattgatgtgaagaagttcaattgattttgaattccatcttcataaaaaattttaacataacatttttaatgaaatattacatataaagaaaaattataacctgacacataatttaaagaaataaacttaaccacatttagattaatggtaagaaggatatccccgacgataaataatttgtttttctttttgctatttttgctacatactagtgtcaaatttatcactgatgacaactggaaataaagtgaaaaggttatttaaa

SEQ ID NO: 563019 - DNA, 257 bp, Homo sapiens
gaatgctgagagttatttgcttgtttgtatatttattagttttgcttctttgttttgtttttccaaaaactatattctccttactagagtattggattccgtgacaaagtttattctttctacactactgtcctakgatgaccactccctctatgttccactcacccttctcagctgcagcaatgccgtggggatattgtatgttgttgagaacatatcttactagctttcaaactatgcaatggctttttgaccat

SEQ ID NO: 563020 - DNA, 398 bp, Homo sapiens
gaattctgctgaattttatccaagacttaccaggatgatctatatgagtctgtaagaactacagcattactaggcttggggggaccccctaggaagatatagctgcagtgaccaaaatcttagatcacaacacctaagtcccttcaaatacctggaaagccatcccaagaaggataggtacaaataagcctagactgtgaagactgcaatgaatacctaacttttcaatgcctaaatattracaaacatccacaagcatgaagaccatctggaaaaacgtgatctcaccagatgaactccataagccaccagggactaatcatagggaaacagagatatgtgacctttcagaaagataatttaaaatagctgttttgaggaaacaaaataaaatttaa

SEQ ID NO: 563021 - DNA, 398 bp, Homo sapiens
gaattctgctgaattttatccaagacttaccaggatgatctatatgagtctgtaagaactacagcattactaggcttggggggaccccctaggaagatatagctgcagtgaccaaaatcttagatcacaacacctaagtcccttcaaatacctggaaagccatcccaagaaggataggtacaaataagcctagactgtgaagactgcaatgaatacctaacttttcaatgcctaaatattgacaaacatccacaagcatgaagaccatcyggaaaaacgtgatctcaccagatgaactccataagccaccagggactaatcatagggaaacagagatatgtgacctttcagaaagataatttaaaatagctgttttgaggaaacaaaataaaatttaa

SEQ ID NO: 563022 - DNA, 509 bp, Homo sapiens
attagaatcaagcagaaattctggagctgaaaaatgcaatcaacatactaaagaatgcattagagtcccttactagcagaactgatcaaacagatgaaagaattagtaagcttgaagacagtctatttgaaaataaacagtaagaggagacaaaagaaaagagaataaaatataataaarcatgcctataaaatctagaaatagcctcaaaagggcaaatctaagcattattggcctaaaagaggaggtagagaaggatagggactcattcaaagggataacaacagagagctttctaaacctagataaatatgtcaatattcaattataagaatataatagaacaccaagcagatttaatccaaagaaggctacctcaaagcatttaataatcagacactcaaaggtcaaggaagaagaaaggatcctaaaagcagcaatagaaaaaaaaataacatacaatggaggtctaacatgtctggcagcagaaatctctgtgacaccttaca

SEQ ID NO: 563023 - DNA, 404 bp, Homo sapiens
acacatatatatgtatgtgtatatatatatacacacacacacacacatatacatttcaataaaaatcacaagaacacaagtcagagccatagaaaaatcatgaaaatcaacttacagctgtctaatgtttagcagtcccctgccagcatggaataaagtcacctgatgctgtcagatcaacatgcatgtttatttcatctaacaacacacaaacacccagaatgcttttcttctcayatgtgaagtctgtgacattaagataccatataactgaatactgactccaatatttggtgattgcaggattaaaaaaaaatcacttcaccttttaattctcaacttttgtttctacaaaatgcagatggggagcagttgggaataacaatctatgaatgcaaagaatt

SEQ ID NO: 563024 - DNA, 404 bp, Homo sapiens
acacatatatatgtatgtgtatatatatatacacacacacacacacatatacatttcaataaaaatcacaagaacacaagtcagagccatagaaaaatcatgaaaatcaacttacagctgtctaatgtttagcagtcccctgccagcatggaataaagtcacctgatgctgtcagatcaacatgcatgtttatttcatctaacaacacacaaacacccagaatgcttttcttctcatatgtgaagtctgtgacattaagataccatataactgaatactgactccaatatttggtgattgcaggattaaaaaaaaawcacttcaccttttaattctcaacttttgtttctacaaaatgcagatggggagcagttgggaataacaatctatgaatgcaaagaatt

SEQ ID NO: 563025 - DNA, 629 bp, Homo sapiens
tttcctctgtgtctgtgaaactgtaatttttaatattgtatttttctttattgatattccataattcmctatgccattctcttatatatttatgttgtttcctattaatatgtatatctgtttatcattatttttgtgttgaaaaataagcttataataaatttgcagcacatttcatatgcatacacaaaaatacaaaatacagaaccgataataatatgtgtccatatggcttggctgagtattttctcatttttttctgaagagattatattaatttaaaaagtgtctttaaaaacttatataatgctggagatatcaagagcatataaaaatcatttttttgtatatgtaatcttagactctgggtcactgttagcatattagaaagctacagacatgtttgttaaaattttgcacttatatcatttctctttttagaatcagacttacaaatctcaatctttgaacatgggttcaaagcttttagttttccactttttaaattatatgtaaaacacatattacaggctgggcatggtggcacacatctgtaatccctgctactcaggaagctgaggtgggaggatcacttgagcctggagggaggaggatgcagtgtgctgaga

SEQ ID NO: 563026 - DNA, 579 bp, Homo sapiens
gcatgcacatacagtccccagaatgaggatgtttagacaaacagaagattatctgcatgtttcagttttatgtcaagtaaaagacaaaagagaacaacttacgtgggccatatttggttattcaaagaaacacttaggaaaacagagggttgtagaattttagcatcaatttctgaacttcttacttacattgttttattgtgtaagctgtgattaaataatgcaagaaacaattaaaaagtaaacaatttcaacaaatatttgatttgttggatgtaacaatatgactaacgtttcaccaccaccgttacccaccgaatgaataaatttggaaactgactagtctcatcacagcaacctcaaaactgatgtggctaaatgctaatcaaaagacgatttttgaaatgtttgttttcagtggtgaaaatagatttttcttccagwgtgagatattacacttcatactagcatgaacacacttagatggcaacatataaatagataaacatgtttatttatatgcttggagagaaaagaatagttaacagtatcaaatttgtttctataattttgtcaaaa

SEQ ID NO: 563027 - DNA, 562 bp, Homo sapiens
aaactgcactttgaagactacacacagaatagaaagaatataggttttaaagtcagaaaaatttagatttaatggtttactctttaagtaaaacmataatttgagcccattgaatacctaaacattatgtttcagctactcttgtaagtgttgagcagtgaacaaatccaaacaaaaaaatctccactctcatgtcacttacatgtgaattgatataaatagattaaaagaaattaagtaaaatatatagaatgtcagttcgatgagtgctctggagtagaagatctcaagtgagaaaacagctaatacggagtttggcacattcaagaaataaaatggtaaagaagcagtgaggatacaaaggaacctcagactgctgtgtgaagaataaactgtagggactgcgtaagcagaataatggcctcccacatgtcaccttaaataacaaaaagaattttaaagatgcgatgaagataaggatcttgagatgtggagattatcctggattacccaggtgtgtccaacgtaatcataagggtacttataagtgaatgatggaggc

SEQ ID NO: 563028 - DNA, 592 bp, Homo sapiens
aaactatagtttgtttctttaatcatctttttttattttttatttttttgagaaagtcttactatatattgcccagactggtctcaaactgctttttaatcaactttttttatttttcatttttttgagaaagtcttactatatgttgcccagactggtctcaaactcctggaatcaagccatccttgctttgctttatcccaggagttaaaattttaagttttcactcaaccttttgagtagctgggattagaggtatatgccaccaaacccagctcactaatcatcttgactcaggatttttagaggatggcagctggctttgctttgaagaagactgaaattttacctctccttataataacaaataaaggtatctttttctctcaaaatgaaggccctatactatcatataggaactaaatatcatgggagagcacatgtacacctgtatcagaaggatttatgtacaacctctgataaatccagtttccaggaacttgctacttgctcagttaagtttcttgtatattcaataagttcccttamcaaaaatgaacagaattaattttttaattcttttttaaatttc

SEQ ID NO: 563029 - DNA, 491 bp, Homo sapiens
ctttatatagccatttctatcagcgtttcataggaaaactttggaaagttttactcaaaaacagaaaaaaatgagagaatatggataaaacataaataattacacacagtaagctaaaatagagggaaatacccacttctgtgaagccacatacacacacacattccatcccatgttaacataaaactatgttataaaacttttggcactgccccgaagtgtgtcataagcaagtgagcttctcagrggacaccatgcccttttccttttaatacatccagagcctacattagaattaaacacaatgcctgacaaactagtaggtgctcagtggtgctcattaaactgaacaatctccctccatgtcttttcacttagccagaagatgatgactttaggacaagacacaatagcactgaatatcatggtggatgtgagaaataaaagcagatcatcaaacacatgtttaatagacatcttctaacaagagt

SEQ ID NO: 563030 - DNA, 491 bp, Homo sapiens
ctttatatagccatttctatcagcgtttcataggaaaactttggaaagttttactcaaaaacagaaaaaaatgagagaatatggataaaacataaataattacacacagtaagctaaaatagagggaaatacccacttctgtgaagccacatacacacacacattccatcccatgttaacataaaactatgttataaaacttttggcactgccccgaagtgtgtcataagcaagtgagcttctcagaggacaccatgcccttttccttttaatacatccagagcctayattagaattaaacacaatgcctgacaaactagtaggtgctcagtggtgctcattaaactgaacaatctccctccatgtcttttcacttagccagaagatgatgactttaggacaagacacaatagcactgaatatcatggtggatgtgagaaataaaagcagatcatcaaacacatgtttaatagacatcttctaacaagagt

SEQ ID NO: 563031 - DNA, 620 bp, Homo sapiens
tctacaccaaatgggtaaaaattcaatgaaataatcctcagcaataaaaaggaataaactactaatacatgcaaaatgaatgaatctcaaaaacataatgcyaattggaagaagccagacagaaaagaggacatattatatttttcatttagtatgatgttctaaaacaaggaagactatggatggtaaatgaaaccagagctgtgattacctggagatgaggagtatgaattgactgggaagtgacctaagggatcttgctgatgaaaatgttctatacttagacagatgtttggattatattagtgtaggcagttgtgaatactcatggaaatttactcttaacatatgtacctttcactttaggtaaatcatgcatacattgttaaaaaatgttgtcactgagtattatttgctagactatgttaagtgcagtaaaactataaatttctgaaaagagagataggaattgtttaatagattcatcctcctccacaaagcatattagaatattgactttttaaagataaactcttaaaagaataataattctttcaaaaataaacatggaagcaacaattcactttaacgagattgaaatgttgttattgagtacagat

SEQ ID NO: 563032 - DNA, 444 bp, Homo sapiens
ttggctctgtgtttgtcatacacggcttttattacattaaagtatgtcccttccatgcctattttgctgagggttttaatcataaagggttgctggattttgtcaaatgctttttatgcatctattgagatgatcatgtgatttttatttttaattctgtttatgtggtttatcacatttattgaagtacatatgttaaaacatccccacatttcaggtattaagtccacttgatcatggtggattatctttttgatatgctgttggattctgttagctagtattttgttgaggatttttgcatctgtattcattagggatattggtctgtagttttcttttttttgttatgtcckttcctggttttcgtattagggtgatactggcttcatagaatgatttagggaagattctctgtttctctagcttgtggaatagtgtcaa

SEQ ID NO: 563033 - DNA, 318 bp, Homo sapiens
ctgggaaattcattgcaaaaagatcattgcctgggcacatactcatcaggttatctaaagttaagaaaaatgaaagaatctaaagagttgcaaggaaaaagccttgggtaatctataaaggaaaacctatcagtttaacagcrgatttctcagcagatccctacaagctaaaagggaatggggtcctatctttaacctcctaaacaaaatgattatcagccaagaattttagatccagcaaaactaagcttcataaatgaaggaaagacacagtcttttttagacaaacaaatgctgagcaaatttgccattaccaag

SEQ ID NO: 563034 - DNA, 440 bp, Homo sapiens
aaaagaagctccttaatgcataaatctcccaggaccaaaaaacaacaacacaataaaaaaacccaaggtactcatgcaacaaatagcataagtaatagaatggtacctcatatctcaatactaatgttaaatgtaaatggcttaaatgctccacttaamagatacaggatgacagaatggataacaatccaccaatcaaatatatgctgtctttaagagactcacccgacacataaggactcacataaacttaaggtaaaggtgtggaaaaagatattccatgcaaatatacaccataagcaagcaggagtagctatcagacaaaacaaagtttaaagcaacagcagtaaaaaaaggcaaagagagacattacatgatgaaaagacttgtccaacaggaaactatcacgatcctaaatatatatgcacctaacactggag

SEQ ID NO: 563035 - DNA, 654 bp, Homo sapiens
gaggagcaaatcaaaaattgcacacataactaatgagcccaaatctctcagtagggaattgaaaaagccagattcaaacagcaggactcccccactcaagtccacttttttccatttcatcaccccatgctatccttagtttggcaacgtgttttacaattttgaaaattaacaaatggaaaagtcgtttagaggaaagaaagatttttgtaatctgatgaaggctaaagcctttacttgaacactgaattttttatttcataacacatgaaatttttattgccttatagaaagccaaccataaagacaaataatgggctaaattgccayagtgataagttatttgttgaataagcaatgacatgcacaccacaaatgtcatacccacagtcatagtgactcatgatgaatttctaaataagatctagataaaaatattagaataggaaggcaaaaccaaatgtttttattggaatacctatttgaagaagtcctggaattcacctgtaaaaattcagatatcattcttcttgcccatttttcagattttaagattataaataaatttgtaattttggtataatacaaagcatgtagatgattattttagcaagattgatcatatgaattaaccaatttaaaatttcttcatta

SEQ ID NO: 563036 - DNA, 555 bp, Homo sapiens
ctgcctccagggttcaagcaattctcctgcctcagcctcctgagtagctgggattacaggcacccaccaccacgcccggctaatttttgtatttttagtagagacggggtttcaccatgttggccagtctggtcccaaactcctgacctcaggtgatctgcctgcctcggcctcacaaaatactgggattacagccgtgagccactgctcccagactattgagctacttctatctgccctatattatatcacagctgagttcatartgtaatagaagatgcagtcaaaagaaagaaaaaaaaatgagttaaggggcatgtatgtgagatcaaaataatcaggtgaaagctggaggcatgggaagggttaaatggttgtatttgtttttcctgttcaggatgggataaacaataaataattagaatgaatagaacttgttccagctttagtatttaggtaactttgctcttatcaactactgcataattaaacagataatataaatataattttcactataacattcctgaaagtgaggtcacggctttcattctc

SEQ ID NO: 563037 - DNA, 555 bp, Homo sapiens
ctgcctccagggttcaagcaattctcctgcctcagcctcctgagtagctgggattacaggcacccaccaccacgcccggctaatttttgtatttttagtagagacggggtttcaccatgttggccagtctggtcccaaactcctgacctcaggtgatctgcctgcctcggcctcacaaaatactgggattacagccgtgagccactgctcccagactattgagctacttctatctgccctatattatatcacagctgagttcataatgtaatagaagatgcagtcaaaagaaagaaaaaaaaatgagttaaggggcwtgtatgtgagatcaaaataatcaggtgaaagctggaggcatgggaagggttaaatggttgtatttgtttttcctgttcaggatgggataaacaataaataattagaatgaatagaacttgttccagctttagtatttaggtaactttgctcttatcaactactgcataattaaacagataatataaatataattttcactataacattcctgaaagtgaggtcacggctttcattctc

SEQ ID NO: 563038 - DNA, 555 bp, Homo sapiens
ctgcctccagggttcaagcaattctcctgcctcagcctcctgagtagctgggattacaggcacccaccaccacgcccggctaatttttgtatttttagtagagacggggtttcaccatgttggccagtctggtcccaaactcctgacctcaggtgatctgcctgcctcggcctcacaaaatactgggattacagccgtgagccactgctcccagactattgagctacttctatctgccctatattatatcacagctgagttcataatgtaatagaagatgcagtcaaaagaaagaaaaaaaaatgagttaaggggcatgtatgtgagatcaaaataatcaggtgaaagctggaggcatgggaagggttaaatggttgtatttgtttttcctgttcaggatgggataaacaataaataattagaatgaatagaacttgttccagctttagtatttaggtaactttgctcttatcaactactgcataattaaacagawaatataaatataattttcactataacattcctgaaagtgaggtcacggctttcattctc

SEQ ID NO: 563039 - DNA, 510 bp, Homo sapiens
tgttgataggttgatagactgcaatattaaaggaaaaaataagatgtaatccatttttcttatatataaataaaactttctttgacttagcaataaaaatgagatggaactaaaataatttacttgtattttcttccagaagctatttctttatttggtagataaacagattataactaacatctttcatcctacaatcactataaagaaaacttgatttcttaggagatatacctaatgctaaatgataagttaatgggtgcagcacaccaamatgacacatgtatacatatgtaacaaacctgcacgttgtgcacatgtatcctaaaacttaaagtataataataaaaaaaaaggccgagaaaaaaaaagaaagaaaacttgatttcttaataaatctaatattaaggtaatatttatgctatatggaactaaaatattttttatgaaaacttaccacatccttaaatatacttaaaatctgatttttattgaaaacagtaacaacaa

SEQ ID NO: 563040 - DNA, 605 bp, Homo sapiens
aacagtgcaaacttcacctgggaacttgttggaaatgtaaattcttggactgaatcagaagcccagagggtggagctcagagtttttttttttttttttgagacaaatcctcactctggttgcccagactagagtgcagtggcacattcttggctcactgaagctttgacctcccgggctcaaacaatcctcccacctcagcttcctgagtagctggtatgacaggcacctgccaccatgcctggctaatttttttattttttgtagagacgggtttcaccatgttgccccaccttcttgaactcctgagttcaagcaatctgcccgccttagcctcccaaagtgtggggattacaggcgtgggccactgtgcctggctgaggtttatatttaacaagccctctaggtcagcagtctccaaccttttggcaccaaggactggttttgtggaagacaattgttacatggataacggggatggcgtggcttgagaataaacatgtctcatctgagatcatcaggcgttagttagattctcataaggagtgtgcaacctagatccctcacatgtgcayttcacgataaggtttgcgcttctatgagaa

SEQ ID NO: 563041 - DNA, 635 bp, Homo sapiens
ttttctcttaaatattttacttctttttattgctattgtaaatatatttatattttctaagtggttattgcaaagaaaagctattaatttttgtatgctagatatgctgttgtgtagcttcaggcaagttaccctctctagagcttagtttccctaattaacctcatagaattattgtcaggaatgagttagcacacatagagtctarcataaggtaatggctcagtaaatgttacctattattgttattatattaatttggtaatccaccatcctactgaattgatttctcttgttgcttctactagttctgcactccattctcctgatatacagtatttgtgatatacagcatcttcctaatcttgataattttcttacttctttaatgttttatatggatttatctttttattacaatgcctaatactttcagaacaataataaataaaagtagtaagctgactggtatcttttgacaggcaagaatatttctactgtaaatgcaaataatggctacattaacattctatagcatatgtacaccaacaagtggttatggatattcctcaacttggggcacttaaattgtttcttgactttttcactgttaaaagtaccagtaaaagagtcat

SEQ ID NO: 563042 - DNA, 561 bp, Homo sapiens
attttttttttaattagccaggtatggtggtgcgtgcctgtagtcctagcttcttgggaggctgaggcaggaggattgcttaagccaagttgttcaagattacagtgaactatgatggcaacactgcataccagcctggctaacagagtgaaaccctatctctacaatatatatgtgattatatatatatatatatatatrtgtgtgtgtgtgtgtgtgtgtgtgtgtgtgtgtgtgtgtgtgtgtgtgtgtgtgtatgtatatatatattccacccatcctagttgttgtaaagcagaatcctattatgaacttgatttagatttccctgatgactaattagactgagtgtcttttcaataacatactgctcatttgtatgtcttctttggagaaatgtctattccctctttggagaaatgtcaattcctttgcccatctgttactgagttgtatttttattactgagctgcaagaattatttatatattctggacataaatccttcattaccaatatcttttacaaatatcttctctcattctgtgggttgtctttttg

SEQ ID NO: 563043 - DNA, 561 bp, Homo sapiens
attttttttttaattagccaggtatggtggtgcgtgcctgtagtcctagcttcttgggaggctgaggcaggaggattgcttaagccaagttgttcaagattacagtgaactatgatggcaacactgcataccagcctggctaacagagtgaaaccctatctctacaatatatatgtgattatatatatatatatatatatgtgtgtgtgtgtgtgtgtgtgtgtgtgtgtgtgtgtgtgtgtgtgtgtgtgtgtrtatgtatatatatattccacccatcctagttgttgtaaagcagaatcctattatgaacttgatttagatttccctgatgactaattagactgagtgtcttttcaataacatactgctcatttgtatgtcttctttggagaaatgtctattccctctttggagaaatgtcaattcctttgcccatctgttactgagttgtatttttattactgagctgcaagaattatttatatattctggacataaatccttcattaccaatatcttttacaaatatcttctctcattctgtgggttgtctttttg

SEQ ID NO: 563044 - DNA, 622 bp, Homo sapiens
agtaaaggcaacaaaaacaacaacaacaaaaatagagaaattgaactatgtccaaatttaaaacttttgttcttcaatagacaatatcaacaaaatgaaaagtcaacctacagaatgggagaaaatatcagtaaattctatctttgataaagggttaatgtctagaatatatatatatatatatatatatatatatawaaaactctataacccaacaagaaaataaccagattaaaaaataggcaaaggacctaagtggtaacctgtccccaaaaatataaagaaatggccaataagcacatgaaaagatgcttaaggtcactaatcactagggaaatgcaaatcaaaaccagaatgagatgccacttcacactcttcaataaggctatttttagaaaaacaaaataacaagcattggtgaggatgtggaacccttgtgcaatgctgctgagaacataaaaatggtacagctgctatgaaaaacagtagggttctcttcaaaaaaaaaccaataaaattagtatatgatccaaccacttcactcttggaattaaaaagcagagactaaaacatacatttgtaacacccgtgtttatagcagcattattcacaatagtcaaaa

SEQ ID NO: 563045 - DNA, 580 bp, Homo sapiens
gaagacactgaagcaatggtagtgactgtgatactaaaaaagaagagtaagtgaagtgaaacttcatttttcagttacgtttaactaacaaaataaagaagggaagacagtaaaggattggttagagagtagagagaaaattaagatagtgcagaagttttytagaaaaagatgcctgatggtgttcatatgaagtgactcagaaaagtcttttaaactcagtgaaaacagagaaatattctcaaaggcaaatatagttgcagaaaggggaaaatcatataaggaattaaggaagacatgggtgatcggtattagaaacaagctcaggccactatttctcagaaatttggggatttacaaaagtacaaaataggtaatctataaaacaggtgtacaaaagtaggtaatctagaggaagaaagcaaaggaccaggcacaagaatttaactgataaaaaaaaacaattccaagagcagcaaaggggacaaaaataggacccacagcacaaggaataagaaacaggtgtcttttcctaaaaaaaaaaaaaaaaaaaaaaaaaaaagaataaaaataaacagca

SEQ ID NO: 563046 - DNA, 580 bp, Homo sapiens
gaagacactgaagcaatggtagtgactgtgatactaaaaaagaagagtaagtgaagtgaaacttcatttttcagttacgtttaactaacaaaataaagaagggaagacagtaaaggattggttagagagtagagagaaaattaagatagtgcagaagttttctagaaaaagatgcctgatggtgttcatatgaagtgactcagaaaagtcttttaaactcagtgaaaacagagaaatattctcamaggcaaatatagttgcagaaaggggaaaatcatataaggaattaaggaagacatgggtgatcggtattagaaacaagctcaggccactatttctcagaaatttggggatttacaaaagtacaaaataggtaatctataaaacaggtgtacaaaagtaggtaatctagaggaagaaagcaaaggaccaggcacaagaatttaactgataaaaaaaaacaattccaagagcagcaaaggggacaaaaataggacccacagcacaaggaataagaaacaggtgtcttttcctaaaaaaaaaaaaaaaaaaaaaaaaaaaagaataaaaataaacagca

SEQ ID NO: 563047 - DNA, 580 bp, Homo sapiens
gaagacactgaagcaatggtagtgactgtgatactaaaaaagaagagtaagtgaagtgaaacttcatttttcagttacgtttaactaacaaaataaagaagggaagacagtaaaggattggttagagagtagagagaaaattaagatagtgcagaagttttctagaaaaagatgcctgatggtgttcatatgaagtgactcagaaaagtcttttaaactcagtgaaaacagagaaatattctcaaaggcaaatatagttgcagaaaggggaaaatcatataaggaattaaggaagacatgggtgatcggtattagaaacaagctcaggccactatttytcagaaatttggggatttacaaaagtacaaaataggtaatctataaaacaggtgtacaaaagtaggtaatctagaggaagaaagcaaaggaccaggcacaagaatttaactgataaaaaaaaacaattccaagagcagcaaaggggacaaaaataggacccacagcacaaggaataagaaacaggtgtcttttcctaaaaaaaaaaaaaaaaaaaaaaaaaaaagaataaaaataaacagca

SEQ ID NO: 563048 - DNA, 667 bp, Homo sapiens
tattaatataagagcataatgtaaaagttaagtcaagaaatgtaaaagctaagtcaaaatgtgaaaagctgagtcatttaagagaaaacagaagaatagcttcatgaaataggagtagtcaagaatgttttgggtagcaaattaaaatgctaatgaaaaaagaaaaaaagtgtagattacttttcattaaacatgaaaactctgctcatcaaaagacaccagtgataaaatgaggagactgttcaaaattattaataacattcaactgaaaaaaacttgcctctagtttatatagaaatgctcacaacattaagcatttcattaagcattaaaatgcttacattttatttatcaataaaaatgtaaagaaatttttaaaagtaggcataggacttgaatagaaaatgcacaagagaagaaacacaaaagtttgatgaagaaactctaaagtatttgatatcatttttcatgagggaaataggaaatcatgctgarataccactcgcaccttccagaagaaggctaaaattaaaatgactgaaaacaacaggaattggcaggaagagggaacaaccaaagctgccattttctgtcagagagaaagcaaacaagtaccatcactttagcaaaggacaaggcaaaacaaaatatcttctttgaccggtgg

SEQ ID NO: 563049 - DNA, 657 bp, Homo sapiens
aattgagttctctaagacaattttgcctaatgctaagttacaaaggatatctgtacattttaaacctagatttttttagttcttctgaaacaaaactttaaaagaagacagcgagcaagcgagagacaatcagaatgtaaagagaaaacaatgtaacacaaaggaatgtagctcttatgatcctttgtacttgtatgttatcagttgtcgtgtctcctctcatttctgattttgagtcttctctgtatttttcttagttattttagctaaagtttggaaattgtatcatttcacaaaaattaacttttgagtttcattgatctatttgcttttctactctctatrtcatttatttctattctgatctttgttatttccttctaaaagggcaaaatattagtgagaatacagaaaatacaaagaagattcatatcctgacctaatgatacactaatcaactgtaaaaaccacattatttctagtgcacataatacatttaccattctaaatcataaactggatcataaaataaaatcttaacaaatttcaaaagattgaactcatataaaagtatatttctggatacagtggaattaaactataaatcacttacaggagtatagctttttaaaatactcaaatatttaggaattaaac

SEQ ID NO: 563050 - DNA, 657 bp, Homo sapiens
aattgagttctctaagacaattttgcctaatgctaagttacaaaggatatctgtacattttaaacctagatttttttagttcttctgaaacaaaactttaaaagaagacagcgagcaagcgagagacaatcagaatgtaaagagaaaacaatgtaacacaaaggaatgtagctcttatgatcctttgtacttgtatgttatcagttgtcgtgtctcctctcatttctgattttgagtcttctctgtatttttcttagttattttagctaaagtttggaaattgtatcatttcacaaaaattaacttttgagtttcattgatctatttgcttttctactctctatgtcatttatttctattctgatctttgttatttccttctaaaagggcaaaatattagtgagaatacagaaaatacaaasaagattcatatcctgacctaatgatacactaatcaactgtaaaaaccacattatttctagtgcacataatacatttaccattctaaatcataaactggatcataaaataaaatcttaacaaatttcaaaagattgaactcatataaaagtatatttctggatacagtggaattaaactataaatcacttacaggagtatagctttttaaaatactcaaatatttaggaattaaac

SEQ ID NO: 563051 - DNA, 657 bp, Homo sapiens
aattgagttctctaagacaattttgcctaatgctaagttacaaaggatatctgtacattttaaacctagatttttttagttcttctgaaacaaaactttaaaagaagacagcgagcaagcgagagacaatcagaatgtaaagagaaaacaatgtaacacaaaggaatgtagctcttatgatcctttgtacttgtatgttatcagttgtcgtgtctcctctcatttctgattttgagtcttctctgtatttttcttagttattttagctaaagtttggaaattgtatcatttcacaaaaattaacttttgagtttcattgatctatttgcttttctactctctatgtcatttatttctattctgatctttgttatttccttctaaaagggcaaaatattagtgagaatacagaaaatacaaagaagattcatatcctgacctaatgatacactaatcaactgtaaaaaccacattatttctagtgcacataatacatttaccattctaaatcataamctggatcataaaataaaatcttaacaaatttcaaaagattgaactcatataaaagtatatttctggatacagtggaattaaactataaatcacttacaggagtatagctttttaaaatactcaaatatttaggaattaaac

SEQ ID NO: 563052 - DNA, 596 bp, Homo sapiens
tcctactacgttgcccaggctggtctcaaactcctgggcgcatacaatcttcctgctttggcctcccaaagtgctgggattacaggcgtgagccgctgtgctcagccttatttgtgactttttgactaaatttgttaacagatgaataaaactagaaaacaatagctgaatgtgttcaactattgttttctagttttattcaactgttgtaggaaaagatacttgatataatctcagtattttaaaatttgttaaggcagtgtgctgccaacacttgatccattctggagaatgtcaaaggtacacttgagaagaacatgcatcctactatcatctgggggaggtgcactgtatatgtctattagggccaattgattaatagtgtttttaagttctgtgtttcactattgattttctatctgattattacattcatttttgaaaggttggcatatagtctcctactattattgtgttactgtctgtttctcctttcaattctgtcagtgtttgctttatataattgaggactctgatgtcaggtacatatacacttataatggctacatcttcayggtaatttgtctcttctatat

SEQ ID NO: 563053 - DNA, 625 bp, Homo sapiens
tccactaggcagtgccccagtagggactctgtgtaggggctccaaacttacatttctcttccacactgccctaccagaggttgtccatgagggccccacycctgcagcaaacttcttcctgagcatccaggcatttccatacatcctctgaaatctaggcagaggtttccaaacctcaattcttcacttctgtgcacctgcaagctcaacaccatgtgaaagctgccaaaacgtggggcttccaccctctgaagaaacagcccaagctgtacattggccctttttagtcatggctagagcagctgggatgcagggaacaaagtctctacactctacacagcagagggatcctgggcccaggccacaaaaccattttttccccctaaacctccaggtgtgtgatgggagtggcggccacaaaggcctctggcataccctgaagacattttcttcattgtctttgtaattaacttttgactcctcattacttatgcagatttctgtagctggcttgaatttctactcagaaagtgggatttttcttttctattgcattgtcaggctgcaaattttccaaacttgtatgctctgtttctcttttaaaactaaatgcttttaacagcac

SEQ ID NO: 563054 - DNA, 360 bp, Homo sapiens
tggtggttttgatttgcatttctctaatgatcagtgatgtagggaaaagaaagagatatcagactgttactgtgtctatgtagaaagggaagacataagagactccattttgaaaaagacctgtactttaaacaattgctttgctgagatgttgttaatttgtagctttgccccagccactttgacycaacctggagctcacaaaaacatgtgttgtatgaaatcaaggtttaagggatctagggctgtgccttgttaacaaaatgtttacaagcagtatagttggtaaaagtcatcgccattctctagtctcaataaaccaggggcacaatgcactgcggaaagccgcagggacctctg

SEQ ID NO: 563055 - DNA, 360 bp, Homo sapiens
tggtggttttgatttgcatttctctaatgatcagtgatgtagggaaaagaaagagatatcagactgttactgtgtctatgtagaaagggaagacataagagactccattttgaaaaagacctgtactttaaacaattgctttgctgagatgttgttaatttgtagctttgccccagccactttgacccaacctggagctcacaaaaacatgtgttgtatgaaatcaaggtttaagggatctagggctgtgccttgttaacaaaatgtttacaagcagtatasttggtaaaagtcatcgccattctctagtctcaataaaccaggggcacaatgcactgcggaaagccgcagggacctctg

SEQ ID NO: 563056 - DNA, 360 bp, Homo sapiens
tggtggttttgatttgcatttctctaatgatcagtgatgtagggaaaagaaagagatatcagactgttactgtgtctatgtagaaagggaagacataagagactccattttgaaaaagacctgtactttaaacaattgctttgctgagatgttgttaatttgtagctttgccccagccactttgacccaacctggagctcacaaaaacatgtgttgtatgaaatcaaggtttaagggatctagggctgtgccttgttaacaaaatgtttacaagcagtatagttggtaaaagtcatcrccattctctagtctcaataaaccaggggcacaatgcactgcggaaagccgcagggacctctg

SEQ ID NO: 563057 - DNA, 565 bp, Homo sapiens
cttaagctgataagcaacttcagcaaagtctcaggatacaaaaccaatgtgcaaaaatcacaagtattcttatataccaataacagacaaacagagagccaaattatgagtgaactcccattcacaattgcttcaaagagaataaaatacctaggaatccaacttacaagggatgtgaaggacctcttcaaggagaactacaaaccactgcgcaacaaaataaaagaggagaagcttctgttttarggtctcaataattaactcaggaaaattaaataatattccaggcaggaaagctgataagggaatgaagcattccatattattaattataacagactagaacacttagtggtaaaaaaaaattacaagagcaagtttcatagaaattagggaaataaattagttgaaggaagaattaagaaagccctagtttagagcactatgtcatctaaagcaagtttctgaaactttaatattccttctgatcatctggtgctcttgttgaaatgaagaatctgactcagctggtctggggtggagcttggaattctgtatttctaac

SEQ ID NO: 563058 - DNA, 565 bp, Homo sapiens
cttaagctgataagcaacttcagcaaagtctcaggatacaaaaccaatgtgcaaaaatcacaagtattcttatataccaataacagacaaacagagagccaaattatgagtgaactcccattcacaattgcttcaaagagaataaaatacctaggaatccaacttacaagggatgtgaaggacctcttcaaggagaactacaaaccactgcgcaacaaaataaaagaggagaagcttctgttttaaggtctcaataattaactcakgaaaattaaataatattccaggcaggaaagctgataagggaatgaagcattccatattattaattataacagactagaacacttagtggtaaaaaaaaattacaagagcaagtttcatagaaattagggaaataaattagttgaaggaagaattaagaaagccctagtttagagcactatgtcatctaaagcaagtttctgaaactttaatattccttctgatcatctggtgctcttgttgaaatgaagaatctgactcagctggtctggggtggagcttggaattctgtatttctaac

SEQ ID NO: 563059 - DNA, 608 bp, Homo sapiens
ccaggcatggtggctaatgcctgtaatccaagcactttgggaggctgaggcaggcagatcatctgaggttaggagtttgaggcctgtctgaccaacatggtgtaaccccatctctactaaaaatacaaaattagctgggcgtgctggcgcatgcctgtaatcccagctacttgggaggctaaggcaagagaatcgctygatcccgggaggcggaggttgcagtgagccgagatcgccctattgcactccagcctgggcaacaagggtgaaactccatctgaaaacaaacaaacaaacaaacaaaatctaatagtgcccattttttaagggccatagacagatgaatttggatcttaatgtcacttgaaaagtgtatcgaaggaaaagtgagcaaatcttaagtgtacaactcaatacattttttgcaaaaggaatatacctgaagatccaacacctagatcaagaaacaacatttggtgcacaccagagactctcctcatgtcctctttcaggtactgtatcctcctcagagcgtttcctcccacttttatataaatgtgtattagtttttcagggctggcataataaaatacgatagattaggtggc

SEQ ID NO: 563060 - DNA, 596 bp, Homo sapiens
ataataagttttgatatctggcaatttaaaaattctagttttgtcttccttggctaatcttggccctttgtatttctgtacaaattttagcttgttaatttttatattaaaaaaagactactgggattttggttgtgattaccatgaatatccagattaatttgaaaattgacatccttataatattgagtcttccatgtatgagcatgatgcatctctctccatttatttttgtttgctttatttcctttamatactattttgtagatttttggtgtagatatcacgaacatcttttgttagattttattctgagtatttgagatatttaattctcttttaaatgttataattcttattttttatttgttcattatggtagcataatttgttcttgtaaaataactctgaattcagtaacattgctaaatttactaattaaatctaatagttttctgcagactctttaaaaacattattttcattttaaatgtatttcatcatttattaaaagaaatgaattaaaattattttcattgatatttctagtgaaaataaaattggaatttttattttaaaatattaattgaataata

SEQ ID NO: 563061 - DNA, 533 bp, Homo sapiens
tttgtttcagaaaaaaattgtttataacttgtaagatctgtaacttaattgttttctcttactggtaagggcatgttcatgctaacagtagccctatagctgtggttacttatcttaattacagccaagatttatttcagcttgagtgttttataagcagattagaattttaaaattttcacagccagtcttcttgcattatactctttttaaattcaagcatgtwtcatattataagaagctaaccttaaattatagcccttgttttgttaaatattcagtattctaggaatttgaaattctcaaatgtagtctttaaaactctgagtttatctgataaggattttattattattgttatttacatatgaatacaggaacaaaatgtgatttaagtaagtcatggcctagaaagggatttgtaatgtcttggccctatttaagaacttttacccatgcctcatgttctaggatttctacttgatccagcttggaaatctgaataactcatgatattgggaaatttccatggc

SEQ ID NO: 563062 - DNA, 557 bp, Homo sapiens
ggagcacatataccctttccctgtggtatataacccttgggtctgggaagtaacagtgtggagatctgtctgtcttgctgcctttcacaaccatgcttctgtctgtaagttccctcaatatgtcacccaatattgacaaaatgaatttgtctgcaatttgttcaccttcattcttgaagaatattgtattttggtagagaactytaggttggcatgtatttttaagcatattaaaatattttacgtgttcagcttccttttttctgtagatagattagctgacagagtaattgttgctactttgaagttaatcctctcttttctacctcttaagatattttcttcatctttaattttctgtaggcttaccatgatgtatttagatgtagattttttttatttgtcatgcttccagttttgtaagatctcttgagtccatggcttaatgtcctcaataaattttggaacgtttttagtccgtattgtttccaataatgcaattatccttttctccttctctttttgttttgttccagttacccaaaataataaaccat

SEQ ID NO: 563063 - DNA, 536 bp, Homo sapiens
agaattagtaatagcatgcataaagagacagtcacatwgtagttgttcactttgtattagcagttgttatctacacagtgaaaggcttttaacaagtgattttttttttttttttttgagactgagtctcactctgtctctcaggctggagtgcagtggcacattctcagctccctgcaacttccaccatctgggttcaagcgagtctcgtgccgcagcctcccgagtagctggaactacaagtgtacactgccacacccggctaatgtttgtgtttttagaagagacggggtttcaccatgttagccatgctggtcttgaactcctgacctcaggtgatccacctgccttggcctcccaaagcgctgggcttacaggtgtgagacattgtgcccggccttaacaagtgaatttcaaggttgctttctttgtcatgtttctgtgatctctatgtgatatatttgctcagaatatcatagaattgcagagtccaagggaaccttagaggttttctagtccactccctgttgagggca

SEQ ID NO: 563064 - DNA, 471 bp, Homo sapiens
agctccccaaacatcactaacaccacttgctaataaaacaaagcagagtttatttcttaccaatgtaagggaaaatgctaccttgcaaagcttccgcagcgtctcagagggagaagtcaaggtcagaatgtactgataattggacgtttggtttatggcaggcctttcagtgcaggcacttgactgatattgaatcagaatcatgatacaacactttagaatttgtggaaacagtaaacagagatttcgaggtgagagattcaaagaatcttarggcacaaattctctgtttatgtttttctttgaaaagttgacaagcgtttcaggtgattcctgtactgaacaactaaataatattcttaggcagcagaatgctggaaaaataaaatcatgttgctgaagacatagcaaagtcatgtcaatataaagataaaggtgtgatttcagttttcagggtccagggtgagtgtg

SEQ ID NO: 563065 - DNA, 506 bp, Homo sapiens
actatttttctctctttatctgtttttggctactaagtatttattttatttattgatggtttttgagaccagagtctcactctgtcgcccagactggagtacattggtagtttcgtaactcactgtaaccatgaagtcctggccttaagggatcctccgatctcaggcctggtctttttttttttttttttttcctttcttttttttttctgagacagagtcttgttctttttcccaagatgactgcagtggtgtgatcatggctccctgcagcctgaaactcccaraatcaagtgatcctcccaccacagcctccagaggagctggggctacaggctcatgctaccatgtccagctttttttttttttttaagtttttgtagagatggggtctttttttaagtttttgctgtgttttccaggttggtcttgaactcctggacttaagcaatcctcctgccttggcccccaaaagtgctgagattacaggcatgagccaccacgcc

SEQ ID NO: 563066 - DNA, 547 bp, Homo sapiens
gactttaatcagtaactcaactayactaattaaatattttggactgataaatcttaccttaactcctttatgattgtcaataatgcagtaatagtaatataatcagtagaattattttaaaaattaaccctttctgaagtagcacaaacattctgagaaaaggatggctaaaaaggataggtgtttccacaatcatagaaaccagtctgtctcttgtaatcatctatatattattgtccaaagccaggaatcccacacatgtacaattaactgggaagccacttcatgaatattcagtttgatgtatacgagtaaacttttggaagttgaaacaaggcagcaactagctcttacacaagtcattttacaatctaaagaaggaagattctgtggttgttaggcatttgactttttttctgtatttatgttttattatttattatttctgatattgattgcgaactgaaaaagattaaatttaatttcttacttatgggaacataaacgtgggagagtagaatcaaattatcctattctgaatatcaat

SEQ ID NO: 563067 - DNA, 570 bp, Homo sapiens
ggattccctcatatggatactgatctgatgaaatggaatctctatgggtgggtctcagatcagtatttttaagaaacataccaaaggatttatgtgcatgatacaatttgagaaccatcaatctagcagagaaaatacaagctcttttgctgagtatggtaagcttactcttcacttttcagtttcatcttttgcattctctcttttgtacactcacttctctgccctcttctctttttttcttcctccctccctcacttcctccctccctccctccctcacttcctctctccctccctcccttcctccctccttccctcctttcctccctccttccttcatccttgcttcsttccttcctttcattcctttttgagacagggtctctctctgtcactcaggctggagtgcagtggcaggatctctgctcactgcaacctcaacctcccaggctgaagccatcctcccacctcagccttctgagtatctggcatgtgctaccatgcccagctaatttttaaaatattttttgtagagatgatgttttgccatgttgcccttgctggtttt

SEQ ID NO: 563068 - DNA, 449 bp, Homo sapiens
tttggccgtttgtgtggggtggcatagctcagtgaaggttttggtttcctaggaggtgaggcaccacatcagcttaggccttgcaggcatggctgcttgaaatgactaatattctatttcttctgaaaggagggcgttgcattarctcaggtgtcaggaggcatgactgtttggctaggtcaagacagtagtaacccagaagtgggacactgcattagctcaggccctgagaggtgggactgcttgactcaaccatgattttatttcccatagaagccactgtttcagctcaagtaccctctgtggctatttggcttggctaaaatgttgtgtttccaggacacaaaatgtagccatctggatttctgtgctctataggatttttgctattgttttgctttactcctgggcttttctttggttttttttttcaaaatgtagtcgttttt

SEQ ID NO: 563069 - DNA, 449 bp, Homo sapiens
tttggccgtttgtgtggggtggcatagctcagtgaaggttttggtttcctaggaggtgaggcaccacatcagcttaggccttgcaggcatggctgcttgaaatgactaatattctatttcttctgaaaggagggcgttgcattagctcaggtgtcaggaggcatgactgtttggctaggtcaagacagtagtaacccagaagtgggacactgcattagctcaggccctgagaggtgggactgcttgactcaaccatgattttatttcccatagaagccactgtttcagctcaagtaccctctgtggctatttggcttggctaaaatgttgtgtttccaggacacaaaatgtagccatctggatttctgtgctctataggatttttgctattgttttgctttactcctgggcttttctttgkttttttttttcaaaatgtagtcgttttt

SEQ ID NO: 563070 - DNA, 573 bp, Homo sapiens
ttgacaatcatctttgcaatgagaggctttgctcctttctgaattatgcccaggagttttattagtttcatttgggtatcattaggtccttgtatcttgtctgtgttaaaggcctagctgtgttgctgcatgtggatcaacagggtgtctagtccttgttgggcagtgcctttgtctgagtccaccaaagtaccatcagtatagcagaaggacagagctctcttcaggggtgggactgtctgtaaaccatarcccatctctgcatggcagatagctaggggcttaggtggccttgcatggcagatacctgggagcttaggtgcgtgcgctctgctgtattggtggtggctgttttcaggtcactgtgagggacagggtctacagtgatgtggccacgtggtgccctgctccctcactaagttctacaggattgccttctttatcatgctaacctctgaagtccgcagtgaaatattattaaaacacccatacattctcagtataattacaccttgggaatgatatatgttacactgtgggattatatttccttgtgttttaaatatgattttt

SEQ ID NO: 563071 - DNA, 552 bp, Homo sapiens
gtttgagaccagcctggccaacatggtgaaatgctgtctctactaaaaatacaaaaattagtcagggagggtggtacatgcctgtaatcctagctacttgggaggctgaggcaggggaatcacttgaactcgggaggcagaggttgcagtgagctgagatcacaccattgcactccagactgggtgacagaatgagaccctgtctaaaaaaaaaaaaaaaagtaatagaaaccaaaatggaaaaaaaaaaaaaggacagtaaaggaaaaaaaagatatgtgcatttgaraaaaaaatgaaatcacatacttggaaatgaaaattgtctttgaaattaaaaactgagcagatcagttaaacagcagattcaatatattcaaggaaacaaagagtgaaatggaatttagatttgattaaatcacacagaacacaacacattatgtgtgtttggaaaagatggatgaaagcctaaaaggtatgatggatgcagggaagtggagaggttcagtacatatctagtaggagtcccagtgagagattataaaagagaga

SEQ ID NO: 563072 - DNA, 592 bp, Homo sapiens
cattaaaaaaaaaaagaaagaaagaaagaatgagatccagtcatatgtaacaacatagatggaactggagatcattatgttaagtgaaatgagccaggcacaaaaacataaacattgcatgttctcacttacttgtgggatctaaaaataaaaacaattgaactcatggacatagagggtagaaaggtggttacaggctgagcggggttgctcaggcctgtaatcccaggacgttgggaggccgaggcgggcagatcacgaggtcaagaactcgagaccatcctggccaatatggtaaaaccccgtctctactaaaaatacaaaaattggccgggcccagtggctcacrcctgtaatcccggcactttgggaggccgaggcgggcggatcacgagatcaggagatcgagaccatcctggctaacacggtgaaaccccgtctctactaaaaaatacagaaaattagccgggcgtggtggcaggcgcctgtagtcccagctactcaggaggctgaggcaggagaatggcgtgaacccgggaggcggagattgcagttagccaagattgcgcctctgcactctagcctggcagca

SEQ ID NO: 563073 - DNA, 592 bp, Homo sapiens
cattaaaaaaaaaaagaaagaaagaaagaatgagatccagtcatatgtaacaacatagatggaactggagatcattatgttaagtgaaatgagccaggcacaaaaacataaacattgcatgttctcacttacttgtgggatctaaaaataaaaacaattgaactcatggacatagagggtagaaaggtggttacaggctgagcggggttgctcaggcctgtaatcccaggacgttgggaggccgaggcgggcagatcacgaggtcaagaactcgagaccatcctggccaatatggtaaaaccccgtctctactaaaaatacaaaaattggccgggcccagtggctcacgcctgtaatcccggcactttgggaggccgaggcgggcggatcacgagatcaggagatcgagaccatcctggctaacacggtgaaaccccgtctctactaaaaaatacaraaaattagccgggcgtggtggcaggcgcctgtagtcccagctactcaggaggctgaggcaggagaatggcgtgaacccgggaggcggagattgcagttagccaagattgcgcctctgcactctagcctggcagca

SEQ ID NO: 563074 - DNA, 517 bp, Homo sapiens
acatacatatataccacattttctttatccactcatcggttgatagacacttaggttgctttcatatcttggcctttgtgaatagagccgtaatgaacatgggaatgaagatatctcttaaaaaaggaattgcaaatggcattcatttatgaaccaaatagttgttaatactacccattactaatttttaaaaatgggtgttttgatgtctcctagcttctttacttatacttgcacatttggctttggggtgttcatagggcaaaattcattctatcaaagaagaattttaaaatgtrtcaaccctttatctgaactctaaagaagtaatatttatcctaattgagaaaacattttggagcatgtacaaaaaacatgtttttgtgccttccctcaacctgtcatttatgtaagttagatagatccctcacttcaagctgattatctggagcatatggtactgggaaaacagataagtgtaggcttatctttttgatggccatgtatccatcaaaat

SEQ ID NO: 563075 - DNA, 570 bp, Homo sapiens
gaaatgctcttattatccccatattgcagayaaccaaactgaagctctcagaagttaaataacttgcccaagattccaaaatgtgtcagagctggaccccaacctggtgtgtctgatgtagagccgtgtttttaaactatgatgttatactccaatatcctaagtatttttggccatgtcatctatacatcataacatcacagccacttacgtttcatacttccacacttacatatcaaattgaatattttctacaatgatttaaaaatttcaggttgtacttcctccccacttttgggggaatgggagtatggtatattgtctattgaaatttctcaagattttttagtcaatttatttaaaggcatttcttacttccacgttaataataaaattcaaattctaatttttttttatttttttgagatggagtctaactttgtcacccaggctggagtgcagtggtgtgatcgtggctcactgcaacctccacctcccaggttcaagcgattctcctgcctcaacttcccaagtagctgggattacaggcgccagccaccatgcccagct

SEQ ID NO: 563076 - DNA, 583 bp, Homo sapiens
ttatccccatattgcagataaccaaactgaagctctcagaagttaaataacttgcccaagattccaaaatgtgtcagagctggaccccaacctggtgtgtctgatgtagagccgtgtttttaaactatgatgttatactccaatatcctaagtatttttggccatgtcatctatacatcataacatcacagccacttacgtttcatacttccacacttacatatcaaattgaatattttctacaatgatttaaaaatttcaggttgtacttcctccccacttttgggggaatgggagtatggtatattgtctattgaaatttctcaagattttttagtcartttatttaaaggcatttcttacttccacgttaataataaaattcaaattctaatttttttttatttttttgagatggagtctaactttgtcacccaggctggagtgcagtggtgtgatcgtggctcactgcaacctccacctcccaggttcaagcgattctcctgcctcaacttcccaagtagctgggattacaggcgccagccaccatgcccagctaattttttgtatttttagtagagac

SEQ ID NO: 563077 - DNA, 571 bp, Homo sapiens
tatgtctaccagaagttaatctgcagtgaagtcaatgcaacagagaaacatgatggcctaaaattattttactgccttctagcagattgcctaaaagaactgataaccatctcatttcttcataccttaggyggaaactatatagctgaaagggtccaacaaaacaaaaggaatctttgcatgttgatagaagaaaaaattaaagccttcagtttataaatgcatgccatttaacaatagttaactttgaattctaactaggcgctgggtattgtgcaatggaattttatatggtttggctctgtgtccccacccacatctaatcttgtagctcccataattcccacgtgttgtgggagggacccagtgggagataactgaatcatgggggcaggtctttcccatgctgttctcatgatagtgagtctaatgagatctgatggttttaacaagaggagttcccctgcacaagctctctttttgcctgccgccatccatgtaagatgtgacttgctcctccttgccttccgccatgattgtgaggcctccccagccacgtggaactgtaagt

SEQ ID NO: 563078 - DNA, 571 bp, Homo sapiens
tatgtctaccagaagttaatctgcagtgaagtcaatgcaacagagaaacatgatggcctaaaattattttactgccttctagcagattgcctaaaagaactgataaccatctcatttcttcataccttaggcggaaactatatagctgaaagggtccaacaaaacaaaaggaatctttgcatgttgatagaagaaaaaattaaagccttcagtttataaatgcatgccatttaacaatagttaactttgarttctaactaggcgctgggtattgtgcaatggaattttatatggtttggctctgtgtccccacccacatctaatcttgtagctcccataattcccacgtgttgtgggagggacccagtgggagataactgaatcatgggggcaggtctttcccatgctgttctcatgatagtgagtctaatgagatctgatggttttaacaagaggagttcccctgcacaagctctctttttgcctgccgccatccatgtaagatgtgacttgctcctccttgccttccgccatgattgtgaggcctccccagccacgtggaactgtaagt

SEQ ID NO: 563079 - DNA, 592 bp, Homo sapiens
cttgtgctattgtcatagttctaaataccttatgaaacctaacttttgaggttgttgtattatctttaaatagttgtgttttggggaattgtgagaagataaaaatggcttttatgtatctctgctyacatactatttctagtactttccttcatttcagagtttctaagttttcatctttaagaataccttttactatttgttttagtgcagttctactggtgatgagttaagtcatctgaatttttcttttagcacttctaagatgttattcctttgtcctctggtttccattgtttctgttggggagcctgttgtttctctgaatgtaatgcctgttttcctctggctgcttttaagatttttctttttttttttttttcttttttttttttagacagagcctcactctgtcaccaggcttgagtgcagtggcacgatcttggctcactgcaacctctgcctcctgggttcaagcaattctcctgcctcagcctcctgagtacctgagactacaggcacgtgccaccacgcccagctaatttttgtatttttagtagagacggggtttcaccatgttggccaggatggc

SEQ ID NO: 563080 - DNA, 592 bp, Homo sapiens
cttgtgctattgtcatagttctaaataccttatgaaacctaacttttgaggttgttgtattatctttaaatagttgtgttttggggaattgtgagaagataaaaatggcttttatgtatctctgctcacatactatttctagtactttccttcatttcagagtttctaagttttcatctttaagaataccttttactatttgttttagtgcagttctactggtgatgagttaagtcatctgaatttttcttttagcacttctaagatgttattcctttgtcctctggtttccattgtttctgttggggagcctgttgtttctctgaatgtaatgcctgttttcctctggctgcttttaagatttttctttttttttttttttcttttttttttttagacagagcctcactctgtcaccaggcttgagtgcagtggcacgatcttggctcactgcaacctctgcctcctgggttcaagcaattctcctgcctcagcctcctgagtacctgagactacaggcacgtgccaccaygcccagctaatttttgtatttttagtagagacggggtttcaccatgttggccaggatggc

SEQ ID NO: 563081 - DNA, 547 bp, Homo sapiens
tcactcacttctattggttctttgataatgccaatgaatagtctaaaatttctgcttactccagggactgaattaggtacagaaatctttatgtttactattcaagtttgcaggcatccttttaggctatttctagatgtctccttaattcaattttttctccattttaaatatcactattaattccttgagatatttttcaccaaccttacaaacaaaakgatcaagtcacaattcctcactttggcaatcttaaaactaaattcagatttatactatcccgttatactttaaaatcccatacaagaccaatttaacctagctctccctgtctaccaaaattcaaaattcaagctcctgggtaaactggaaggcttaattcttcccacatatgtgtattcttttttgttttttatttttacttttaagttcgagggtacatgtgcaggatgtgcaggttagttacatatgtaaatgtgtgccatggtgatttgctgcacccatcaacccgtcacctaggtattaagcccagcatgcattagctatt

SEQ ID NO: 563082 - DNA, 486 bp, Homo sapiens
taaaacttttatttttgagacagggtctcactgccacccaggctgaagtacagtggcacaatggtagctcactgtaacctcaaactcctgaactcaagtgatccccccgtatcagccccccaggtagctaggactacaggcatgcaccaccacacctggatcatatttttttagaatcagggtctcactatgttgcccagtctggtataaaatgcctgccctcaagtgaacctccctcggcatccaaaagtgctgggattttagtcatgagccattctgaccagcctaaactaaaactttgtaccctttaaccagcatctacccattccctgacayccctccccacccagcccctggtaaccaccattctattatctgattctaggagtttgattgctttttcagatttcatgtataagggagataatgcagtacttgtcctccaggaccttccatgttattgcaaatgacaggattttctttttt

SEQ ID NO: 563083 - DNA, 486 bp, Homo sapiens
taaaacttttatttttgagacagggtctcactgccacccaggctgaagtacagtggcacaatggtagctcactgtaacctcaaactcctgaactcaagtgatccccccgtatcagccccccaggtagctaggactacaggcatgcaccaccacacctggatcatatttttttagaatcagggtctcactatgttgcccagtctggtataaaatgcctgccctcaagtgaacctccctcggcatccaaaagtgctgggattttagtcatgagccattctgaccagcctaaactaaaactttgtaccctttaaccagcatctacccattccctgacatcyctccccacccagcccctggtaaccaccattctattatctgattctaggagtttgattgctttttcagatttcatgtataagggagataatgcagtacttgtcctccaggaccttccatgttattgcaaatgacaggattttctttttt

SEQ ID NO: 563084 - DNA, 486 bp, Homo sapiens
taaaacttttatttttgagacagggtctcactgccacccaggctgaagtacagtggcacaatggtagctcactgtaacctcaaactcctgaactcaagtgatccccccgtatcagccccccaggtagctaggactacaggcatgcaccaccacacctggatcatatttttttagaatcagggtctcactatgttgcccagtctggtataaaatgcctgccctcaagtgaacctccctcggcatccaaaagtgctgggattttagtcatgagccattctgaccagcctaaactaaaactttgtaccctttaaccagcatctacccattccctgacatccctccccacccagcccctggtaaccaccattctattatctgattctaggagtttgattgctttttcagatttcatgtataagggagataatgcagtacttgtcctccaggaccttccaygttattgcaaatgacaggattttctttttt

SEQ ID NO: 563085 - DNA, 530 bp, Homo sapiens
aaaatttacaatttgcctaagactatttttcaatatattttcttatgttttatctaaaagaaaaaatcttagcaatggtattttggaaatgataaccttctattttcatcttataagaataataaggtaatttccaagcacttaactgtccaaaacaccaaacaaaacaaaataaaagcaattaaagcatttgcggtttcaaattctcctttctttaagtttctgttatagtaagttgaaaatataaaccacaaaccctttttaaaaactatgtacagacaaacaactttttcttcacctttgaaaatgttggaactaacatttaaaagaaaaaaawggaaatttaagcaaaattttacttttgtaagtgcttgataagaatgtggtttttaactaccttgtgaaattttaatatggttaggaagagcttttttctatgaatcagccacatatcatatattttattttttcattactttataacacaaagaccaaaatcctgttctctctgctatcagttaataaaacat

SEQ ID NO: 563086 - DNA, 530 bp, Homo sapiens
aaaatttacaatttgcctaagactatttttcaatatattttcttatgttttatctaaaagaaaaaatcttagcaatggtattttggaaatgataaccttctattttcatcttataagaataataaggtaatttccaagcacttaactgtccaaaacaccaaacaaaacaaaataaaagcaattaaagcatttgcggtttcaaattctcctttctttaagtttctgttatagtaagttgaaaatataaaccacaaaccctttttaaaaactatgtacagacaaacaactttttcttcacctttgaaaatgttggaactaacatttaaaagaaaaaaaaggawatttaagcaaaattttacttttgtaagtgcttgataagaatgtggtttttaactaccttgtgaaattttaatatggttaggaagagcttttttctatgaatcagccacatatcatatattttattttttcattactttataacacaaagaccaaaatcctgttctctctgctatcagttaataaaacat

SEQ ID NO: 563087 - DNA, 526 bp, Homo sapiens
tcaaattcttgaaaatttaaaggttatttaacatctcttccctgtctgctttgtacagtagattccagatagagcagtaatacatgagagggtaggacgtggttgttttaacaggggaaaaaaactccaaaaacaaaaaccaagttttcctctgtttgatattatattaaaagcatatcttactgtggttgagaaaaatgtagacagagatgtttggggggttaactcttatgacttaaagcatttatataaatgcagaatataacagtctaaattttggcctgaataccaatttattggctctgtaaatttgtatttgttcaattttttaaaatacttgattacaactttaatttgcttcttctggtttatacataataagacttctgacttcatactaaatgacattttcttctaccttaccttgtttctactgtatgtatgtatatatacacgcacatatctctctctctcwcacacacacacacacacacacacacacacacacacacacacatatatacac

SEQ ID NO: 563088 - DNA, 594 bp, Homo sapiens
tgggtgtggtggctcacacctgtaatcccagcactttgggaggttgaggtgggtgggtcacctgagatcagaagtttgagaccagcctggccaacatggtgaaaccatctctactaaaaatgcaaaaattaactgggtgtggtggcacacacctgtaatcccaactcctggggaggctgaggcaggagaattgcttgaacccgggaggcagaggttgcagtgagccaagattgccccctgcactccagcctgggcgacgagtgagactcaatgtcaaaaaaaaaaaaaaatagaatccccttttttaacctaccaatatatataaaattatctagaagctatcccccctgtaactgtggcaagctcatttcatgaaagaaacaggtaagttaaatatttcattgtaccatgactggttgaataactttcaaagtgtttacctgcttaactgcatatcaacaaggaatgcagagataaactaaaaatttgaaaatgaatcgtgaattttagaatagttgaactagtaagtcatttgaaagaatgctgmagtatattttctaagttttgcactaattttgcatgaatacttttaca

SEQ ID NO: 563089 - DNA, 631 bp, Homo sapiens
ctctttttttgttttgagacaagatcttgctctgtcatcttgctttgaaaagtgtaatgaactgtaatgtaaggacctcaagtctaagagaatgaagtgctgtttagtaagatggtgcctttgtgtttcatgtccccccaaagcaacctcattttttttttttttgaggcaagatcttgctctgtcacccaggctggagtgcagtggcactgtcttggctcactgcagtctccacctcccgggttcaagtgattctcctgcctcagcctcccagtgctgggattacaggagtgagccactgtgcccggccaagcwacctcatttaatacatccaaatgcctccataggtgcctcttgattgtgaatttcagacattaaccactgacttcctgctgtcacagatgggcattggcctttcttaggaccaccctctccccctcaaggaaatgtaaccttttctcaagctttgacactgcatttcctttcatgagctttaaaatgtagagtgttttactgcttccttctaataaagaggttcgaatcatcaagaaaattttccttttctatttagaggaaaacttttagctgaattacttcatttttgagatatagagtgtttgtgtctgcaaga

SEQ ID NO: 563090 - DNA, 533 bp, Homo sapiens
gtaatcaattaaagatctgagtatgactatttgctgagtcctgtgagtccttctagtgaaccatcaaacctggggtggtcttgggaaaccttgacacaaatacattgtgtaagatttgtattaagttgatatgatatatgtaactgtaatcagatggctatttcacagaataattttccctaaactgtttcttttctttttttcccttgatatttgacttggagattcttgtatttctatatctatccacaggaataaagccataaaaggaataaatgacacaataatatcagaaaataatgtggaataagcagcaatcctattttaactgaataaaaaacagagaatctgggtgattgacaatatgttgtasaatatgaatgtttctagaaaaaataatgaaaaggtggtcaattttctgcaactcaactgggcttaattcctttttataataattgtgcaggtcaggtgcagtggctcacacttgtaaatcccagcattttgggaggctgaggcaggaggatcacttgaac

SEQ ID NO: 563091 - DNA, 329 bp, Homo sapiens
tcttacatggaagactatattctaggtactccaggatacacacaaatatgtttactgacctccagtagcctrtagtatgcaggagcttccaatgattatttaaacaactaaatagaaaaccttctgacattcaaaatttcagaataggatataaggactttgagtggttacttttattttttaagatgtagtcttgctctgtcacccaggctggagtgcaatggtgcgatcttggctcactgcaacctccgcctcccaggttcaagcgattctcccaccgtggcctcctgagcagctgggattacaggcatgcaccatcacgcctggtt

SEQ ID NO: 563092 - DNA, 326 bp, Homo sapiens
tctttcttgcaaattatagcgaataaaagtggggtattattgtcctataaaacagcaggaaaaattaataattcacaaaattacatatttctcaactgaactgaaaatcttctctarggtgctttgaacttcaacatacaatatacaaaggaagtaaatgaaaagcagtcccttccttctcactcctctgtgctttctgatgtgctgctttttgccttgcaaacaaccctcctctgtctccccggattaactgtggtcattgccaaaactcactttaaacatttaccagtcccaagaatccttgctttgatcacagcacttagcat

SEQ ID NO: 563093 - DNA, 326 bp, Homo sapiens
tctttcttgcaaattatagcgaataaaagtggggtattattgtcctataaaacagcaggaaaaattaataattcacaaaattacatatttctcaactgaactgaaaatcttctctaagrtgctttgaacttcaacatacaatatacaaaggaagtaaatgaaaagcagtcccttccttctcactcctctgtgctttctgatgtgctgctttttgccttgcaaacaaccctcctctgtctccccggattaactgtggtcattgccaaaactcactttaaacatttaccagtcccaagaatccttgctttgatcacagcacttagcat

SEQ ID NO: 563094 - DNA, 326 bp, Homo sapiens
tctttcttgcaaattatagcgaataaaagtggggtattattgtcctataaaacagcaggaaaaattaataattcacaaaattacatatttctcaactgaactgaaaatcttctctaaggtgctttgaacttcaacatacaatatasaaaggaagtaaatgaaaagcagtcccttccttctcactcctctgtgctttctgatgtgctgctttttgccttgcaaacaaccctcctctgtctccccggattaactgtggtcattgccaaaactcactttaaacatttaccagtcccaagaatccttgctttgatcacagcacttagcat

SEQ ID NO: 563095 - DNA, 326 bp, Homo sapiens
tctttcttgcaaattatagcgaataaaagtggggtattattgtcctataaaacagcaggaaaaattaataattcacaaaattacatatttctcaactgaactgaaaatcttctctaaggtgctttgaacttcaacatacaatatacaaaggaagtaaatgaaaagcagtcccttcmttctcactcctctgtgctttctgatgtgctgctttttgccttgcaaacaaccctcctctgtctccccggattaactgtggtcattgccaaaactcactttaaacatttaccagtcccaagaatccttgctttgatcacagcacttagcat

SEQ ID NO: 563096 - DNA, 567 bp, Homo sapiens
tgctttgaacttcaacatacaatatacaaaggaagtaaatgaaaagcagtcccttccttctcactcctctgtgctttctgatgtgctgctttttgccttgcaaacaaccctcctctgtctcccyggattaactgtggtcattgccaaaactcactttaaacatttaccagtcccaagaatccttgctttgatcacagcacttagcatggtacattgtaatcatttcactgtgtcccactgaaaccaagagcttcttgaggcaagggctgtatcttttgtctctatagccccaaaaccctaagacacagtagcaaacattttaagttttttacataaattaatgatctaaattattctcactaaagcagtgtttcttaaactatattccaaagaatatttgccttaccagaagtattataccccaagagaaagactccatgaccatctgcatttgagaagtattataaaactgtatgttatgtccaataatcaagaaatctcttgaattttacctaatccccatttgacaatactatttgtggcaaacattaacatttgaggaattaa

SEQ ID NO: 563097 - DNA, 542 bp, Homo sapiens
gagaaataggtttaaaaaacttaagaacaaatatttaaaaaaccaaagctcagtaagaaatactattctcaattataatggtaatcccgggaccccagggcagctctactttttaaatccatttttattggcttccacttaaagggctacttaaaattattttttattttagacaaaatataaatccraaataaaaacataatggcttatcaaaaaaattctcatactgatccatatgaattatttctcgcataataaaagccagtaagtcacttgcatttctaaggaagagcactgaggagaaagatgtaatgtctgcaatattcataaattatccaactataaccaggaataacctaaaaaggcttctaggcattcttatgggcagataattatttgtggtatatataaagaaaagagtttcaaaaacttcttaattctaaaattcaactccataactgagggatttatatactctatagactatatattataacaaatacgtgctgacttaaaaaccttgaaatctttatcgaaatata

SEQ ID NO: 563098 - DNA, 329 bp, Homo sapiens
tcttacatggaagactatattctaggtactccaggatacacacaaatatgtttactgacctccagtagcctatagtatgcaggagcttccaatgattatttaaacaactaaatagaaaaccttctgacattcaaaatttcagaataggatataaggactttgagtggttacttttattttttaagatgtagtcttgctctgtcacccaggctggagtgcaatggtgcgatcttggctcactgcaacctcygcctcccaggttcaagcgattctcccaccgtggcctcctgagcagctgggattacaggcatgcaccatcacgcctggtt

SEQ ID NO: 563099 - DNA, 542 bp, Homo sapiens
gagaaataggtttaaaaaacttaagaacaaatatttaaaaaaccaaagctcagtaagaaatactattctcaattataatggtaatcccgggaccccagggcagctctactttttaaatccatttttattggcttccacttaaagggctacttaaaattattttttattttagacaaaatataaatccgaaataaaaacataatggcttatcaaaaaaattctcatactgatccatatgaattatttctsgcataataaaagccagtaagtcacttgcatttctaaggaagagcactgaggagaaagatgtaatgtctgcaatattcataaattatccaactataaccaggaataacctaaaaaggcttctaggcattcttatgggcagataattatttgtggtatatataaagaaaagagtttcaaaaacttcttaattctaaaattcaactccataactgagggatttatatactctatagactatatattataacaaatacgtgctgacttaaaaaccttgaaatctttatcgaaatata

SEQ ID NO: 563100 - DNA, 542 bp, Homo sapiens
gagaaataggtttaaaaaacttaagaacaaatatttaaaaaaccaaagctcagtaagaaatactattctcaattataatggtaatcccgggaccccagggcagctctactttttaaatccatttttattggcttccacttaaagggctacttaaaattattttttattttagacaaaatataaatccgaaataaaaacataatggcttatcaaaaaaattctcatactgatccatatgaattatttctcgcataataaaagccagtaagtcacttgcatttctaaggaagagcactgaggagaaagatgtaatgtctgcaatattcakaaattatccaactataaccaggaataacctaaaaaggcttctaggcattcttatgggcagataattatttgtggtatatataaagaaaagagtttcaaaaacttcttaattctaaaattcaactccataactgagggatttatatactctatagactatatattataacaaatacgtgctgacttaaaaaccttgaaatctttatcgaaatata

SEQ ID NO: 563101 - DNA, 329 bp, Homo sapiens
tcttacatggaagactatattctaggtactccaggatacacacaaatatgtttactgacctccagtagcctatagtatgcaggagcttccaatgattatttaaacaactaaatagaaaaccttctgacattcaaaatttcagaataggatataaggactttgagtggttacttttattttttaagatgtagtcttgctctgtcacccaggctggagtgcaatggtgcgatcttggctcactgcaacctccgcctcccaggttcaagcrattctcccaccgtggcctcctgagcagctgggattacaggcatgcaccatcacgcctggtt

SEQ ID NO: 563102 - DNA, 542 bp, Homo sapiens
gagaaataggtttaaaaaacttaagaacaaatatttaaaaaaccaaagctcagtaagaaatactattctcaattataatggtaatcccgggaccccagggcagctctactttttaaatccatttttattggcttccacttaaagggctacttaaaattattttttattttagacaaaatataaatccgaaataaaaacataatggcttatcaaaaaaattctcatactgatccatatgaattatttctcgcataataaaagccagtaagtcacttgcatttctaaggaagagcactgaggagaaagatgtaatgtctgcaatattcataaattatccaactataaccaggaataacctaaaaaggcttctaggcattcttatgggcagataattatttgtggtatatataaagaaaagagtttcaaaaacttcttaattctaaaattcaactccataactgagggatttatatactctatagactatatattataacaaataygtgctgacttaaaaaccttgaaatctttatcgaaatata

SEQ ID NO: 563103 - DNA, 627 bp, Homo sapiens
tataaaatgaaaacatacttttcatctgaatatatatataatatagttaatatttttcaagtaagttctcttttgttgtttttttttttctgaaacacaggcagttttaatttttagtttgctaaatcaaccttcagaatgtctgcttatgaggtcattcttaggaaggcttttgtcaacataaagtgtacctgcaaaataagcgtttgtgttttcttctggtactttactcatttgcatatgtaaaaatttcaatctgtattccatcaggaactttgtttgtgacataaaatttcattagttttcttcaaacagcagacttttttttattaataattcatcctttcctactcatcaatccttatgtatatcttacataatttyagtgtttctgggttgcctattctgttccatgcgtttatctgtcttttcagctgttagtaaacaattaattgtagaaattaatagcacactttgatatctagaggagcaagtgttttttcactccattatgaaattttttaaaatgtcatcacaatagcgaaagacagcaggtgtcatacaaaaatcttaaaaccttgatatttccattcggtctatgtaaaattgattaacacagaaagagct

SEQ ID NO: 563104 - DNA, 627 bp, Homo sapiens
tataaaatgaaaacatacttttcatctgaatatatatataatatagttaatatttttcaagtaagttctcttttgttgtttttttttttctgaaacacaggcagttttaatttttagtttgctaaatcaaccttcagaatgtctgcttatgaggtcattcttaggaaggcttttgtcaacataaagtgtacctgcaaaataagcgtttgtgttttcttctggtactttactcatttgcatatgtaaaaatttcaatctgtattccatcaggaactttgtttgtgacataaaatttcattagttttcttcaaacagcagacttttttttattaataattcatcctttcctactcatcaatccttatgtatatcttacataatttcagtgtttctgggttgcctattctgttccatgcgtttatctgtcttttcagctgttagtaaacaattaattgtagaaattaatagcacaytttgatatctagaggagcaagtgttttttcactccattatgaaattttttaaaatgtcatcacaatagcgaaagacagcaggtgtcatacaaaaatcttaaaaccttgatatttccattcggtctatgtaaaattgattaacacagaaagagct

SEQ ID NO: 563105 - DNA, 627 bp, Homo sapiens
tataaaatgaaaacatacttttcatctgaatatatatataatatagttaatatttttcaagtaagttctcttttgttgtttttttttttctgaaacacaggcagttttaatttttagtttgctaaatcaaccttcagaatgtctgcttatgaggtcattcttaggaaggcttttgtcaacataaagtgtacctgcaaaataagcgtttgtgttttcttctggtactttactcatttgcatatgtaaaaatttcaatctgtattccatcaggaactttgtttgtgacataaaatttcattagttttcttcaaacagcagacttttttttattaataattcatcctttcctactcatcaatccttatgtatatcttacataatttcagtgtttctgggttgcctattctgttccatgcgtttatctgtcttttcagctgttagtaaacaattaattgtagaaattaatagcacactttgmtatctagaggagcaagtgttttttcactccattatgaaattttttaaaatgtcatcacaatagcgaaagacagcaggtgtcatacaaaaatcttaaaaccttgatatttccattcggtctatgtaaaattgattaacacagaaagagct

SEQ ID NO: 563106 - DNA, 627 bp, Homo sapiens
tataaaatgaaaacatacttttcatctgaatatatatataatatagttaatatttttcaagtaagttctcttttgttgtttttttttttctgaaacacaggcagttttaatttttagtttgctaaatcaaccttcagaatgtctgcttatgaggtcattcttaggaaggcttttgtcaacataaagtgtacctgcaaaataagcgtttgtgttttcttctggtactttactcatttgcatatgtaaaaatttcaatctgtattccatcaggaactttgtttgtgacataaaatttcattagttttcttcaaacagcagacttttttttattaataattcatcctttcctactcatcaatccttatgtatatcttacataatttcagtgtttctgggttgcctattctgttccatgcgtttatctgtcttttcagctgttagtaaacaattaattgtagaaattaatagcacactttgatatctagaggagcaagtgttttttcactccattatgaaattttttaaaatgtcatcacaatagcgaaagacagcaggtgtcatacaaaaatcttaaaaccttgatatttccattcggtctatgtaaaaytgattaacacagaaagagct

SEQ ID NO: 563107 - DNA, 567 bp, Homo sapiens
ctcactacagaaccaataatataagtagagaaacaatctctcctaaaaactatatgataccaaaataataagtttccaagaagaaaagctatatgctatgtgccgaacctttttgcaactaaaagttaccaggattccatgattactgcaaataatttgatccactgaagagttatacaggcataaatattatgaaagtcacactcacaggatttaaaactcaaagtattagtatttatccaaataaagcttaatcaaatttcatatttcctytattggagaaagcatttcctaatgtgattttcctgtcactacttattttccagttcattttttgtcagctcctaccctgtcacggtacttatcaatctttgttagttaccaaagttaaacaaattttttcaatcaactagccatatatatgtttttctctgacccactttccgttaccaccataaaacaatgacagataaaccactgctaagtttgaaaagtaaatactatgcaaaactacattcagagtgagaaaattaattttacaagagaccaatttaccttagcagcaac

SEQ ID NO: 563108 - DNA, 567 bp, Homo sapiens
ctcactacagaaccaataatataagtagagaaacaatctctcctaaaaactatatgataccaaaataataagtttccaagaagaaaagctatatgctatgtgccgaacctttttgcaactaaaagttaccaggattccatgattactgcaaataatttgatccactgaagagttatacaggcataaatattatgaaagtcacactcacaggatttaaaactcaaagtattagtatttatccaaataaagcttaatcaaatttcatatttcctctattggagaaagcatttcctaatgtgattttcctgtcactacttattttccagttcattttttgtcagctcctaccctgtcacggtacttatcaatctttgttagttaccaaagttaaacaaattttttcaatcaactagccatatatatgttttyctctgacccactttccgttaccaccataaaacaatgacagataaaccactgctaagtttgaaaagtaaatactatgcaaaactacattcagagtgagaaaattaattttacaagagaccaatttaccttagcagcaac

SEQ ID NO: 563109 - DNA, 515 bp, Homo sapiens
ggtaattaatgcagtaagaactcttccctttgtatttattagatgtaaagaagaataaatttattaaaatttggtatctacaagtgaactgcagtatacaagtcatcctagccaaaccctatgagattgagtaaaaatggtattgttagcagaacaggtgtgatgagtcaacagtgtcaaagagcatgatttctggaccaaaatatgaggagcagttagaggatacagtagtaccccttatccactgtatgtgcggaaagacatacttgacatgtttttctctgctctcacgccacagcaacaatcatcaacaaagaaggcttctgtgaccaaatgtgtggagagtttttccccaccaamaagcaagcaatcattcctgctgatggcacgattcaattctcacaccctatcttcagattacatcagatttaatttataaattaaactttatcatagatatgtatgtatagaaaaaacagtttgtgattcagtactattcatggtttcttgcatcc

SEQ ID NO: 563110 - DNA, 576 bp, Homo sapiens
gcaacatcctggcattagaggaaattcttaaccacatttctttccaccagcaacaggggtagcgcaggcgctgtcccatgggtatttttccactcctgagacctgccctctctatctggctaaccagcctctaactgccttctctctcagaaccaaccctgcaacatcttgatctcagacttctgggacaatacataccttgtttaagctacttggtctgtggtactttgttacagcagccctcaaaaacgaatccacactctgtgagagaggagttattatctgttttgcggatgaggacactgaggctcagagaggttggatgttcccctcaaaggccctcatatccagtaagaggcagggattttggcttccatgaaattttccactgcactgagctgctcctctcgaggcagtgagaggtttggggtccctggggttttcccacacctggcacaggctgcactctcgcgctgtaaacagagaaggctctgtaattaggattattctccactcttctgtggttaggtaacaatgctgccaattatctycctggtgcttacatgggacagagca

SEQ ID NO: 563111 - DNA, 579 bp, Homo sapiens
ctcctgccctcctatcactcagtcctattttctcccaaggctggtcatagaaactagaatccctcttcgtacagtgggtcatagaaaccagaagccccttttcccaatgccagccataaaatctaaaaatattactctaattttttctccacctttctgtgtaaaagctggccayaaagaaattatctgacttatcttgtttgactgtaggccgtaagatccccatttcaattgccccaaacccaaaaggagaagaatgcatgctcagaaaggcacagaagaatctagacaggcagggattgctgaattttcccactcagtctattaacattagatcataccgtgtttgtcctatcatatttctacacagctgtctatactttgttaaacctaggcacaaaaatggacaatttcctgtatatctttgagtcttcattctgaaggctcctatgtatacacgttaaataaatttgtatgccttttcttctattaatcaatctgctcatgtcagtgattttcagtgaatttccagggagccgagggatgtggtctccacattcccctattgcaatagcccta

SEQ ID NO: 563112 - DNA, 579 bp, Homo sapiens
ctcctgccctcctatcactcagtcctattttctcccaaggctggtcatagaaactagaatccctcttcgtacagtgggtcatagaaaccagaagccccttttcccaatgccagccataaaatctaaaaatattactctaattttttctccacctttctgtgtaaaagctggccataaagaaattatctgacttatcttgtttgactgtaggccgtaagatccccatttcaattgccccaaacccaaaaggagaagaatgcatgctcagaaaggcacagaagaatctagacaggcagggattgctgaattttcccactcagtctattaacattagatcataccgtgtttgtcctatcatatttctacacagctgtctatactttgttaaacctaggcacaaaaatggacaatttcctgtatatctttgagtcttyattctgaaggctcctatgtatacacgttaaataaatttgtatgccttttcttctattaatcaatctgctcatgtcagtgattttcagtgaatttccagggagccgagggatgtggtctccacattcccctattgcaatagcccta

SEQ ID NO: 563113 - DNA, 629 bp, Homo sapiens
tgtctgcttctggtgtgggcctctggaagcttttactcatgggaagacaggtagcaagtgagagaaagaaagaggtgtcagactcttttaaacatctgatctcatgggagctaatagagtgagactgactcattacaattaaagggcaccaatccatccttgaggaatcttccccatgtaaaaaaaagcattctaccaggccccacttccaacattaggaatcacatatcaacatgagatttcgaggagaaaaataaccaaattatatcagaccaataatgagtaatgagatggaatcaataataaaaagtatcctatgaaaaaaaagcccaggacctgattacttcactgctaaatgttaccaaacacttaatttctttcaaaatattccaaaaaatttaggaagaaggaaatttttcaaattcattctattatgyaagcattatcctcacaccaaaactagaaaaagacacacaataaaataaaactatatgtcactatcactaataaaaataggttaaataatcctcaacaaaatactagcaaacaaattcaacacacatttaaaatctcattcgctatgctctagtgggatttatcccagggatgcaagtatagtgcaatataca

SEQ ID NO: 563114 - DNA, 611 bp, Homo sapiens
catgctattttattatttttttaaatttatttttatttatttttttgagatagaggcacactctgtcgtccaggctggaatgcagtgacgtgaacttggctcactgcaacctccaactcccaggttcaagtaaktctccagcatgagcctcttgagtagctgggaccataggcatgtgtcaccatgcctggctaattcttgtatttttagtaaaaatggggtttcaccatgttggccatgctggtttgaactcctgtcttcaagtgatctgcccacctcgtcctcccaaaatgctgagattaccaggcatgagacaccacactcaggcaatacatgctatttaaatctttctacctacctaggcatctctattgaaatatatttatgcttatatgtaatgtactatacacatatatatgtaacatatatacacatatgtaatatagtgcagatatacacatatatgtatatactatatagtatattgtgcatatggtatatacatatataagtctatacaggtatattgcatatacacctatatacatatatactatatgcactatatactacatatatacacataggcctatatatacacacaatatatg

SEQ ID NO: 563115 - DNA, 611 bp, Homo sapiens
catgctattttattatttttttaaatttatttttatttatttttttgagatagaggcacactctgtcgtccaggctggaatgcagtgacgtgaacttggctcactgcaacctccaactcccaggttcaagtaattctccagcatgagcctcttgagtagctgggaccataggcatgtgtcaccatgcctggctaattcttgtatttttagtaaaaatggggtttcaccatgttggccatgctggtttgaactcctgtcttcaagtgatctgcccacctcgtcctcccaaaatgctgagattaccaggcatgagacaccacactcaggcaatacatgctatttaaatctttctacctacctaggcatctctattgaaatatatttatgcttatatgtaatgtactayacacatatatatgtaacatatatacacatatgtaatatagtgcagatatacacatatatgtatatactatatagtatattgtgcatatggtatatacatatataagtctatacaggtatattgcatatacacctatatacatatatactatatgcactatatactacatatatacacataggcctatatatacacacaatatatg

SEQ ID NO: 563116 - DNA, 588 bp, Homo sapiens
tttgttccctatctttgttctccatctcccatgattttactatcaatacctaatgcttcatcatgattaagatacatgctattttattatttttttaaatttatttttatttatttttttgagatagaggcacactctgtcgtccaggctggaatgcagtgacgtgaacttggctcactgcaacctccaactcccaggttcaagtaattctccagcatgagcctcttgagtagctgggaccataggcatgtgtcaccatgcctggctaattcttgtatttttagtaaaaatggggtttcaccatgttggccatgctggtttgaactcctgtcttcaagtgatctgcccacctcgtcctcccaaaatgctgagattaccaggcatgagacaccacactcaggcaatacatgctatttaaatctttctacctacctaggcatctctattgaaatatatttatgcttatatgtaatgtactatacacatatatatgtaacatatatacacatatgtaatatagtgcagatatacacatatatgtatatactatatagyatattgtgcatatggtatatacatatataagtc

SEQ ID NO: 563117 - DNA, 585 bp, Homo sapiens
tgttacaagtttggatagtgtgcttttaaatttttttggaaaatactgtcttgatacaattaggctaatgtttggtacttagacatgtttgcattttgctagttaagattatttaagagcattgacctgaggccatttgcaaaacttgtgaccacagcagaatcttgttaaggcagtttcagccctgaatactcttttcatgttgtctctaattgatggtgaaagtttcatccctctgttatttaccattttaaatacatgaccaagcatctttgactagataaatttgaggaatggttcctagcagttattctcttcccttagtttctgatgggaatcatgggtggtttgaaactcttgaaagttttcrggaatggtggtccatttgggtttttcaaaccaacctataccccaaacggggtattcaaaccccaatgggttttccaggcctatctaataagaggataaattgatataaatttccttagctttcttatagagtccaatgggagagcaagtttttccatttgaaacacttttgtctatatggctttatttttatctgaagtgacaaaaatggaaata

SEQ ID NO: 563118 - DNA, 518 bp, Homo sapiens
taatacaggctcagatccataaattcctttctgttgttatttaaatatttcaggggtgtgtgtgttgtctccaaaaccagtgagccagtgagaatgcccctagaggacaggaacacatattagagtcatatgaagaaaaacaaagggaaacaattatatctgggtcattgcttacctaattacttttgagggcaagataattacagagtaaggaaytttcattgtctgtcagcaaacctgtagacctatcccataaaaaagatggctgcttaagttttgctatgtttttattccaaaggaattttcttgaaatagagttgctttctgttatttttgtatgttattgccatatctgtgatctttacttttcctctattgtttgcttgtgaaagctgtagttatagatagttgtaatctcttttaagtagatattaatatatattctaatatttattttgtttactacattaaacacattttgctgacttccagataaatataggaatatgtatacttga

SEQ ID NO: 563119 - DNA, 518 bp, Homo sapiens
taatacaggctcagatccataaattcctttctgttgttatttaaatatttcaggggtgtgtgtgttgtctccaaaaccagtgagccagtgagaatgcccctagaggacaggaacacatattagagtcatatgaagaaaaacaaagggaaacaattatatctgggtcattgcttacctaattacttttgagggcaagataattacagagtaaggaactttcattgtctgtcagcaaacstgtagacctatcccataaaaaagatggctgcttaagttttgctatgtttttattccaaaggaattttcttgaaatagagttgctttctgttatttttgtatgttattgccatatctgtgatctttacttttcctctattgtttgcttgtgaaagctgtagttatagatagttgtaatctcttttaagtagatattaatatatattctaatatttattttgtttactacattaaacacattttgctgacttccagataaatataggaatatgtatacttga

SEQ ID NO: 563120 - DNA, 518 bp, Homo sapiens
taatacaggctcagatccataaattcctttctgttgttatttaaatatttcaggggtgtgtgtgttgtctccaaaaccagtgagccagtgagaatgcccctagaggacaggaacacatattagagtcatatgaagaaaaacaaagggaaacaattatatctgggtcattgcttacctaattacttttgagggcaagataattacagagtaaggaactttcattgtctgtcagcaaacctgtagacctatcccataaaaaagatggctgcttaagttttgctatgtttttattccaaaggaattttcttgaaatagagttsctttctgttatttttgtatgttattgccatatctgtgatctttacttttcctctattgtttgcttgtgaaagctgtagttatagatagttgtaatctcttttaagtagatattaatatatattctaatatttattttgtttactacattaaacacattttgctgacttccagataaatataggaatatgtatacttga

SEQ ID NO: 563121 - DNA, 475 bp, Homo sapiens
tatatgattggtaaaaacagaagtaaagtgattcaacttgcatagtacctctataagaaaaataaactggctgggtgcagtggctcatgcctstaatcccagcactttgggaggctgaggtgggcagatcacgaggtcaggacatcaagaccatcctggcaaacatggtgaaaccctgtctctactaaaaatacaaaaaaattagccaggcatggtggtgggtgcctgtagtcccagctactcaggaggctgaggcaggagaatggcatgaacctggggggtggagatcgcgccactgcactccaacctgggtgacagagcgagactccatctcaaaataaataaataaataaataaattatgactctaggtttatgttgaggaacaactcttgaattgtacccatattgatgcaacaacactgttgctacagcactaaatgggttttgatttaaaaaaatatgtgtatgcagaa

SEQ ID NO: 563122 - DNA, 475 bp, Homo sapiens
tatatgattggtaaaaacagaagtaaagtgattcaacttgcatagtacctctataagaaaaataaactggctgggtgcagtggctcatgcctgtaatcccagcactttgggaggctgaggtgggcagatcacgaggtcaggacatcaagaccatcctggcaaacatggtgaaaccctgtctctactaaaaatacaaaaaaattagccaggcatggtggtgggtgcctgtagtcccagctactcaggaggctgaggcaggagaatggcatgaacctggsgggtggagatcgcgccactgcactccaacctgggtgacagagcgagactccatctcaaaataaataaataaataaataaattatgactctaggtttatgttgaggaacaactcttgaattgtacccatattgatgcaacaacactgttgctacagcactaaatgggttttgatttaaaaaaatatgtgtatgcagaa

SEQ ID NO: 563123 - DNA, 201 bp, Homo sapiens
gatagaagaacaagattttattccaaaaaagtaatgaaactgttgaaatcataacatataaataaggtaacttaaagagaaaagctaaagattgttttgcttacttatgtttttaatttttaacttaagttaaagaactgtatcaacatgctgtatttatgctactttcctaacwtgcggctattatacctaataatgtat

SEQ ID NO: 563124 - DNA, 594 bp, Homo sapiens
agtttctctttttgtaaaaatgccatttaaataagaacctctacgtattagcaccttcacataaaaaaaggtgaaaatctctgagtaagataggacaggaagtgggagtgattcctctttcagttgagcagcctaaagggttgttgagggtgtttcttatacctccggctgactaaagccattagtctgttgtgaatgaagagagtgaaacttcaagtcctaataaagctcagggacaacccaaataattcatattcttttattgttaatatcttacaagatttctaatgcaacaaccacagtatttgtttggcttactgtgtctctgaattaataggggttcatgttttctcctargttgagccagtttttttgggttctgtgctaaaatacgactccattctagaggctgggaaagctatgcagtatttgagccagagtagaccttgaagggcccaggaaggtgtccagggcagcacagacagctctagtcagtgacggtcatgggaagtcatcagtcaggcctgaacaggggctggagaacatgtttgcactcctacaggtgtgtatatatagagatatatatacacacac

SEQ ID NO: 563125 - DNA, 442 bp, Homo sapiens
gctggagaacatgtttgcactcctacaggtgtgtatatatagagatatatatacacacacagggttatatataatggtaaaaaaaaaacacgtaaaacaaaatktaccattttaatcacttttaagtgtacagctagcttgatagtgttacatacatttcacattgcatgcaaacaatatctaaaacttttcatcttgtagaaatgaaactctgtacccattaaacaataactctccatttccctacctcccctacccctggtgactgaccactattctacttgctgtttctatacatttgactaccaagtcatgaatttgactactctaggtaatggagtcctgtagtatttggccttttgcagcttgcttatttcacatcacataatgtcctcaagcttcatccatgttgtgtcatatgtcacaatatttctcgttttta

SEQ ID NO: 563126 - DNA, 323 bp, Homo sapiens
cactaatacttactattgtgtaacaactgcytacagtattcagtacagtaacatactgtacagattagccgaggagcaacaggctataccatatcgccaaggtgtgtagtaagctacaccatctaggtttgcataaatacattctacaatgttcccataaagaggaaatcacctaatagcacatttcttagactagatcctcatcattaagcaaagcatgactgtacagaaatgtttaaaagaatcatgatcataatataatgtttttgttttaaggagaatgtgtttatgtttgaaaattacagatgtaattttaaaagaat

SEQ ID NO: 563127 - DNA, 388 bp, Homo sapiens
ctatattgccaacaaaatgaaagcttttaccccctaaacatgtcaaacaattcagcagctgataattacatttattggagttaaaaaataaagtgggatcttaaggagaattagtttatttgaatcatggtgactgagagtgaaaagagaaaaagacaaatgtgaaacttctgtttcatccactaaggagtcagcagaaagtaccacggaacctacagacctcaaacmcccaaaaaaaaaaaaaaaaaaaaaaaaaagaaaatttaaaccagaagaaacaaagagccaggaatagaacagtaactttggcaaaaattggccctttctggatggggcttatatttttaggtggttaagcccacaaataaacacacaaaattatgggatg

SEQ ID NO: 563128 - DNA, 388 bp, Homo sapiens
ctatattgccaacaaaatgaaagcttttaccccctaaacatgtcaaacaattcagcagctgataattacatttattggagttaaaaaataaagtgggatcttaaggagaattagtttatttgaatcatggtgactgagagtgaaaagagaaaaagacaaatgtgaaacttctgtttcatccactaaggagtcagcagaaagtaccacggaacctacagacctcaaaccccmaaaaaaaaaaaaaaaaaaaaaaaaaagaaaatttaaaccagaagaaacaaagagccaggaatagaacagtaactttggcaaaaattggccctttctggatggggcttatatttttaggtggttaagcccacaaataaacacacaaaattatgggatg

SEQ ID NO: 563129 - DNA, 586 bp, Homo sapiens
ggatcgctggctaagttaatgtcatgtaactctgtactgatgccaaagttagccacatcttacttccagacatttaccttatttctgttttcaaaaattattaaatctaaaaattacttctgattttaaaaggattctctgaaacagaaaacaaagacaagttgttgcatggtgcaaagtgatggaaatttggcyaaatccaacctaagtttgaatcatcaattttcttatctgtaaaatgaagctaacgtacattttaaaggttattatgaagattaaatcataagattcatacatggaacatttagtattttacttggttcacataagaccatcaataaatagttgtaaataataaaaatgataatttaactttgattttagtaaggttatcattaaatgaaaggttcggtaccactggtggtagctgctaagcttgagtaaagacttattttgaagatgctatattttttataagactgctaatccattcaaaaatagtctactacatgccaggcactgtgctaggtgctggacatatagtagtgagaaagagtccctgccctcaggcagcttacattttaga

SEQ ID NO: 563130 - DNA, 559 bp, Homo sapiens
aactacacttgttatcacaagaattaagcttgttgttcttgggtaggatgcaacaaatagaagattaaactgaagtattatctgaaaccaagacaaagaagcagaaaaacaagtcaaaaagtctctgagaaacctaatgggcacaagcttggataagatttttaaaagagaaattggactgtacgaagcattcaaaaatgagcaatttatgaaaatgtatttattctgaatgtayttcccatttggttgggtgaacacaagaaaactcacagggtgaacagaagtgacctcagtgatttgcaatctaattaagcacttgctattgagagatcaggtttctagagaacattgataattgacccctattaacataaattctggcatgagaaaatggagtctagaaaaccttgtatcaaaagaactcgaatggataatccatgcaagaagaagtcaggagtgggagggaaggtagataaaattagagaagcagagacagcgaggaggagtaataatttcctgtatggccacgaacacaccaggtattgattaattcaccaaa

SEQ ID NO: 563131 - DNA, 559 bp, Homo sapiens
aactacacttgttatcacaagaattaagcttgttgttcttgggtaggatgcaacaaatagaagattaaactgaagtattatctgaaaccaagacaaagaagcagaaaaacaagtcaaaaagtctctgagaaacctaatgggcacaagcttggataagatttttaaaagagaaattggactgtacgaagcattcaaaaatgagcaatttatgaaaatgtatttattctgaatgtacttcccatttggttgggtgaacacaagaaaactcacagggtgaacagaagtgacctcagtgatttgcaatctaattaagcacttgctattgagagatcaggtttctagagaacattgataattgacccctattaacataaattctggcatgagaaaatggagtctagaaaaccttgtatcaaaagaactcgaatggataatccatgcaagaagaagtcaggagtgggagggaaggtagayaaaattagagaagcagagacagcgaggaggagtaataatttcctgtatggccacgaacacaccaggtattgattaattcaccaaa

SEQ ID NO: 563132 - DNA, 481 bp, Homo sapiens
ccccaggacagagccgccttcatccatatgatggcatcccgtcctcattgccaagtcctctagctatcttggggtcccacctacgtcacactggaaagtaacttgtaaggctttcctctgactgacaggctgaacttccaagttcactaaaacatcartagagggctacatgtgaaatggatccctgtcttgtgcataactcatctttaccaacatgcctttcattctctgggataaaattccaggtggaaaagctgggaggcatgattcagactgctttgtctcctccctttcactgtcattcttgttttgcagaattcaccaaattcagcaaggaagcatgattttccttttctttcttggtgacatattctcctaccaccagagactgaggctagatgtaatcagttgaagaattctcttccatacattctgacttgagttttccaggcttggcccttgataaactaaaaaaagaatt

SEQ ID NO: 563133 - DNA, 481 bp, Homo sapiens
ccccaggacagagccgccttcatccatatgatggcatcccgtcctcattgccaagtcctctagctatcttggggtcccacctacgtcacactggaaagtaacttgtaaggctttcctctgactgacaggctgaacttccaagttcactaaaacatcaatagagggctacatgtgaaatggatccctgtcttgtgcataactcatctttaccaacatgcctttcattctctgggataaaattccaggtggaaaagctgggaggcatgattcagactgctttgtctcctccctttcactgtcattcttgttttgcagaattcaccaaattcagcaaggaagcatgattttccttttctttcttgrtgacatattctcctaccaccagagactgaggctagatgtaatcagttgaagaattctcttccatacattctgacttgagttttccaggcttggcccttgataaactaaaaaaagaatt

SEQ ID NO: 563134 - DNA, 609 bp, Homo sapiens
ctaaaactgaaacagatatttccttaaacagtttttatcctcacaatgcatgatgtgcttagatacattctattctattctgttttttttaattaataggctttattatttatttattatttatggtagttttaggtttgcagaaaagtagaacagaaactacagagagttcctataaactatctttcctttcccccttctcacacacagtttcctttgttattaataccttgcattaatgtagcatatttgttataacaagtgaaccaatattgatatattactaccagctaaaatctatagtttaaattagggttcactctccgtgttgtacattctgyggattttgacaaatctataatgatgtatccaccattatagtattatacaaaatagtttcaccgccttaaaaataccgcatgctccaacctgttcatccctccctctacgctaactcttggcaaccagtcatcattttactgtccccacagttttgccttttccagaatatcatattgtcagaattgtccagtacataaccttttaagcctggctccttttacttagtaatatccatttaagggtcctccatgtctttacacaacatga

SEQ ID NO: 563135 - DNA, 634 bp, Homo sapiens
atggacagtaaggtcttagggaaagtgagatgaaagcacccaatccttggcttaaaaaattatactaagagaaagagctggcccagagccatgtgcataaggttatccaaaatatgtttaatttggggctctatgaaaatatcttgaaactagggacctcaaatagattgtgttagaaaggcagggatagatgaaagtaagattatctcccattcgacagatgcaaaaatctgactctgccaacagtccaggaggtcaaagaagagactaaagtttttgatgcagccttgagttctattgttgggtcttgcaaatttctgtaagaaatgagaaacagtttgacttgactttgcttggccttttggcctgcaaaaatactaagacaggatgacatttcrgctacaaattttgcagctgtgtaatcactggggtctgggagaccttactatacttggttcagcatttgaattccttttaagaccaagacaatagaacttataattagcaaactaccacaagtctcagagtatgacacatgaatagaactcttccttttcctctttcgctgcacgagaacataaaaatagaacaagtaactagtatatttgtacttctcaccactttaataaaaaac

SEQ ID NO: 563136 - DNA, 632 bp, Homo sapiens
ttagtgcatattcatctatttgtttttctttctcactgcatgctctgcaaaattctgtataagatggctgactatattttacaaaccaagttaaccctgctttggccatttaaaattcatattttatctctctgcttaaagtataggatgtattgaaatacaaatgtccattgacttttacaatattcagtctgagaaggagagtagtagtatayctgccaagcatttattcccatctcaaactgtgatggttagttgcagctacactggaccattcagctgggcattcactctcaggtactgctatggagagaaaggctgacggttgccctttatgacaacatgattaaaggggaggtgtttcttccacacatctctaatccatgaaagggtacaggatgttctgctccattcatgcatcacatcttcacttcctttagtaatcttagtaatttcctttaatcttagatacaactgctcaaaatctttgcctaccaacctcagcttaaacatatctcaactcacacctactggggacacacttctctcctaaccagctgggtgactcccatgaaggcactgaacacctagctcataagaaaacttataatcacaagagaaaggaaggacaa

SEQ ID NO: 563137 - DNA, 401 bp, Homo sapiens
tcactgccttctcaagaagaacaatgttttctttattctgaagttggtgtagggcaacaaggaaagagaccaagagatacatccaggtgcacatttttttctcttastttatataatcaaaatttgtttgtttctaagaataaggagatcatcacagaaatggtttaccccaagtcaggaagacaaggtcagctcagagtgggcataaaattgcttaaagcatctcagatagctaatgtaatagtgatttatcagaatgtccctaaaatgaccaatatttggggacagtaagaatggctaaagcttaaaaaaaatgtaaaagaggcttgagttacctttctactggttctccaaatatatgatattttcattgttgctatttttaaatctaaaagattttt

SEQ ID NO: 563138 - DNA, 401 bp, Homo sapiens
tcactgccttctcaagaagaacaatgttttctttattctgaagttggtgtagggcaacaaggaaagagaccaagagatacatccaggtgcacatttttttctcttagtttatataatcaaaatttgtttgtttctaagaataaggagatcatcacagaaatggtttaccccaagtcakgaagacaaggtcagctcagagtgggcataaaattgcttaaagcatctcagatagctaatgtaatagtgatttatcagaatgtccctaaaatgaccaatatttggggacagtaagaatggctaaagcttaaaaaaaatgtaaaagaggcttgagttacctttctactggttctccaaatatatgatattttcattgttgctatttttaaatctaaaagattttt

SEQ ID NO: 563139 - DNA, 583 bp, Homo sapiens
cttggtggcttagaatggcagaaatttattctaacagatatggaggacagaggccaaaatcaagcttttaacagggctgtgctgtccccggaggctccaggggagaatcctttccttgcctcttcccgcttctggtggttgtggcgctccttagctcctgactgtgtcactccagtctccgcttccatattcaatattgccttctcccctatggggcggggtcagatctccctcttatgaggatacacgtgatgaccatcagggaccacttggataattcgggataatctccccacctcaagatccttagttaattacatctgcaaagaccctttttccaaataaggttaacatttatagattctagggattaggatcctggatgggccctaataattaggaccatgattcatcctactacttgctgcaacatatagtatccgattctcaagtagctttaaatctactgcagtatgaggactatattggaatgtaggtgctaactagagttaaatataatcaaagttgctgtgactgtaatagttcaggagrgaaggtattttgggtgaaaataatggctctt

SEQ ID NO: 563140 - DNA, 576 bp, Homo sapiens
tttctcttgatgaatgttccatttacttgaaatgaatgtatcctctgaacattataatgtgtgtaatgttctataaatgtcaattagatcaagctggttgatagggtttttttgtgccttctctacactactgtttgttaagaagacatccttgctgagtcaataagaagttagctaacagcactgttccatcaatcactgagagagaagaattgaaatcctgaatatagtactggatttgtcttatttccccttttaattctttcagttttgcttcatatatttcaagtttctatgttaggtgcatagacaattagtattgctatgtcttcttgaggagttgacttctttatcattataaaatgtctcttttttctttagtaatatttattgttctgaagtctactttttctgagtattatagccaacttatttttcttatgatttgtattttatggtacactttttacaaaatcttacttttaactttktttttttttttttttttaccatgtttgtattagtcctttttcatgttgctgataaagacatacccaagactgggaagaaaaacag

SEQ ID NO: 563141 - DNA, 580 bp, Homo sapiens
gggatggaaaaagatacactaaaaaagatcaagaatagcgatatttataacagataaaatagactactagtcaaaaaccgtaaaaagagataaagaaggtcaatatataatgataaaggggtcaattcagcaagaggatataacaactataaatatctatgcacccaacatcggagcacccaagtatataaagcaaacagatctaccaagggagaggtagattgccacacagtaggcaattagtactagtaggggatttcaacactgcactcagtagtggacagatcaaccaaacatagagccaacaaagaaacctcagagttaaactacactcaagacctaatagacttatttgacattcacagaacacttcacccgtcaactgcagaacacattctttcmatcagcacagggaacattccccagaatataatgtatcataggtcacaaaatgagtctcaaaaaattcaaataagaagaaatcatttcaagtatattttcttgccacaatggaataaaactagaagtcaataacaagaggaatctcagaaactacacaaacacatagaaattaaacagc

SEQ ID NO: 563142 - DNA, 431 bp, Homo sapiens
cacctgatatttaaaattagaagaattgtattctattaaaccctaaagtgctaaataatttccatactaacaaatttgccctataatttttgaaactgttaattatgtctgcctatatctttttttgtgataacttttagttggaacttcatagtaactttatatttgggtattgagaaatcagtttcctttcatttgaaatgttggcatcattttgttcattagctaagtagtaataggtaaaaaatttkaaaattccgcatgttatatgttaggatttagtatatgatttggttgggattaactacaaattttaagcatgcctaaaggtggtggttttttttttttttttttttttactttaggttctggagtacatgtgcacaacgtgcaggtttgttacatagatacacatgtgccatgttggtttg

SEQ ID NO: 563143 - DNA, 431 bp, Homo sapiens
cacctgatatttaaaattagaagaattgtattctattaaaccctaaagtgctaaataatttccatactaacaaatttgccctataatttttgaaactgttaattatgtctgcctatatctttttttgtgataacttttagttggaacttcatagtaactttatatttgggtattgagaaatcagtttcctttcatttgaaatgttggcatcattttgttcattagctaagtagtaataggtaaaaaattttaaaattccgcatgttatatgttaggatttagtatatgatttggttgggattaactacaaattytaagcatgcctaaaggtggtggttttttttttttttttttttttactttaggttctggagtacatgtgcacaacgtgcaggtttgttacatagatacacatgtgccatgttggtttg

SEQ ID NO: 563144 - DNA, 431 bp, Homo sapiens
cacctgatatttaaaattagaagaattgtattctattaaaccctaaagtgctaaataatttccatactaacaaatttgccctataatttttgaaactgttaattatgtctgcctatatctttttttgtgataacttttagttggaacttcatagtaactttatatttgggtattgagaaatcagtttcctttcatttgaaatgttggcatcattttgttcattagctaagtagtaataggtaaaaaattttaaaattccgcatgttatatgttaggatttagtatatgatttggttgggattaactacaaattttaarcatgcctaaaggtggtggttttttttttttttttttttttactttaggttctggagtacatgtgcacaacgtgcaggtttgttacatagatacacatgtgccatgttggtttg

SEQ ID NO: 563145 - DNA, 598 bp, Homo sapiens
attagagtggacctaaattagcctttacccttaaacaagctttaatataggggctggtatatgtctataattatgctgtacacaatggttaggatgttccacaaagtgtctctattcttcctagttgaaactcaaacatttcccagaccaatgtgagtcctggaaattattcagctttctaactctttgcctcataaagtttcaccctatgcgtatgtatcttagtattcagcaacatatttaaaggaatgcctatgtgtatttttggaactccttttcttagtagcatcctttttctgtgctctgtcttgaaaactccaggtatctcagcctttctaaactccatctgtcttttcaaaccagtgaggcgatggtgttctgcttggctttcttccccctactccatggtctagaaaatgtaccgggtagaaatctaaagtgaccaaggtctcattttttctctcctctctcagatattacagtattctactgtcyaatgcccaatgtctaaactcaacttttaaatattttttttcagttttttagcatttttttaaatggtgggagggtaagttattatttcatgtccaaggaccag

SEQ ID NO: 563146 - DNA, 537 bp, Homo sapiens
tttgtatatattcttttgagaattgtctatttatgttcttagcccaccttttgatggaattgtttttttcttgctgatttgtttgagttccttgtagattctggatactagtcctttgtcggatgcacagattgtgaagattttctcccactctgtgggttgtctgtttactctgctgattatttcttttgctgtgcagatgcttttyagtttaattaagtcccatctatttgtctttatttttcttgcatttgcttttgatttattcgtcatgaactctttacctaagccaatgtctagaagagtttttctgatgttatcttctagaatttttatggattaaagtcttagatttaattctttgatatgtcttgagttgatttttgtatagggtgaaagatgaggatccaatttcattcttctatatgtggcttgccaattatcccaccaccatttgttgaataagatgtccttttcccactttgtgtttttgtttgctttgttgaagatcagttagctgtaagtatttgactttat

SEQ ID NO: 563147 - DNA, 550 bp, Homo sapiens
ggatttgtttctattttcttcttcttcatcaggaaagaacatgggcagagggggaggtgtggggacctgtgaccctctaagcaaagagatcagagccacagaggccctaggtgagaatagattccgcaatgtcttgctgttgtcctttacggcccagggtacctgcagccaggtctaaagcccagagccagattaaggcccttttgtatatgagcctctttgtcagcaggagaaactcaaacctgggattgtccctggtcattccagtgctactggatgaaagagcccatggggactgagaaaaattcagcctttctctcaacaccaaattaatttactttctcaaattcttgtacacaggcrcacacacacacacacacacacacacacacacacacacactcttaagaaaggataaagagtacaaaaatgagtctggaggtccaggttcgtgggtgagcggtcacagtgttaccaaggggggtagctgcgtgtgagtatgataacttccatccccagggagaagcgtgaaatggaaggaatattaatc

SEQ ID NO: 563148 - DNA, 550 bp, Homo sapiens
ggatttgtttctattttcttcttcttcatcaggaaagaacatgggcagagggggaggtgtggggacctgtgaccctctaagcaaagagatcagagccacagaggccctaggtgagaatagattccgcaatgtcttgctgttgtcctttacggcccagggtacctgcagccaggtctaaagcccagagccagattaaggcccttttgtatatgagcctctttgtcagcaggagaaactcaaacctgggattgtccctggtcattccagtgctactggatgaaagagcccatggggactgagaaaaattcagcctttctctcaacaccaaattaatttactttctcaaattcttgtacacaggcacacacacacacacacacacacacacacacacacacacactcttaagaaaggataaagagtacaaaaatgagtctggaggtccaggttmgtgggtgagcggtcacagtgttaccaaggggggtagctgcgtgtgagtatgataacttccatccccagggagaagcgtgaaatggaaggaatattaatc

SEQ ID NO: 563149 - DNA, 479 bp, Homo sapiens
  misc_feature 1, 2, 3, 4, 5, 6, 7, 8, 9, 10, 11, 12, 13, 14: n = A,T,C or G
nnnnnnnnnnnnnnatatatccattgtatatatgaaatagggcaacttcaaaatattggataggtattggtataggtatatgtatakgcatttgtatatgtatatgtatatatatatttttatatataatatatgtatatatatttatatataatatatgtatatatatatttatatatatttatatataatatatgtatatatatatttatatatattatatatatatataaaaaagacaactatggaatagaatttcagcatctatgttttatttttatttttattatattttattttttgagacagagttgcattcttttggccaggctggagtggagtggcacgatgtcagctcactgcaacctccgcccccagttcaagtgattctcctgccccagcctcccgagtagctgggattataggtgccaaccaccacacctggctaatttttgtatttttagtagagacagggtttt

SEQ ID NO: 563150 - DNA, 591 bp, Homo sapiens
gaaactctgtctctaccaaaaatacaaaaaaaaaaatagctagatgtggtggtgcatgcctgtagtcccagctactcaggaagctgaggtgagaggatctcttaaatctgagaggtrgaggttgcagtgagctgagatcgcaccatggcactccagccctcggagacagtacgagcctttgtctcaaaaaagataaataaacacaaataaaaataaaagcatggcaccaacatctccttctgatgagggcctcaggaagtttccactcatggcagaaggtgaaggggagctgatatacacagatcacatggtgagacaggaggcaagaaagagagaaggtgccaggctctttgcagaaatccgttctcatgggaactaagagtgaaaactccctcattaccgctattcatgagggatccacctccatgacccaaacacctcccataaggccacacctccaacactggggatcaaatttcaacatgagacttgatggggccgaacaaaccacacacaaaccctagcactaccattgcaatatcacacggaacagtttcactgccctaaaaatctgctttgctctgcctgctc

SEQ ID NO: 563151 - DNA, 591 bp, Homo sapiens
gaaactctgtctctaccaaaaatacaaaaaaaaaaatagctagatgtggtggtgcatgcctgtagtcccagctactcaggaagctgaggtgagaggatctcttaaatctgagaggtggaggttgcagtgagctgagatcgcaccatggcactccagccctcggagacagtacgagcctttgtctcaaaaaarataaataaacacaaataaaaataaaagcatggcaccaacatctccttctgatgagggcctcaggaagtttccactcatggcagaaggtgaaggggagctgatatacacagatcacatggtgagacaggaggcaagaaagagagaaggtgccaggctctttgcagaaatccgttctcatgggaactaagagtgaaaactccctcattaccgctattcatgagggatccacctccatgacccaaacacctcccataaggccacacctccaacactggggatcaaatttcaacatgagacttgatggggccgaacaaaccacacacaaaccctagcactaccattgcaatatcacacggaacagtttcactgccctaaaaatctgctttgctctgcctgctc

SEQ ID NO: 563152 - DNA, 219 bp, Homo sapiens
aactttgtatgttctcatttatgcatgctaaaaattaaaacagttgaactcatgagatattgagagtacaaaaatggttgccagaacttggatggagctggacactattatcctaagtgaagaaactcaggaatggaaaccaaacattgtatgttctcactcataagtggaagctaagctatgaggwtgcaaaggcacaagaatgatacaatggacttt

SEQ ID NO: 563153 - DNA, 559 bp, Homo sapiens
ataatagtaaatgtttattaaatccatactgtgttctaagccttttgccttacgttatctcggttaatcccccaacaggcctacaaagtgggcttccttatcattgccactctacaaaccattgtagagtgctcagtgtagaggctcagcaaatttggggcctgtatccttcagcccttgctttagtcagccagcaagggaagactcaattcaatagatctgaaacaattaaaggatttwtctgccttgacaaaagttaaaatggagcagcttgcaggaggtggtctattctgcatctctcaatgaaatgcaatgagaaggttatttcttatttctttctggaagcaaagagtctttggctggtgtggtggctcacccctgtaatcccaacacttcgggtagaccaaagcaggaggattgcttaaggccaggagttcaagaccagcctgagcaacaaagcaagaccccccatctctacaaaaaatagaaaaatcagccaggtggaggctgaggcaggaggatcacttgagcccaggaggtcaaggctgcagtgagccat

SEQ ID NO: 563154 - DNA, 407 bp, Homo sapiens
ccttaaactaaccccgccaccactgtcccaccccttccctgcccctgcccctgcccctggccccatcactgaccatgacatccttcctgaagctttgtccccaactcctagctgggccacctggaaggaagggttacccctgaccatcgctgcagaccgtaaggatgatctacctccaaatatgagattccatgaggagaagaggctggactttgaatggacactgaaggcagggtgagaaaaaggctagacctcgragtgaaataagggctgggagggccaagaatgatgatagacggtgagggactgagggatcagctgatgagttaagcctcaatacctgtcctagggctctggagatggccctcaaacgtgtttacaccctcctgagctcctggaactgccta

SEQ ID NO: 563155 - DNA, 502 bp, Homo sapiens
ccttgccggtaaagtgagaggttgaaccaggtccctccagggcctccctggctctgtgcctctcagcctgtgtcccctggaattgttctgaccttctcaatatggtgggcctggccctgtgttcctccaacagttgtggtctttggtggatcaggacctgggaccacaargtttggcttaacacagggaaggaggctgtgactggactgagtctccaggtctcagcttcagttacatagatctcaaccttcctagctgtcttgctattttctggggtctcttccagaccaggagccatttgtagaccagggaggaggatgaggggataggagatcggtgtttgggccgggagcactcattttggcaatttcatcggcagcctccagtggtggcggcaacggtgaagaaccagtcacggagtcccatcaagcgacgctcggggctcttcccccgcctgcacacgggctcagaaggccagggcgacagccgggcacgatggtaa

SEQ ID NO: 563156 - DNA, 482 bp, Homo sapiens
aaaattggatttcttgattaaaattttggattataaagtttttgaggcaaatgaccatgtaatctcaacacatcatacaatacagaaatatactccccaagtatttggtggcaaaacatttgaggcccagcagccataaaaagataatcttaggggttttttttccctctcaccarctcaaaccagttgttagtaataagttggtagctaatattttcttcctttttttgtggtgttattgttgttgttgtttgaaacagggtctctctgttgccaagtctgtagtgcaatggcatgatcatggctggctgcagccttgacctcccagcctcaatcaatcctcccatctgagcctcctgagtagctgggactacaggcgcacaccaccacgcctggctaatttttttgtgcattttttgtggagacagggttttgccatgttgcccaggctggtcttgaactcctgggctcaagcgatccac

SEQ ID NO: 563157 - DNA, 568 bp, Homo sapiens
cttgttctcatcctgcttttctctattttgctaycacattttgattatttgtatatttttatctccttagttaattagctgtactctttgttattgtttgttcactgtatcatgtatactatgtaggtttaacttattacagtgtacccttaagtgatattacaccatttcatgtatagtataagagcattacaatagttatgtcaggagtgcccctcagttcacggattccctgggaagactcacaggactcaacatatagtcattcccacagctatgctttattataatgaaaggatacaaaggaaaatcagcaaagggaaaagccacatggtgcaagtctggaggaaattagacacaagcttccaagtaccctccccagttaagtcacacaacatacactcaattcctccagcaattagttgtgacaacatgtgtgaaatattgtataccgggaaaacgcattagtgattcatgacccaagatttttattggcgtgtggtcatacagacccccaccttgcctaacacataccaaaattccaggcagccagaaggggagcaggtaa

SEQ ID NO: 563158 - DNA, 566 bp, Homo sapiens
ttattttttgattttttaatagtagccattctgactggtataagacggtggttttaagttgcatttctctgatgattactaatattgagatttttttcatgtacatggccatttgtatgtctccttttggaaaatttctgtttatgtcctttgcttactttttaatgggattatttgtgaagtttttgttgagttgtttgagttccttgtatattcttaatgttagtcctgtcagatgtatagtttgcatatattttctcccattctgcaggttcttttcactctgctgattatttctttggctgtgcagaagctttttagttttagttgcatttgcctrtttttgtttttgttgcctgtgcttttgaagtcttagtcataatttctttacctaaaccaatgtccagaaaagttttctgtaggttttcttgtagtatttttagtttctagtcttaggattaagtctttagtgtatcttgagttgatttttgcatatggtgagagataggggtccagtttcattcccctgcatatggcaatccagtttttctagcaccattttttga

SEQ ID NO: 563159 - DNA, 498 bp, Homo sapiens
taatgatcctttgaatttctgtggtatcagttgtaatgtcgttttcatctctgatttcaatttatttgggtcttctctctttttttcttagtctggctaaaagtttgtcaattttatcttctccaaaaaaaacttttcatttcattgatcttttgtattttttgtttcaatttcatttatttctgctctaatctttatttctttccttctactaagtttgggtttagtttactgtttactttgttctttaagaagcatcattaagttgtttatttgacttttcytttttttttttttttttttttgagacagtctcactctgttgccctggctggagtgcagtggtgtgatcccagctcattgcaacctctttcccccaggttcaagcgattctcctgccttagcctccggagtagctgggattacaaatgcccaccaccacgcctggctaatttttgtatttttagtagaggcagggtttcaccatgttggccaggc

SEQ ID NO: 563160 - DNA, 592 bp, Homo sapiens
ctcacgctcaccctgtggcaactccaaagcatatgtaaaaggttcttagggaggctgaatacaaattaaaccaatttagaaccttgaaacagtttatgcaagtcccgtttaatacagaaatagtctgaacttaatagacttctccctggcagacgggttcctctgaactgtgctctaagtgttgtaagaagcattaattgaagatgatttcataaaataaacaaactcttatggttttaagtacactttaatcaaaagagccgaaacagaaagatctataattgttcatgtgaaagctaagaattattgtctaagtattatatagtgatgagaaaaataagaaaatgatccatgcaaatgagagttaatgacacagaggacatccctcttttaggaaggaactgatttgccctgtaaattgaatattgtgcctggtttcaaaggttctagacatagtttacaggaggaaattttcttattatggtaatcaatagaagtaagttttagycctgggctcttcactgcaacgaaaatgttgtctgagatagggatggtcctatattcctagctttacttcttgaagtcaacactc

SEQ ID NO: 563161 - DNA, 571 bp, Homo sapiens
cttttaggctaggtgaccttagataggtcatttgtcttctttggattcctgtttcttcattggcaaaatggtggagttaagctaaagaatatcaatattagctctatatatctatatagtgattcaatcatttctaaaataatttcttgttagattacgttattctatatatatatcrtctttacagtttctttcagctataaaagtctatgactatcaatagatcatcaaattatttccctacctagaaatgccaactgtcaactctttttttttcttttcttttcttttttttttttttttttttgagttggggtctcactctgtcacccagagtggagtgcagtggtgcaatctcggctcactacaacctctgcctcccaggctcaagcaatccttccacttcagcctaccaagtagctgggaccacaggtgcatgccaccacactcagctaactttttgtattttttgtagacatggggtttcatcatgttgcccaggctggtcttgaactcctgagctcaagcaattcatctgccttggcctcccaaaatgcagggattacaggca

SEQ ID NO: 563162 - DNA, 514 bp, Homo sapiens
gagacaaccaaaactattttattaacaaataataacacgaacatgtaaaaatagatgagtaattgaataagagaaaaaaatggtgagaaagagaacacttaagaggggagaagagaaagaaccaggatgaggtgaaagaaaagtccagagtggatttaggaaagagtgatttatcttggtttttccaaaagaggaacagcaggcaacatgccataaaaaaagaaagaaactgggccgggtgcggtggctcatgcctgtaatcccagcactttgggaggccgaggagggcagatcacctgaggtcagragttcaagaccagcctgaccaacatggagaaacccagtctctattaaaaattcaaaattagcagggcatggtggcacatgcctgtaatcccagctacttgggagtctgaggcaggagaatcgcttgaacccgggagggagaggttgcattgagctgagatcacgccattgcactccatcctgggcaacaagagtgaaactccatctc

SEQ ID NO: 563163 - DNA, 560 bp, Homo sapiens
taagttgactttgtataagctcaagctgcctttgttttgtgtctagtgttgcaagtttggcagtgaggtttggggatctcaggtgttgacrtgtatatctgccaggacgctgaaaatgtctacatccaggagtattttagccttcacctacagcatttggcagtagatacgaaccacatgttcagagagagagatttaatctatgaaaatacaaaattacaaggagattaggaagaagttgcctagaaataggcaggagccatcacccgaaaatgggggcatccttgtccgtggccgttggtgcatttgcttatatggacaggggcataggttgcaggttgctcttcattttcctttctgggagacagagaggaaataggattaaaaggcagttcagatgagttaacatcatggcatagccaaaaaaccccaatgtaatgcaatactctttatacttagatatagctgagtttttattggctgtttggaattgggcatgttacttatcatctcagcggttttctcatctccaatatggaaataaaatacactttaaatga

SEQ ID NO: 563164 - DNA, 560 bp, Homo sapiens
taagttgactttgtataagctcaagctgcctttgttttgtgtctagtgttgcaagtttggcagtgaggtttggggatctcaggtgttgacatgtatatctgccaggacgctgaaaatgtctacatccaggagtattttagccttcacctacagcatttggcagtagatacgaaccacatgttcagagagagagatttaatctatgaaaatacaaaattacaaggagattaggaagaagttgcctagaaataggcaggagccatcacccgaaaatgggggcatccttgtccgtggccgttggtgcatttgcttatatggacaggggcataggttgcaggttgctcttcattttcctttctgggagacagagaggaaataggattaaaaggcagttcagatgagttaacatcatggcatagccaaaaaaccccartgtaatgcaatactctttatacttagatatagctgagtttttattggctgtttggaattgggcatgttacttatcatctcagcggttttctcatctccaatatggaaataaaatacactttaaatga

SEQ ID NO: 563165 - DNA, 664 bp, Homo sapiens
aactaaattactcagttgagtttaaactaagctactaaacttagctacttaagtgtgtaattgtatcccatcatagttttaatttgcatgtctgtagtggctaatgatgttgaacaccttttcatgtccttatttctcaaactcataccctcttttcaagttctttctccatttttaactttgttgtctttttaatttttcttgctttcttgttgagtttggcagttctttttatattctgcatacaagctttttgttaaatatgtgatttgcaaatattatctcccagtttggaacttgtttttcattctcttacagaccttgtaaaacttacttaccagtcctaatactatttttctatgaagactccttgagattttctatgaagaccattatgccatctgtaaatagagatagtattacttctccctttgcaaccctctgtatgatattcattttttcttcttgtcttatttyattggtcaggattttcattattatgttgactagtagtggtatgaacattcttgccttgtcccaattttagaaagaacacatttagactttcaccattaaaaataaggagattggccaggcatggtggctcatgcctataatctcagcactttgggaggcaagtggatcacgaggtcaggagttcgag

SEQ ID NO: 563166 - DNA, 270 bp, Homo sapiens
tccaacctggcatctctgacacgttttgcaatgtgagtgaacacaatgttttattgtccaaccatgtgtaccattatttttttcattcagagaacgagttcaccaaagtatacgccacgctgccttcaggcattcatgcctaagyggcaggaattaattgtgagaatgttctgcccaattgataccatgctgtggttgctcaatacttatttaaaatatccacaaaacttgcttctttgctttgacatttgaaccagatatataatgttg

SEQ ID NO: 563167 - DNA, 601 bp, Homo sapiens
tatcattcaaataaatctagagctgtatttaagggaaagttagatttggctttggcttgtaatcatgccttttaaatcctactgcttatgatccagatatattaataatatttgcccacttggaatcatatttactaggaagccagataatatattcatgcattttttattttagagataaataatactatgctgcaatattgctgaaaatgcaagtacataggttcacatgtagttgtaactctaaaatattaattgttgaccctggcactcttctctgatgtaatgtggttcatactcattaggtccaaaggcaggcatgatagatgcattgctgagatcatggtgcccacgaagccaaggtyataggtgtaagctctctatgggccaggttttctgtagaaaaaaaatgaaaagccagcatctcaagtcttatctcttttttggattaacacataccattaaacaggaggtatactgatggtaatattaaataaaccaaaccaaaatgcatgtcctccttattgtacctaagatcaacttcatatataaagggaatttatttatttaatcaaaagaatatcttggttcaagagcatat

SEQ ID NO: 563168 - DNA, 601 bp, Homo sapiens
tatcattcaaataaatctagagctgtatttaagggaaagttagatttggctttggcttgtaatcatgccttttaaatcctactgcttatgatccagatatattaataatatttgcccacttggaatcatatttactaggaagccagataatatattcatgcattttttattttagagataaataatactatgctgcaatattgctgaaaatgcaagtacataggttcacatgtagttgtaactctaaaatattaattgttgaccctggcactcttctctgatgtaatgtggttcatactcattaggtccaaaggcaggcatgatagatgcattgctgagatcatggtgcccacgaagccaaggtcataggtrtaagctctctatgggccaggttttctgtagaaaaaaaatgaaaagccagcatctcaagtcttatctcttttttggattaacacataccattaaacaggaggtatactgatggtaatattaaataaaccaaaccaaaatgcatgtcctccttattgtacctaagatcaacttcatatataaagggaatttatttatttaatcaaaagaatatcttggttcaagagcatat

SEQ ID NO: 563169 - DNA, 601 bp, Homo sapiens
tatcattcaaataaatctagagctgtatttaagggaaagttagatttggctttggcttgtaatcatgccttttaaatcctactgcttatgatccagatatattaataatatttgcccacttggaatcatatttactaggaagccagataatatattcatgcattttttattttagagataaataatactatgctgcaatattgctgaaaatgcaagtacataggttcacatgtagttgtaactctaaaatattaattgttgaccctggcactcttctctgatgtaatgtggttcatactcattaggtccaaaggcaggcatgatagatgcattgctgagatcatggtgcccacgaagccaaggtcataggtgtaagctctstatgggccaggttttctgtagaaaaaaaatgaaaagccagcatctcaagtcttatctcttttttggattaacacataccattaaacaggaggtatactgatggtaatattaaataaaccaaaccaaaatgcatgtcctccttattgtacctaagatcaacttcatatataaagggaatttatttatttaatcaaaagaatatcttggttcaagagcatat

SEQ ID NO: 563170 - DNA, 628 bp, Homo sapiens
atatccaaataagctcaattagaaacgaaacgggagatactacaaccaataccacagaagtacaaaagatcattcaagactactatgaacacctttacatgcttaaacaatgaaatatacaggagacggataaattcctggaagtatacaaccctcctagattaaaccaggaagaaatagaaactctgaacagaccaataacaaacagcaagattgaagtagtaatttaaaagttgccaagaaaaaaaattcaaggaccagacagattcacagttgaattttatcaaacattcaaagaattggtaccaaccctattgacactattccacaagatagagaaacagagaattcctcctaaatcattctgtgaagccggtatcaccctaaccaggaagggacataagaacaacaacaaaaaactacaacagagcaatgatgaacatagatgcaaaaatcatcaataaaatactagctataacagaatacaatagcatagcaaaaagataatccaccatgatcaagtgggtttcatatcaggaatgcaggaatggtttaacatctgcaartcaataaatgtgatacaccatataaacagaattaaaaacaaaaaataacatgatcatctcaa

SEQ ID NO: 563171 - DNA, 543 bp, Homo sapiens
gggcagtgtaaaatcataggctttcaaatctgaggagtaagttttttttttttagttatttactctagatacataccatcagctacagaaaaaaaatgcagatatttttgcattttaataaacttaacccattatttattacaaaagtatagtaagacaaggctgctgtattcccacttattaaaatgtaaatgtttctgtatatgattattttagcattctaacacatacttactgaaagccttttttttaaaataagccgctttaaaatatgttgtatattctgtcctaatgtacattataattcactttaacaawgaatgtaactctaaattaagatactgtctctttttctactttaatgaagtttgagagaaaagggaattttgctttaacttaaaaaaaaaaaaaacaggcagggcacctgtaatcccagcactttggaaggctgaggtgggcagatcacgaggtcaggagatcaagaccatcctgactaacacgatgaaaccccgtctgtactaaaatacagaaaaaaatagctgg

SEQ ID NO: 563172 - DNA, 315 bp, Homo sapiens
aaaacaaaactggcaaatatacataaacagagaatagtcagtggttaccaggggtggagaggtggagagaaaataaggagatgtaagtcacatgatactaagttatagttatgcaagaccaataagtctagagatctaatgcacaacatgaagactagagtggtaatattgtatactgaaaatttgctcacagagcagattttaggtgctctaactacacacgtacacatgcatagacacacaaatgagtaactatgtgargtactggacatgtccatttgctgggctatggtaaccattacactgtgtataagc

SEQ ID NO: 563173 - DNA, 635 bp, Homo sapiens
ttaatgcatgatttttaatatatgtgtgtagaaatagttatagatatgtatgagtgtatataacctagctgtgctcagtgagagggcctagaagcaatgtaccccagtagcaatgagcacatccaaacctttgtttctaaatactaatccccactggccgggcacagtggctcatgcctgtaattccagcactttgggaggctgaggtgggcgaatcacgaggtcaggagatcragaccatcctggctaacacggtgaaaccctgtctcgactaaaaatacaaaaagatgagctgggcgtggtggcaggcacctgtagtcccagctacttgggaggctgaggcaggagaatggcgtgaacccgggaggcagagcttgcagtgagccaagatcgcaccactgcactccagcctgctgggcgacagagtgagactccgtctcaaaaaaaaaaaaaaaaaaaaaaaaaactactccccactatgagccagagctgctaggctaggtgcagtcactcacacctgtaatcccagcattttggggaggccaaggcaggaggattgcttgaagccagaagttcaagaccatccccggcaacagagcgagaccccatctctcaaaaaaatatttaaaaataag

SEQ ID NO: 563174 - DNA, 474 bp, Homo sapiens
ctgtgaatacataaagcggcggaggcctgggcggtggagggtgacagctgccctttaatgcttggctttttaaagatcatggtagagttcagaaagtatagtcatgaggtttaatgatttaatggggacgactggggagcaaaaatagttactgcgccctggggaaaagtgactcctcatacatattackttagcctaatggcctataacgccctccccccgtgcccatggggggagtcacgctacatagccgctgtaataccgaatggcctgattaaatgcatattaaacaatactaaattgggaaaaaaaaggcggaggctgctaaatgtatttattctgtgaggggaagatatgactcctcctctagcattggatggaagaagtcctcctgcctagctggttccccaaaagatgtggtgtcccagtgagattcagagggaggtaggaacctcatttctttgggaagaactt

SEQ ID NO: 563175 - DNA, 460 bp, Homo sapiens
attctcagcttcgagttctgtccacagatatgtggtttgagtctaatcagtcatttttgagaggctgcttttccgtaaaatcaggggctacttttggattcttgggtccagtgtactggtctccttagctgtaaaccactcccctccctcaacatggtcctggtcatcagtttctaagatcactgatgaggctagagtgagaatgaagccttagttcctcaatgcacctggattctatagaccatgaatacatgctagaatcaccttggtaggtttttaaactaccagtgtctggattattctccccaagagattctgattcacttggcttggtgtgcctcccaggtgttggtattttttaaaagctacccaggcgagtccaatgtgcatccaaagttgagaatcgctttagtagagtgtcagagctgggagagacttyggaaagcacccagtttaaggt

SEQ ID NO: 563176 - DNA, 364 bp, Homo sapiens
gcccttgaacttcccggaaacagtgagcygcagcactgagttgggactcatttgagggagagggtggccaagacacagtacagaccaggcaggcaagagccttcagacttcaagctggagacagtgggcaccgcacccactcaaggttggggagaaaaaccgccattgacctccatgaataggggctggaggggtgcgggcccagcttgggggatagaatcagagaagcagcaagctcccaccacttagggaagatgttcctggtgaacgtcattgctaccaactggccatgagcaagagaaagagggtggctggggagaatcacagtctggagggaggtgtttgggatgaagggataagtatt

SEQ ID NO: 563177 - DNA, 364 bp, Homo sapiens
gcccttgaacttcccggaaacagtgagctgcagcactgagttgggactcatttgagggagagggtggccaagacacagtacagaccaggcmggcaagagccttcagacttcaagctggagacagtgggcaccgcacccactcaaggttggggagaaaaaccgccattgacctccatgaataggggctggaggggtgcgggcccagcttgggggatagaatcagagaagcagcaagctcccaccacttagggaagatgttcctggtgaacgtcattgctaccaactggccatgagcaagagaaagagggtggctggggagaatcacagtctggagggaggtgtttgggatgaagggataagtatt

SEQ ID NO: 563178 - DNA, 364 bp, Homo sapiens
gcccttgaacttcccggaaacagtgagctgcagcactgagttgggactcatttgagggagagggtggccaagacacagtacagaccaggcasgcaagagccttcagacttcaagctggagacagtgggcaccgcacccactcaaggttggggagaaaaaccgccattgacctccatgaataggggctggaggggtgcgggcccagcttgggggatagaatcagagaagcagcaagctcccaccacttagggaagatgttcctggtgaacgtcattgctaccaactggccatgagcaagagaaagagggtggctggggagaatcacagtctggagggaggtgtttgggatgaagggataagtatt

SEQ ID NO: 563179 - DNA, 364 bp, Homo sapiens
gcccttgaacttcccggaaacagtgagctgcagcactgagttgggactcatttgagggagagggtggccaagacacagtacagaccaggcaggcaagagccttcagacttcaagctggagacmgtgggcaccgcacccactcaaggttggggagaaaaaccgccattgacctccatgaataggggctggaggggtgcgggcccagcttgggggatagaatcagagaagcagcaagctcccaccacttagggaagatgttcctggtgaacgtcattgctaccaactggccatgagcaagagaaagagggtggctggggagaatcacagtctggagggaggtgtttgggatgaagggataagtatt

SEQ ID NO: 563180 - DNA, 526 bp, Homo sapiens
tcttgcttgataaaaatcatctaactctagaatattttatactcatcaaatatacaaagtaatagtcaaaatatggaattctatracaagaataaaaggggacaagtgcagaaaatcatcttattttgtaaatcaaatttgtctaaattatatgaagctactgttgaaaaatatggtgtgtttcctactgaaatacattatcttttaaaagaaaggataatggcatgcatgtagggtacctttaaaaagaggattcactgcataacagcaccttggttttagcacaaggatcaacaaattggtgcttgtggagcaaatccagcccactgcctgttttcataaggaaatttccttgaaatgcagccacacttatgccctttataattcacaaggcctaaaatatttactaactggctctttacaaaaagagctgtccaattcttggttcagtagagctaagatcctctgttgtattttagtaagttttacccagtatattgaaaagctgacacggaacatgaatccc

SEQ ID NO: 563181 - DNA, 526 bp, Homo sapiens
tcttgcttgataaaaatcatctaactctagaatattttatactcatcaaatatacaaagtaatagtcaaaatatggaattctataacaagaataaaaggggacaagkgcagaaaatcatcttattttgtaaatcaaatttgtctaaattatatgaagctactgttgaaaaatatggtgtgtttcctactgaaatacattatcttttaaaagaaaggataatggcatgcatgtagggtacctttaaaaagaggattcactgcataacagcaccttggttttagcacaaggatcaacaaattggtgcttgtggagcaaatccagcccactgcctgttttcataaggaaatttccttgaaatgcagccacacttatgccctttataattcacaaggcctaaaatatttactaactggctctttacaaaaagagctgtccaattcttggttcagtagagctaagatcctctgttgtattttagtaagttttacccagtatattgaaaagctgacacggaacatgaatccc

SEQ ID NO: 563182 - DNA, 526 bp, Homo sapiens
tcttgcttgataaaaatcatctaactctagaatattttatactcatcaaatatacaaagtaatagtcaaaatatggaattctataacaagaataaaaggggacaagtgcagaaaatmatcttattttgtaaatcaaatttgtctaaattatatgaagctactgttgaaaaatatggtgtgtttcctactgaaatacattatcttttaaaagaaaggataatggcatgcatgtagggtacctttaaaaagaggattcactgcataacagcaccttggttttagcacaaggatcaacaaattggtgcttgtggagcaaatccagcccactgcctgttttcataaggaaatttccttgaaatgcagccacacttatgccctttataattcacaaggcctaaaatatttactaactggctctttacaaaaagagctgtccaattcttggttcagtagagctaagatcctctgttgtattttagtaagttttacccagtatattgaaaagctgacacggaacatgaatccc

SEQ ID NO: 563183 - DNA, 553 bp, Homo sapiens
ggaatcctttttcaatcaaaaatatgaaaaatgttggcaaggatgtggagaaattagaaccctcatacaatgctgatgggaaygtaaaatggtgcaaccactttggaaagcagactggaagctcctcaaaatgttaagcatagtgttaccatatgacccagaaattcaactcatatgtatatacccaagagaaaggaatacatatacaaacacaaaaacttgtaaataaaagttcacagcagcatgattaataatagccaaaacatggaaacaacccaaaggtccatcaactgatgaatggctaaataaattagtggtatgtccatacagtggaaaattactcagcaataagatgaaattaaatactgatacatgttacaacacaatgaaccttaaaaatgttatgctaagtagaagaagccagtcacaaaagaccaccacacattgtgtgatccaattgatacgtggtgtccagaatgggctaatctatggaaacaaaatagattgctgattcttttcagggtcatgaaaatgtcctacaattgatgatggt

SEQ ID NO: 563184 - DNA, 553 bp, Homo sapiens
ggaatcctttttcaatcaaaaatatgaaaaatgttggcaaggatgtggagaaattagaaccctcatacaatgctgatgggaatgtaaaatggtgcaaccactttggaaagcagactggaagctcctcaaaatgttaagcatagtgttaccatatgacccagaaattcaactcatatgtatatacccaagagaaaggaatacatatacaaacacaaaaacttgtaaataaaagttcacagcagcatgattaataatagccaaaacatggaaacaacccaaaggtccatcaackgatgaatggctaaataaattagtggtatgtccatacagtggaaaattactcagcaataagatgaaattaaatactgatacatgttacaacacaatgaaccttaaaaatgttatgctaagtagaagaagccagtcacaaaagaccaccacacattgtgtgatccaattgatacgtggtgtccagaatgggctaatctatggaaacaaaatagattgctgattcttttcagggtcatgaaaatgtcctacaattgatgatggt

SEQ ID NO: 563185 - DNA, 553 bp, Homo sapiens
ggaatcctttttcaatcaaaaatatgaaaaatgttggcaaggatgtggagaaattagaaccctcatacaatgctgatgggaatgtaaaatggtgcaaccactttggaaagcagactggaagctcctcaaaatgttaagcatagtgttaccatatgacccagaaattcaactcatatgtatatacccaagagaaaggaatacatatacaaacacaaaaacttgtaaataaaagttcacagcagcatgattaataatagccaaaacatggaaacaacccaaaggtccatcaactgatgaatggctaaataaattagtggtatgtccatacagtggaaaattactcagcaataagatgaaattaaataytgatacatgttacaacacaatgaaccttaaaaatgttatgctaagtagaagaagccagtcacaaaagaccaccacacattgtgtgatccaattgatacgtggtgtccagaatgggctaatctatggaaacaaaatagattgctgattcttttcagggtcatgaaaatgtcctacaattgatgatggt

SEQ ID NO: 563186 - DNA, 297 bp, Homo sapiens
ccacatatttagtctagtacttagtcttaatataaaaaggtggatttgccagcagaaaattgtaattacttttttatgaagtaaacacacattatatcactatcattgcatggaagagaaggtgaacaaaaaaagattaaggaataaaaaaaagaatatcactatcatataactacatacattaacaaagagacaaacatttcccactggagattaggagtttagcagaagtctctgaaaatactaaaaactgaaacaaaattaataattgytttttgtttgtttgtttgcttgttt

SEQ ID NO: 563187 - DNA, 572 bp, Homo sapiens
tcgtgccaaggttttcagctccattatgtcatttaagattttctctacactgtttattctagttagctactactctaatctttttttaaggtttttagcttccttgcaatgggttcgaacatcctcctttagctcagagaagtttgttattactgaccttctgaagcctacttctgtcagctcatcaaagtcattctccatccacctttgttctgttgctggcgaggagttgcaatcctttggaggagaagaggtgctctggtttttagaattttccgcttttctgctctggtttctccccatctttttggttttatctacctttggtccttgatgttggtgacctacagatggggttttggtgtagatgtcctttttgttggtgttgatgctattcctttctgtttgttagttttccttctaacactcaggtccctcagctgcaggtctgttggagwtcactggaggtctactccagaccctgtgtgcctgggtatcaccagtggaggctgcagaacagcaaatattgcagaacagcaaacattgctgcctgatccttcctctggaagctt

SEQ ID NO: 563188 - DNA, 572 bp, Homo sapiens
tcgtgccaaggttttcagctccattatgtcatttaagattttctctacactgtttattctagttagctactactctaatctttttttaaggtttttagcttccttgcaatgggttcgaacatcctcctttagctcagagaagtttgttattactgaccttctgaagcctacttctgtcagctcatcaaagtcattctccatccacctttgttctgttgctggcgaggagttgcaatcctttggaggagaagaggtgctctggtttttagaattttccgcttttctgctctggtttctccccatctttttggttttatctacctttggtccttgatgttggtgacctacagatggggttttggtgtagatgtcctttttgttggtgttgatgctattcctttctgtttgttagttttccttctaacactcaggtccctcagctgcaggtctgttggagatcactggaggtctactccagaccctgtktgcctgggtatcaccagtggaggctgcagaacagcaaatattgcagaacagcaaacattgctgcctgatccttcctctggaagctt

SEQ ID NO: 563189 - DNA, 572 bp, Homo sapiens
tcgtgccaaggttttcagctccattatgtcatttaagattttctctacactgtttattctagttagctactactctaatctttttttaaggtttttagcttccttgcaatgggttcgaacatcctcctttagctcagagaagtttgttattactgaccttctgaagcctacttctgtcagctcatcaaagtcattctccatccacctttgttctgttgctggcgaggagttgcaatcctttggaggagaagaggtgctctggtttttagaattttccgcttttctgctctggtttctccccatctttttggttttatctacctttggtccttgatgttggtgacctacagatggggttttggtgtagatgtcctttttgttggtgttgatgctattcctttctgtttgttagttttccttctaacactcaggtccctcagctgcaggtctgttggagatcactggaggtctactccagaccctgtgtgcctgggtatcaccagtggaggctgcagaacagcaaatattgcagaacagcaaayattgctgcctgatccttcctctggaagctt

SEQ ID NO: 563190 - DNA, 595 bp, Homo sapiens
ccacagtaaacatatttaggaatatttaaagtgcatttttacagtatagccaaaaagtcattgtaccaaagaaaataaatattgcatgttttgaggcagttttaggatgcaacagtatgacacttagaattttgattacatttgggctttcgacgcatgccggcacttccccactgacatttattcaaagtcactagtgacctacacagccaccaaaatatccatcaaagcaactaaagcaacatgttccaaactataaaatctctatggcaacctgaatgaagctttgaaatttcagcattttccataacactaagcactatgtttcatgctcaacacatatttattgaattaactggtcaattaggaaaaagcattcatttctcttagattcaattggtgaatatcaccaatacttccaaataygctctttaccttccatggataaacaagatttcatattcttgtctatatttaatgttacttaacttggttttctggttaattgccttatagctttgctagtggtaaacccaacagcttttctcaaacctcttttctttcttaattgttttttataattctgtttttgagg

SEQ ID NO: 563191 - DNA, 551 bp, Homo sapiens
tgaatgtaggcatccctctctggtcctgctatttggttaaaaaaaaaaagtaattgaagttagcagtgagcttataataatgttctctctcctctctcttggcagaatctctcctccattttcagaattcccacttttggagttaagattattcaagctcatggaccctctatgtaatttagtatttataaatatctgcttaacttaatcagaagaggactttttawaaaagactgctttttctcctctcatagtttttttgtgtgtgtggcagagtcttgctctgtcacccaggctagaatgcagtggcatgaacctggctcactgcaacctccacctcccacgttcaagtgatcctcccacctcacactccctagtagctgggactacaggcacgcaccaccatgcccagctaactttctttctctttctttctttcttcctttctctttctttctttcattttttgtatttttggtagagacagggtttcaccatctttcccagtctggtctctggccttgaactcctgggctcaagtgatatgcccg

SEQ ID NO: 563192 - DNA, 533 bp, Homo sapiens
ggccttgggctctgagacatgctgacttcatgtgtgacccagcaaattctcagctgtgaaggctatagtgaaagactccttttatttgagaaaagcagagggaaaagtaaaggagactttgtcttgcaccttaggtaccagctcagctatagcgaggcagagcaacaaacaggctcttggtgtcccgagactaggtctaggctcttgaacagcatttcygaacctgccctgggccagaggggagcccagtgccctaaaaggtgagttccaggcctggcagaattcatgacaagctgactgaagagcacttgggctttaagtgaacatcagctgttcacttgtagtggcctggcagagcccccatgagctggtggtggtgctgcagggagaggctcctctgcctgtggaaagaggtaggaagagcaggaaggagtttgtcttgtggtttgcgtgccagcttagctgcagcagaatagaacattaggtaaatttccaagattttttactctaacccttcgattcaacacagcaac

SEQ ID NO: 563193 - DNA, 591 bp, Homo sapiens
agagagaagtaagttgcttagggtcagagtagcagagctatcatttaaacttggtggtctagatttgaatagacatttatcaaaagaagacacagaaatagcaagcaggcatataaaaaggtgatcaatatcattactcattagagaaatgtaaatcaaaactacagtgagatatcatctcactccagttaaaatggcttttaatccaaaagacaggcaataacaaatactggcaaggatgtggagaaaaaagaacccttgtaaactgttgatgagaatgtaaattagtacaaccactatggaggacagtttcgaggttcctaaaaaaaacaaaagcaaaaacaaaaaaatcctaaaactaaaagagctaccatataatccagcaatcccactgctgggtatatactcaaaagaaaggaaatccrtatattaaagagatatctgcactcctatgtttgttgttgcagcactattcacaataactaagacttggaagcaacctgagcatccatcaacagaagactggataaagaaaatgtggtataaatacacaatggagtactattcagccgtaaaaaagaatgagatact

SEQ ID NO: 563194 - DNA, 552 bp, Homo sapiens
gcagcctccaactcctggactcaagtaatcctcatgtcttagcctcccaagtagctgggactacaggtgtgcaccatcatacctgactaatttttaaatttttttgtagagagagggtcttgctatgttgcccaggctggcttaaaacttctgatctcaagtgatcctcccaccttgacctcccaaattgttgagattacagatgtgagccaccatatctagctgtactcatgctctttttcttttctgaaaaacggtggaagagtttttttttttttttaaatccttaattaagaaaaacagaagtctctgagacggtagctgcctcttctactctgcagaaagagtaagcgtatagcaatggaattgcttgaaattttatgarattgtttgttcatgaatacacagataattgcatctctgcagatttttattttgcattttctataagtaaccctggatgcttagtcattctatttcctatttatgttcagcagatgtgtttaagtgtaaatgtttgcaaagtgttgttcagtagagtaggtacttgtt

SEQ ID NO: 563195 - DNA, 552 bp, Homo sapiens
gcagcctccaactcctggactcaagtaatcctcatgtcttagcctcccaagtagctgggactacaggtgtgcaccatcatacctgactaatttttaaatttttttgtagagagagggtcttgctatgttgcccaggctggcttaaaacttctgatctcaagtgatcctcccaccttgacctcccaaattgttgagattacagatgtgagccaccatatctagctgtactcatgctctttttcttttctgaaaaacggtggaagagtttttttttttttttaaatccttaattaagaaaaacagaagtctctgagacggtagctgcctcttctactctgcagaaagagtaagcgtatagcaatggaattgcttgaaattttatgagattgtttgttcatgaatacacagataattgcatctctgcagatttytattttgcattttctataagtaaccctggatgcttagtcattctatttcctatttatgttcagcagatgtgtttaagtgtaaatgtttgcaaagtgttgttcagtagagtaggtacttgtt

SEQ ID NO: 563196 - DNA, 549 bp, Homo sapiens
atttcactctgtttcccatgctggagtgcagtaacatgatcatagctcactgcagcctcaaactctcaggctcaagcaatcttcccaccttggcctcctcagtagctaggactacgggtatgtgccaccatacctggctaatttttttggtttttcataaacatgaggtgtccctgtgttgcccaggctggtctcaaactgctggcctcaagcgmtcctcctgctttggcctcctaaagtgatgggattacacgtgtgagccaccatgcctgccctaatcttccctttctgatgagctgtcttacaaactttggacttgcttagccagtctgacacaattgcataagccaggtcctcgtaatatgtctctatatatgtgtatctatgtatgtattcatgatcgtcaatctattttcgtatttcctactggttctgtttctttggttgaactctaatacaccattccattattaacaaccacattaatacaccattcctatatatatatatatatatatatattttttttttttagatggagtttcgctc

SEQ ID NO: 563197 - DNA, 515 bp, Homo sapiens
aaacgtctatggcagagacacttatcaccttagatcttggggtcagagctgctttgaaagccaggatcatttaacatcaccagaaataatcaaatcctcttcctttgttttttatgatgaaaacacagggtaagagagcaccaggcactgaggcctgggagttccacagaccaacacccctgctcctggcggctcccacccgggacttagaccctcaggtccctaatatcccggaggtgctctcaatcagaaaggtaaagtgggaggtgggggcagatcccagaggccatttttccagttgaggagggtggakgtgacaacaattagaggcttttggagcatcagattgaaccagaattccccatcattgttttctgtgcatccttcccttcccttgccattagaatttcaatttaaaaagcaatgattaggccttaaaatgtctccatgagcccagaggaggcgaaaacgagctgtgaggtccaggaaaaaggtaagtcctccgcagatatccc

SEQ ID NO: 563198 - DNA, 558 bp, Homo sapiens
aaacctcaaaccttgaatttaattttaaatgattccagattagtatttcctttggggacctagcaaaagcaaaggcaaatcctccctcaatgaagacctctgcatcctaagcctcaaaaatctccacaagtaattcttcaaaggcagtgagcaaataagcacatagggagagaaggcaccgtgagtaagaatcagcaaaaacaacagacagcagaaacagatgcacaaagcctccagagattgaaactacctgtyaggcacatgttaaaaaacaagcctgaaaatatttccgggaatgtaaaaagtgatctaatggatttaaagcagaaccaagtagaatgattctaacagcaaattggacccaattgaagagataattagtaaattaggagacagatcaaaagaaatccagaatgaagcacaatgtggtgaaagtatgaaaatatcaaacagagttgagatatatggaaaatagagggagaagacccgtatcaaccaataattaaggctccaaaattaaacaagacaaagaatagaacagaggcaatgtttgaagaa

SEQ ID NO: 563199 - DNA, 504 bp, Homo sapiens
gcatcttttcatagtctttaaagaaatattacatttttaattcatatctactctttcaattcatgagaaatcagagtgctgatacaaattctttggtgtgakaatactgatattgtgactaaaggttgtttaaggccaatcttagcattaaaaaaaaaatcaacatactgtttcacatacaaaatagtaactgtcaacaactgtgactgtcatcagctctagactggaactccctacactactacattaaatctgaatattccaaaagttccttgaaacatctatttcactaggattataactatgtttattcaaaatttataaaaaattataaagcaaaactcaatgttttcaaaattttttgataaattttatgaaaatatatctaccaaacagaactttaaggaaaaaaattatttcaaaataatttaaaaatctttattagaaacactatccagtttatttctgtcaaattgacatatcagtaagtcaaatcagctgtca

SEQ ID NO: 563200 - DNA, 640 bp, Homo sapiens
catttcatgtcttccatattggattttcaataaaagcctccttatatagaagagttcggtaagaaaaaaatcattttaacttttataaaacttaattawtaagcccatgataaattctgaggaaaactgaaattttctctatgtgtacagtaaatgttgagtagcatatatttttaaatgctttatctaatggttatgttgaagatgaagacatttagtccagtctcctatattttatggtgctacacaatgtcaaaaataaagaaaagcacgatgagtttagctaagtatatgttgttacatttgaatgctttaaatacatttgaatgctttgaattcttgcagggcacacagattatcaactggcaagaacattagattttctcaactattctgaattagcaaaaatttactacagcttggtgaggaatatatggaaactatatcatctttgcaattttttaatctaaaattattccaaatatttaaaagtttattttcaaaagtttacactgtgatgtcatgactacttaataataggatggactggaaatatctatgcattctcctgtgtatattcatttctataaagtaaatgacaaaaataaaaacgtttttactgaagtaactttcattctta

SEQ ID NO: 563201 - DNA, 545 bp, Homo sapiens
ttacttttaaaaattattttaaagcaatgcaattaggtaatgtctgagctacattggatattttagtctgatatcagtgatcaatatgtaaggagtcagtatgttttagtgtagacacatactttgaagggagcagcattaggactcctggccaccactcccttgggggccatgctttgccatcatttccaatattggccagtctattcagaatagtgcatccctcttagtatgtagtgggcatgttcttcaacattaagctctgcagatttaccctcagtttttttgttgttgttgttgttgttttaagaaagagttttgagtttgttgcccaggctgtagtgcagtggcacaatctcggctcactgcatcttccgcctctggggttcaagtgattctcctgcctcagcctcccgagcaactgagactacaggcatgcaycactacacccggctactttttgtatatttagtagaggcgaggtttcacagtgttggccaggctagtctcgaattcctgacctcaggtgatcctcccgcctcggc

SEQ ID NO: 563202 - DNA, 511 bp, Homo sapiens
ctggtgtcatggaagacaatttttccacagaccagggtagggggatggttttgggataattcaagcgcattacatttattgtgtactttatttatattattattacattgtaatatatatgaaataattatacaactcaccataatgtagaatcagtgggagccctgaacttattctcctggaactcgaaggtcccatctaggggtgatgggagacagtgacagatcagcaggcattagattctcataaggagtgtacaacctagatccctcatgtacacagttcacaacagggttcacgctctrtgagaatctaatgctgccactgacctgacaggaggcagagctcaggtggtaatgcacataatggggagcggctgtaaatacagatgaagcttcgcttgcttgcccctgcctacctcctgctttgcagcctggttcccaacaggccatggtattggtctgtggcctgggaattggggatctctgctttaggcaatataaattataac

SEQ ID NO: 563203 - DNA, 628 bp, Homo sapiens
actttttaagcaacaaagcactctcaagtgtaagactaggtgaaaaaattatagtccacaggtcaccttcttattttccttcttccaggtgtaggctgaggctattttgagggatcctcaaaattaaatagaggaaatsggcatatttgttttaataataacttgatgatatatcgtgtccataggatctatacaaacatctccaaatactccatctttgacctctaaaaagattcccatggaagagccttccccatctgctagagtttcctaatcaggtgaagagaaataggacaatctctcagatggagaaaaacccaggacacaaaagaatctactgttatacagaactaacagcccctttatgtttcacaatgtcgttcttgtcctgcttttcacataaagatttggcgatactgcagtaagaaaacataaaacaaaacatccttgggggtggggtgaggggtttgaggagatgctggtcaaagagttcaaagtttcacttaggaggaataaattcaggaaacctattttacaacatagtgactatagttaataacaaggcatggtatccttgaaacttgcaaggtattgtatacctggaaattgaaaatagaatttaaatatt

SEQ ID NO: 563204 - DNA, 556 bp, Homo sapiens
tcgttatgaccttgatttgcacrtaatataagaacagaagaactccaatgctttgtctgagtcagaagtgtggactccagccttcaatttcacttcctctaggtcttagaataatagcataacatacctaggaaaaatgtttcatagttcatcacatcattcattaaggaaacattttagagtacgtatttgatactttatcattttaaaccaattttatgaattgacaaaacattttttttaattggctaatgatatttgataaccctgaaaggaagatctctgtgtatttgggtcattaacggatcatccaagtccagggtttaggttgttagggtgagaaaggcattccttgtgtttcaggagattagcatattaccaataaaaacttttaaataagtatacagaatatttagcctagaacttctgctaactttcttctttcttacagattccacaccaaatcatccatcacaaacaacgcctgcccaaaagaaaactcccagttcttcatctcgacagaaagataaagttaataaaagaaatgaacgtggtg

SEQ ID NO: 563205 - DNA, 579 bp, Homo sapiens
agggtagctgctggtaagaaaaagcaggctagacgaatgtatttttggtggaatctagtttattgcatttaagggcctcaaaagttagcaacactatattctgcattgttataaacacaactgtgtatgtttgtcctctctgtaattatatcagaacaaccctaacatcaaaggattgcagaattacatagcaaacccagaatagcctgtggtttggaagctgaatagagagcccaattacccaggtcaaatatctaccagtgatatcagtttagggccacgctctggctttactttctggtgcaaggatattccaggcctaaaatctggggacaggccactacttcttggggcaaaagtcayagcctgctcaaagttgttgctcttgtcgcattccaatttattccccttccagcttgataagccagtctacacccaaatttccagctcttcagtttcaagaatagaaccagatggccgggcacggtggttcatgcctgtaatcccagcagtttaggaggtcgaggtgggtggatcacctgaggtcaggagttcaagaccaccatgagcaacatggcg

SEQ ID NO: 563206 - DNA, 579 bp, Homo sapiens
agggtagctgctggtaagaaaaagcaggctagacgaatgtatttttggtggaatctagtttattgcatttaagggcctcaaaagttagcaacactatattctgcattgttataaacacaactgtgtatgtttgtcctctctgtaattatatcagaacaaccctaacatcaaaggattgcagaattacatagcaaacccagaatagcctgtggtttggaagctgaatagagagcccaattacccaggtcaaatatctaccagtgatatcagtttagggccacgctctggctttactttctggtgcaaggatattccaggcctaaaatctggggacaggccactacttcttggggcaaaagtcacagcctgctcaaagttgttgctcttgtcgcattccaatttattccccttccagcttgataagccagtctacacccaaatttccagctcttcagtttcaagaatagaaccagatggccgggcacggtggttcatgcctgtaatcccagcagtttrggaggtcgaggtgggtggatcacctgaggtcaggagttcaagaccaccatgagcaacatggcg

SEQ ID NO: 563207 - DNA, 496 bp, Homo sapiens
agcacacactgtattattcaatgatatgtaatatattgccaagacttaaagttacaactactctgtatatcctcttaagactaatttactttaaattagcattcttaaatctattttaatgtaccaactttgrattctgtttgtgtgttttctgatttcattacctgaattgctggtctagcttttcagccacaaaatcctgcctctctttttcattcttctcttttagtaatttagttttctctctcatcctatcttttttctcctcaatggtttctttcttcaattgcatttctgtaaaatactcattttcttctaatgctaaaagctcacgtagcctgaaacaaaaagccaaaaaaaaaaaaaaaaaaagaaaactgtcatgctacatgcatcgttatattcaatttcagaactataggtctaatttgtaagaaaagaaagatcactgcagtcttccacagaataagactggttggtttgtttttttgttttt

SEQ ID NO: 563208 - DNA, 487 bp, Homo sapiens
acagtcactatcttgcaagaatttttgtaaagatggcatgaaataatggatgcggagtatttaaagaacctggagcagcatgatacattacatacctgatggttattaggtaggcaataaacaggagtaataattactacaatatccagcaaatatagtttacacttaaaaagaattggctgcatttttctttcacttttttccattgatttttacaagtaaatgtaatcaaggtcgttggctgatatcacagtttgcgtcgctaatttgctggaagcyttctgaccatgtacctagaccttgatctgtgatttactgctgtagaaatggtaacagagaaaaagaaagagggaagaggtgacagtctacttttaaaatttcaggataaagaaaatagctggtctggcatcaaaatgaaggttgtcatgacggctgattctcacagcaaaatacgtgccttcttaagggaagagagaaacatgtttaa

SEQ ID NO: 563209 - DNA, 491 bp, Homo sapiens
gggtatttgtaatcccaggtactcaggaggctgaggcaggagaattgcttgaacctgggaggcagaagttgcagygagccagaattgcaccactgcactccagcctgggcaacaaagtgagaccctgtctcaaaaaaaaaaaaaaaaacggtctcacactgaatggaataccaggtctggtgtctgaagggtaaaagagaaatttcagcacaaatatactaaataataaactcaaagcaatcaaaacaatgcctaaaaataaatgtatttgtttaaaaaatacataagaacattatgtaaagctacagaagaactatgatggagtcacagggacccgattgtcccctcctacctgaaggaataaaaatttttaaaaaccagactatatatatgaaacgatgattctcaagacatactggatatcaggtgatgaaggacagtgatttctgagagatgagaaacaaatgaagtgagccctgtgatttacccag

SEQ ID NO: 563210 - DNA, 610 bp, Homo sapiens
attgtatatttcaatataaaagctaaaaataattataagggagtccttaaggacatagaaatattgagaaatattaagttttaaaacactgccttaagcccaggcacagtgtctcacgcctgtaattccagcactttgagaggccgaggcaggtggatcacctgaggtcaggagttcgagaccagcctggccaacatggtgaaaccccatctctactaaaaatacaaacaaacaaacaaacaaaaaattagctgggcatggtggcatgctcctgtaatcccagctgcttgggaagctgaggcaagcgaatcacttgaacttgggaggtgaaggttgcagtgagcagcaatcatgccactacactccagcctgggcaacagagtgagacattgtctcaaaaaaataataacatgataataaaaaataaaacatcgccttaaaacaatatgtagaggrtggtcttatgtttgttattctgggtggctcattattttcccttgttttcatggggaaataactgtccccttacaatcttccccccaaatatacacatacttctttggtctgggtgcctgctcttgtcacattccaagtatttggggggtttcct

SEQ ID NO: 563211 - DNA, 611 bp, Homo sapiens
attttcttctttttcaaagtggtgtagtatttcattgtgaatgtataatgcattttctttattcctctgttgatggatacttagattgattccatatcttggctactgtgaatagtgctgcagcaaatatgggagtgcagagagctctttgacatattaagttttttttcttttttttttttttttgaggcggagtcttgctctgtcgcccmagttggagtgcagtggcacgatcttggctcactgcaacctctgcctcctgggttcaagcaattctcctgtctcagcctcccaagtagctgggattacaggcacccaccaccacgccgggctaagttttgtatttttagtagagacgaggtttcgccatgttggccaggctggtctcaaactcctgatctcaggtgatccgcccacctcggcctcccaaagtgctggaattacagacatgagccacggtgcctggcctgacatactaatttcttgcctttgaataaatatctagtagtgggattgctggatggtatggcaagtctatttttaattttttaaggaacccccatacggtttctcataatggctgtactaatttacattcctactaacagagt

SEQ ID NO: 563212 - DNA, 611 bp, Homo sapiens
attttcttctttttcaaagtggtgtagtatttcattgtgaatgtataatgcattttctttattcctctgttgatggatacttagattgattccatatcttggctactgtgaatagtgctgcagcaaatatgggagtgcagagagctctttgacatattaagttttttttcttttttttttttttttgaggcggagtcttgctctgtcgcccaagttggagtgcagtggcacgatcttggctcactgcaacctctgcctcctgggttcaagcaattctcctgtctcagcctcccaagtagctgggattacaggcacccaccaccacgccgggctaagttttgtatttttagtagagacgaggtttcgccatgttggccaggctggtctcaaactcctgatctcaggtgatccgcccacctcggcctcccaaagtgctggrattacagacatgagccacggtgcctggcctgacatactaatttcttgcctttgaataaatatctagtagtgggattgctggatggtatggcaagtctatttttaattttttaaggaacccccatacggtttctcataatggctgtactaatttacattcctactaacagagt

SEQ ID NO: 563213 - DNA, 485 bp, Homo sapiens
aaaacatagaggcctaaatgtttctttgtgggaagcactttaactataatacaattacaatttctttagtagctacagggctactcagggtatctaattcttcttaggtgasatttgcgagtttgtgtcttgcagtgaatctggtcatttcattcaaatggacatattattcttttaatatgtgcagaagctataatgataacacctctctcactcctgagattgttaacttgtatgttatctttttttgctgtttagttaggctagaaatttattaattttattgatctcaagaaaatgcttttgctttcagtgatttttctctattttctgttttctaatttattggtgtccattccaatctttattatttcagatattctctttactctgagtttaatttgttcctctttataaaattttgttaagtgaaaactaagttcatcatttgagatctttcttttcttatatagatatgtggggtt

SEQ ID NO: 563214 - DNA, 485 bp, Homo sapiens
ttttgttttacctgaaccaccaatttgaaagaaaaaattaaatgaaagttaaaataatttatgaaataacaatcaacttctatgtttgctactttgattgtgataatggcttcatggctgtatacatatgtccaaacatatgcatcaaattatatgcattaaatacatgcgaggttttatatattaattacagccaataatcctgttaaagaaaactaaaatggagtcggaacaaattaaaaagtacatgctaaaaaaacctcatatattttatagtttgcaagttctttcaaatgtattatttcattcaatactyattgatagccctttaagtgagggtactagctccactctacagatacataaactgggacttagtaaggataaggctcttgctcaagaccatccagctggtatacgaaagagccaaattcagttcttccaactctgctcttcaccagtacctggcaccatagttaaaatgc

SEQ ID NO: 563215 - DNA, 485 bp, Homo sapiens
ttttgttttacctgaaccaccaatttgaaagaaaaaattaaatgaaagttaaaataatttatgaaataacaatcaacttctatgtttgctactttgattgtgataatggcttcatggctgtatacatatgtccaaacatatgcatcaaattatatgcattaaatacatgcgaggttttatatattaattacagccaataatcctgttaaagaaaactaaaatggagtcggaacaaattaaaaagtacatgctaaaaaaacctcatatattttatagtttgcaagttctttcaaatgtattatttcattcaatactcattgatagccctttaagtgaggstactagctccactctacagatacataaactgggacttagtaaggataaggctcttgctcaagaccatccagctggtatacgaaagagccaaattcagttcttccaactctgctcttcaccagtacctggcaccatagttaaaatgc

SEQ ID NO: 563216 - DNA, 622 bp, Homo sapiens
tggtgtctttctctgttgcccagactggagtacagtggcatgatctcggctcactgcaacctctgcttcccgggttcaaaagattctcctgcctcagcctccgagtagctgggactacaggtgcacaccaccatgcctggttaatttttgtattttttttttttttttttttttttagtagagatggggttttgccatgttggccaggctggtcttgaactcctgaccttgagcgatccacccaccttggcctcccaaagtgctgggattacaggcgtgaacagccgcacctggccaactctgtacctacttcttattgctagttttgttgttaaagtcttgaatctgaatttcccaaacagattacagggttcatggaaatggaagctggttgtccatctctttgaattccctacagagtctgaaacagtgccttgcagaatgatatggattgagaaaattaatctttatatctagtccaacagtttatrtatgtttgttaaattcaggttcatttggtctcttgggtgctccaacatgtttggcagagacgataccttggttatgaactcatcttggcttggcatgcacttcagaggtgaactgaagatgctatcagcta

SEQ ID NO: 563217 - DNA, 575 bp, Homo sapiens
atgtcccaacatgccaaattaaatgtagaaacagaaacaaggaaaaacaggtcatgggaacattggaaacacttcagatgatttaaatttttctaatatgcttttagtattttctgtgacatgtatggattgctctttgattaaaaagaagtttctgaaaaaaaatgatgcttacaatactatatgataagataagcacttacttatggcatagtgctattttgaaacattttatacacaccttgaattttgctacataaaatataagccccccctttgcactaaaaacattgaaccaaaatgttaataaagattgtattttcttatttcttcttacatttctatattttccaattttttaatgagttttgattatttttatgatttgaaaaacamaaaatttacattttttttagttttaaatttttattttaagttatgggatacatgtgcaggatgtgcagatttgttacatagataaacatgtggcatggtggtttgctgcacctatccaacccatcacctaggtaataaacccagcatgcattagctttttttcctagtgctctccctcc

SEQ ID NO: 563218 - DNA, 527 bp, Homo sapiens
cccatgaaacacagttggtaaaaaggaatacgatttgaataaaatggtggagaacctagattcatctttgtgggacttcagtctgtgctttgaacagcacagtcttcaaagggcccaaaggcacctgcagccacaggtgaggcagaggaatgagttcatccccacaggccctatctagatacatgcacctcatgctgctgagsgacctcatggtgctgagggctgggccagtcttcccggctttgttgggaagtgagttcatctggggtaaactgtgcttgttctctttctccttaacttggtctggctacttgaagtgctagtttaacactcactgccagcgtgcatctattgccttcccactgagtaatgacaggagttacagtggtctcccccttaatggagggaggtctgctccaacacctgcagtggacgcctgaaacctcagttggtactgaactctatatacactgttttttcctatacatacaaagctatgataaagtttaattcatagtcagagattc

SEQ ID NO: 563219 - DNA, 593 bp, Homo sapiens
aagtgatacattttatttttgcttttattttagagtttgctttaaggtgaaagctagttaacaaataacatagtatctttgtgcttgaggtgrtgataaactatttaggcaattgtatttcatagtttgagtctacattataaaaccaggaggttgtttagattcaaaattatataggtcctgtacaacttagtgtcagtaagttgtcagatatatagtaaaaactagagattactggggattaatagagttgaagtctactaaggtagacaatgatttggatgttcattggcaacactgactatgtgaaatagccttataataaatatgacagcttgcaaaaacccactggatatcagcaaaaccatgatatttgtctcaaagttcaatacatatttttgctatttctttcagacacattggcaaattggtaatcacgactatcttagagacatgacttgtaactttcatagctgtcaagaaaatttgttgacattttcttcctaggaggaaattccattttagagatgatatgggggaaagaggattaatgagaaagctcattaacatatttgcctgtaggaacaaagtga

SEQ ID NO: 563220 - DNA, 582 bp, Homo sapiens
ccattgcactccaagcctgggcaacaagagtgaaattccacctcaaaaaaaaaaaaaaaagagttaggcctggaaggaagggtagaacttttgcaggctaatgccatgtggtcaaaccccatcttctgctaacccctttgagcttctaccatcgttgattaatgcagcttctatctgccatggtgtgtgcatgtaaactgtctacattcaggctcaagcagctcattgagggcagtagrgtgtccttgcttctttgctctatggaatggcggaggctggtgatggtgaagtgacgctcttgggtcattcagctgataagtggacaagatgtgggtctgtggattcccaaagcatggggcatgaaacttggggaagccagatgatctgcaggatcacacccagaaagccacttccttctccagcctcagtgctcctcatcacatcgaggtgcaagtggcagcttggcactggctggttgtgactttgacacctggctgacacttgccaaaaagaaaacaaaaacaaaagagagagctgccctggagcccagagctttaagctactgactcaaccactattcat

SEQ ID NO: 563221 - DNA, 573 bp, Homo sapiens
gtttttcattttcttttctcctctcatctctctcttcttctctgagttatttttcacttccaacccaccatgtttgtactttccaaatttctaatcccaactttctcccatatcttacccttcctccactctaccttcctctctctttttcctttcccttctcttctcttcccttttcttcttctcatctcgataggtgcttatctgacatactttattccttttcatggtttatatataatctccatgtagaccaattattatttcaccaagcattcatggtgccattactatgaacaaatatagtaactgctagagatggaaagacaaaaataggtataaagcatattmtccttaattaagatggttttaacttaatagttgataacttcaaaaacagtagtagtttagtgcacatcttctggagccttggagccttacctgcagagtaagactccaaactctactatagccacttggctgtgagacctttgacacattactgatgctttctgtgctcatgccccttatgtgtgtgtgtgtgtgtgtgtgtgtgtgtgtgtgtgtgtgtgt

SEQ ID NO: 563222 - DNA, 544 bp, Homo sapiens
acacaaaacaattttggaaaagaaaagtaaagatgaaagacttttacttcccaatttcaaaacttaccataaagctacagttatcaagaaactgtggtgctggcaagagggtaaacatatagatcaatggaacagaatcaaaagtacaaatrtaaatccatatattaatatttatagtcagctgattttttgtatggtgccaaataaattaattgtggaaagcatagtcttactttcagttgattaagtattcaggtttttttccccagtattttttgaaggtttatatgctgttttttttttttcttattttctctggtgttgtatgtgtgtatatttgtatgtctatatgctttttctctgtatgggttagctctttttcctcccatatcaagctattgatatgaatatttttatcattattccaactactgtgtgtgccttttcaatatgaagtatatgctttcgtgtaactataaaatgtttactttttattagtttatatattccttttgtttgtttctctggcttattagaaatttag

SEQ ID NO: 563223 - DNA, 551 bp, Homo sapiens
gaaattcaataataattaattgcattttcctgattactaataatgttgagcaacttttcatttggaattcatgaagttccagtttaagtattttgttcatttatctattgtgttgtcttttttaagttaattggtagagctttttatatatgctagatattgaatctttgttattataggccttaagacatattttcctattcctacttgcattgtcatttgtattattattgacagtggataactgtcaaatttatatgaagttgaatttataaatcattacatttatattagttgaatttgtgttgtaagacatcttttcctaactgtaggacacgaaaatattgtatggatttttggggaagttaaataaaaccaatggaaaaaatattgagaaaagcaaaagagaaacaatatgttactgctacagggaaaaaccaattctaaagacagcagatttcttatcagaaagcatggagattggcacaatattttcyaatgggaaagaaaagaaattgccaacccacaattctatgtttagcaaaaataac

SEQ ID NO: 563224 - DNA, 324 bp, Homo sapiens
ctttatttttactgtagcagtttctttcaatgatgagatatagaaccaatggaagcatcaccttcaaaagaatcttatccaatactagtggatcctggctaacagaatccaagcatctctggcactaatgcaacgctgggaaaacataatagaagcactgcagacaaagggcaaacagactctcaaagccctttgttgctaagaaccaaagtggcaagaatataaaatagataggatttagatgcacagtaatcttccctaaaaatgtttcagtacatttctggttagggaatgacmtgatgaacatctaatgcataacttagg

SEQ ID NO: 563225 - DNA, 466 bp, Homo sapiens
gttatatttggaagaaagctaaagactccatcacaaatttcttaaaacgaacaaatccagtaaagtttcaggatacaaaaccaacatacaaaatcagtagcatttctatatgccaacagtgaacaatctaaaaaagaaatcaaaatttacagtagcctgaaataaaatgaaatacctaggaattagtcaaagaagtgaaaaatctctataatgacaactataaaacaccgaagaagaaaatgtaagaggacacmaaaagtgaaagatatttcatattcatggaccagaagaattgatgtgtttaaaatagccatactaccgaaagcaacctacaggttcaatgcaatccccataaaaataacaatgacattcttcacagaaataaagaaaaaaattctaaaattgacatgaaaccacaaaatacccagaatagcaaaagccatcctaagcaaaaaagaacaaaact

SEQ ID NO: 563226 - DNA, 601 bp, Homo sapiens
ttctggatcaaaattattttctccattgacatgtaatgtgtagctatagtattaaaattttgtgagtggctataattttacttgttatttatgagtaatcataattgctattattgtggcattttaggtctggttctactttccagtagatttgccaatttctgactttggaacagaactttcctatttgtgggcctaacaagatyaacaagcaggcataaaaataatttgtattctaattagactgtaggaaccaaaggaataaagaaaatattttaatgtggctagaaacatcttttaatgatgtaacacagtgggtctttgaaaactttagcatgttttcatgtattagaaccatctggaggacttgttaatctatagattactgggttccaccctcggaatttctgattcagtaggtctggggtggggcccaagaatttgtggttctaacaagttcccaggtgatgatgatagtggtaggtgaggaatgacactttgcaaactactgtgtatactcatatatacacacattatgtgtgtgggtacatacacacatatatactactaataaatggtactataatgaaagtaaaggtct

SEQ ID NO: 563227 - DNA, 564 bp, Homo sapiens
ctgtaacatattcacggaaacagtgtttttgcactttgcagcctagtggcctgctttgtaatttgtaaataacaaaggatcctaaatacatgttataggactgaatggacagccaagcagcaggaaaaaagaggtaaattattttcaaaggaaaattttctattagcctgcatgttacataaaaatcaaaaagaagatgtgttatgctataagtcatgtagtcaatacctaaaattacattttaaagtagcgatggcaaaaaaaaaaaaaaaatctamaacttaaacagtaatcctcaatcacacctttatcaattaaatatttaccaagctcttttaaaaccatctaaaataaagatttattgagatcttaggaagaaacattatcaagattgaatttttgtaagaatcacaaaataggtgtcagttgatcaaattatgaatgaaaaggatgtgtttcattttgtatttttggagggtccataatttttctgtttattacaactctcttaagagaaaaactgaaattcttctttaatgcaattttctgctcctatatgtctgt

SEQ ID NO: 563228 - DNA, 624 bp, Homo sapiens
tttaaaaaaaaatctgtggatagctattctgcagataaaaaagtaaaacattttatgtggaaataaaaatttttcaaaaatacccatttggtaagctcccttggggcaaggacttggtctatcttgtttaatactgtattcccagcctctagcaaagtgtgtggtctaaaaagtstttgataaatataggttcaattaataaataattaataagaggggtttcaactttctattctcactagattcctattgagtaattgtgacatagatagccatctctatgggcaaagccaagacctgaagttttaatctcaacatttcccaccattttttacacatagtaattgaatgagtttgttttctagatcttctaatgtaaaacaccaatgaaatggatattctacatgaataaacatgtacttttactgcctcaaaaataaatattctacatcattaaacttatacatttattgcctatctttttttgagatggagtctcgctctgtcacccaggctggagtgcagtgacacaatcttggctcactgcaacctccacctcccgggatcaagtgattctcctgcctcagcctcccgagtagctgggatacaggcatgtgccaccac

SEQ ID NO: 563229 - DNA, 596 bp, Homo sapiens
aggattattaactcaaaggaaccagacagcggtaattcgagagcagaggttttaaagagaaacaaactttaaggaaaaaaaaaaaaaaaagctgaggagcagctctgtatggcatctactgaggcagagaagacaatatagaaacaggcttgactatgactatcttaaaagaggtcaaacaacttcagtgtgagtccaaataccataagtaaaccaaagcaggattatatacaatgaaacacaacaatgacaacagctggaaaacaatgtgttaaaagcagctaagtaacagattgctacaacatgtgagatgaataagacactgctsctatcatatatataaccaattagtcaaactttttatccacctttagtacacaatgaggtactgaggtacacaacacaacaatgtttataaataaattgcctcagctgggtatggtggctcatgcctgtaatcccagcattttgagaggctgaagtgggcagattgcccgagctcaggagctcgagaccaccctgggcaacgtggtgaaaccctgtctccactaaagtacaaaacattagccaggcatggtggcacgcacctgtagtcc

SEQ ID NO: 563230 - DNA, 546 bp, Homo sapiens
tgagtgccatggctcatgcctgcaatcccagcactttgaaaggctgaggcaggtggatcgcttgggcccaggagttcaagaccagcctggtcaacatgatgaaacctcatctctacaaaaaataaaaaaaaatagctgggagtggtgttgtgagcctgtagccccagctagccaggagggtgaggcaggagaattgcttgagcatgggtggttgaggttgcagtgagctgtcatcatgccactgtactccagcctgggcaacagagccagaccctgtctcaaacaaacaaatgaaacaaaataaaaccaaaccaaaaaatgttagctttccttagggtgcctccctcaactactatgggckttcaaggaatacaaactaaattttttattaagctgagtaaaatattttgaagaagatattggggaaaatatttactatattacaaaatgaaatgtaaaatatcttgtggattatccattgcttctactcaatatttaacaacattatctgaataatttattttcttttagaaatgtggcaagagt

SEQ ID NO: 563231 - DNA, 568 bp, Homo sapiens
cacatactagaaacattatatsttagttgagtctgttttttttttcccaaagtactttctcaaacacaccaaccttagccctctaagagatacatcacattaaaaataaaacgtctgcccactgctggtttctcaactttcgtccaccttctgtcccctttaatgaactggaccacgaggtgagtcagaaaggataaagggagtggtaagaatttgaggagagaagagagtgaggctaaaacaggaaatcaggaaaagcgattaggtcgccccatccctcacctggggccgctctcttgttgcccagcgtggtttcttcttgagggttctgcatggttcctcaatcccagggaattctgcaggacgttccacccaagaccactgggctcccacctctactcttttgccagttaatgaataggaaggaatttcactgcctggaaagaggaatgatgctttctggtccttatttcacacctaaaatagaaaggtcaattgatttattcctaaatatctttgaacactaaagtagaagttttaaagcatatatactacctggttgctctag

SEQ ID NO: 563232 - DNA, 535 bp, Homo sapiens
tgttttaccagtagatagaaatagatgccactgtatcattatgaaacaaaaaatcaatgtgtgtcgtgcttagtttaggtcctctccaatggaygtgaggtttttattgctctctttcactgggtctgcctttctctgcgtgtgctggagtgaaaattaatcagcccctctggtcgtgagcagattgcatgtttgtgctgcctgtctttctgcctctgcggagctgtagaggagccaccagagagcagagggccagaactgctgaagtttttgtctgaatgttcacaccggaatctggtcggggggaactgagaaaccagaacaggaatgaagaaatgtgggctctcctggttttaactccctgcacttccagaaggaaatgaaggggtgtgctccctcaggaataccacaaggaagggaggaacttattttaagtaaaatgcagcaccacgctaataataattttaaaaactatagccttagaggtttttctttttaatagcagacataaccctatttatcacatcacttattt

SEQ ID NO: 563233 - DNA, 584 bp, Homo sapiens
cttcaaaatctacaaagcactgtgccaagaaatgtgttgattattctctaccactgataaagctctcagtcagcagaacagaaggttccaaaacataaaatcctgggtcatcaccccaaccagctgcaccttaggaatgatttttccagatagaaaaatataactattctctacagttcatggcttaggtactctttacccagtgatataaagaaattgaaggaagagatgaggatggtcagaaatgacaggtgtgatttgtactaatgttgtgagacaaaaaaggcttgggaatgatyttggaaacgtataatcaaagctgctcccatttgtattcatataaatgtgcaaggccagagatgttaaggccctttaataatgatggaattttttgtttaaataacaataacattttatggcatttaggtgcaccctgcattgtcccaaactgtatttgagatagataccttacatttttgtaatacttcatgattttcaaaaatttcatattaatgatttcaattgatgatgactttccagtgctatctttttattgtatatatttaaggtaaacaacataaggt

SEQ ID NO: 563234 - DNA, 585 bp, Homo sapiens
ttaccacaatttagcagcttagaacaatgcccatttattgtctcatagttctgtagattagaagtctggtgggttcatgtgggttctgtgcctggagtctcacaaggctaaaaccaaccaggctggcctcttacctagagtttctgggaagaagccacttccaaactctttcaggttgttgggagaatctagctccttgaagctgtaagtctgaggtccttgttttcttgctgactgtcagccagaagccactctctgcttctagaggcttcctggactccttatgcggcctccttcatcttcaaggagaaactgcattgaatccttctcatgcttcaaatctgacttcctcttttgccaacagccagagaaaatgtttaccacttaaaggtctcatatgattacattgggcccacttggataatctttctattctaaggtcagctcattagtcaccttagttacatcttcaaagttgcttttgccatgtactataatcacagaagtaattccagggtgaagatcataagagctacgtagactcctgcttaccgcaygattattttgaggaataagtaaaggtgt

SEQ ID NO: 563235 - DNA, 451 bp, Homo sapiens
agtgcctcattaataatgtctaataggcatctccagtttagcatcttcaaaagcaaacacgccccaggarccaagtaaagggcgacttcatcctcccaatagaaaccatccttccagtggctcactccaaaaatccttggagtcatctgcaactgaggagatagagtaaattgaacggtggaggggaaagccagataaagtgagttgggaagtaaatgagaaatataagggaggagaagactttgactgcaaaagaaggaacatagagaaccagctataagtagagttaaagtgaaggggcttgcttatagtttgttttataaatttggagataactgacttcatttaaatggcaatgagatggacccatttactatgtacattgatattaccagggcatggtggcgcgtgcctataatccgaactactcaggaggctgaggcaggagaac

SEQ ID NO: 563236 - DNA, 664 bp, Homo sapiens
aagttcattttaatttccttaattgtttccaaaatattatttaaagaatctttgtccagttcaggatactgtctaggattacatattgcattaagttgtcctgtctctttagactcatttaatttaaagcacttyctcaacattcttttgtctttcatgccattggcatttatgattaatacaggccagttatttcatagaatatatctattaagatttgggtttctctgctgcttccttatgattagacagagctaatccatttttggttggattaccacatgagtgatgttttgttttgcttgtgttatcacattgggaggcacttgatattcctttgcctcttgttgatgatatcagtgttgatctacttggttaagtaggatgttattctgcttctacactattttccctcatcattattaagtaacttgtggagaggcattttgagactgggtaaataacttgctcctcatcaaaattccctctgctagatctggcatctattaatcattctagccagaatcagttttactctgatggttataaaatggtaattttctaactccattttatccatttgtcttctctatcagccaggattttgctgtgagaaacagctttttcttcttccttatttagctattatgagtttggacccatt

SEQ ID NO: 563237 - DNA, 580 bp, Homo sapiens
cagtggcacaatcttggctcactgcaacctccacctcccaggtttaagcaattctcctgcctcagcctcctgagtggctgagactacaggcataagccaccacactcagctaatttttgtatttttagcagagagagggttttgccatattggccaggctggtctcaaactcctgactgcaagtgatccacccacctcggcctcccaaagtgctgggattacaggtgtgagccactgtgcctggccacataagctgtttttaaattgtctttgatggaactctgttccataaggaatctcagataagatttttaaaaaaaatctgagcccagccatggctttgtatactcaaatacctatgagttgggtaaattcctctcctcttgatgtcccaagataacttaagcctcctgggtttgtcacaaagtgacattcttcactcaccacaggtcaggaacctacacagggactgtgtagacaaggtatraggccagttttcccaaggggcttttcttggctctgtaagttgagtttgattccttaaaggaaagcacaccattccagtcaaatccttggtaaa

SEQ ID NO: 563238 - DNA, 607 bp, Homo sapiens
atgtggtttatatacataatgaaatattatttaaccttaaaaaatgaaatcccatcattttcagcaagatggatggaagtggagatcatgttaagtaaaataagccaggaacataaaggcagatatttaatgttctcactcatatgtaggagcaaaaagaattgatctaatggagataatgaagagaatgctggttaccagaggctgggaagagtagttcagaggtgggaatgaagagtggttgtttaattggtataaaaatacaattagatagaagaaatcagctctagtgtttaatagcaccaatatcaaacactatagggcagctatagtttacwatcatttattgtatatttcaaataactagaagagatttgaaatgttcctaacacaaaaaaatgataaattcttgaggtgatagatactccaattaccctcatttgatcattacgcagtagacttgtatcaaaatatcacatgtaccccataaatatgtacattatgcatcaattacaatttttaaaaatgttaaacaagttactatatgatctagtaatttcgcttctcctgtatacacccatgagaattaaaaatatgtatgtccaca

SEQ ID NO: 563239 - DNA, 607 bp, Homo sapiens
atgtggtttatatacataatgaaatattatttaaccttaaaaaatgaaatcccatcattttcagcaagatggatggaagtggagatcatgttaagtaaaataagccaggaacataaaggcagatatttaatgttctcactcatatgtaggagcaaaaagaattgatctaatggagataatgaagagaatgctggttaccagaggctgggaagagtagttcagaggtgggaatgaagagtggttgtttaattggtataaaaatacaattagatagaagaaatcagctctagtgtttaatagcaccaatatcaaacactatagggcagctatagtttactatcatttattgtatatttcaaataactagaagagatttgaaatgttcctaacacaaaaaaatgataaattcttgaggtgatagatactccaattaccctcatttgatcattacgcagtagacttgtatcaaaatatcacatgtaccccataaatatgtacmttatgcatcaattacaatttttaaaaatgttaaacaagttactatatgatctagtaatttcgcttctcctgtatacacccatgagaattaaaaatatgtatgtccaca

SEQ ID NO: 563240 - DNA, 594 bp, Homo sapiens
agtcaaactatctctggttgccactgatatgaccttatacctagaaaaccttaaagactcctccgaaagactccgctttgacaaggatttgaattcagtaaagtctcaagttacaaaatcaacatactcaaatcagtagcaccaattcactaataacaaccaagctgcaaatcaaatcaagaagccaatctcatttagcaaaagaaaaaaatacataggaatatatttgcagtagtccatcttgtgtcgctataaagaaatacttgagactgggtaatttataaagaaaggaggtttgattagctcacagttctgcaggctgtacaagcatgacaccaacatctactcaccttctgatgagagcctcaggaaacttccaatcatggcagaaggtgaaaaggaagcaaatgtatcacatggtgggagcagtaccaagagagagagtgggaggggatatgccrcacacttaaacaaccagatctctcaaaaactcattcattatctccagatcagcaccaagccaagagggatccacgccatgaccgaaacacctcccaccatgccccacatccagcactgggaatatcaattcaa

SEQ ID NO: 563241 - DNA, 614 bp, Homo sapiens
tttcccatcatcaactcacccagaaagcagaacattcactttcccagttctattcaggggccacaggtgctatgagcagatgcaccagggcgctgtctacaatctgtgaccaggagcagcgatgctgacccagcttccctccatcaggtgctgccgtcgtggagatgcactcagcaccagggcacggagcacctgctccttctcggcgatgcgctcagcaccagggcacrgagcacctgctccttctcggcgatgcgctcagcaccagggcacggagcacctgctccttctcggcgatgcgctcagcaccagggcacggagcacctgctccttctcggcgatgcgctcagcaccagggcacggagcacctgctccttctcggcgatgcgctcagcaccagggcacggagcacctgctccttctcggcgatgtgctcagcaccagggcacggagcacctgctccttctcggcgatgtgctcagcaccagggcacggagcacccgctccttctcagccgcaccagggcacagagcacccgctccttctcagcgatgcgctcagcaccagggcacagagcacccgctccttctcagcgatgcgctcagcaccagggc

SEQ ID NO: 563242 - DNA, 548 bp, Homo sapiens
cctttttctttttcttggaaaaagaacttatttgtagttattaggaagcctacataaaataccttgtcattataacaggacattttaagctgataatttaacttcagctgcacataaaaactctacactttawttctctccacattttatgttactgatgtcacaattgatatcttttacatatcatgtattcattaacaaattattgtagctataattatttttaatacttttgtcttttaacttttctattagaattcaaagtgatttatgtactaccattacagtattagagtattttgaatttgactatattcttatctttacagaaagttttatatttccatttgttaattggcaccctttcagtttaacgtgaagaattccctttagcattcttgaaaggtagatctcatggtgattaactcccacagcttttgtctgtctggaaaagtccttatctaccttacatttctgaaggacagccttaccacatgtagtattcttgtttggctttttttttttttccttgcagcactttgaatata

SEQ ID NO: 563243 - DNA, 606 bp, Homo sapiens
aggagtgaggtggtatctcattgtggttttaattttcatttctctgataattagtgatatcaaccatttttttcatgtttgctgaccatttgtatatcttcttttrataattggtcattcatgtcctttgcccactttttgatgagattatttgggctttttttgctactttgtttgaattccatatatatattctggacaggagtcctttgccacatgcatagtttgcaaatattttctcccactcggtgggttgtctgttcactatgttgatagtttcctctctctctctctctctctctctctctctctctgctgtgcagaagttctttagtttaagtaggtctcatttgccaaattttgtttttgttgcatttgcttttgggttcttggccatgaattccttgcctaagccaataagtggaagagttttttgatgttctagaatttttattgtttcatgtcttagatttaagtctttgatccatcttgagttgatttttgtctaaggtgagagatgaggatccagttttattcttccacatgttgttggccaattaccccagcaccatttgctgaataaggtgtctttttcttactttatgt

SEQ ID NO: 563244 - DNA, 422 bp, Homo sapiens
ttgttggtttaaagtctgctttgtaggaaattagaatagcaactcctgatttttttctgttttctgtttgcttggtagatttttttccatccctttactttgagcctataggtgtcattacatctgagatgggtctttgtcgatagtatacagttaggtctagtttctttatccaactgaccactctatggcctttaattggggcatttagcctgtttacatttaagattaatactgatttacgcaggtttgatcctatcttcatgttgttagctgrttataatgcatatgtgattgtgtagttgctttatagtgtcattggtctatgtacttaagtgtgtttttgtggtgatcagtaatggttttcttttccatatttgtcactctcttaaggacctcttgcaaggcagggctggttgtaa

SEQ ID NO: 563245 - DNA, 619 bp, Homo sapiens
  misc_feature 310: n = A,T,C or G
tagagacaggggtttcactatgttggccaggctggtctcgaactcctggcctcaagtgatccaccttcctcagcctcccaaagtcctggaattacaggcgtgagccactgcgcctggccggctttacaaatatctttaaagttttgttcagctttcaagagaccaaaactaaaattgtaggcaatgcattatggttatggttgaaccaaaaaagacaacttagaacatcaataactgtatctacattaaaaaarttaaacaaggccttaacccaacttcaaaatagtgccgtatgcatgtacactttcangtgttaatctaaaataaaatgttaatgtaacatttggaatgattcctcactttgactttttaaaccgtctgataacaattctcaagagccttttactacacaccatttacatgctcaccttccaaatgttatgttcattaatttctcgatgcctattcaatgaactctaaactttgtggtctagcaaatctacacatttttacctaactccatgttctatttttattttttattcatataccttatctttagtccaattagacttattattctctgagcacatgctttaattttaagctcatgttatac

SEQ ID NO: 563246 - DNA, 485 bp, Homo sapiens
acacgttgtgagcatgtgtattaactataaagggacactatgctcactgggtaaagttgtgagatacasagtttgcctcgaatcagactggttgtgtttgaattctggttccctactttctggttgtatgactttaaacagattacatattttcttcatgcctcaattttttcatctacaaaagaatgggtattataatgctgtcaacctcatttgattgttgtaaggcttaaatgagataaaaagtaatacagcagtgactgtcatagagtattgatccataattttaactattttaatgagctattataattatttttaaggattctttgtccttctaaccttcggcatgttcatttctcatggcaatgttgtggagtccctgggtcaacagaagcaattttagctatgaaacaattacaaggaacagcttactccaagtcacatgtatctacagatcctcattcattggggttacagtgaga

SEQ ID NO: 563247 - DNA, 546 bp, Homo sapiens
tactataaacaactatataccaaaaaatggataacatagaataaaatgatgcattttagaaacatgtaccctaccaaggctgaatcctgaaaaatagaacatcaraacaaactaataagtaaaaaattaaataagtaataaaaaaaatcttatcaaacaaaagcccaggacctgatggctttgctgctgaattctatcaaaccgctaaggaagaactaatatcactctcactaattctatttaacatagtatggatgtcctagtcagaacaattttgcaagacaaagaaataatagccacctgtatgaagaaaggaggaaataaaattgtctccatctactggacatatgactctctctatatatagaaaaccataaagacttcacccaaaactgtttgaactgataaacaaatttactaaagacacagtttacaaaataagcatacaaaattagtttttatacactaacagcaaactacccacccaaaaaattaagaaaacaattctatttacaatagcattaaaaatacttactagtaaattaa

SEQ ID NO: 563248 - DNA, 546 bp, Homo sapiens
tactataaacaactatataccaaaaaatggataacatagaataaaatgatgcattttagaaacatgtaccctaccaaggctgaatcctgaaaaatagaacatcaaaacaaactaataagtaaaaaattaaataagtaataaaaaaaatcttatcaaacaaaagcccaggacctgatggctttgytgctgaattctatcaaaccgctaaggaagaactaatatcactctcactaattctatttaacatagtatggatgtcctagtcagaacaattttgcaagacaaagaaataatagccacctgtatgaagaaaggaggaaataaaattgtctccatctactggacatatgactctctctatatatagaaaaccataaagacttcacccaaaactgtttgaactgataaacaaatttactaaagacacagtttacaaaataagcatacaaaattagtttttatacactaacagcaaactacccacccaaaaaattaagaaaacaattctatttacaatagcattaaaaatacttactagtaaattaa

SEQ ID NO: 563249 - DNA, 576 bp, Homo sapiens
tgtgtgtatatatatacacacatacacacacacacatacataaatgtatatacacacacaaaaacacagatgtatatagcatgattcatcaattgcaaatatataatatattaatagaattaatttatataattaatattaataagtatgtatagtgacacacgggtatttttcctcaaataaataaaaaatcgcctgtctcctcaagggtataatagaactccttattacctaatctttttttactacctagagatatttgcctgggtctggttttaagctataatagaaactatatatacagacattgagtcatacacccacacatcactccctatcccccaccacacacctgcataccttagtgtaaaaaaaaaaactatcacatcatgtaaaatataattttgaagttaaattatgctaagcttgtctcaaattgaaaacatgwtgaagcactgctaaacttagtatagttgccctaagaacatctcacattaatttctctgtatttaaaaaatggtgatgtcctgcatttaccatccacggtatcactgctctcttggcatgacggcttaa

SEQ ID NO: 563250 - DNA, 576 bp, Homo sapiens
tgtgtgtatatatatacacacatacacacacacacatacataaatgtatatacacacacaaaaacacagatgtatatagcatgattcatcaattgcaaatatataatatattaatagaattaatttatataattaatattaataagtatgtatagtgacacacgggtatttttcctcaaataaataaaaaatcgcctgtctcctcaagggtataatagaactccttattacctaatctttttttactacctagagatatttgcctgggtctggttttaagctataatagaaactatatatacagacattgagtcatacacccacacatcactccctatcccccaccacacacctgcataccttagtgtaaaaaaaaaaactatcacatcatgtaaaatataattttgaagttaaattatgctaagcttgtctcaaattgaaaacatgttgaagcactgctaaacttagtatagttgccctaagaacatckcacattaatttctctgtatttaaaaaatggtgatgtcctgcatttaccatccacggtatcactgctctcttggcatgacggcttaa

SEQ ID NO: 563251 - DNA, 400 bp, Homo sapiens
agtctatacctatatttaatatcaaaaatataaaataggccaggcactgtggctcacgcctgtaatcccagcactttgggaggccgaatcaggtggrtcacctgaggtcaggagttcaagaccagcctgggcaacatggcgaaaccctgtctctactaaaaatacaaaaattagccaggcgtggtggcacactcctgtaatcccagctcttagggaggctgaggcaaaggaatcgcttgaattgaacctgggaggcagaggttgcagtgagccaagatcgtgccactgcactccagcctgggcaacagagcaagactccatctcaaaaaaaaaaaaaaaaaaatatatatatatatatatatatacataaaaaataatatttctgtaaaccccaaaaacc

SEQ ID NO: 563252 - DNA, 400 bp, Homo sapiens
agtctatacctatatttaatatcaaaaatataaaataggccaggcactgtggctcacgcctgtaatcccagcactttgggaggccgaatcaggtggatcacctgaggtcaggagttcaagaccagcctgggcaacatggcgaaaccctgtctctactaaaaatacaaaaattagccaggcgtggtggcacactcctgtaatcccagctcttagggaggctgaggcaaaggaatcgcttgaattgaacctgggaggcagaggttgcagtgagccaagatcgtgccactgcactccagcctgggcaacagagcaagactccatctcaaaaaaaaaaaaaaaaawatatatatatatatatatatatacataaaaaataatatttctgtaaaccccaaaaacc

SEQ ID NO: 563253 - DNA, 572 bp, Homo sapiens
agttcatcccttgcttcccagaagtactcatacaaacatgtgaatttaaaaaatagatttttctgttcaaaaaataaagcttctgcccttttaaaaacttgtcaggctttcatttgccaaaatgttgaaaactgcacatattcaaacatagttcccgtaggaacacatattcctcaactctcacacctttgaagacacaggagacgggcaatataaatgttcccttctttccagctgatgttaaatagttaggtttgcttcatgagattatcggaataaagggttarattttcattttccattactctatctagtaaaattagacttaaagtaggtagaatactaccagaggaattacacagtgattggcaaactggcctaaaataatcaggctttttatttatacttccctttttaaagttgtcatttgacaacagcttccatctttaacagcaggcaaaagaaaatgaggtgccatgctatattaattaaaatattccacaatgaaagaaaatacaaaacctgaaaataacttcagtgctatagacatttaaaaagttacaatggttaaa

SEQ ID NO: 563254 - DNA, 683 bp, Homo sapiens
actaggcaggcttggagagccataatgacttggccaacatgtacggaattgaggagatgttgaaaagatggttctatatttgggctccctggaataatagcagcccctcaggctttcaggccaacacataaaatctcagttccctgtcacccatcaytctgacagcctcgttgtcactcaccccattctagcccaagagaactccatttaaaacaggtaagtgattttttttattgctgtgagtaaaattacagtctagataggaaaggccccatctagactagatgttatgggacctaaagtaggtggctgaaagcactagtactattgtctggacttgggtagacagagttggagagactaaagcagtgcggggtggagccacttgtactggctcatctgtgcatattccttgcaaacttcacattcagtgatgtcacgttgataccttgaaaatgaccttggtgggagtacatacactgccaaaactggcaaacactacaatgcagggctttaattgattgactgatctttgtgtgtgtattttagctgggttaccagcacaccaccaaaccacagtcataaatatgggctatgccagtagaatggaaaatgctgtctgggatggcagaatgaggagactctgggcatggggtccctttttacctctcagtgtgccaaag

SEQ ID NO: 563255 - DNA, 683 bp, Homo sapiens
actaggcaggcttggagagccataatgacttggccaacatgtacggaattgaggagatgttgaaaagatggttctatatttgggctccctggaataatagcagcccctcaggctttcaggccaacacataaaatctcagttccctgtcacccatcattctgacagcctcgttgtcactcaccccattctagcccaagagaactccatttaaaacaggtaagtgattttttttattgctgtgagtaaaattacagtctagataggaaakgccccatctagactagatgttatgggacctaaagtaggtggctgaaagcactagtactattgtctggacttgggtagacagagttggagagactaaagcagtgcggggtggagccacttgtactggctcatctgtgcatattccttgcaaacttcacattcagtgatgtcacgttgataccttgaaaatgaccttggtgggagtacatacactgccaaaactggcaaacactacaatgcagggctttaattgattgactgatctttgtgtgtgtattttagctgggttaccagcacaccaccaaaccacagtcataaatatgggctatgccagtagaatggaaaatgctgtctgggatggcagaatgaggagactctgggcatggggtccctttttacctctcagtgtgccaaag

SEQ ID NO: 563256 - DNA, 683 bp, Homo sapiens
actaggcaggcttggagagccataatgacttggccaacatgtacggaattgaggagatgttgaaaagatggttctatatttgggctccctggaataatagcagcccctcaggctttcaggccaacacataaaatctcagttccctgtcacccatcattctgacagcctcgttgtcactcaccccattctagcccaagagaactccatttaaaacaggtaagtgattttttttattgctgtgagtaaaattacagtctagataggaaaggccccatctagactagatgttatgggacctaaagtaggtggctgaaarcactagtactattgtctggacttgggtagacagagttggagagactaaagcagtgcggggtggagccacttgtactggctcatctgtgcatattccttgcaaacttcacattcagtgatgtcacgttgataccttgaaaatgaccttggtgggagtacatacactgccaaaactggcaaacactacaatgcagggctttaattgattgactgatctttgtgtgtgtattttagctgggttaccagcacaccaccaaaccacagtcataaatatgggctatgccagtagaatggaaaatgctgtctgggatggcagaatgaggagactctgggcatggggtccctttttacctctcagtgtgccaaag

SEQ ID NO: 563257 - DNA, 683 bp, Homo sapiens
actaggcaggcttggagagccataatgacttggccaacatgtacggaattgaggagatgttgaaaagatggttctatatttgggctccctggaataatagcagcccctcaggctttcaggccaacacataaaatctcagttccctgtcacccatcattctgacagcctcgttgtcactcaccccattctagcccaagagaactccatttaaaacaggtaagtgattttttttattgctgtgagtaaaattacagtctagataggaaaggccccatctagactagatgttatgggacctaaagtaggtggctgaaagyactagtactattgtctggacttgggtagacagagttggagagactaaagcagtgcggggtggagccacttgtactggctcatctgtgcatattccttgcaaacttcacattcagtgatgtcacgttgataccttgaaaatgaccttggtgggagtacatacactgccaaaactggcaaacactacaatgcagggctttaattgattgactgatctttgtgtgtgtattttagctgggttaccagcacaccaccaaaccacagtcataaatatgggctatgccagtagaatggaaaatgctgtctgggatggcagaatgaggagactctgggcatggggtccctttttacctctcagtgtgccaaag

SEQ ID NO: 563258 - DNA, 462 bp, Homo sapiens
tgcgtatactatacccaatgtgtagtcttttatccctcacctcctcccamccttcctcccacatccccaaagtccattatataattttcatacctttgcatcctcctagcttagctcccacttgtaagtgagaacatacaatatttgattttccactcttgagttacttcacttagaacaatggtctccgactccatccaggttgctgcaaatgccattatttcatttctttttatagctgagtagtattccatggtgtatataccacattttctttatccacttgttggttgatgggcatttaggctggatgatacactttaaatggatgaattgtatgatatgtaaattatatctttaaagctgtttaaaagaaaagaaaagcccaggacttgatggtttcactcatgaattctacaaaacacttaaagaagaaagaaaaccagtccttctcaaactctt

SEQ ID NO: 563259 - DNA, 462 bp, Homo sapiens
tgcgtatactatacccaatgtgtagtcttttatccctcacctcctcccaaccttcctcccacatccccaaagtccattatataattttcatacctttgcatcctcctagcttagctcccacttgtaagtgagaacatacaatatttgattttccactcttgagttacttcacttagaacaatggtctccractccatccaggttgctgcaaatgccattatttcatttctttttatagctgagtagtattccatggtgtatataccacattttctttatccacttgttggttgatgggcatttaggctggatgatacactttaaatggatgaattgtatgatatgtaaattatatctttaaagctgtttaaaagaaaagaaaagcccaggacttgatggtttcactcatgaattctacaaaacacttaaagaagaaagaaaaccagtccttctcaaactctt

SEQ ID NO: 563260 - DNA, 462 bp, Homo sapiens
tgcgtatactatacccaatgtgtagtcttttatccctcacctcctcccaaccttcctcccacatccccaaagtccattatataattttcatacctttgcatcctcctagcttagctcccacttgtaagtgagaacatacaatatttgattttccactcttgagttacttcacttagaacaatggtctccgactccatccaggttgctgcaaatgccattatttcatttctttttatagctgagtagtattccatggtgtatatacyacattttctttatccacttgttggttgatgggcatttaggctggatgatacactttaaatggatgaattgtatgatatgtaaattatatctttaaagctgtttaaaagaaaagaaaagcccaggacttgatggtttcactcatgaattctacaaaacacttaaagaagaaagaaaaccagtccttctcaaactctt

SEQ ID NO: 563261 - DNA, 462 bp, Homo sapiens
tgcgtatactatacccaatgtgtagtcttttatccctcacctcctcccaaccttcctcccacatccccaaagtccattatataattttcatacctttgcatcctcctagcttagctcccacttgtaagtgagaacatacaatatttgattttccactcttgagttacttcacttagaacaatggtctccgactccatccaggttgctgcaaatgccattatttcatttctttttatagctgagtagtattccatggtgtatataccacattttctttwtccacttgttggttgatgggcatttaggctggatgatacactttaaatggatgaattgtatgatatgtaaattatatctttaaagctgtttaaaagaaaagaaaagcccaggacttgatggtttcactcatgaattctacaaaacacttaaagaagaaagaaaaccagtccttctcaaactctt

SEQ ID NO: 563262 - DNA, 556 bp, Homo sapiens
gcataggcaacaaaaatgaaaattggcagaattatttgaaactagaaaaacttctgcataggcaggaaataacagaagaaaaaggcaatctatggaatgggagaaaatatttgcaaacctttatctgataaggggttaatagcaaaatatataaataattccaacaacccaatagtagggaataaacttcttaaaaaatgggcaaagcacctaaataggcaattctcaaataagacatacaaatggcccataggtaaatgaagaaaagaaaaaggtcaacaaaattaatcatcagggaaatgcaaattaaaaccacaatgagatatcacctcatacatgttagaatgactattaacgaaaagacaaaagataaaaagtgttggagagaatggggagaaggggaacccttgcacattgttggtgggaatgttagatagtataactattatggaaaacagtatggacagtcataaaaaawttaaaaatagaactagctatgatccagcaatctcactactgtgtatatatccaaatatatgaaatcagtacgttgaag

SEQ ID NO: 563263 - DNA, 411 bp, Homo sapiens
tttgtctttttgataatagcccttaagataggtgcaaagtgatatctcattgtggttttgatttatatttccctgatcatcagtgatgtttaacattttttaatacacctattgacctattggccatttgtatgtcttcttttgagaaatgtttactcaggtgttttgccctttttaaaatastgttgtttgttttcttgtcattaagttgtttggattccctataaattttagatattaatgccatatcagttgtatagactgcaaagattttctcccactttacaggttgtgtttgcactttgtggattgttttctctgctgtgcagaatctttttctttgaatgtaatctcatttgtctattttgctttttgtcatctttgattttgaggtcatatccaaaaaaaaat

SEQ ID NO: 563264 - DNA, 411 bp, Homo sapiens
tttgtctttttgataatagcccttaagataggtgcaaagtgatatctcattgtggttttgatttatatttccctgatcatcagtgatgtttaacattttttaatacacctattgacctattggccatttgtatgtcttcttttgagaaatgtttactcaggtgttttgccctttttaaaatagtgttgtttgttttcttgtcattaagttgtttggattccctataaattttagatattaatgccatatcagttgtatagactgcaaagattttctcccactttacaggttgtgtttgcactttgtggattgttttctctgctgtgcagaatctttttctttgaatgtaatctcakttgtctattttgctttttgtcatctttgattttgaggtcatatccaaaaaaaaat

SEQ ID NO: 563265 - DNA, 565 bp, Homo sapiens
attcaagatgagatttgggtggggacacagtcaaacaatatcagtgttctattcctgggttggtaaatagattggcaagtaaaaactacaaggtcaatggagggatgtcataggatacaggcctctaaatataaatcagcacctggacatgaaggacatttaatgtcttgctaaggagcatgaacattattcctrggtaaaagaaatccactgatggcttctagaggggagtgtctctggccaatctaaaatcaacatattcagtaatttcagcttgtgatttgcagggagaacaaaggaagggcaaatcttgggttaaaattcacaattataattatttgcatatttaaatccattgtccacattatccatattctaaattaacatgggaaaacttggtttgtggttttgataccatgatgaagtagagattttgactttggccttgtttagatgtttcctacagatgctgtgttcattagtccagaggtgttagttcttcaattccttttataagcattttgttattttgtcattggctaataatggatgtgtcaaagttaat

SEQ ID NO: 563266 - DNA, 559 bp, Homo sapiens
tcactcccactctgtcgatttccatttttcacataattgtgctttagaaaatttccccttttgcaaataatgtgcctagttagttgagagatttcactaatgcttatgggtcttttgtgcaatatttcattaagctgttgtatatcctgtttgataactacraaaggaaatgaacacagttattacaatttaaaaaaatctttcggacaaatctttagtttcttttttccaagagttctattttcttttacatacatttctaaaccacaaccacatgtaaaaatgaattttattttaaaggctcaccattgctctgtaaaatgcacatacatttgcaagatagataaaatatagactacaaattgctctcagtagttaaaattcaattgcattgatgaaatatgggaaaaggttcattttctggtgctgtctttgggttttttgaaatcctggttgctggcttactcactaatttggtaatttgcaataggcttcccagtcattagtgcaaattagcaaggtttagctataatgtgaatattaatatcttcatttagaa

SEQ ID NO: 563267 - DNA, 578 bp, Homo sapiens
tgcctggctaatttttaaatttttttgtagaggcggggtctccctatattgccctggctagtctcttaactccagtgctcaagtgatcctcccacctcggcttctcaaagtgctgggatttcaggtgtgagctaccgtgcctggcctggattttgtacttttaatgggctgtaaaaaaatgaagaatatgtgagaccattgtggcccacaaagcctaaaatatttactgtctggccctttacrgaaatagtttgtacagccctaatttatgataacttggaaagcagtgtgttggctgcagatactggtagatgggtggactagtggtgtgaatctgtggaagttatgttctgattatgtttcctcgtttgtatcatacacatttatcttacaattccaaggtaggaaataagttaaacaatgctgcaaacaaatttggtaacccttacctttcttgtgaaggggcacttgggcacttcctttcctttcctaattcattggaggaagaaagagaagttgggaagataacaattgatagcaagcttcttaaaacaggctcctgtttcttggctggatgc

SEQ ID NO: 563268 - DNA, 366 bp, Homo sapiens
gaattttggaatcaatttgtcagtttctacaaagaagccagctgagattttgatagggatcatgttgaatctgtagatcaatttggagagtattatcctcttaatcaatttggagagtattatcttaacaatgttaagtcttcagacycataaacatgggatgtcttttcatttatttatatcttttaaaaatttatttaaacaatgttttgtaattttcagagtataaggtttggacttcctttattaaatttattcataagtattttattcttttagatgcttttgtcaatgtaattattttcccaatttcatttttggggtgttcattacaagtgtatggaaatacaatttactttttgtaca

SEQ ID NO: 563269 - DNA, 565 bp, Homo sapiens
aatgagacaggatttcagtgaaataattctatttgggaaagtgtaggtaacactgttaggggagttgatacaaggacgagaaggcagccatttaaaggtccaggctttaattgacacataatctctgaaattttctttaactattaaccctgtcagttgtcagttgatgtgtcccatggactatgtctccaaaacctacccattyttagtagagaacctatccatttttgctagagatggggtttcgccatgcctgtctcgcactcctgacctcaagagatctgcctgttttgacgtcccaaagttctgggattacaaagtactgtgtcatccagtgtggcttgattaatatgaaaatgtttatagagataagacaacagaatacttaagaaaatagctagtgtgaagcatacacaaataaatcaggaagggagctgtgtttttttttttttttggttttgtttttttgttttttttgtttttttttttggtttttttttttttgagacagtctgactctgttgcaggggctggaatgcagtggcacgatctcagctcactgaag

SEQ ID NO: 563270 - DNA, 561 bp, Homo sapiens
gtaaggtttccgcattccaaaccatgtgacaaaatattgattcttagtacactctaaaaagtattactttttaatttatggagcaatcacttaaaaattacaaagagataatagtaaatatcacattaagataagattaaaatggaatactaaaaaatgttcaaataatccaaatgaatacaggaaaaaggaaacaagaataaaaaacaggaaacacaaagaactgaataataaaatagtagacctaagtttaagtatatcaacaattacactcaagaagttaataatggagaaaaaatgaaatcgtaagaggaaaaagaaactaatagaataattagagggcaaaaatcaaaacagcatgattaaatccaagcatattgataattacattaaatataaatcgtctaaaactgtcaattagaaggcaacatctgccacattgaaaaaaaayaggcaaagtcctatcagctatcaaagagactaaaatgtatgaaagtataaaactcactagtaaaagtaaggacacaattcaaaatattctaatactgtaatggtggtgtg

SEQ ID NO: 563271 - DNA, 619 bp, Homo sapiens
gtctcttcagcaagatgatagaacaattgtaaatctatatgtaccactggagcaccaaaaatataatgcaaacattattagatctaaaaagagagaagaccccaaaacaataatatcttgggacttcaacagcacatttttaggattggacagatcatccagacagaaaatcaacaaagaaacatcagatcagaccttaatctgcactacagaccaaayagacatttacagaccatttcatctaatagctgcacaatacacattcttctcctcagcacatagaatgctctccaagatagacaattcattaggacacaaaacatgtctcaaaaattcaaaacaattaaaatcatatcaagtatcaagtatctcatctgaccacaacagaataaaactagaaatcaatagcaggaggaactttgaaaactatacaaactcatggaaatgcttctaaaaaaaccacttcggtcaatgaagaaattcagaaaaaaattttaaaatttccagaaacaaacgaaaatggagacaaacagatcaaaacctaaagaagacagcaaaagcagtactaagagggaagtttacagtaataaatccttacattaaaaaaatagaaaagctt

SEQ ID NO: 563272 - DNA, 619 bp, Homo sapiens
gtctcttcagcaagatgatagaacaattgtaaatctatatgtaccactggagcaccaaaaatataatgcaaacattattagatctaaaaagagagaagaccccaaaacaataatatcttgggacttcaacagcacatttttaggattggacagatcatccagacagaaaatcaacaaagaaacatcagatcagaccttaatctgcactacagaccaaatagacatttacagaccatttcatctaatagctgcacaatacacattcttctcctcagcacatagaatgctctccaagatagacaattcattaggacacaaaacatgtctcaaaaattcaaaacaattaaaatcatatcaagtatcaagtatctcatctgaccacaacagaataaaactagaaatcaatagcaggaggaactttgaaaactatacaaactcatggaaatgcttctaaaaaaaccacttcggtcaatgaagaaattcagaaaaaaattttaaaatttccagaaacaaacgaaaatggagacaaacagatcaaaacctaaagaakacagcaaaagcagtactaagagggaagtttacagtaataaatccttacattaaaaaaatagaaaagctt

SEQ ID NO: 563273 - DNA, 662 bp, Homo sapiens
tcctgggttcacgcgattctcgtgcctcagcctcctgagtagctgggattacgggcgcccatcatcacgcctggctgattttttgtattttttgtagagatggggtttcgccatgttggctaggctggtctcgaacttctgacctcaggcaatccgcctgcctcagcctcccaaagtgctgggattacagatgtgagccactgcgcctggtcatattttttgattttataccaaaatattttatgttctttaaggctattgtagttggtagtatttcttttaatttcaatttccagtttgtagactttaaaaaaataatcagggaaatctttctttggtgatatttcctcgcccatatctctttattttttatttttgtggttacgttataggtgtatatatttatgggataaatgagatattttgatacaggtatacaatgcctaataaccacatcagggtaaatagggtattcattacctcaagcatttatcctttctttgtgttataaacaattcatactaattatactttctacccattaaccatccccatttcccccactccaatacctttcccagcctcaggtaaccatcattctactctrtctccatgaattcaactattttaatttttagctcccagaaataactgagaaaatg

SEQ ID NO: 563274 - DNA, 633 bp, Homo sapiens
aacacttttttggagggacacattcaaaccatagcagagactctgcttcatgtcaaggatggctgttattccagtttgcaatatctctttcctcctttctgtctgagatctcctcagaattgcctcacaattaaatattctgttttaggaggcaatcaacttgttttggttcagcacacatgacctagctcacttttcaaaaaacagagctttactgagttacaatttgcacctcaccatattcaccttttaaagatgtacagttcacttatgtttagcatatttagagagtggtacaaccatcaccattacctaattttaggctgaagagccaaattgtataaacaaattggtatctgtgacttgttaaaaaataatttctagggtatcttatatagtcagtataaaatcaaactaatctgtactttagatgtataaaaatgaatttttataatgatgttttatcataacatcattatatcagtattttaccatcctgagttatcaaagcatattataatttccaaaaatatagaaataaactgaggtaggcaraactttaagatggcccttttgacttttatccctggtattactgtcatgattatgttatgtcatttgtcaagagggaga

SEQ ID NO: 563275 - DNA, 557 bp, Homo sapiens
tacactatcttgttccacttattaacttttaaacttttgatgtgttattcaatttttctagctttgaatttcctaatttgtaaagaagagatagcaataatataaccctccaaagattattattaaatgagataatgagatagttactgagaactgtgctctattagagaatgatgctgctgttgattgcaaggttgtttattgcaccattgtttctaagggcaaattgaaacccaaatgagtaacaaagtagagttatttaaataaattgtatattatcaacacaatgaaatttagctcttaaaaaagtaataaatgggacacagaatgatgccccaaatgtcttgttaagtgaaacagtagttgcaacatagtatttttagtacaaatatgtacacacacacacacacacacacacayatatatataaacatatctatctaaaaaacatgtacatgtgttttatgtatacgaaaatattcagaactgtagtttgaaaatagtctgtatgtaacaaattgtgaaatgtacctctaggtagtgggctgggggaaagg

SEQ ID NO: 563276 - DNA, 514 bp, Homo sapiens
gtggacagaaatggtaaataaaataatgggggggggggggcggggtcaggcagtgcccgcatggactaaaataagtattagattctgccttcaagcttgctaccagatgcgactgtaaaattgaagtacatcatctcacttgccactataaagcctgctaccagatgcagcttaattrtcacttgccactcactcactgatagggttttgatatgagtctgcaagcaattgatttattgtggtccctgtgcactcaaacctctctgctaacattaatctgtatttgcagccactcccaagccctatcatcatcacctcagctccacctcagatcatcaagcattagattctcatagggacatgcaacctagatccctaacatgtgcagtttacaatagggtttgcactcctatgataatctaatgttgccactcatctgacaggaggtggagctcaggcagtaatgcgagtgatggagaatggctgtaaagacagatgaagctgtgtttcctca

SEQ ID NO: 563277 - DNA, 525 bp, Homo sapiens
gcgagaactcactcactatcacgagaagagcatgggggaaatcacycccatgattcaattaccttcaccaggtctcttccttgacacatggggattatggggattgtggggattaaaattcaaggtcagattttatgtggagacacacccaagccatatcagggatgttctaagggcagtgaaacagggcagtggccctgggagaaaagggcactgatgactaagactttgtggagccacagggatggggatgtggcccttttagtcacacctgtggtggtggtggtggggtggggtacttgtttggcctctgcagaaggctgacactatgtagacttctttctatgccttcaaagtctccaaaggttggggtaggggtgtggggacaactctggtgagctctttgtcacttttgatttgctcagtaacatcctaggagacaccgttgatcttgtacccttttaaattttttcaactcttttaaagcccagggattagccaatgggctgcttcatgtcacggaaa

SEQ ID NO: 563278 - DNA, 525 bp, Homo sapiens
gcgagaactcactcactatcacgagaagagcatgggggaaatcacccccatgattcaattaccttcaccaggtctcttccttgacacatggggattatggggattgtggggattaaaattcaaggtcagattttatgtggagacacacccaagccatatcagggatgttctaagggcagtgaaacagggcagtggccctgggagaaaagggcactgatgactaagactttgtggagccacagggatggggatgtggcccttttagtcacacctgtggtggtggtggtggggtggggtacttgtttggcctctgcagaaggctgacactatgtagacttctttctatgccttcaaagtctccaaaggttggggtaggggtgtggggacaactctggtgagctctttgtcacttttgatttgctcagtaacatcctaggagacaccrttgatcttgtacccttttaaattttttcaactcttttaaagcccagggattagccaatgggctgcttcatgtcacggaaa

SEQ ID NO: 563279 - DNA, 552 bp, Homo sapiens
ctcagaactgaaaggtggctctgggaatggcttcaagaaaccatggagtgactgaggctccaatgaaataatggaagtatccacagacaagcatgatgttctctgaaaatataagaagcacagtattgtgagtttgatctttttaatgtggtgggacaggtgtaacmagcattgccatatgctctaattcttacatagctcctacagtgtgtcctctttgccctactctaattgcctactcctaattgctagcttggacaagctgcctcaactttgagccttgtttttcttgttgctacagagatgattttactactaatgtctaagtctgtctacatgtttcttcctaccctcccccactctcgtagatagttctagaagggtgtctcctaggacctgatattctttatcacctttctgtggcctccatgtgtggaccaggacacccctttagggctctgttgccctagagagtggggaagggtcaaggtattattgcccttgatctaaaaccctggagtcaatgtcagtctttacttaggcagtgtggaa

SEQ ID NO: 563280 - DNA, 538 bp, Homo sapiens
gattcaattacctcctaccaggttcctcccacgacatgtgggaattgtgggagttacaattcaaggtaagaccatatcagtcaatcactatctggtacatgactatatgatgtctactgagcaccggttatgtgctggacattgttcctgctgcttctgtgtatgtgccaacttctttttttttttttttttttttttgagatggagtcttgctctgtcgcccaggctggagtatagtggcacaatcttggctcactgcaacctccgcctcccgggttyaagccattcccctgcctcagcctcccgagtagctgggactacaagcacgcaccaccatgcctggctaattttttttcttttttgtattttagtagagacagggtttcaccgtgttggccaggctagtcttgaactcctgacctcgtgatctgcctgcctcggcctcccaaagtgctgggattacaggcatgagccaccaagcctggtctgtgccaacttcttttgcgcatgttattccacgtgtgatatagaatgaata

SEQ ID NO: 563281 - DNA, 583 bp, Homo sapiens
ttctaagcatacagtttgatggactccccacatcaaaacacagaaccactccattaccctcaaaaatttccttctttctctttcacgtcaatcccctcccctgamcatcagtcccaggcaaccactgatcttctttctgtcactacacttccatctttttgagaattaaaaatggaaaatataaatcccagcactttgggaggccaaggtgggcggatcacctgaggtcaggagttcgagactggcctgaccaacatggcaaaaccccgtctctactaaaagtacaaaaattaaccgggtgtggtggcaggtgcttgtaatcccagctactcaggaggctgaggcaggagaattgcttgaacatgggaggcggagattgcagtgagctgagattgcgcctgtgcactccagcctaggcgacaagagccagtctccatctaaaaaaaaaaaaaggcaaatatgaaggaataacttatcctctgttcagttaggtaaaatattaacatgattaatcttaaaaaaatctacagatggacaggattttatatgcttatatggattatatctttcaaaaagtaaacag

SEQ ID NO: 563282 - DNA, 619 bp, Homo sapiens
ttggaacacagtggaaccctgactcaattttcccagggcaccctccatagatgtggttattaccggactctccagcactcagtgtctgatttctgctctgttggcttgcaccacggggggtgttcacaccccacctgggtgtttgcttgtaccctgttgacttcatttgctataaatgcaacctggatcatgtgaatcctgaaacatttcttactttggttcctttcaatggcagagctagaktaacccaatctacatgggggtggtgtagaaagagttaccatctaacctgactcatgtctgatcatttcctgagtttgtgaagcacaactgattgcatagcaattctcacctgtgacttggtgctgcatcagactggggcttctaacatgttagaatgacaggttgatagaagctgtgtaggctggaaagcgctttgtcctgctctcacgctttcctctgtggtatgtcggagcttagaaatggggaggaggtaagacaacctgcagagacgcacagccctgctaactatcccttcttgccctcctcttcccttgtggcacagattttgggataatggaaggatgggggcctgaacagtggagtgtatgacatggtt

SEQ ID NO: 563283 - DNA, 364 bp, Homo sapiens
tggttattaccggactctccagcactcagtgtctgatttctgctctgttggcttgcaccacggggggtgttcacaccccacctgggtgtttgcttgtaccctgttgacttcatttgctataaatgcaacctggatcatgtgaatcctgaaacatttcttactttggttcctttcaatggcagagctagattaacccaatctacatgggggtggtgtagaaagagttaccatctaaccygactcatgtctgatcatttcctgagtttgtgaagcacaactgattgcatagcaattctcacctgtgacttggtgctgcatcagactggggcttctaacatgttagaatgacaggttgatagaagct

SEQ ID NO: 563284 - DNA, 619 bp, Homo sapiens
ttggaacacagtggaaccctgactcaattttcccagggcaccctccatagatgtggttattaccggactctccagcactcagtgtctgatttctgctctgttggcttgcaccacggggggtgttcacaccccacctgggtgtttgcttgtaccctgttgacttcatttgctataaatgcaacctggatcatgtgaatcctgaaacatttcttactttggttcctttcaatggcagagctagattaacccaatctacatgggggtggtgtagaaagagttaccatctaacctgactcatgtctgatcatttcctgagtttgtgaagcacaactgattgcatagcaattctcacctgtgacttggtgctgcatcagactggggcttctaacatgttagaatgacaggttgatagaagctgtgtaggctggaaagcgctttgtcctgcyctcacgctttcctctgtggtatgtcggagcttagaaatggggaggaggtaagacaacctgcagagacgcacagccctgctaactatcccttcttgccctcctcttcccttgtggcacagattttgggataatggaaggatgggggcctgaacagtggagtgtatgacatggtt

SEQ ID NO: 563285 - DNA, 446 bp, Homo sapiens
aagctttcataggcacatgggcttttcttctgaagaacagaagatgaagaaactgagacttagaggatttagttaatgtgtccaaagttaaacagctaataaacagtgaacctgagatccaaggtcccaagaccaataatgacagatccaggattcagaactgtatttgattctaaactctctgckgctgactactatgccagagatgggaaataggtttttacctcacatggtaattttgatgagcagtgctgcctatagtgacatgatgaaaaggatttctgaggttgcatccttgctcagtggaaaagtataccatgtttaattagtgatgcctgtcgcaggtgaaggactggagaaggaaggtagaccaggcaggtaattggcccatgcaaatgctataatgcacaatgttatagtgcccatttgattaaaaaaaatcaaga

SEQ ID NO: 563286 - DNA, 577 bp, Homo sapiens
ctgtagcatttcagtattctggtttatggttctggattctgggtttctagttgaggattctagctggtgagtgtttgagttcttgcctgtgactctttaaatcccttttgcttccacactggcatgctgacttctagtcaatatccagggcagatattttgattccattccaaatctgtttctcccttagttttcctttcttagtattatcagatcaaaaatctgtttttccttcaaatttccatcaacrtctagtccatcaacaaacctgtcagttctaccttcaaaacattctccaattctgctcctgtctcccctaccccaaccactgccatctcagtgctggattccttgatttcctaactagactaacagtagcttcctcacttatttctctacttctaccttcaactgtctctatttcactttcatacagcttccagaatgatctttattaaaaaatacttaattttgcctttctgcactactcacagaggggtcaaaatggcattgttctggattcctgtcgtaacttaaagggaaactttcacaatgtctggagcccttgatgccctgc

SEQ ID NO: 563287 - DNA, 577 bp, Homo sapiens
ctgtagcatttcagtattctggtttatggttctggattctgggtttctagttgaggattctagctggtgagtgtttgagttcttgcctgtgactctttaaatcccttttgcttccacactggcatgctgacttctagtcaatatccagggcagatattttgattccattccaaatctgtttctcccttagttttcctttcttagtattatcagatcaaaaatctgtttttccttcaaatttccatcaacatctagtccatcaacaaacctgtcagttctaccttcaaaacattctccarttctgctcctgtctcccctaccccaaccactgccatctcagtgctggattccttgatttcctaactagactaacagtagcttcctcacttatttctctacttctaccttcaactgtctctatttcactttcatacagcttccagaatgatctttattaaaaaatacttaattttgcctttctgcactactcacagaggggtcaaaatggcattgttctggattcctgtcgtaacttaaagggaaactttcacaatgtctggagcccttgatgccctgc

SEQ ID NO: 563288 - DNA, 530 bp, Homo sapiens
aactaataaataaattcagtaaaatttcagggtaaaaaaaacaayatacaaaaattatagtatttctatacactaacaatgaattatccaaaaagaaatttaaaaagcaatcttatttacaagcataaaaatactgagaaataaacataaccaaggagatgaaagagttgtatgaaggaaacaatcaacaaaataaaaaggcagcttatgcagtggaagaatatatttgtaaaacatatatttgctaaagagttaatattcaaaatatatgagaaattcatacaactcaatagtgaaaacacaaataatctgattcaaaaatcggcaaaggaactgaatagacatttctccaaataagatatacaaatgatcaacaggtgtatgaaaagttgctcaacatcagtaatcatcagggaaatgcaataaaaccacatgagatatctacttcacacctgttttgctggctattattaaaaaaaatccaaaggataacaaatgtcattaaggatgtagtggaaggggaacacttg

SEQ ID NO: 563289 - DNA, 633 bp, Homo sapiens
ctggtagaactaataaataaattcagtaaaatttcagggtaaaaaaaacaatatacaaaaattatagtatttctatacactaacaatgaattatccaaaaagaaatttaaaaagcaatcttatttamaagcataaaaatactgagaaataaacataaccaaggagatgaaagagttgtatgaaggaaacaatcaacaaaataaaaaggcagcttatgcagtggaagaatatatttgtaaaacatatatttgctaaagagttaatattcaaaatatatgagaaattcatacaactcaatagtgaaaacacaaataatctgattcaaaaatcggcaaaggaactgaatagacatttctccaaataagatatacaaatgatcaacaggtgtatgaaaagttgctcaacatcagtaatcatcagggaaatgcaataaaaccacatgagatatctacttcacacctgttttgctggctattattaaaaaaaatccaaaggataacaaatgtcattaaggatgtagtggaaggggaacacttgtacactgctggtgtcaatgtaagttggtacagccactatggaaaacagtatccagatttctcaaaaaattcaaaatcagaactgccacacgaacct

SEQ ID NO: 563290 - DNA, 661 bp, Homo sapiens
tacaaatgatcaacaggtgtatgaaaagttgctcaacatcagtaatcatcagggaaatgcaataaaaccacatgagatatctacttcacacctgttttgctggctattattaaaaaaaatccaaaggataacaaatgtcattaaggatgtagtggaaggggaacrcttgtacactgctggtgtcaatgtaagttggtacagccactatggaaaacagtatccagatttctcaaaaaattcaaaatcagaactgccacacgaacctgcaatccaacttttggatatatattcaaaggaattgaaatcaggatcttggaaagctatctgcactcccatgcttattgcagcattattcacaatagccaagatatgaaaactacttaaatgtccatttttagataaatggataaagaaaatggtatatacatgcaatagaatattattgagacgtcaagaagaaggaaaccccaccatttgtgacaacatagataaacttggaggacattatgctaaatgaaataaaccaaacacagaagggcaaatactttatgatctcacttatatgatgaattaaaaatagccaaactcatagaagcagagcttggaatggtgattgccagaggctagggggaggaggaaatgaagaagtattagtcaaagg

SEQ ID NO: 563291 - DNA, 661 bp, Homo sapiens
tacaaatgatcaacaggtgtatgaaaagttgctcaacatcagtaatcatcagggaaatgcaataaaaccacatgagatatctacttcacacctgttttgctggctattattaaaaaaaatccaaaggataacaaatgtcattaaggatgtagtggaaggggaacacttgtacactgctggtgtcaatgtaagttggtacagccactatggaaaacagtatccagatttctcaaaaaattcaaaatcagaactgccacacgaacctgcaatccaacttttggatatatattcaaaggaattgaaatcaggatcttggaaagctatctgcactcccatgcttattgcagcattattcacaatagccaagatatgaaaactacttaaatgtccattkttagataaatggataaagaaaatggtatatacatgcaatagaatattattgagacgtcaagaagaaggaaaccccaccatttgtgacaacatagataaacttggaggacattatgctaaatgaaataaaccaaacacagaagggcaaatactttatgatctcacttatatgatgaattaaaaatagccaaactcatagaagcagagcttggaatggtgattgccagaggctagggggaggaggaaatgaagaagtattagtcaaagg

SEQ ID NO: 563292 - DNA, 573 bp, Homo sapiens
acatctcaggacctgtttggttctgaaaactctgggagcatatgaggaactggcaatttgttttattttttaatttaacgtttaagttcagggctacaagagcaggtttgttatgcaggtaaacttttgtcatggggatttgttgtacagattattttgtcaccctggtattaagcstagtgcctattaattattttttctgatcaatttgatagtgaacaaaaggagcctaactgcattatgagaacagaaagaatattttaataaccattccccctttctccctgtataatggctttttctttattaatttgattaaaatgtctttaaagtccaattgtgtttccagcacggggataagaaaaactctgagactaaaagcagagtttaagtactgatgctgaagtgatgcagaattaagaaaagacagttgtgaactggaattagtctggagagttttacaaaggagtcaggtcaactttgggtcttgaaggcagggtaggttttacatttgatctgagagtaggtaaatagccattaatggttcttaagaagggagtggtgtgctagaaa

SEQ ID NO: 563293 - DNA, 631 bp, Homo sapiens
tccaattgtgtttccagcacggggataagaaaaactctgagactaaaagcagagtttaagtactgatgctgaagtgatgcagaattaagaaaagacagttgtgaactggaattagtctggagagttttacaaaggagtcaggtcaactttgggtcttgaaggcagggtaggttttacatttgatctgagagtaggtaaatagccattaatggttcttaagaagggagtggygtgctagaaatatagtatctgggaaattatctgtagatgccctaccagaattgagatccttgaccagacttcgaactacttagggtatagagatgtgctttttacactttgcattgaagcatagtttctagcatatagtaggtcctaaaagattattcactggatgagattggggaggatgttgaatctggaagggttatgaggtagaaacccaatgaggattgcttgtttcactggcttccacatattgccatgccatgctgtgatgtggacagctccaggatcctcattggctggggaggatgctggaggtgagatgggtccacatttcaaatcctgtagttgcagcttagactggaatgcagagcaccctgcattctttgagggcttgatgtgatgg

SEQ ID NO: 563294 - DNA, 631 bp, Homo sapiens
tccaattgtgtttccagcacggggataagaaaaactctgagactaaaagcagagtttaagtactgatgctgaagtgatgcagaattaagaaaagacagttgtgaactggaattagtctggagagttttacaaaggagtcaggtcaactttgggtcttgaaggcagggtaggttttacatttgatctgagagtaggtaaatagccattaatggttcttaagaagggagtggtgtgctagaaatatagtatctgggaaattatctgtagatgccctaccagaattgagatccttgaccagacttcgaactacttagggtatagagatgtgctttttacactttgcattgaagcatagtttctagcatatagtaggtcctaaaagattattcactggatgagattggggaggatgttgaatctggaagggttatgaggtagaaacccaatgaggattgcttgtttcactggcttccacatattgccatgccatgctgtgatgtggacagctccaggatcctcattggctggggaggatgctggaggtgagatgggtccacatttcaaatcctgtagttgcascttagactggaatgcagagcaccctgcattctttgagggcttgatgtgatgg

SEQ ID NO: 563295 - DNA, 567 bp, Homo sapiens
gtttgggtgataaaggagctcttaagtggcaaattcagagggcacagcccagtgtgccatttgaaaagcaacacsagtgagctctaattgatacggccaaggaaatcctttgcatgggaagcaaagtcctgcacagattgtctggaaactgatggccagcagagggaggtggagcccaaacaacctactggacatgagctgtgtttgctgtgtctctgtgagtagccagagcaactatggaaactcttttggtcacacacatggaaagcctaataagaacatgcagagagcagacattcccagtggggaataatcaccgtaactcacccttgtgtcttgctttatagtgcttaaaacacctccataaaaccttatcatgtgatccccacaaaactcaggtgaggtagaaataggtattcttcctttttttttttttttgtaggtgaaaccctgtcagagaggttaggcagcttgcctgcgggctggttagtaggggacttgggcctccagcttcactggaccctggaagcagagggcagcaccagtgaaacatcatggaaactttcc

SEQ ID NO: 563296 - DNA, 567 bp, Homo sapiens
gtttgggtgataaaggagctcttaagtggcaaattcagagggcacagcccagtgtgccatttgaaaagcaacacgagtgagctctaattgatacggccaaggaaatcctttgcatgggaagcaaagtcctgcacagattgtctggaaactgatggccagcagagggaggtggagcccaaacaacctactggacatgagctgtgtttgctgtgtctctgtgagtagccagagcaactatggaaactcttttggtcacacacatggaaagcctaataagaacatgcagagagcagacattcccagtggggaataatcaccgtaactcacccttgtgtcttgctttatagtgcttaaaacacctccataaaaccttatcatgtgatccccacaaaactcaggtgwggtagaaataggtattcttcctttttttttttttttgtaggtgaaaccctgtcagagaggttaggcagcttgcctgcgggctggttagtaggggacttgggcctccagcttcactggaccctggaagcagagggcagcaccagtgaaacatcatggaaactttcc

SEQ ID NO: 563297 - DNA, 663 bp, Homo sapiens
aacagagctggagaagcagaaggcacaggggaaactaatttggggtggaacattgaaattagttgggagtaggtaatcacctccctttaccaaggttaggtgcccaggaggggccactgagtaccagagggcagaggtgtactgtctgcatccgtccttgctaagtttgggtggtgactggtccatatttgccttagagaggagataaggatcagatttatggataatgtcagcaaatatccagagagtctgtgtggtagaaaccttaacaataaattaatgagatgactccagcagaagagtcttgaagaaattcaaattcaagggatgaaagactcaaagaatgctttataaataaggtgaaatgatatcccattttgtttctttttcttctggcaactgccaagccattrggctttttgagtaggacctctggctattatagagccctggatccatgggttagggtatcatttctctctcctgggcttcagggctggcctgcattctgcagtgggagagactggaaggaccctcagaagttcttagtcttctctgcaaatgggaaccactgagaaactttaaaagcactcgtgcctgggatccatctccagagatactgatttattcagtctcgcagaggcctaagcctgggatttttga

SEQ ID NO: 563298 - DNA, 643 bp, Homo sapiens
atttcctgttgacttggtttgtctcacgcacgtgccattagatctaatgactaacgcatgccaccttctgaagagaacctaaataaccttcctgtaattctagttcttttgtaatagacccaaatctggtttctcttcctggtctacttaaggcaaatgctatggaggtaatttttctatccccttgccaaaggatgtgagggtaaggttagcgacccactgctgcactgcacttctgcttcagaagcaaaagaaagacaatagccaaagggttactggagaagcataataaatagttttcacttattacagcttttatggtccaattctccaaggtgcataaaaccagcacattgagatagggcaaatgagtctaagtgttatatcgtggctttcttgtctcatagtacaccccggagaatacctgaaaccctgcgttagccaacaccaaggttaaaaatacctctctctcctctggctgggggagagagcaggtttcaccttgycgagggacagtgaaggccatagccgcactttcttgactaggacattctcttgctggagacctgcctaaatacaagtatagcccaccatagaatttctcccagaaacatggtcggctccgtcttgagctgtcatcata

SEQ ID NO: 563299 - DNA, 643 bp, Homo sapiens
atttcctgttgacttggtttgtctcacgcacgtgccattagatctaatgactaacgcatgccaccttctgaagagaacctaaataaccttcctgtaattctagttcttttgtaatagacccaaatctggtttctcttcctggtctacttaaggcaaatgctatggaggtaatttttctatccccttgccaaaggatgtgagggtaaggttagcgacccactgctgcactgcacttctgcttcagaagcaaaagaaagacaatagccaaagggttactggagaagcataataaatagttttcacttattacagcttttatggtccaattctccaaggtgcataaaaccagcacattgagatagggcaaatgagtctaagtgttatatcgtggctttcttgtctcatagtacaccccggagaatacctgaaaccctgcgttagccaacaccaaggttaaaaatacctctctctcctctggctgggggagagagcaggtttcaccttgtcgagggacagtgaaggccatagcygcactttcttgactaggacattctcttgctggagacctgcctaaatacaagtatagcccaccatagaatttctcccagaaacatggtcggctccgtcttgagctgtcatcata

SEQ ID NO: 563300 - DNA, 643 bp, Homo sapiens
atttcctgttgacttggtttgtctcacgcacgtgccattagatctaatgactaacgcatgccaccttctgaagagaacctaaataaccttcctgtaattctagttcttttgtaatagacccaaatctggtttctcttcctggtctacttaaggcaaatgctatggaggtaatttttctatccccttgccaaaggatgtgagggtaaggttagcgacccactgctgcactgcacttctgcttcagaagcaaaagaaagacaatagccaaagggttactggagaagcataataaatagttttcacttattacagcttttatggtccaattctccaaggtgcataaaaccagcacattgagatagggcaaatgagtctaagtgttatatcgtggctttcttgtctcatagtacaccccggagaatacctgaaaccctgcgttagccaacaccaaggttaaaaatacctctctctcctctggctgggggagagagcaggtttcaccttgtcgagggacagtgaaggccatagccgcacttkcttgactaggacattctcttgctggagacctgcctaaatacaagtatagcccaccatagaatttctcccagaaacatggtcggctccgtcttgagctgtcatcata

SEQ ID NO: 563301 - DNA, 539 bp, Homo sapiens
atgtctctctcagtaagtaacaggttccggtgaggcagaaacaatstaactgattggatgcctcaaatctgtacagaagccagagagcccacctatcgtaggaatgtatttgagagggtgaactattctgaaacattccatctttatattgacatccacataaccactctgcagctaaaggtatatccaagcacccagcttcccatgccagaagcaaggagcctgttccatttccattttcactctccaccatgtctactcgactttagaaatagctctcaaattttgccacccattttctccacctttgctgacaatgacatataatcagaccctcagaatctattgccacttctagctagtcccttgcgacttttcctcccattatcttcctctccagcatgctttcaaaagcacaaatctgaccatttcattccacaacaggtcacaacttcctttgggctgcaccaacacaccaggtcctttgtcatctcctttcagtctcctttccagttttcctggctgctcccacagaactt

SEQ ID NO: 563302 - DNA, 539 bp, Homo sapiens
atgtctctctcagtaagtaacaggttccggtgaggcagaaacaatctaactgattggatgcctcaaatctgtacagaagccagagagcccacctatcgtaggaatgtatttgagagggtgaactattctgaaacattccatctttatattgacatccacataaccactctgcagytaaaggtatatccaagcacccagcttcccatgccagaagcaaggagcctgttccatttccattttcactctccaccatgtctactcgactttagaaatagctctcaaattttgccacccattttctccacctttgctgacaatgacatataatcagaccctcagaatctattgccacttctagctagtcccttgcgacttttcctcccattatcttcctctccagcatgctttcaaaagcacaaatctgaccatttcattccacaacaggtcacaacttcctttgggctgcaccaacacaccaggtcctttgtcatctcctttcagtctcctttccagttttcctggctgctcccacagaactt

SEQ ID NO: 563303 - DNA, 591 bp, Homo sapiens
cgcagagtgtctcaccaggtgcggggatttctctccgcctcaggccgtacgagcttccctcgctgtccctgagcgcaaatgagcctcttcagtcgccgaggcccggccgcttagctctcrgagccttccacagcccaacaccctgagccctggagtaggcaatttgctcccacagccctgtgctggcccttccaggcacagggagtcccccttctaggggtaggggcgggcgggatgaagcgcacccagccctctctcctacccttcctcctttggtcccttcggctttcgtgtaccttatctcccgcgcgcccagctccttggccggctcacctgctaagcggagcgcggacatgcgctggaactccggctcctgcagccacttccacatcctccggaaggtctcccggccggatttgagtttgctccagggtttggggttgcgcagcaggtccgagagggtcccctgggagcggcagagcaccctctgcgcgaagatggcctgtgggatgctgtagcgcttgagctcggtggtgatacgctgcgccacctctttggtattgatctcttccatctgccctgaattacttc

SEQ ID NO: 563304 - DNA, 618 bp, Homo sapiens
cgtcacagtcttcctggttcgcttagccaccgcctcccagatccgcatccagccttcgatcctgcgaagagctacgcagtccgtgtgtgtgtgtgtgtgtgtgtgtgtgtgtgtgtgtgtgtgtgtgtgtgtgtccgactgcttggcccrggccgggctctctttcctgggaggctctcagggtttcagtctaggctggaatcactcaaactgggtttccgaaacctctgtgggctggattcctcaagtgtggcaggcggagagcgcattctaggaaaacgacttcattgggaacgtgctgattacacggacgatggggttatttatctacgttaaaaacaaaaaaggaaaaactaaaaaaatccggtgtgtatctcatcttacactccccttccgttccccaagccgaatcagactacccgtgtctttccgctgctgctgctgctgctgctcttgggttagggtccatgtgcgcagccagggttcctattcatccgctgccttcctccggaacaaagtggctccccatcgtgccaggggtcttggagcgaggcccgcgagagtgcaaatagcttcactcacacttaacagcaccattggaaaaataactaccaagcc

SEQ ID NO: 563305 - DNA, 618 bp, Homo sapiens
cgtcacagtcttcctggttcgcttagccaccgcctcccagatccgcatccagccttcgatcctgcgaagagctacgcagtccgtgtgtgtgtgtgtgtgtgtgtgtgtgtgtgtgtgtgtgtgtgtgtgtgtgtccgactgcttggcccaggccgggctctctttcctgggaggctctcagggtttcagtctaggctggaatcactcaaactgggtttccgaaacctctgtgggctggattcctcaagtgtggcaggcggagagcgcattctaggaaaacgacttcawtgggaacgtgctgattacacggacgatggggttatttatctacgttaaaaacaaaaaaggaaaaactaaaaaaatccggtgtgtatctcatcttacactccccttccgttccccaagccgaatcagactacccgtgtctttccgctgctgctgctgctgctgctcttgggttagggtccatgtgcgcagccagggttcctattcatccgctgccttcctccggaacaaagtggctccccatcgtgccaggggtcttggagcgaggcccgcgagagtgcaaatagcttcactcacacttaacagcaccattggaaaaataactaccaagcc

SEQ ID NO: 563306 - DNA, 618 bp, Homo sapiens
cgtcacagtcttcctggttcgcttagccaccgcctcccagatccgcatccagccttcgatcctgcgaagagctacgcagtccgtgtgtgtgtgtgtgtgtgtgtgtgtgtgtgtgtgtgtgtgtgtgtgtgtgtccgactgcttggcccaggccgggctctctttcctgggaggctctcagggtttcagtctaggctggaatcactcaaactgggtttccgaaacctctgtgggctggattcctcaagtgtggcaggcggagagcgcattctaggaaaacgacttcattgggaacgtgcygattacacggacgatggggttatttatctacgttaaaaacaaaaaaggaaaaactaaaaaaatccggtgtgtatctcatcttacactccccttccgttccccaagccgaatcagactacccgtgtctttccgctgctgctgctgctgctgctcttgggttagggtccatgtgcgcagccagggttcctattcatccgctgccttcctccggaacaaagtggctccccatcgtgccaggggtcttggagcgaggcccgcgagagtgcaaatagcttcactcacacttaacagcaccattggaaaaataactaccaagcc

SEQ ID NO: 563307 - DNA, 587 bp, Homo sapiens
tggggagctgccagggacagggagtttgtcaccaaaggctttacctaggaggatgagatggagctgggcaggtgagaatgattgtagaggaagaacatagagaaaaacagaatgaataaagtgcccagmctggcagacatgagggtaatagctccaagagaaagtcagctggggcctgggaagggcctattgccaagttgggttttgattttctcatttacccaacagggaaccaatagaagtttttaagcaggtaaataaggtaataggatttattgcttaggaaaagaactggtttaagagtgaggagagtggggacagggaggtcagtagaaacacaagagcaacacacacaaacaaagctggtgttcatgttgttggtgtataaagcgttagttcattaaataattttccagatatccattttttcttaagtacaaaaatcgaagtatcaaatttatttgaggagaataagtgtgatgtttttctatttactattattgttgtttaattttcccttctattaccataagcaccccatcattttgcctctgaattttgttgttctctgttgaagttgattggct

SEQ ID NO: 563308 - DNA, 495 bp, Homo sapiens
caacatggtgaaacccctgtctccactgaaaaaaaaaagaaatactaagttgggaaaagtaaattcatcaacattcattcattcaacaaatatttactgagtaccctccatgtgccaagctggytaaggacataacggtgagcaaatgtacacactgtccctgccctcacagagcttacaatccaatcaaatatttggtttaatgtaaaattgcatctttgctaaatgccacaaaagagccgggcaatgaactgagagagcttgttctagaacgatctgacctggtcaggggaatcagggaagacctcctgaggaagtgacccttgagctgagagctgaagaacgagcaagaattaacgtggggacgaagggaggaaagagtgtcccggggtgagaacactgtgtgcacaggccttctggcaggagggagtgtgtagattcatggtggtcagaaaggccagtcccctctttatctggtggagcgacatcatgagg

SEQ ID NO: 563309 - DNA, 490 bp, Homo sapiens
accctgtctctaaaataaattaattaattaaataaataaaagtttttttaaaagggataaatctgataatagatgtgaaagacctgtacactgaaaactataaaatattgctgagataaattttaaaagatctgaataaatggagagacataccttgcttacagtttacactaagtcagtgtaatattgacagaaaagacaaatggaacaaaaaaaaagmatccagaaatagacctgcacataaatgtgtgtagtggattgacttatatcccacccaaaaaaatgtgttcactgggacttgtgaaaatgaccttatttggaaaaaggatctttgcagatgtaattaagttaaggatctcaagatgagattatcttgcattttgaatatgccctaaatccaatgacaggtatccttataagaagagggccacactgagagccatatggctagatggccttataaaaatggaggctaccacaagcaaaggaa

SEQ ID NO: 563310 - DNA, 578 bp, Homo sapiens
taaaatgctttgtgatgcatccattaaactcacagarttaaactggttttttgattgggctgttttgaaatactgtttttgtagaatctgtgaaggaatatttcagtgcgcattgaggcctgtggtggaaaggaaatatctatggagattaactagactgaagctttatgagaaacagttttgtgatgtgagtattcatctcacagagttaaatatttcttttgattgagcagtttggacactctgtttttgtagaatctgtgaagggatgttttggagtgcatttaagcctatggtgaaaaaggaaattatttcagataaaaacttgaaagaagctttttgagaaactgttttatgaagtgtgcatttatctcacagagctaaacctttcttttgattgagcaatttgggaacactttttatgtataatatgcttaacaatgtttggtagtgcaaaaaggcctatggtgaagaaggaaatatcttcagataaaaactgcaaggaagctttatgagaaactgctttctgatgggtgtattcatctaaccgagttaagtccttcttctgatggaaaagt

SEQ ID NO: 563311 - DNA, 468 bp, Homo sapiens
caatcaaaagaaagtttcaactctgtcagatgaatgcacacattacaaagaacgttctcagaaagcttctgtctagtttttatgtgaagatatttcctttttcaccatgggactcaaagggctcccaaataaccttttgcagattctacaaaaagactgttcactaactgctcaatcaaaagaaaggttcatctgtgtgaggtgaatgcacacatcacaaacaattttctgagaaagcttctgtctagttttaatgtgaagatatttcctttttcaccataggcctgaaactgctcagaaatatccctttgcagattcaagaaaaagactgttttcaaactgctgaatcaaaagtaagtttcaacactgtgagatgaatgcacacatcacaatgaastttctcagaaagtttctgtctagtttttatgtgaagatatttcctttttcaaaataggcctcaaagcaccc

SEQ ID NO: 563312 - DNA, 631 bp, Homo sapiens
ttgagaataaatatgactcatcagtcttgggcagtggaggtgggctgaagaaaattgttaatttacagggtcacttcactatgggagcctgaacagaaatgtcattttaaaagttgtgaccctattactgaatttactgttttagatggtgtgctgttagactggactcaatggaccaggggcttggctgaccctatccaggtcagacatttgacctggtgggccaagagactcacatgacctatctgccatgttcctgatgggattaagaggcagagtgcaagagaagtcttctggccagggagcaggagagggaagggagaaaacactggagtgtcaggcagagtgagggatagccagtaacctgttactaaggcttagttactgaaaggaggttcagagccaggaaggtggttctgaccttcgagagmgaccaaatcttctgaagaagagtgttcacaacaggaggtccatgatagaactgagacacaagaatgaaataaagccctgctcgggtagctgccatagacactgtagcttggttacattggacatggtggttcattcacatagtcagtggttttatatgtcagaaactatggaaagtttttgggattcagaaatgaaccat

SEQ ID NO: 563313 - DNA, 566 bp, Homo sapiens
aatctctctctctctttcatttttgtttctcagagttagggtctcactctgttgcccaggctggagtgctgtggcacgatcacagctcattgcagccttgaactcctgggctcaagtaatccttccacctcagcctcccaagtagcagggactacaggcatgtgccaccatgcccagctaattaaaaaattgttttttgtagaaacaaggtttctctatgttacctagccaggtctcaaactcctggactcaagaaatcctcccgcctcagccttcaaagtatcgggattacaggcatgagccactgcacccagccaagaatagacaaatctcttgtgtagaagaatttcaaataatttgtatagaccttctgtcctcaaaagggaggagcgtaactccctaagtttggggtgcacaaaatgacttctttccaaagagaacaatagggaaaaggggaaaaagagtgatttaacagaggagccacctataaataatacctcagccaagtgatcaaaattagcatgatatrgtgtgataacaatggcattttgccatgtggtctaact

SEQ ID NO: 563314 - DNA, 598 bp, Homo sapiens
ggactaatacactagataaacacgagtcattaattgtcctttgattagtgaaattgatcttttcttcatggttgattggtgagggagagggaagttgacctgttgaagttcgtgcttggagcttctgtttggttaggagcagcagcacaatgtttccttgcctgtgagggaaagtgaatattttgaggagtgggaaaaaaataacttttggtgttagctagattcctcagagccataatgcctaggttttctttgtttttctgaattttattttattttattaatttatttatttttgagacagtctcacygtggtgcccaggctggagtgcagtggtgtgatctcggctcactgcagcctctgcctcctgaattcaagtgattctcctgcctcagcctcctgagtagctgggattataggtgcccaccaccacatccagctaatttttgtatttttagtagagatggggttttaccatgttggccaggctggtcttaaactcctgacctcaagtgatctgcctgccttggcctcccacagtgctgggattacaggcatgagtcaccacacccggcctgtttttctgaattttagtaa

SEQ ID NO: 563315 - DNA, 609 bp, Homo sapiens
accccatctctactaaaaatacaaaaaaattagccgagcatggtggcagatgcytgtaatcccagctactcgggaagctgaggcaggagaattgcttgaacccgggaggcagaggttgcggtgagccaagatcacaccattgcactccagcctgggcgacagagcaagactgtctcaaaaaaataaataaataaaaagtagaatacgcattccccaaatcagtaaaggttaaaacaaaatgcacaaggtgaacctaaccaggaagaggaaataaaacaataaaaaagaaaacaggaaaatttttaagtcatatgaaaagaacaaatgcaaacgtatccatgatcacaatcaatataaataaactaaacttcccaattaaaaagaagattgggttaaaaacaaaataaaaccaactctaagctgcttgcatgcaacacatctaaagggaaaaaaagtacagataaacgttgaaactaaaaaatagaaaaatatgttagaaaaatagtaacaaagagaaagatggtaaggcagtgttaatatctagtaaaaatgaaattcaagtataaaaaaattaaagaagataaatatatatttcatattgattagatt

SEQ ID NO: 563316 - DNA, 609 bp, Homo sapiens
accccatctctactaaaaatacaaaaaaattagccgagcatggtggcagatgcttgtaatcccagctactcgggaagctgaggcaggagaattgcttgaacccgggaggcagaggttgcggtgagccaagatcacaccattgcactccagcctgggcgacagagcaagactgtctcaaaaaaataaataaataaaaagtagaatacgcattccccaaatcagtaaaggttaaaacaaaatgcacaaggtgaacctaaccaggaagaggaaataaaacaataaaaaagaaaacaggaaaatttttaagtcatatgaaaagaacaaatgcaaacgtatccatgatcacaatcaatataaataaactaaacttcccaattaaaaagaagattgggttaaaaacaaaataaaaccaactctaagctgcttgcatgcracacatctaaagggaaaaaaagtacagataaacgttgaaactaaaaaatagaaaaatatgttagaaaaatagtaacaaagagaaagatggtaaggcagtgttaatatctagtaaaaatgaaattcaagtataaaaaaattaaagaagataaatatatatttcatattgattagatt

SEQ ID NO: 563317 - DNA, 609 bp, Homo sapiens
accccatctctactaaaaatacaaaaaaattagccgagcatggtggcagatgcttgtaatcccagctactcgggaagctgaggcaggagaattgcttgaacccgggaggcagaggttgcggtgagccaagatcacaccattgcactccagcctgggcgacagagcaagactgtctcaaaaaaataaataaataaaaagtagaatacgcattccccaaatcagtaaaggttaaaacaaaatgcacaaggtgaacctaaccaggaagaggaaataaaacaataaaaaagaaaacaggaaaatttttaagtcatatgaaaagaacaaatgcaaacgtatccatgatcacaatcaatataaataaactaaacttcccaattaaaaagaagattgggttaaaaacaaaataaaaccaactctaagctgcttgcatgcaacacatctaaagggaaaaaawgtacagataaacgttgaaactaaaaaatagaaaaatatgttagaaaaatagtaacaaagagaaagatggtaaggcagtgttaatatctagtaaaaatgaaattcaagtataaaaaaattaaagaagataaatatatatttcatattgattagatt

SEQ ID NO: 563318 - DNA, 313 bp, Homo sapiens
aaacaaaataaaaccaactctaagctgcttgcatgcaacacatctaaagggaaaaaaagtacagataaacgttgaaactaaaaaatagaaaaatatgttagaaaaatagtaacaaagagaaagatggtaaggcagtgttaatatctagtaaaaatgaaattcaagtataaaaaaattaaagaagataaatatmtatttcatattgattagattataattcaaggtataaatttaccaccattgttatgaacatttctgtattaaaaacatagtttataagtatataaataaataactgattatatacatgact

SEQ ID NO: 563319 - DNA, 627 bp, Homo sapiens
aattcatcatatgagctctaaatccataagccaacctacaaaaatataagcaaaccagaattgagtcatttcaaacaaaaatatttacttaagatacctggggaaaaaatggttataacctctttcagaaaccttgttggtaaattcactgaagcttaagatcaagtaaatcttctaattcacctttttcattttcagagaaggaacctcaagttctaagcaaattacgacttaacaaattaatgaaagagccaggatgttagcccatataatctgtcggcaatatgagtgctcttcctagaacacacctctttcttcattgtcagctaaatttcagggtccaggatatttctrcatgttctatacaatgatcctttccatgcccccaaatatttcatttaatgttaaagataaattttaggctctaaagagcttcttcatgtcttatataataattccctcccaccctgcaaatattttatttaatgataaggataaacaatgccagcattttttttaaccttaacttctttttatttggtctttttcactttattttattattattatactttaagttctagggcatttgccttacttatttcttcaaagtaaaaacattaaaat

SEQ ID NO: 563320 - DNA, 403 bp, Homo sapiens
ttttttttttttttgaaaaaaaaaaagttgaataggtatcataagtcttttaaaagaatcaaaatatagatagtaaatcagactctacactgaaatagatgtctctaatatattcctagtattaaaaaratcctggcaatgtttcttaatctatcgtttgttattatgaaagtaacatattgagattattcccatcagactgtttgacatggaagtttttacagtctgattgccctatttcactcaactttaacatgcaaggcttaaataaagtcccaaatcactttgtgaactcaacaaggtaaacttggaaaatgcattatagcttctatgaaacagtttcttaaacatcaattgagttagttgaggaatagttcttgaccttcttcgaaaatatacccaa

SEQ ID NO: 563321 - DNA, 481 bp, Homo sapiens
atttcctgtgtctccttccaaaaaaaattctcaacaacaaatacacatttatatacatgagtctgttgtatatagcayatgttgtatacagtacctagaaaaatgcaaaaaaaacttgtatgtaaggtttaaaaaataactcattaatacccagttgaaggaatagaagtgagaagatccctccccaaagcccctgtctgtgcctccctgaacatagccagcttattcctaaacatgctcatgattctgactttagtgatagccatatccttgcctttattttatccttgcctttattttatttttgtttttgagagagtgtctcagtgttgcccaggctggagtgcagtggcttgatcatggctcactgcagcctcaacccccactcagggatcctcccactcagcctccagagtagctgggaccatagcaccacttccagctaatttttttttttttttttttttttgagacagagtct

SEQ ID NO: 563322 - DNA, 481 bp, Homo sapiens
atttcctgtgtctccttccaaaaaaaattctcaacaacaaatacacatttatatacatgagtctgttgtatatagcatatgttgtatayagtacctagaaaaatgcaaaaaaaacttgtatgtaaggtttaaaaaataactcattaatacccagttgaaggaatagaagtgagaagatccctccccaaagcccctgtctgtgcctccctgaacatagccagcttattcctaaacatgctcatgattctgactttagtgatagccatatccttgcctttattttatccttgcctttattttatttttgtttttgagagagtgtctcagtgttgcccaggctggagtgcagtggcttgatcatggctcactgcagcctcaacccccactcagggatcctcccactcagcctccagagtagctgggaccatagcaccacttccagctaatttttttttttttttttttttttgagacagagtct

SEQ ID NO: 563323 - DNA, 310 bp, Homo sapiens
gtgataacagtaacacacaatactgccttctttcttcttatcttggataatttatccaaattgatatttctggatcaaagagtatatatatatatatatatatatatatatatatatatatatattctcttttttttttttttttttgagacagagtttcgctcttgttgcctaggctggagtgcgatggcatgatctcggctcactgcaacctccgcctccagggttcaagtgattctcctgcctcagcctcctgagtagcggggattacaggcatgcaccaccatgcccggctaactttgtrttttta

SEQ ID NO: 563324 - DNA, 653 bp, Homo sapiens
aaatagctttctagtcagctatacaccaattatagccctcaaattgctcacagtctcatattggctacagaaacagaaatgtaaacagataaaatataaatagacaatyataagacaacacggccaggggccaaatgggggtgtgtgagcaaaatagagggtgtttctaacttcctgagtgtgggggtggggtatttcaggcagaaaccccccttctgaaagatcaggaggctggaaaccacgaagcatgagctgctggtagctcctggctcagtatacaaatggacacctctataaggagatccaatgcaaagtaaatgtcagatcatgaggaggccattcaatattgaggggacacattcgatagagtgcagagggagaaggtggtcctgggagatgaaaactgaacaagaacagttgaggtacaggcttgcgaatcaagtttagaagataagaaaattgggcagaagagtgggtctaggagaaacatctagagaaagtagggagttattcaggactcagaggtttctaaacaggactcctgctaggatcaggtctgagcttcaagcaaaagcattaagtaggtcatttactgtattatgcctgcccctgagtttttttgtttgtttgtttgtttgtttgtttgttttaac

SEQ ID NO: 563325 - DNA, 462 bp, Homo sapiens
caaggcaatcctaagttaaaagaaaaaagcaggaggctttattctacccaacttcaaactatactactgggttacagtatttgaaaaasagtggtactcatataaaaatagacacatagaccaatggaagaaaatagcccagaaatgaagccacacagctacaaccatctgatcatcagcaaaagtcaacaaaacatgcaacagggaaaggattccctattcaataaatggtgctgggataaccggctagccatatgcagaagattgaaactggaccccttccttaagccatatatatataaatatactcaagatgggttaaagacttaaaataataccccaaactataaaaatcatgaaagtcaatctaggcaataccattttggacttaggaacaagcaaagattttatgataaagatgccaaaagcaattgcaatgaaagcaaaaattggcaagcggga

SEQ ID NO: 563326 - DNA, 408 bp, Homo sapiens
gtggcttgttttctcattttcttgacattgtttttcttttgcaaagcataaattttaaatttcagtgaagtccrgctcaattgtttccttcatggattgaaccatttttgatttaactaaaacgttatcaccatgctgaagatcacctaggttttatcctatattattttctagaatttttatagttttgtgttttataattaggtctattattcattttgtgaaggttataaggcacgtggctgaatttatttttttgaatttggatgtttaatttttacagcatggtctttcaaaatgactacgtttgtttcactgttttgccttttttttaatcaaaggtcagttaagtgtattcatttcagtattgttctgggtaatagttatatgtgtgtgtgtgtgtctgca

SEQ ID NO: 563327 - DNA, 592 bp, Homo sapiens
ttttttgaatttggatgtttaatttttacagcatggtctttcaaaatgactacgtttgtttcactgttttgccttttttttaatcaaaggtcagttaagtgtattcatttcagtattgttctgggtaatagttatatgtgtgtgtgtgtgtctgcataagattttgaactttgatactttgcttgtactcttatataataataayttatgaaatagttgcctagttgtaactgcattttgataaaactaaaatttcttcagtagatacaatgttagtaagcaagttattttatgatttatgtaacattttattttctttactatttgagaatttcccaattatttcaacttcaaagattttaaaattcaataaactatgtcatttatgaactgaaatcttaataatgctgaagatttagtaaatatacagtatacctagttgaattttaatttctgataaactatagtttgtcagaaattaaactataaattaaacttaaactatatagtataagatgttccaaaattgcatgaaacatacttacaaacgaaaatcattgtgtatctgaattcaaatttaactgggcattct

SEQ ID NO: 563328 - DNA, 514 bp, Homo sapiens
attaactgacttactaaaatgatttttaaaataaaggacaacttccaagagaactagacaaacacactagctgtgttggaagacttggaaacatcaaagaacctgaagcttcaagagtcaaacacaaagattatagctcattactatatacctcaagtattgactgaaaactgctaaaaattagtgatgaaatkgtctccattttcttgatttgatgaagtgcttagggacaaggttcttgaacatgatttttaagcaaaacatcaaaattcaatagccttcttgtaagattacttgagataatttttgctttatgttttgcctgagtcttccatttggaagtttgtaaatgaccacataggataactattgtgagattttgttgaaatgatttttactaagtgatcttttatctcaacatatataaagggaaggaggtcagcaataatgaatgcaactattatctatcaaattttacacattgaataataaaatatttattattcagggtatt

SEQ ID NO: 563329 - DNA, 514 bp, Homo sapiens
tggggggaaaggggaggaagagcattaggacgaataactcatgcatctgggcttaaaacctagatgacaagctgataggtgcagcaaaccaccatggcacatttatacctacgtaacaaacctgcacacgtatcccagagcctaaagtaaaaacaaaacaaaacaaacaaacaaaaaccctcattatttacctctcagttctgtaggtcagatgactgggttctatgcttattgattcataaggccaaaatcaaggtattgtycaggctgggttcttattggaagctttcacctttagagaacaagttgctttgaagctcatttagtttactggcagatttcaattactcgtagcattgaagcccctgatttcttgttgggacttctctcatttgctatcagctgttctcagaaccctgcctcttagtcttctaggcaaagataaacttctttgtatcaaatcccttatttttcaaatctctaggacttcctcttctactactagtcagagaac

SEQ ID NO: 563330 - DNA, 578 bp, Homo sapiens
tcaagacttaggagaaagctacaattattaagtgatatttgtggaagaatagacaaaaagatcaatggaaaaaaatagagcccagaaatagatccgcataaatatagttaactgatcttttacaaaggagcaaaggcaataaaataaagcaaagacagtcttttcaaaaaattgtcttggaaccaactgaacaatccccctgcaaaaatatgaataaagacacatgctttatattcttccaaaaattaactcataatggctaggcatggtgactcccmcctgtaataccagcactttgggaggccaaggcaggaggactgctggagcccaggagtttgagacgagcctgcataatatagtgagaccccatctgtagaagaaatcttaaaaattagccaagcatggtggtgtgaacctgtacttccagctattcaggaggctgaggtgggaggcttgcttgtgcttaggaggcagaggttgcagtgagccaagatggcatccctatactccaacctgggtgacagggtgagaccctctcccaaaaaaaaaaaaaaaaaaaaaaaaaaacaacctcacaa

SEQ ID NO: 563331 - DNA, 578 bp, Homo sapiens
tcaagacttaggagaaagctacaattattaagtgatatttgtggaagaatagacaaaaagatcaatggaaaaaaatagagcccagaaatagatccgcataaatatagttaactgatcttttacaaaggagcaaaggcaataaaataaagcaaagacagtcttttcaaaaaattgtcttggaaccaactgaacaatccccctgcaaaaatatgaataaagacacatgctttatattcttccaaaaattaactcataatggctaggcatggtgactcccccctgtaataccagcactttgggaggccaaggcaggaggactgctggagcccaggagtttgagacgagcctgcataatatagtgagaccccatctgtagaagaaatcttaaaaattagccaagcatggtggtgtgaacctgtacttccagctattcaggaggctgaggtgggaggcttgcttgtgcttaggaggcagaggttgcagtgagccaagatggcatcmctatactccaacctgggtgacagggtgagaccctctcccaaaaaaaaaaaaaaaaaaaaaaaaaaacaacctcacaa

SEQ ID NO: 563332 - DNA, 539 bp, Homo sapiens
aagggaatatgtgtgtatatactaaccagtgtatttacacatttttatgaatattttcatatgtaaccatctgtatctctgttaagcaaaacatgagtttgtacttatatctccaactctaatccattaacacatggatagttttagcttcctgcccttgcatattggtaacttctcatgccaacagtaacaaatctggcatccataatccaccatacatttaattattyaattctcatataaaagaatagtaggattagacttttaaacctgtatccctgcaggaaacaactttatcaactagagtacagtacttacatagctttccaaaattacaaaaatcagtactttcctccttacactcacttcgttgaggttggatcatacatttggaatacagttaaattgttttgtcacattttgtattccatcaggagattcaatgacctcctacaggaatttattaagcctttgcatataatgaggtgaatgcattgtgctgtaatttctatgggttttgacaaatgcatagtgtcatg

SEQ ID NO: 563333 - DNA, 633 bp, Homo sapiens
acaatgactcatctctctaatataatggggagacctcagaggtccttagtaggattttgtaaatagaaaagagaagtgagatatagaacattgcagacagaggatagacaggtggaaaagcatgaaacagcaaggtccttttataggactatgagaaatcttgtcttgctgaggaaaaagtggaaatgagtgcttcaggatgggtggaaggaccaggaaatcttcaggagacatatgtagggctaacgaygattctgtaaagtgccttgtaggccacactaaggagcttgacttttatcctgaatgtcaaaggaaggcaatgagagattgtaaaaaggaaactaactttaaatttgtacattctaggaagaagatatgagttcagtttttgatatgagtttgaagttcctatctaaattagttaaatgtagatatatctaatttaaactatccaatggggatatattgggttggaatccaggggaagctggagttggggaggagatacagagaggggaatcattgcataagtggtatttgagccagcatagaagatgaacttccccaagttgagtgcatggagtcaacaacagctctggacagcaccctgggaagcatcagcattcaaaaggt

SEQ ID NO: 563334 - DNA, 562 bp, Homo sapiens
tgggtacacagtcaccagtataaagataacacctctcaacaccttctctagctaggtgtggccatatgactatgttctgaccgatggggtattagcaggcatggcgtctgtgaaactcattcctcaatttctcatttatttcctggaataagaacacagtgtggagccatcatggaccacatggactatggcagagaccaggaccacatggactatggcagagaccaggaccacatggactatggcagagaccagagagtagtggcgtggcggtgaggggactgaatcccagccctcagacaacttccactgtaattagggaamgtgtgtcaaagtgggtatatggagcagaggccacgatcccagtcctagggcactgttaacgtgagtctgtcttcccacaactgatatctgaacacagggcctggtatatattaatcacttaataaatataagctattattatcatcacttgtataattaagtacaatattacagcaaaagcctagatcatgaaatgtcaagtgtgcctggcctgatcctgataccagaggaaagagaa

SEQ ID NO: 563335 - DNA, 564 bp, Homo sapiens
atttgcatccagcactggatcaagtgttgtataaggattttaaaatgaacctttctgtttactgacataggacactctaagactgtcaataacaataaagagagagttgggacatgcttaaaatgaatacacccacagaataagtttagagttttcagtctgaggtaaacccacagagcagggcaccaagtaaaaagtgtgatcactgaaagatgcctgttgggtagaaattttcacttggatctttaatttgcaactatatgcaggattatgtgagataatgccaggattgtaaatgggtgtttatcctcatgccagtactatcaactcatggtggatgcctggaaacttgtgttgagaagcatttgaagttcagtgcaagagagtcccatgattaactagctgtatttctgacttattccattttatgcactataacagaataccacacactgggtaatttataatgaatagaagtttatcaactcacaattctggaggctgacaagcccaagatcaaggggctcacatcwtgtaatggccttcttgttgcaccataacatg

SEQ ID NO: 563336 - DNA, 538 bp, Homo sapiens
ccacgtgtatgaggtatctactaaagcagtcaaactcatggaaggagaaatgtgaatggtgataccaaggactagtgagggagagaaatggggagctgctgttcaatgattatagactttcagtcatgcaagatgaaaaatttctagagatttgcacaacagatatgtataacaatgggcatgtagttaacaatactgtactgtacacttaaaaatttgttgagagggtatatttcatgtatgttgttgggtttttttttaccataataaaaacaaaaatgcaaacaaaaaacacctaatgcctggctccgctctaaccaattaaatcaraatttctgggggttgggtgttgggcatccctttgttgtttttgatgatgttgtttttcctcttttagctgtgcacattagagagcttcatgctaaaaagtctccataaaacattatcatcttcttcttctttttttttttttttcttgagacagggtctcactctgtcacccaggctggactgcagggacccattttggctcactgcg

SEQ ID NO: 563337 - DNA, 449 bp, Homo sapiens
atcctccagcacctccaagatcctggcaggaaactggatggttattggctattgaatgaatgaaaaagcaaaggaataggttaaccagtcactcagccaaatgagcaagcaaataatgtattaatttttgtcataacaaaccagcacttcaatttttaagggaaacctaaagcaaaagcatagaattaagatttgaaattttgaaaaagactaaatatgatttgataaatatcttcaagyaaaattctgaaaaaaaaaaaatcccagcttttattggggaaataccttgcagcaatgagaataaatgtactgattcatacaacaatgtggatgaatttcacagatatcatggtgagcaaacggagacaaacacaaaataaaacacattgcatgggtcccagcactttgggaagctgaggcgggtggatcacaaggtcaggagatcgaga

SEQ ID NO: 563338 - DNA, 596 bp, Homo sapiens
aacctctgcctcccgggctcaagcaatccttccacatcggcctcctgagtagctaggactacaggcatgtgccaccatgcctggcacatttttgtattttttatagagatggggtctcaccatgttgcccaggctggtcgcgaactcctgagctcaaggaattcacccgactcggcctcccaaagtgctgggattacagacatgaaccaccgcaccaggccaaaactaactcttttacatgtcttatctcagcatttaagcagcactagaccctcaagagtggcaaactggatgcctgggtggaccacccactctggttaagtgtcaccatgtgaaaatgaggacccagtttgtcctaatctttaggttttttcaagagaagctgraagttaatttttatgtgaaatcttgtgatgtatgtgtgaaatctcactatatttaaatacgggaaactttgaaaggcaaaactgtgctggccaaaaaactctacatctgtgggccagatttggcccatggaccgctagctttcagtctctacgctggatgttatatcaagatttctgtggttaaatagatttgcaaaatgcaacagaatg

SEQ ID NO: 563339 - DNA, 580 bp, Homo sapiens
actagcacagcaagggggccaagattcaggatgggctcctgccacaatgttatacacctgctgaatgtcagccctgcccactcctctaggcataggatgagtctagtggtggacccaagaccacatggggccaatcagatctttctctgggcatgaaaaaaaaatggaccttggaaagaaggaaagctctttacattaggagagttaagatgtaaaacctgagataagagaggaaaatgaaaacaatcagacaagcaggaatgagagataagcagggaaaaaacyctggtgaagttgtgtcctgattctcaagtccctggtcctacagttctctccttaattctatggtctgcaccaccatccttcccagttgcctgagccaatcaactcattttttcttaagctagttcaaattgggtttgtcttggacaatcaagggttctgacaaaaactcctccactcacaatgtcaaactttagctgtgcacaagaagtggccatgtaccaaattaattacagtagaaagacaagggagcatttgaaggagaaaaaaaggaaaggccctgaatctgaggattcac

SEQ ID NO: 563340 - DNA, 550 bp, Homo sapiens
agcttaaatcactggccaccctagggagcattcttatttaaaagactgcttgaaaaacattctgaagctgaagaagcaatagaaaaatatatcttcttggggatttcagtctacgtaaagaggctggacagagagaaaaggatgaaagaagatctgagctctaatcttcttagctctgccattggcttggggtttgaccttgggctagtcacacaacttctctgtatctcagttgctttgyttgtaaagtgaaggccttggatcaaatgagttccatgtttccttccaattttataatgccatgattttttgagcttcccaaaacctcccttatgcccaagaaagagtgtcccctgtcctggaacccacaatttacatagtctcagggtctaaaggcatgagcctacccttggacctggctccaagaacccaggaccacagaattctctggctgtgcaggctgacgtatgtatcacatgcatgtgtgtgtgagggcctcatatagcactacatggacctgaggctggggaacacaggctgctgattggct

SEQ ID NO: 563341 - DNA, 550 bp, Homo sapiens
agcttaaatcactggccaccctagggagcattcttatttaaaagactgcttgaaaaacattctgaagctgaagaagcaatagaaaaatatatcttcttggggatttcagtctacgtaaagaggctggacagagagaaaaggatgaaagaagatctgagctctaatcttcttagctctgccattggcttggggtttgaccttgggctagtcacacaacttctctgtatctcagttgctttgcttgtaaagtgaaggccttggatcaaatgagttccatgtttccttccaattttataatgccatgattttttgagcttcccaaaacctcccttatgcccaagmaagagtgtcccctgtcctggaacccacaatttacatagtctcagggtctaaaggcatgagcctacccttggacctggctccaagaacccaggaccacagaattctctggctgtgcaggctgacgtatgtatcacatgcatgtgtgtgtgagggcctcatatagcactacatggacctgaggctggggaacacaggctgctgattggct

SEQ ID NO: 563342 - DNA, 550 bp, Homo sapiens
agcttaaatcactggccaccctagggagcattcttatttaaaagactgcttgaaaaacattctgaagctgaagaagcaatagaaaaatatatcttcttggggatttcagtctacgtaaagaggctggacagagagaaaaggatgaaagaagatctgagctctaatcttcttagctctgccattggcttggggtttgaccttgggctagtcacacaacttctctgtatctcagttgctttgcttgtaaagtgaaggccttggatcaaatgagttccatgtttccttccaattttataatgccatgattttttgagcttcccaaaacctcccttatgcccaagaaagagtgtcccctgtcctggaacccacaatttacatagtctcagggtctaaaggcatgagcctacccttggacctggctccaagarcccaggaccacagaattctctggctgtgcaggctgacgtatgtatcacatgcatgtgtgtgtgagggcctcatatagcactacatggacctgaggctggggaacacaggctgctgattggct

SEQ ID NO: 563343 - DNA, 645 bp, Homo sapiens
tctgtgggcccaggattttcaatgctagtcttctctatcctggtgaattcagggggatgttctagtttttaagtggcttctggtagtgcttttgttggaagagtgatgcaaggggattttctattctgccatcttggtgacgtcacttctaaactctctcattaaatcaagaaaattatctctgcggtgggaaaaaaggtttccacagtaagacctaagcttctttgtattcacagtatttacctgcttaaaataattttttagatagccagtaaaaatcgtgttaaagcactaattcttaaagtctaagatgactatgtaagggaaaatgttataaatagaaaaaataatagaaaatattgggtcgaaagttaatcaacctgaaaaaagtatcatatatatgaaaacctttcagaagtggatgccataacacaaacaggaacacagaatggcaacccagtattaacaactaggagtaggctcccctagaaagcattctcttccttaccttccgtgtcacttttctctggcttccttttcccacatccagtctgtcctgcttcaaacatttatacactctgcctcaaaggtgactttattaacaaattgaatcaygtgcctcctcttctttagaatactttttac

SEQ ID NO: 563344 - DNA, 625 bp, Homo sapiens
ataatattttagttatgtatatttacatatgtgtgtatttctaaatacactgttttaatgtacatatcatttgctactgtgtttctttacatatcaatcagtatgcagcctccattgtagcgaggattaaagatgatgcatgcaaaacacttgtgtcgtctcttccagagagtagcctctctaaacttcaggagattcctattcttgctcataatgttctacatttttttcatattactggtatataatatgcttgcttaataattttggttgcttagacactgaaaactaagattggttcagtttaagttaactcattccaactacctagcccataatttctttcttattatttaatggcatatacaatcatctacattactttgggctgyttttaatagaaaactgaatacaatggcttaatgaagtaagggtgtatatttctcacctagaaaaaaaatcagaggcaagaaatccatggccagtgctccactatgtcacaaggacctggtcttcttttctgttctaacatctttagtttgtgaattacgttcccatctgacatgacggttgctgtatttaacattcacaattgaagaggaagtagaaagacaatagccgtttg

SEQ ID NO: 563345 - DNA, 622 bp, Homo sapiens
ttgtacatttaaaaataactgagtataattggattctttgtaacacaaaggataaatgcttgaggtgatggataccctatttaccctgatgcaattattacacattgtatgcctgtatcaaaatatcccatataccccatagctatatatacctactayatacccacaaaaattaatattaaaaaaataaactaaaatgggctaatatctgtacagacatctcaccaaaaaagatataaagacagcaaataactgtgtgaatagatagatgtgcaacatcatatgtaattagaaaactgaaaattcgatcaacagtgggatatcctacacacctattggaatggctaaaatcaaaacaactgacagtaaatggaacttattcattgctggtgagaatttaaaatgatacatccaccttgaagacagtttggcagtttcttacaatacttgacatattcttaccatatgatccagtaatcatgctcccaagtatttacctaattgagttgaaaacttatgtccacacaaaaagttgtgcagggatgtttatagcagttttattcataattgcctaaacttggaagcaaccaagatgtttttcagtaggtaataaataaactgt

SEQ ID NO: 563346 - DNA, 603 bp, Homo sapiens
cacaaagtatctacttgcgcgtcccaaatctgacmtatttgaaacaagcttgtcatcatttcctgcaaatcacttcccctctgcgtttcttatttctatcatgtacccaagtatcctttgtatttccacttcaactactgtaatgtttcctttgttacctcatgcctggggtatttgaaatagcttcctacttatcttcctgtttctagtctctcacataccacctggtatcagatcaatcttacttaagttacacttttgtaatattaagttcctgttaaaaccaaaactaaacaaacaaaaacttcaatcatcattcttctttactactttcagaatgtggtgccagagggatcaaatatagagacaatggtacctaagattatacttcacaatcaaactagatagtgggttaatgttagtgtgcaagtctgcaacttatttaaagacattccaatttgcctttctataaaactacataaactagcttagatcaccagaacagaaataaccacttctacagtaactcctctgaattgttttattatttatttaaatattcactgttctgcaattattctaaaatatattcgtaagaaaaca

SEQ ID NO: 563347 - DNA, 603 bp, Homo sapiens
cacaaagtatctacttgcgcgtcccaaatctgacatatttgaaacaagcttgtcatcatttcctgcaaatcacttcccctctgcgtttcttatttctatcatgtacccaagtatcctttgtatttccacttcaactactgtaatgtttcctttgttacctcatgcctggggtatttgaaatagcttcctacttatcttcctgtttctagtctctcacataccacctggtatcagatcaatcttacttaagttacacttttgtaatattaagttcctgttaaaaccaaaactaaacaaacaaaaacttcaatcatcattcttctttactactttcagaatgtggtgccagagggatcaaatatagagacaatggtacctaagattatacttcacaatcaaactagatagtgggttaatgttagtgtgcaagtctgcaacttatttaaagacattccaatttgcctttctataaaacyacataaactagcttagatcaccagaacagaaataaccacttctacagtaactcctctgaattgttttattatttatttaaatattcactgttctgcaattattctaaaatatattcgtaagaaaaca

SEQ ID NO: 563348 - DNA, 612 bp, Homo sapiens
tgtggaaattcatctttttggaattcttgaggtggaccactgagcaaaaggatgagtctakcacgagagtatttgcgtgtggagagagactgatgctgcaaatgtgcaaagtgaagcagatatgtgagaacacgtgtgcgtgtgtgtgtgtgtgtgtgtgtgtgtgtgagagagagagagagagagaagggagggtggaaaaaataggagaggaggggaggggaggaatgagagatgttgcctaatggctttgaggtcctggaataactcttgtacatcatgctctataacattcctctgtgttgtcattgttaactatttttgttttaatataatttgattcagtttattttccatgaaaacaaatgagctctaagataaagtaggaatagttccccagtaagtcccacacattgattctagagctgcatttttgaacacaaaacaaatctcctccttcctatctagcccttcaaacattttaagacagcaataatgcctattgctgtttcctacggtttcctcttcttcaggctaaatatttctctctttaacaacatctgtttcatcatctgttgctttttaaagatgacactcaaattgagcacctta

SEQ ID NO: 563349 - DNA, 612 bp, Homo sapiens
tgtggaaattcatctttttggaattcttgaggtggaccactgagcaaaaggatgagtctatcacgagagtatttgcgtgtggagagagactgatgctgcaaatgtgcaaagtgaagcagatatgtgagaacamgtgtgcgtgtgtgtgtgtgtgtgtgtgtgtgtgtgagagagagagagagagagaagggagggtggaaaaaataggagaggaggggaggggaggaatgagagatgttgcctaatggctttgaggtcctggaataactcttgtacatcatgctctataacattcctctgtgttgtcattgttaactatttttgttttaatataatttgattcagtttattttccatgaaaacaaatgagctctaagataaagtaggaatagttccccagtaagtcccacacattgattctagagctgcatttttgaacacaaaacaaatctcctccttcctatctagcccttcaaacattttaagacagcaataatgcctattgctgtttcctacggtttcctcttcttcaggctaaatatttctctctttaacaacatctgtttcatcatctgttgctttttaaagatgacactcaaattgagcacctta

SEQ ID NO: 563350 - DNA, 612 bp, Homo sapiens
tgtggaaattcatctttttggaattcttgaggtggaccactgagcaaaaggatgagtctatcacgagagtatttgcgtgtggagagagactgatgctgcaaatgtgcaaagtgaagcagatatgtgagaacacgtgtgcgtgtgtgtgtgtgtgtgtgtgtgtgtgtgagagagagagagagagagaagggagggtggaaaarataggagaggaggggaggggaggaatgagagatgttgcctaatggctttgaggtcctggaataactcttgtacatcatgctctataacattcctctgtgttgtcattgttaactatttttgttttaatataatttgattcagtttattttccatgaaaacaaatgagctctaagataaagtaggaatagttccccagtaagtcccacacattgattctagagctgcatttttgaacacaaaacaaatctcctccttcctatctagcccttcaaacattttaagacagcaataatgcctattgctgtttcctacggtttcctcttcttcaggctaaatatttctctctttaacaacatctgtttcatcatctgttgctttttaaagatgacactcaaattgagcacctta

SEQ ID NO: 563351 - DNA, 624 bp, Homo sapiens
tttctgctagtgatgaaatcctacatttaaatttgtgccaccccatagttatataagtaaatagagtctggtcagagtatgtggagtatccaagccttccatgagctgatccactcatgtttctagtctgaccttctgtcattcattacctgccacacccaaacctgagctcctagcatgcgcacagttgaatcatcaggcacactttgcagcttcctatttgtctgtctccgtacaggcttttccttctggctggaatggactcctctcgacttcccttttctcacctctgcttgaaatatgtgcaccttttcatattggggagacamataaaataaattcagtttgaagttttaacacagaaaaagaaatctgaaatgtgaaggccactaataatctgcatctgccccaacatggggtgtggaatttttcaaccatgataaaaaaagatctaaacaagggggtgtttacaccatacttctaaagtgctctatatcttacaggggtcaagacctcactgatgtgagacaaccatgacactgatgcgcaggggctgattccatatatatgtacacatagcaaaaactcagcacacctgagctcttctaacgcatgtgtatgtgg

SEQ ID NO: 563352 - DNA, 624 bp, Homo sapiens
tttctgctagtgatgaaatcctacatttaaatttgtgccaccccatagttatataagtaaatagagtctggtcagagtatgtggagtatccaagccttccatgagctgatccactcatgtttctagtctgaccttctgtcattcattacctgccacacccaaacctgagctcctagcatgcgcacagttgaatcatcaggcacactttgcagcttcctatttgtctgtctccgtacaggcttttccttctggctggaatggactcctctcgacttcccttttctcacctctgcttgaaatatgtgcaccttttcatattggggagacacataaaataaattcagtttgaagttttaacacagaaaaagaaatctgaaatgtgaaggccactaataatctgcatctgccccaacatggkgtgtggaatttttcaaccatgataaaaaaagatctaaacaagggggtgtttacaccatacttctaaagtgctctatatcttacaggggtcaagacctcactgatgtgagacaaccatgacactgatgcgcaggggctgattccatatatatgtacacatagcaaaaactcagcacacctgagctcttctaacgcatgtgtatgtgg

SEQ ID NO: 563353 - DNA, 494 bp, Homo sapiens
taactgggactacaggcacacaccatcataattgttaaaatttttttttaattttttttttatagaaacaggatcttgccatgttgcccaggctggtctcaaaatcctgaatgcaagctatctcctygacttcccaaagtgttgagattacaggcatgagccacctcacccagccatgtctcagggatcttgaaaacaagtggttcaagaggaaaagctgcctgaaaggtgtacagatctctcattcaacacctgcctgacatcacacatctgcaaggcagagaggtaaactatctctaagaaatcaggcccctgacacagttccagagcaagtaagattagcacctctgtgagtctgctgccctgccacatattatatttaacagaagtttcttaggagtaacctatttgaactaggaagcaacagaagtttccacatgactgtaccatctaccactttctagaatgaaaatcttaacctggggttagaattc

SEQ ID NO: 563354 - DNA, 494 bp, Homo sapiens
taactgggactacaggcacacaccatcataattgttaaaatttttttttaattttttttttatagaaacaggatcttgccatgttgcccaggctggtctcaaaatcctgaatgcaagctatctcctcgacttcccaaagtgttgagattacaggcatgagccacctcacccagccatgtctcagggatcttgaaaacaagtggttcaaraggaaaagctgcctgaaaggtgtacagatctctcattcaacacctgcctgacatcacacatctgcaaggcagagaggtaaactatctctaagaaatcaggcccctgacacagttccagagcaagtaagattagcacctctgtgagtctgctgccctgccacatattatatttaacagaagtttcttaggagtaacctatttgaactaggaagcaacagaagtttccacatgactgtaccatctaccactttctagaatgaaaatcttaacctggggttagaattc

SEQ ID NO: 563355 - DNA, 512 bp, Homo sapiens
gaattcctgggctcaagtgattctcctgtctcgacctcctgagtaactgggactacaggcacacaccatcataattgttaaaatttttttttaattttttttttatagaaacaggatcttgccatgttgcccaggctggtctcaaaatcctgaatgcaagctatctcctcgacttcccaaagtgttgagattacaggcatgagccacctcacccagccatgtctcagggatcttgaaaacaagtggttcaagaggaaaagctgyctgaaaggtgtacagatctctcattcaacacctgcctgacatcacacatctgcaaggcagagaggtaaactatctctaagaaatcaggcccctgacacagttccagagcaagtaagattagcacctctgtgagtctgctgccctgccacatattatatttaacagaagtttcttaggagtaacctatttgaactaggaagcaacagaagtttccacatgactgtaccatctaccactttctagaatga

SEQ ID NO: 563356 - DNA, 596 bp, Homo sapiens
acatcacactctggggactgttgtggggtcgggggaggggggagggatagcattgggagatatacctaatgctagatgacgagtcaatgggtgcagcgcaccagcatggcacatgtatacatatgtaactaacctgcacattgtgcacatgtaccctaaaacttaaagtataattaataataaataaaataaaattttaaaaaaagaaagtggtggtcgcttaacacatgtttgaattctattatttttattyagtcagattattctttggcttcatttattctctttcattctctaatgctccttcctttgaagatataaaataattattttttcactcctatgatacagttgctcatattttatgagaatgcacattgttagtttattttaaaaagtgcctctattttgtcctaataatgtgataaagtagtaacgacatataaatatctctgctagagctttgattggtgtttgaaagaggcaaaattagaatactgagagaatgaaaaaactttaataggtgaggtgacatttgatttgcattgagctttgaaaaatagagtagtatttcaaatgtcataggtggacaggct

SEQ ID NO: 563357 - DNA, 596 bp, Homo sapiens
acatcacactctggggactgttgtggggtcgggggaggggggagggatagcattgggagatatacctaatgctagatgacgagtcaatgggtgcagcgcaccagcatggcacatgtatacatatgtaactaacctgcacattgtgcacatgtaccctaaaacttaaagtataattaataataaataaaataaaattttaaaaaaagaaagtggtggtcgcttaacacatgtttgaattctattatttttattcagtcagattattctttggcttcatttattctctttcattctctaatgctccttcctttgaagatataaaataattattttttcactcctatgatacagttgctcatattttatgagaatgcacattgttagtttattttaaaaagtgcctctattttgtcctaataatgtgataaagtagtaacgacatataaatatctctgctagagctttgattggtgtttgaaagaggcaaaattagaatactgagagaatgaaaaaactttaataggtgaggtgacayttgatttgcattgagctttgaaaaatagagtagtatttcaaatgtcataggtggacaggct

SEQ ID NO: 563358 - DNA, 566 bp, Homo sapiens
tgtctttaaaaaaaaaaaaaaaatacaaaaattagctgtatgggatgattggttcctgtagttccagctactcagtgggctgagatgggaagactgctgagcctggaaggtcaaggctgcagtgagccatcacaccactgcactccagcctgggtgacaaagtgaaatatttgaggagayagtctatgtgttttcatcactttaacctgagaccatgtacagtgagtggcacatagtagagatcgaaggtcacttatttggtgaaatgatctcttgtattgcctcagttgaatttacacactcttatagtaggtcttataatcccaacctgactataagctccttgatgactgatcaaaaaacaatttatatattttttaactttttaattgtgaaataattaaaacttacagtaaagttgcaagaatagtacagggaactccagagcacacctcacccggactcatggattgtttatttacatttcgtcacattttctacatgattcattttctgtttctctctgtgtccatatatacaaatatagagacagagataattatgat

SEQ ID NO: 563359 - DNA, 566 bp, Homo sapiens
tgtctttaaaaaaaaaaaaaaaatacaaaaattagctgtatgggatgattggttcctgtagttccagctactcagtgggctgagatgggaagactgctgagcctggaaggtcaaggctgcagtgagccatcacaccactgcactccagcctgggtgacaaagtgaaatatttgaggagacrgtctatgtgttttcatcactttaacctgagaccatgtacagtgagtggcacatagtagagatcgaaggtcacttatttggtgaaatgatctcttgtattgcctcagttgaatttacacactcttatagtaggtcttataatcccaacctgactataagctccttgatgactgatcaaaaaacaatttatatattttttaactttttaattgtgaaataattaaaacttacagtaaagttgcaagaatagtacagggaactccagagcacacctcacccggactcatggattgtttatttacatttcgtcacattttctacatgattcattttctgtttctctctgtgtccatatatacaaatatagagacagagataattatgat

SEQ ID NO: 563360 - DNA, 566 bp, Homo sapiens
tgtctttaaaaaaaaaaaaaaaatacaaaaattagctgtatgggatgattggttcctgtagttccagctactcagtgggctgagatgggaagactgctgagcctggaaggtcaaggctgcagtgagccatcacaccactgcactccagcctgggtgacaaagtgaaatatttgaggagacagtctatgtgttttcatcactttaacctgagaccatgtacagtgagtggcacatagtagagatcraaggtcacttatttggtgaaatgatctcttgtattgcctcagttgaatttacacactcttatagtaggtcttataatcccaacctgactataagctccttgatgactgatcaaaaaacaatttatatattttttaactttttaattgtgaaataattaaaacttacagtaaagttgcaagaatagtacagggaactccagagcacacctcacccggactcatggattgtttatttacatttcgtcacattttctacatgattcattttctgtttctctctgtgtccatatatacaaatatagagacagagataattatgat

SEQ ID NO: 563361 - DNA, 566 bp, Homo sapiens
tgtctttaaaaaaaaaaaaaaaatacaaaaattagctgtatgggatgattggttcctgtagttccagctactcagtgggctgagatgggaagactgctgagcctggaaggtcaaggctgcagtgagccatcacaccactgcactccagcctgggtgacaaagtgaaatatttgaggagacagtctatgtgttttcatcactttaacctgagaccatgtacagtgagtggcacatagtagagatcgaaggtcrcttatttggtgaaatgatctcttgtattgcctcagttgaatttacacactcttatagtaggtcttataatcccaacctgactataagctccttgatgactgatcaaaaaacaatttatatattttttaactttttaattgtgaaataattaaaacttacagtaaagttgcaagaatagtacagggaactccagagcacacctcacccggactcatggattgtttatttacatttcgtcacattttctacatgattcattttctgtttctctctgtgtccatatatacaaatatagagacagagataattatgat

SEQ ID NO: 563362 - DNA, 598 bp, Homo sapiens
cactacatctgtctaatttttgtatttttactagagacagggtttcaccatctcggccaggctggtcttgaactcctggccttgtgatccacccgcttcggcctcccaaagtgctgggattacaggcgtgagccaccatgctcacacactttttttctctccaatgcatagatttttttttttcccagataaattgcatgccatctgctccctcattttcttcaggtctttccgctcaagttaccatttcaataaaacttcatttacccaccactttacaatggaaaaacaaaacatctacactttctatagttcttcctgctttatagttgtcaactgaaattatcatcaccygaaatatatcataatcacttatttacttcattggcaacctgctgacttcaacagagtataagctccatgaggtcagagatttctgttttgttctctgctatatgtacagcacttagtaaacatgtattggatgaatgaatgaaaagcagttgttaaaatgatggtggctttcatagtggagagcactttggaatggaggaaataaagcaaatctcactttagaaattattattttgttgaacaa

SEQ ID NO: 563363 - DNA, 490 bp, Homo sapiens
aattacatcaaactattaataatcaaccttccatcacatcatttttatacggaaagataaacaaacccataattatctaactggtgagaaggaaaaatgatttcagcaaaagtttaattaattgttttgtctaaattaatgctggagagattgtatttggagacaagcagactggactatagctccaggtctacaaaggacaaacacagtaaccttttctgtttgacaacaatttctcacaaaragattgtgattttgactgtataattatttctacctcaaaatagtattttttattagtgactgactcatcttttacattaattgtgatatgtaccatttagtttatctagaaaaatcttaaatattatagagcaggatatttatacctttgtaattgaatttctgaaacataacagtatatgaataagtgtgtgacttgaagactcaatttataaaataaaaataaattagtgatatttagaaaaat

SEQ ID NO: 563364 - DNA, 434 bp, Homo sapiens
gtggagcttgtagtgagccgagatcacgccactgcattctagcctgggcgacagagcgagactccgtctcaaaaaaaagaagaaaaaaaaaaaaagtcatcaggtctttctacaacacgcgcacatgcaaactacttaaagaaacagtaagttatgggcctggcacggtggctcacacctgtaatctcagcactttgggaggccgaggcaggcagatcacctgaggtcaggagttcaagaccagcctgaccaacatggagaaaccctgtctctactaaaaatacaaaaattagctgggcacagtggygcatgcctgtaatcccagctactcgggaggctgaggcaggagaatcgcttgaacccgggagatggaggctgtggtgagcagagatcatgccattgttgcacttcagcctgggcaacaagagcgaaac

SEQ ID NO: 563365 - DNA, 579 bp, Homo sapiens
aattttttaattagaaacaattgtgctttaaaagcacattgcacattaacttgtatattctattttcatttacaaactgaatacgaggaatgcctttagagaagaaaaccaaaacattacaactgagaaaacagaattaaatctttatccagttaatcaaatttagtcatcaagccaacagagaaattgatgaggtagtctctgaagtattcataaaaattcacacaaacctatcctctaaaatgattattttccgggaagctatgtaagaaccagggctcttttattaaagtgtaacatcaattaaagctgtcttgtctagatttctaaaatatatcagcaaaaatgctgggtcaaaactatgtgagtgaaaaaataaatacactcttcaataatataattcaatcaatttcrttggtttgattactacagcttatgtatttttcttaaattgtcctctggggaaatataatgttgaaatatagtgaaatagctttaatcttttgagctcgaattatgctgactgaaatatctttatgaaggttatttatgcttaaaaatccacatgttgaagtttac

SEQ ID NO: 563366 - DNA, 635 bp, Homo sapiens
taagtaaggaggagccaaatgttaatccccaagacaagggggaaaatatctccagggcatgttagaggtcttcacagcagtccctttcatcacagtcctggaggcctaggaagaaaaaaaggtttcatgggccaggcccagggtccttgtgctgtgtgcaatttagggacttggtgcctggcttcccaaccactccagctgtgatcaaaagtggccaaggtacagcttgggccatggcttcagagggtgcaagccacaagccttagcagtttccacatggtgttgagcctgccagtgcacacaagtcaagaattggggtttgggaacctctacctagatttcagaaattgtatggaatggcctagatgcccaggcagaagtttgctgcaggggtggggccctcatgaagaacctctgctagggcagtgtggaagggaaatgtgaggtcggagcccccacacagagtccctattggggcactgcccagtggagctatgagaagagagccacaaccctcaaaccccataatggtagatccattgacagcttgcaccatccacytggaaacactgcagatactcaatgccagctgtgaaagcagctgggagggaggctgtaccctgcaaagccacagg

SEQ ID NO: 563367 - DNA, 706 bp, Homo sapiens
tctctttcttataaacttacctaatggtggcaagagtagttaatgcacaatatatcttcattttattaaaatcctggaggctagaattccaagatcaaggtgtcagcagggtttatttcttctgaggtctctgttcttggcttttagatggccatcttctccctgtgtctttaaatagccttccccctgcatatgtcctaaattcctcctgacttataagggcatcaatcatattggattagggccaaccataataacctcattttaacttaattacctcctttaaggaccatatgtcaaaatakagtcatagtctgaagcaccacggattagggcttcaacttacgatttttggagaaatacaattaaactgtagcaatatcttataactgcttcttattctactactttaccagtgcctgatttgccatatgcaggtaacaggaaagatttaccatattttgctactgcattataaggttacaaaattctagtctgtaatgtcaatccttgccatctgctgctggacaacttccattaagctaatgatacgtgttctgttacttgaagcaactcagttccaaaagaaaaaaaaaaaaaaaacctggaatcaattgcaattagtttcaaatgtaaattgcaatgacctccaattaaaagtgctgaaaataagatacacaattctcaattaaatgttcttaagtag

SEQ ID NO: 563368 - DNA, 637 bp, Homo sapiens
gaaaatgtatctttaggccgggcgtggtggctcacgcctgtaaccccagcactttgggaggtcgaggcgggtggatcacgaggtcaggagatcaagaccatcctggcatcctggctaacacagtgaaaccccgtctctactaaaaatacagaaaaaaaaaaaaaaaaaaatagccaggcattgyggcgggcagctgtagtcccagctactcgggagcctgagggaggagaatcgcttgaatccgagaggtggaggttgcagtgagccgagatcgtgccactgcactccagcctggcctacagggagattctgtcaaaaacaaaaacaaacaaacaaaaaaaactatcttacatgtagttttttcagtttcggaaatttacttggcttctagtgaacctgttctttgcttttttaaaaaagaaatttatcatgaaataatattttttaaatacaaacttgccaatttttagcatagagcaaaataaattaatttaaaatgtatcaatttgaaatgctggaactctttgcatctagttatctcatgttctgtttttatctggcctttagggttttatcaaactgcaagaaaatatgtattcatgaacatgctttaaatgagctgtaattaaaatcactg

SEQ ID NO: 563369 - DNA, 633 bp, Homo sapiens
tgttgcccaggctggagtgcaatggcatgatcttgggtcaccacaacctytgcctcctgggttcaagcgattctcctaccttaccctcccgagtagctgggactgcaggcatgtgccaccaggcccagctaatttttgtatttttagtaaagacggggtttcaccatgttggctaggatggtctccatctcttgacctcgtgatccacctgccttggcctcccaaagtgctccgattacaggcataagctaccgcacccagcccaaacaggactttttaagctcctccaagtttattattaatagactctaccctctgtcctccaatcatacttcttaacaattatccacttcttcatcagacttagtacaaaaatacacaagtttacctctgtctttgagtcttcatttctgaaggctcctgtttggtgtgtgctttcctctagttaatctgtctgttgtcatagaagcctcagccataaatctaagatgaaaagaagaaatatttattttcccctgcagcaccattttaactgatctgaaaccatcaactcattagactgttgagtaaacaacaagtaaaaatactcaaagcctttaaatttttgttttgagcaatttgtacttgttttga

SEQ ID NO: 563370 - DNA, 462 bp, Homo sapiens
aaaaaataataaaaaaatagttcttttttgttttaaccttctggtctaactaaaattataattcccgaaggtctttaggttcctgttgattttgatgatatattcaggactcaaaaaattcctccatgttcaacaatatatcacagaaagctcaaatcactgtgatattttcagttgacggtgtttggaaatatgttacctccattggtaatatttcgtaatgttgcacataagatttgtctttgatttataaacagatgcatataaattcatgatttttccttaatcattagtaaaagggaaactagcattttctgaagctctactatgtaactctactacttattttatatagattgtctttaatatgaagacaactctatgtgaaaggtgatatawctatttgacacgtaagaaacaaagtttcagaaaagtgagtaaatttctaatggaaaacaaaag

SEQ ID NO: 563371 - DNA, 633 bp, Homo sapiens
tgttgcccaggctggagtgcaatggcatgatcttgggtcaccacaacctttgcctcctgggttcaagcgattctcctaccttaccctcccgagtagctgggactgcaggcatgtgccaccaggcccagctaatttttgtatttttagtaragacggggtttcaccatgttggctaggatggtctccatctcttgacctcgtgatccacctgccttggcctcccaaagtgctccgattacaggcataagctaccgcacccagcccaaacaggactttttaagctcctccaagtttattattaatagactctaccctctgtcctccaatcatacttcttaacaattatccacttcttcatcagacttagtacaaaaatacacaagtttacctctgtctttgagtcttcatttctgaaggctcctgtttggtgtgtgctttcctctagttaatctgtctgttgtcatagaagcctcagccataaatctaagatgaaaagaagaaatatttattttcccctgcagcaccattttaactgatctgaaaccatcaactcattagactgttgagtaaacaacaagtaaaaatactcaaagcctttaaatttttgttttgagcaatttgtacttgttttga

SEQ ID NO: 563372 - DNA, 633 bp, Homo sapiens
tgttgcccaggctggagtgcaatggcatgatcttgggtcaccacaacctttgcctcctgggttcaagcgattctcctaccttaccctcccgagtagctgggactgcaggcatgtgccaccaggcccagctaatttttgtatttttagtaaagacggggtttcaccatgttggctaggatggtctccatctcttgacctcgtgatccacctgccttggcctcccaaagtgctccgattacaggcataagctaccgcacccagcccaaacaggactttttaagctcctccaagtttattattaatagactctaccctctgtcctccaatcatacttcttaacaattatccacttcttcatcagacttagtacaaaaatacacaagtttacctctgtctttgagtcttcatttctgaaggctcctgtttggtgtgtgctttcctctagttaatcygtctgttgtcatagaagcctcagccataaatctaagatgaaaagaagaaatatttattttcccctgcagcaccattttaactgatctgaaaccatcaactcattagactgttgagtaaacaacaagtaaaaatactcaaagcctttaaatttttgttttgagcaatttgtacttgttttga

SEQ ID NO: 563373 - DNA, 633 bp, Homo sapiens
tgttgcccaggctggagtgcaatggcatgatcttgggtcaccacaacctttgcctcctgggttcaagcgattctcctaccttaccctcccgagtagctgggactgcaggcatgtgccaccaggcccagctaatttttgtatttttagtaaagacggggtttcaccatgttggctaggatggtctccatctcttgacctcgtgatccacctgccttggcctcccaaagtgctccgattacaggcataagctaccgcacccagcccaaacaggactttttaagctcctccaagtttattattaatagactctaccctctgtcctccaatcatacttcttaacaattatccacttcttcatcagacttagtacaaaaatacacaagtttacctctgtctttgagtcttcatttctgaaggctcctgtttggtgtgtgctttcctctagttaatctgtcygttgtcatagaagcctcagccataaatctaagatgaaaagaagaaatatttattttcccctgcagcaccattttaactgatctgaaaccatcaactcattagactgttgagtaaacaacaagtaaaaatactcaaagcctttaaatttttgttttgagcaatttgtacttgttttga

SEQ ID NO: 563374 - DNA, 514 bp, Homo sapiens
aagaacatacactggggaaaagacagtcttttcaataaatggtgctgggaaaactggttatccatatgcagaataatgaaactagacccgtatcctygccatataaaaaaatcaaatcaaaatggattaaaggcttaaatctatgacctcaatctataaaactactataagaaaacactggggaaaatccccaggacattgatctgggcaaatattttttgagcaataccccacaagcacagacaaccaaagcaaaaatgggcaaatggtatcacattaagttaaaaagtttctgcaaaggaaataaccaaccaactgaagagacaacacacagaattggagaaaacatttgaaaactacccacctgacaagaaattgataaccagaagatataagaacctcagacaactccatagaagaaaaatctaaaaatctgatcaaaaatgggcaaaaaatattgctagacatttctcataaaaagacatacaaatggaaaacaggtatatgaaaaaga

SEQ ID NO: 563375 - DNA, 514 bp, Homo sapiens
aagaacatacactggggaaaagacagtcttttcaataaatggtgctgggaaaactggttatccatatgcagaataatgaaactagacccgtatccttgccatataaaaaaatcaaatcaaaatggattaaaggcttaaatctatgacctcaatctataaaactactataagaaaacactggggaaaatcyccaggacattgatctgggcaaatattttttgagcaataccccacaagcacagacaaccaaagcaaaaatgggcaaatggtatcacattaagttaaaaagtttctgcaaaggaaataaccaaccaactgaagagacaacacacagaattggagaaaacatttgaaaactacccacctgacaagaaattgataaccagaagatataagaacctcagacaactccatagaagaaaaatctaaaaatctgatcaaaaatgggcaaaaaatattgctagacatttctcataaaaagacatacaaatggaaaacaggtatatgaaaaaga

SEQ ID NO: 563376 - DNA, 574 bp, Homo sapiens
ggcaacacaacttataaaattaattaaggcgtgttccttcattttcccttctttgaaagaatgaggttaaagttgaaattaccamttcttaaatgcaaaatatcctatcaaaccatatgagcttgttttatttatttattttgaggagatatttttaaattacttaatatgattaataattatattactcaagttttctaccacttttagttcagtcaagaaatctgtttatctatgttaaaatttcccaaatttattggcatataactgcttgtcataatttcttattttttatgtcaggttcatagatttgtatgtcctctgtttacccatgtcttgttcatattttgttccatacgccaaatgtgtcccagattttcacattctaaaacgtttacatacacaaacacacaaccatttatacaatctatccctcaaaccaaaacctacttctcacctttcacaaacagctttacaaggtagggaacgttgttggatcctgcggtagctctctttttagaggaatcaccgtttttcatggtagctgcacaattctatattcttttcaataatg

SEQ ID NO: 563377 - DNA, 574 bp, Homo sapiens
ggcaacacaacttataaaattaattaaggcgtgttccttcattttcccttctttgaaagaatgaggttaaagttgaaattaccacttcttaaatgcaaaatatcctatcaaaccatatgagcttgttttatttatttattttgaggagatatttttaaattacttaatatgattaataattatattaytcaagttttctaccacttttagttcagtcaagaaatctgtttatctatgttaaaatttcccaaatttattggcatataactgcttgtcataatttcttattttttatgtcaggttcatagatttgtatgtcctctgtttacccatgtcttgttcatattttgttccatacgccaaatgtgtcccagattttcacattctaaaacgtttacatacacaaacacacaaccatttatacaatctatccctcaaaccaaaacctacttctcacctttcacaaacagctttacaaggtagggaacgttgttggatcctgcggtagctctctttttagaggaatcaccgtttttcatggtagctgcacaattctatattcttttcaataatg

SEQ ID NO: 563378 - DNA, 574 bp, Homo sapiens
ggcaacacaacttataaaattaattaaggcgtgttccttcattttcccttctttgaaagaatgaggttaaagttgaaattaccacttcttaaatgcaaaatatcctatcaaaccatatgagcttgttttatttatttattttgaggagatatttttaaattacttaatatgattaataattatattactcaagttttctaccacttttagttcagtcaagaaatctgtttatctatgttaaaatttcccaaatttattggcatataactgcttgtcataatttcttattttttatgtcaggttcatagatttgtatgtcctctgtttacycatgtcttgttcatattttgttccatacgccaaatgtgtcccagattttcacattctaaaacgtttacatacacaaacacacaaccatttatacaatctatccctcaaaccaaaacctacttctcacctttcacaaacagctttacaaggtagggaacgttgttggatcctgcggtagctctctttttagaggaatcaccgtttttcatggtagctgcacaattctatattcttttcaataatg

SEQ ID NO: 563379 - DNA, 608 bp, Homo sapiens
cgagtatctatctagtgtctagtatygagtgtcatgtatcgagtatctagtaataataaatgtatctagtagaactgctgtaagaataaactaaaatactgtatattaaagcattctgctaacatcttatgaaaactattgattaatgtatactggcattattttaatgatgataatataattagtatccacctgcccaaaggcatgtcaaaaggccacattgttctctgccccaaaccaggctcaagtgagatcttctaaacatgcctatgtctcctttctgatgaatatagctctccatagatatagtgagaatctcagccaaagtcaaaggagtagggcatgaaataccctgtagcaataaaaaatgatatagatgtatattcagtatttcaaaatcatatgttttgtccattataaaaacagctttcatgcttaattatgatatggtgtgttctctaatctttctgaataaaccaatagtaagtctgtgatcaaaattaaggagaaaaatgtaactctaagctgtatttattggaatatcaggagtaggatttttaaaaatctctgtgcatgaatataatgactagccaagattgtaagctatc

SEQ ID NO: 563380 - DNA, 586 bp, Homo sapiens
tggaagtcctagccagagcaattagacaagagaaagaaatataggacatccaatttggtaatgaggaagtcaaactgttgctgtttggtgatgacatgattgtayacctagaaaacccccaagacaccttgaaaaagttcattgaactggtaaatgaattcagcaaagtttcaggatatgaaattaatgcatacaaatcagtagttctgctatacaacaacagtgttcaaactgagagtcaaataaaaaacaacccctttcacaatagctgcaaaaaaataaaataaaatacttaggaatatacttaaccaagtaggtgaaaaacctctacaaggaaaattacaaaacactactgaaagaaatcatagacaacacaaacaaatggaaacatatcccatgttcatggatgggtagaatcaacattgtgaaaatgactgtattgccaaaagcagtctacaaattcaatgcaattcctgtgaaaacatcatcatcattcttcacagaactaggaaaaaccatcctaaaattcatatggaactaaaaaagagcccacatagccaaagaaagactatgcaaaaagaacaaa

SEQ ID NO: 563381 - DNA, 483 bp, Homo sapiens
gaattcgagcatggtgcgggcaggccggcagtgctggagtacccagcgcccccaccgcaggtgctggcccggttgctaagcccctcactgcctggggctggcagtgttggccagccgctccaagtgcagggcccaccaagcctgtacccacctggaactcgtgctagcccatgagcaccgcatgcagccctggttcccacctgtgcttctccctccacacctccccgcaagcagagggagctggctccagcctcagccagcccagagagggactctcacagtgcagtggcaggctaaagggctctcaaacgtggccagagtggacgctgaggccaaggaggcactgagagtgagcgagggccactagcacgttgtcacctctcaatcctcactctaaacaggacaccccacctgattttgggaatgtggccgatgactgctctagctacttcctgmtagataagggtgaagaaggggccctgc

SEQ ID NO: 563382 - DNA, 596 bp, Homo sapiens
caattttcccatacccttaccacacacaaaccttctgtttgtttgyttttatagtggttattccagtggatgtgaggtgatgggttattgttgatttgatttgcatttctctaatgattagtgatatagagcatttgttcataagcttgttggtcactgatgcatcttctttgcagaaatggctattcaacctctttgcatattttttaaggctttgttattgttgttgacttgtaggacctttttttaaattctgggtattcaccccttatatgatatgtggcttgcaaatattttctccctttatgtagactgcctttgcattctgttttttcctttaatgtacagaaggcttacagttagaggtagtcctatttgtctattgcttttcttgtttgtgctttggaggttatagtcaagaaagcattgcccattccaatgtcatgaacatttttccattttcttataggagctttatagtttcaggtagtacatttaggtctttaattcattttgagttaattgtatatatggtgtaagagaagggcccattatctttcttttgcaaatggatatccagttgtctcaatgttttt

SEQ ID NO: 563383 - DNA, 560 bp, Homo sapiens
taaaaatagaaaaaagttagccagacgtggtggtgggcgcctatagtctgagctgctggggaggctgaggcaggagaatcgcatgaacctgggaggcagagcttgcagtgagccgagatcacaccactgcactccagcatatgtgacagagcaaggctccatctcaaaaaaaaaaaaaaggaagaaaatagccacacagagtttacagtctataaatgtgttaatttacatcagtgtcttctgctctttttgggttacaygacacatatgttaaaaaaggtaaacaaccccctaaaatatatgtgtatttgcataggttattcagatgtatcaatgttttatatatgtgaaaatatacacaaaaatgtaaattataaaggataagataaaaaagaaacaatgctttttaagtaattgtgttattaatgataaaacgttattctcactaaaccctttttacacattattaatattcgtgagaacaatgcacttgtaaatactttatgttttcaaatcttgctttaggactttgtagtatactcattggagggtccagttct

SEQ ID NO: 563384 - DNA, 375 bp, Homo sapiens
tttgctaataatgaatttgggatgttcagagataaatttcaaagtcatttgtgccaggaattatttcagctacaaataatagaataaccacaaaacagtggcttaagcaataaaggcatttgactatttcctgtaacagaaagcttagaggtaggtggtcccaataygggggcagcagctcaggggcagaagagacccaggcactctctgcctttctcctctgcctttcccagtaggtcagtgatgtttctcctcatggtgaacaagatggctgcacattcaccagaatcacatcctcacaaaacatcttcccaagcaccaaagaagaggatggggagtaggaccctttctcttcctgctgctctgatatggttt

SEQ ID NO: 563385 - DNA, 585 bp, Homo sapiens
cctgtcatctgctacccaacaagatctgcttcctaccattaccgagttggtcatacaaggtggaatgatttcaccagagcaagccatgctcagaaacagaaaatgttgcctcaggtgctttcttgaatgttagattttaatataaaagccagttctatccataatgggcaaatcytaagcggttgattctcttaggtttctcttacagcagagaacagaggatgagaagaaagagctctgaagggtcagcagaagggggaacggggtaccaggtgactttcatccctgtgagtgggaacttgactttgcgttgcgaccctgctcagctgttcatccaaaaggaaattgtggtttacaattacagaaaatcagtagctggaattattaataatagcaaaaaaagcgctgttggtgcagcaagtgatttgtggtaatgttttctaattgatagtcatttctattatttaaatactaactaattcatttcatgtactaagcagtgcattgactttacttacagtattatggcagccctcctagcttaaaatcattccttattgttttctttaggtaattaaaatgcac

SEQ ID NO: 563386 - DNA, 583 bp, Homo sapiens
tgcactggctctaccagcaagtccactgcctgtagacactctcttctagcagcaaggcccttctgcattggyaagtctgcagcccaaggattggccacagaaatcccctccttcggatgacaccaaagcagccttcctgtccaggggcagtctgactttttcatgctgagggggaaatggcataagcactttagaccttaaaatctgagatgttaggccaggtgcggtggcttacacctataatcccagaactttaagaggctgaggcgggcagatcactttaagtcaggagttcgagaccagcctggccaacaaggtgaaaccctgtctctactaaaaatataaaaattagctgggcatggtagcgcacacctgtaatccccactactcaggaggctgaggcaggagaatcacttgagcccaggaggtggaggttgcggtgagctgagattgtgccactgcactccagcctgggcaatagagcgagactccatctcaaaaaaaaaaaaatctgagatgtttctgtgaacagtgtagtcattggagaaacagcccgagttccaatgagaagaaggcaaagttt

SEQ ID NO: 563387 - DNA, 583 bp, Homo sapiens
tgcactggctctaccagcaagtccactgcctgtagacactctcttctagcagcaaggcccttctgcattggtaagtctgcagcccaaggattggccacagaaatcccctccttcggatgacaccaaagcagccttcctgtccaggggcagtctgactttttcatgctgagggggaaatggcataagcactttagaccttaaaatctgagatgttaggccaggtgcggtggcttacacctataatcccagaactttargaggctgaggcgggcagatcactttaagtcaggagttcgagaccagcctggccaacaaggtgaaaccctgtctctactaaaaatataaaaattagctgggcatggtagcgcacacctgtaatccccactactcaggaggctgaggcaggagaatcacttgagcccaggaggtggaggttgcggtgagctgagattgtgccactgcactccagcctgggcaatagagcgagactccatctcaaaaaaaaaaaaatctgagatgtttctgtgaacagtgtagtcattggagaaacagcccgagttccaatgagaagaaggcaaagttt

SEQ ID NO: 563388 - DNA, 601 bp, Homo sapiens
tttaagaatgaagcctcaggargaagagtagatgctgggagaagagtcagaaagctatctaagtgctccaggtaagagatgagcatggcttagactaagatggtgacagtggaaatggtgagattgaattgatttgggccgtactttgagtgtaaagttaatagaactgtttttttaaaaaaaagatgtagagggtgaagtaaaggaaaacaccaaggacagctcccagctttttggcctgagcacacacctagatgaaggtgccatagagcgagttcacaacaacagtttgcaggggaaatttacaaattctgtggactctcagatttatgtttttaaaaaggcataaaatgataaaagttgataccttttgctgtttagccctttgctatttatagagccccttctcattgatttatcttcattgatcctcctgaaaacccagtaagtttgcagtatctcttcctttttgcagctgaggaaatcagggtttagaaaacattaagtctgaaacactgacaatgattggttttttttcttacatcatataatgaatacaaccatcctcacgacttgcatggccctgtaagatggagaaggg

SEQ ID NO: 563389 - DNA, 549 bp, Homo sapiens
tgcaaatcctttcatttttttccctattcacttggaataatggcaaaactttttggsgggggtgttgcctcctacctagcctgtcacctcatctcccacaatagctcccttcactacttctgtctcaactacagtgacctatcagtttttcactcttgccttgttcacctctatcacgggacctttgcacatccctcagacacattctccctttcactcccctcctggcctggttaaatccctacccatctttcacattccaatacatacattctcagggaagcctcttcagttctccctgagcaggttaaatccctcttggcagtatatcctctcttttgcgcacctagcccttttaattatgtctatctcccctgacaagaacaggtatatgatgccaggacctgtgtctggttctgcttaccagttgaacactccaggactttgtgtggcactcagtaaatattgttgaaagagtgggtaggaggatgcattggaggtcagatcatctcaacaaaaccccaaaccaccctttgcgatagtgagagc

SEQ ID NO: 563390 - DNA, 549 bp, Homo sapiens
tgcaaatcctttcatttttttccctattcacttggaataatggcaaaactttttggggggggtgttgcctcctacctagcctgtcacctcatctcccacaatagctcccttcactacttctgtctcaactacagtgacctatcagtttttcactcttgccttgttcacctctatcacgggacctttgcacatccctcagacacattctccctttcactcccctcctggcctggttaaatccctacccatctttcacattccaatacatacattctcagggaagcctcttcagttctccctgagcaggttaaatccctcttggcagkatatcctctcttttgcgcacctagcccttttaattatgtctatctcccctgacaagaacaggtatatgatgccaggacctgtgtctggttctgcttaccagttgaacactccaggactttgtgtggcactcagtaaatattgttgaaagagtgggtaggaggatgcattggaggtcagatcatctcaacaaaaccccaaaccaccctttgcgatagtgagagc

SEQ ID NO: 563391 - DNA, 545 bp, Homo sapiens
atttctcaaaaatgactccttaatctgtgggctgcagaatggatgttgttagcaggccggaaaacattaatctccttgtacttctccatcagagctcttgggtgactaggtgcattgtcaatgagcagtaatattttgaaataaatctggttttctaggcagtaggtctcaacagtgggtttaaaatatacagtaaaccatgctgtaaacagatgtgctctcattcaggctttgctgttccatttagagcacaggcagaatagatttagtgtaattcttaagggccccasgactttcagaatggtaagtgaacattagcttcaacttaaagtcaccagctgcattagcccctactgaaagggtcagcttatcctttgaagctttgaagacagctattgacttctctccagctatgaaagtcctagattggatcttcttccaacataaggctctcttgtctacactgaagctctgttgtttagtgtagccaccgccacccatgatcttagctagatcttctggatagctttctgcagcttctacat

SEQ ID NO: 563392 - DNA, 573 bp, Homo sapiens
acgcttgctccgtggagaaaggttaaacggtttccccaagaccacacagatcaaacaagtgggagaggaggggctgaaagtgcctggtatacctcgccacactcccataattacccaaaccgtctcattccaagcccaaggaccgggctttcaaggggacacgaaaggaacgcccgggaggtgagcgccaggagatcgggagaggtgcctttcccggcatgctctgcagcacaccgaggggcgccaggcgtatcccggcgtgcatcggggagcgcccaagggcgatggttcccggctcctggagaggcgtgcgaagttaagccggtaggtgcgagcttccttagctttgagcctctggtttctcgtttcctctttatgggtttaaatccataacggcagaaaaggatggccctctaactaccctccctctccgcgtgcgaacgactcggcgccgcttcgagctcggtgccaggtgattagcgggtaggggcgggcytgcgaccagcacgtgacccgaactggcagccaatgactagccgggtggtccagcagcgcgaggattccgggacccgc

SEQ ID NO: 563393 - DNA, 609 bp, Homo sapiens
cctacacgttttctagttcagactattccagcagtttctgtcaatgttgttgtatatctcctcaggaagagcaaagtgtagagaaatatgaccttcctaagtaaaaagtaggtcagatcagtagtgttggataagcctccttctgttgactccttccttagtcttctcattctccttcatagtgttttgtattgtcacmtagcatgtcacgtagtaggttctcagtgcttgctaattcttatcaaagaaggcagttttggatcattgaccacaaaatctgctctcctactccctacttcttttttgccttttaagaaactacgcttcctttttactggtgtcaggagcacagaagaaagaacagctggtaaggagtagagaaggagaaagaaaactactttttgaaggttaggagaaatactgtccattgatttacttcagcaactgcctgacacataatagatattcactaatactttctttgcacctcatagcttaaatgtcttgaagaaacaaaaattgaatgcacaggatcaaggcactaaagcttagataacacactcctgcatcgtttccctgttttatcaagatatctttcatctttatatc

SEQ ID NO: 563394 - DNA, 613 bp, Homo sapiens
taatttttaaagaattggttaaaacttctctgtcttggttttactggtaatgatctgaaaaccaaaattttagtttatagaaagatgtttaakaaattcggcaccttttcatgtaatttataggtttgggataactagattttttttcatatacttctttgctgccttagtcatatgaaatgcacctaaggatgttgtgctcacgtggaacacatacacacaaaggatgttttgcatacttattcacaaaaatagttggtgatttgtaataaaaccttgaagtttatgaattaataagtacaagctaggagtttgcattgtttgaattatacatcattgtagaggtattttttttttgccagttctttaagctttaatattttaccttatttgtgacttccgtttagttttgttttgtcagtctctgataggtatcgcctaagtgtgttagttttagaaaaccaatcaacttcataggtaaaagcttgaggcagcttttgaaaagaatcactgtacattttatctcttttaaaaataaacttcacatcagaggagagattttttgttgttgttgttcctgacctttcctgatattagtgctttagtgttggga

SEQ ID NO: 563395 - DNA, 482 bp, Homo sapiens
ccttggtatagatctctaccctgacacttcctagctctgtcaccctcttaacttctccatgcctaagtttctcatgggagaaatggggataacaaaagtgttgctgagaagatgaaatgagataactgaagctgcttgcataggtggtgtatagtaagtgctcaataaatccatctgttaaaagctttatcactgatattcccagaggaattctcaaatttccaagggccaccctcttccacctgagtggatgggtgaagcagtggctggttgaagcagtggctggttaacctcaaggaaactctagccactcttctggcatttgacttggctgcttcacaccagataatgctgcctctggtctgggctgctgcagacataagccctgatgtgatttggctrtgtccccacccaaatctcatcttgaattgtagttcccataatccacatggaaagggacctggcaggagttgattggatca

SEQ ID NO: 563396 - DNA, 598 bp, Homo sapiens
gggctggggagcaggggagatgccaacagggaggtcagagggaggggtgccacagctgggcctgtgcctcaagagtcagagcagaatgggtgggtctgattcagaaggtagcagggatgtgaaatggagcctgctttccggtccctgtaaagaaagggaactccaggtggctcgtccccatgtgtggggttgttccccaatcacatggggaatcagaaagcaatctggccatgaggcaggggccagggagctgtggcttgtctggaagctgcacagcaagtccagtgtgcggttatttgtggaggcttgagggagaattgatggaaactgtggggggcagccccaaccccaagccacctggaggctgcctacttttgacaactacaatatccctgccaacaagctcaggggcaagggtgttaccaggtctgctctgtgcctgaaggacttcagctcagagaggctgagctcctactcagagtcacacagcactgctggctgccctgagcactggccacagccttcctgactccctttccagggctcccctcccagagtcctgccctcccactgcwgttctcaggcctccccttaaggg

SEQ ID NO: 563397 - DNA, 524 bp, Homo sapiens
cccatgctggagtgcagtggtacaatcttggttcattgcaatctctgcctcctggattcaagtgattctcccacctcagcctcccaagtagctggattacaggtgcccatcaccatgcccagctaattttgtatttttagtagagacaggatttcaccatgtgggccagactggtctcaaacttgtaatctcaagtgatccacccaccttggcctcccaaagttctaggattacaggcatgwgccactgaacccagccagtggctaggattttttaaaggatagtttggtgggcaggtgtgttagtccatttacacactgctataaagaactgctcaagactgggtaatttataaagaaaagaggtttaattgacttgcagttccacatggctggggaggccttagaacatacaattataacagaaggaaaagcaggcatgtcttacatggcagcaggcaagagagtatgtaagagcacaggaaaaacaaccatttataaaaccatcagatctcatgagaattc

SEQ ID NO: 563398 - DNA, 419 bp, Homo sapiens
cacaccctgtagccactctgtccagcagcaatgtcctaactgttctagcctagacctcatgtctgcgtgcagwggctgccgctgctttaatacttttagaggcccgcaaaataagtagaggcctttcaaacagggtctgagaaggccaccgcagtcatttcttccgttctgtcaaacataattcctcagtttagccttcccacctcaatacagtttgataacagacgaacctttattagtcaaatcagccaagcagtttttcaggctcttagtattcagtgaaacctttatatcccttatggtcctccatcttcaagaaaagtagaatggactaaaggtcttttaaaaacacacctcaccaagctcagccaccaacttaaaaaggactggacaatacttttaccgctttcccttctcag

SEQ ID NO: 563399 - DNA, 428 bp, Homo sapiens
gaatttttacacaagagccaggaccacaccctgtagccactctgtccagcagcaatgtcctaactgttctagcctagacctcatgtctgcgtgcagtggctgccgctgctttaatamttttagaggcccgcaaaataagtagaggcctttcaaacagggtctgagaaggccaccgcagtcatttcttccgttctgtcaaacataattcctcagtttagccttcccacctcaatacagtttgataacagacgaacctttattagtcaaatcagccaagcagtttttcaggctcttagtattcagtgaaacctttatatcccttatggtcctccatcttcaagaaaagtagaatggactaaaggtcttttaaaaacacacctcaccaagctcagccaccaacttaaaaaggactggacaatacttttacc

SEQ ID NO: 563400 - DNA, 419 bp, Homo sapiens
cacaccctgtagccactctgtccagcagcaatgtcctaactgttctagcctagacctcatgtctgcgtgcagtggctgccgctgctttaatacttttagaggcccgcaaaataagtagaggcctttcaaacagggtctgagaaggccaccgcagtcatttcttccgttctgtcaaacataattcctcagtttagccttcccacctcaatacagtttgataacagacgaacctttattagtcaaatcagccaagcagtttttcaggctcttagtattcagtgaaacctttatatcccttatggtcctccatcttcaagaaaagtagaatggactaaaggtcttttaaaaacacacctcaccaagctcagccaccaacttaaaaaggactggacaatacttttaccrctttcccttctcag

SEQ ID NO: 563401 - DNA, 281 bp, Homo sapiens
agtcacattgaacacttactcctcatctagggacaccccaggtactgatgtgtgcatgtttgtagatctttctctctgtctagtctcccctctgttacaggtaacaggctggtgtgtggcatgttccagagtgtgagatgtgtgtctgtgctggagcaaggggtgcttctagggatatggcattaagtaaygtgttacatatccttgagttacctagtgagaaagtgatccccttgtccactctgacaggtcagagaaaaggacagtacagtaaagggcag

SEQ ID NO: 563402 - DNA, 592 bp, Homo sapiens
ttcatgcaggaattccaaaggtacagcctatcccactccaagactccagttcctccaaaatattgtccaggaatgctctagttgtaaaggtgtcctcaggacctccttgcaggccagatcttctcaggtgaccaaatttttctacacttgagtgagagtttttcaaaaaatttgtcaaaacaaaaatggcattcctagctgaacatctatatacctargagaggtgatgtgagtctttacaaaacaagaaagatctatctctttaaagttacttatcttctacttggaataatggaacccatagacccaacactttcatcactatagaagatcacttaaatgagtcttcaccaaacaaagttataaatctattctctcctgtgtgaccctattaattacttgctacacatatgggaagacaattagaacacaatgaggaaagtattttgaagatatgagcctgatatttgaaatttagtcaataacctttaataaactcatgacccaattaataaaatagtgtatattttctcccaaaattatcaactttaaacattaaaactcatggaatcttccctgaaaatgatacagc

SEQ ID NO: 563403 - DNA, 499 bp, Homo sapiens
attggtcacagaaaatcatatggcctagcacaacatcaactgacatggcagtatgctctatcacagtaggaatagaagataaatgaaaatttgctgaaaaacaaatccaaactatcaaaagttttttccaagaagaaaaattgaacagtgttaattagtgatgaaaggtctagtaagataacatctgaaaagtattcatagaatttatgaaataaggatattttagtgacctagtaaagtgcagctttaataaaataataaaaagcagatttcagaggtatagagtgaattcaaggcaaagaaccgtgaagtaagcatagatgaatgtttaaagaaatttggggctgggcacattggctcactcctgtaataccaacactttgggaaactgagacaagacaatcacttcaggccaggagttagagaacagcttggraaacatagcaaacatagcaagacctcttctctacaaagaaaaataacaggctagccataatgg

SEQ ID NO: 563404 - DNA, 669 bp, Homo sapiens
gagagtaaggaaaacgggccttttccaattaatattttaagctgcaattaccacagcagaaaggtaaccaaggttctgcctgctggtttaaagagagtcatgctaaacccagtctgcagcatctcagagatcacgtcagcycactgacctagcttttacatagccaactgggaatccaggcaatgggatggatgcacagtgcaccaagcttgcatgcacacacacacacacacacactatcagtgccacgtggtggggagaccaggacgggaaagtttttgaatactaaatactgcatatatattaaacggcagcaacttgctactcatgcagagccactgtaatctttttagggattaagagtaatatttgaatctcttagctttagcagtaactgctatgcaccaaaagagcaaatttacagaaaaggacacatgctaatattgcaaggacatcttcacatctattgtttcacaatggagtcctctaatttatctttcatgttgccccatttatataataggaatcaatgtataatgtaacaaaaggatgtgttactccttagttcatagccactgtgtcctcaaattctttcaactcatacaactcatggggagtggccaatgctcaattcagttgtttaaattgtagctttagtctccttattca

SEQ ID NO: 563405 - DNA, 520 bp, Homo sapiens
gacatgtgatgccatgcacttccctgaactctcctttcttacaaaagaaacactttatgacattagcgggtgggtaaggtctcataaccacagaacaaagagacacattacagctgggggaatggtaaaaacaaacaaacaaataaaaccacacttctctctgggggaggactggatctaggcttctatagcaataccaaatagcaagttgaaatctcttactgctaaaggattggcgggaaactctctgccaagaccagttgcatatataaggtagcttggccttcatggggaggaggggcagaaatgctgaaaaacccgcactcttgaagcatagacacacaggagctctttaaggctgagattagagcagaatagagagcctgttatccytgcactccgatataacctagcactgagtatcaagcaacagcattctacctctggagtgcagtaaagaacatggagagagatatcatctgtgcaaagggcacatagagtcagcggagagctgggagca

SEQ ID NO: 563406 - DNA, 351 bp, Homo sapiens
aaattttttttatttggctaccccatatagattgtggattctttcactcaactatgatattataaaatgcagcccattatttttcaggtagagaatactggaatcaggggatcagttatgaagctggaaaaatcactttctcttatcaacaaaataagtccatacacctccatctacttgggtaacccaattttcctaaattttcctcaaatatgcatcattccaattgtccctccagcaaatttcagtgttagacagacctcatctagtaactacactagaaatgatccaaagtggatatctacaaatcagtaattatgaaaytatagttagttaactagaagattaaaa

SEQ ID NO: 563407 - DNA, 596 bp, Homo sapiens
tcctctcctgcttcactgtatccttgactggatccaaccctagttaaaatcagttacaccttttctgtgcttgcaactatgtatctaaatgtggctagaaaaacaaaacacaccatataatcatacagaatgttttcactttacatttatgaacaatctcctgaaattgaaccaaccaaaccattcattgctcccattcttctagattagtatttcaaacttaactcttctctccttaagytattaatatcccttccctcaattccacccttactaggcaagtaccatataataataagggtctacaagactgtattctacaagatcaaaacttcccccttatacataagatcttatccctctcacctactctaatcactccaggaagtctcccctttttaatttttgtagagacagggtctcgctctgtcactgaggtttaaatgcactggtacaatcatagctcactgtaatctcaaactcctaggctcaaggtatcctctgcttccacctcccaagtagttgggattgtaacaccaagcccagctgtttttttttaattaaatattttgtagagagaggatctcactatgttc

SEQ ID NO: 563408 - DNA, 475 bp, Homo sapiens
aaaagagaaaatatcatcaaaatacaaataactgttagaaatgattgctcaaaagaaaaacctggcaatgcatgattaagaaatgcaaaagaagatacagttgctctctgtatatgcgctttccacatccacagattcaaacaactgtggataaaaaaggatttttcaaaaccattaaaaaacaatgcaacagtaaaaaaaagtacaaataaaaaaatacagtataacaactatttacatagcatttacattgtattaggaattgtaagtaatgtagacatgatttaaagtatgcaggagaatgtgcattggttatatgaaaataccatgtcatttcataaaagggacttgaacattgtgaattttgatacctgtaacggtgctgaaatcaatttccctgtagatacaagggatgactatagggatagccagtagtatatgaaagrtatttagccttgccaatatataataatgt

SEQ ID NO: 563409 - DNA, 582 bp, Homo sapiens
gatctgcctgccttggcctcccaacatgctgggattacaggcatgatccactgctcccggccaggaagaataaatttctattgtgttaagtttcctagtttgtaataatttgttacaacagccctaggaaactaatacgctacactctaccaatcattctgtaagaggcagcacgctggagtgagaaagacattggacttcgaaaacagcttctgagcttaatgcttctaccagtagctgtgtgaccttgagtgtactgcaactccaccctgagtctctgttgcttcatctacaaaagggaaggatgtggacttccttttcaagttctytctagctctgtccttgctctcccaccataaagaaacccagaaaattgaacaaaatttaaaataatgatttttggttgttggacaaccggtattgtaggactgtggctcctgagagaaggacaacagacaagataatttctaagctcactccaagtttagcctgaaggtactttctggactatgccacagagaaatgaaacataatcaaagcccagcaggacttttgagttgaagggataaaattggaatttgt

SEQ ID NO: 563410 - DNA, 422 bp, Homo sapiens
gcagatctcctttgtgctagcttggaagtatcttagtcacttccaccacattccactggtcaaaccaagtcacagggcaagtctatatttaaggggagaacaatacgttttgcctttcaatgagcacagtgacaaagaatttgcaaccatctttctgctacagtggcatttctttaggacaaagatattcactgaataaattaatatactcatgaatgaatgaaakatataggacatgtctgaattcaatcctagctccatcattaatgtgtggtctgatcaagttatttaaacttgctgagactcagttttttttttttttttttttttttattatactctaagttttagggtacatgtgcacattgtgcaggttagttacatatgtatacatgtgccatgctggtgcgctgcacccacta

SEQ ID NO: 563411 - DNA, 594 bp, Homo sapiens
tgacaaatgggatctaattaaaccacattttccttatccattcatttgtcaatggacatttgggctgcctctccctcttggctattgtgaataataataggtgcaatgaacgtgggtgtacaaatatctctttaagattccgctttaattcttttggatatgtaccctgaactgggacataatcgtatggtgattatattttcaattttttgagaaatcactatattgttttccataatggttgcaccattttacattctctacaacagtgaacaagggtkacaatttctctacatcctttccaatgcctgttattttctgttgtgatagtgtccatcctaatgagtatgaggtgatatttcattgtgctttttatttgcatttctcttatgattagtgatatggagcattttttcatatgcttgtgggtcatttgtatgtctttggagaattgtctatttaagcccttcacccattttttaataaggttattttgttgtaggagtttataatatattctggatattaaccctttatcatatatataatttaaaaatattgtctcccattctgtaggtcatctttttttgctgt

SEQ ID NO: 563412 - DNA, 407 bp, Homo sapiens
ataaaaggaattgcattgtcttgttttaggctaggaataaattagatgtttgtgaaagccattgtaaatggtagagtacttcaccaatgttaattataataatttgacacaatgtagggtagtggtcaatagcataggttttgaagtcagaacaacccagacttgaatcttgccttgcctgctactaactctctaactttggcaagtttttcaacgcctgagtactccctttgctggcctataacatgcaaacatgcaaataatatcaatatctacctcccagggtcatctaagtgctaagtggagagagtatatgtaaagtacttatatagtgcctgctcawtatgttaaatattattattaattgtattagctcaataaatgtttgtttagagtaaatctactgg

SEQ ID NO: 563413 - DNA, 616 bp, Homo sapiens
cagccatgttctttgctacagcaaaacaaaagtaaccttggctcctgttcccagtaatttcctcattttcatctgagaccttgtaagcctggccttcactgtccatccttctgccagccttttaatcacaactatttaacaagtgcctacgatggtccaaaatttcttcatcttcctgtcttctttcaagctctccaaactctccaacctctggcttttacacacttctgaacctgctttacattttcagctatctttgttgctgcttggtaatgtagaagaaaaagaagtccattttcagggggaaacttcaagaaggcttcagatatttgcattaaaaagaagtccagtgctaatagtcaagacgatggggaaatgtcattgaagatatttcatagctccacttcacagtactttattttctgtatgatcataatgaaaaggggtttaattggcccatggttctgcaggctgtaaagaaagcacagtggcttctgcttctggaaggactcaggaagcctcccaatcayaccagtaggaaaacagcaatgaaatgtttcatacggcaggagcaggagcaaggctgagagaggaatgaggtgccacatcgttatat

SEQ ID NO: 563414 - DNA, 616 bp, Homo sapiens
cagccatgttctttgctacagcaaaacaaaagtaaccttggctcctgttcccagtaatttcctcattttcatctgagaccttgtaagcctggccttcactgtccatccttctgccagccttttaatcacaactatttaacaagtgcctacgatggtccaaaatttcttcatcttcctgtcttctttcaagctctccaaactctccaacctctggcttttacacacttctgaacctgctttacattttcagctatctttgttgctgcttggtaatgtagaagaaaaagaagtccattttcagggggaaacttcaagaaggcttcagatatttgcattaaaaagaagtccagtgctaatagtcaagacgatggggaaatgtcattgaagatatttcatagctccacttcacagtactttattttctgtatgatcataatgaaaaggggtttaattggcccatggttctgcaggctgtaaagaaagcacagtggcttctgcttctggaaggactcaggaagcctcccaatcataccagtaggaaaacagcaatgaaatgtttcatacggcaggagyaggagcaaggctgagagaggaatgaggtgccacatcgttatat

SEQ ID NO: 563415 - DNA, 616 bp, Homo sapiens
cagccatgttctttgctacagcaaaacaaaagtaaccttggctcctgttcccagtaatttcctcattttcatctgagaccttgtaagcctggccttcactgtccatccttctgccagccttttaatcacaactatttaacaagtgcctacgatggtccaaaatttcttcatcttcctgtcttctttcaagctctccaaactctccaacctctggcttttacacacttctgaacctgctttacattttcagctatctttgttgctgcttggtaatgtagaagaaaaagaagtccattttcagggggaaacttcaagaaggcttcagatatttgcattaaaaagaagtccagtgctaatagtcaagacgatggggaaatgtcattgaagatatttcatagctccacttcacagtactttattttctgtatgatcataatgaaaaggggtttaattggcccatggttctgcaggctgtaaagaaagcacagtggcttctgcttctggaaggactcaggaagcctcccaatcataccagtaggaaaacagcaatgaaatgtttcatacggcaggagcaggagcaaggctgagagaggaawgaggtgccacatcgttatat

SEQ ID NO: 563416 - DNA, 525 bp, Homo sapiens
actttaaatagcagtagcgatataatcagagtgcacagttgctctgggacaaaacttggaaatgagcatatttttagattcttaatgttttacacactttagcattccacagcaccattacatactcatttttctactagaataccttggtaraaattcacagtagagatcaggcttgtccttcatacattaactaatcaagtagaaaagtgcaaatgagaacacagtgccaaaaataggcaccacatggaaaaaagcatggaacttccaggaagccatttttgtagctttatagcccaaattatatttttcctaatgtatgcacacaaaactgggggaaaaaaaaagaggcagagagaaaacaggttatatcagccctatctcacaatccacaagttcatcctattagaggattaactatgtaaaacaaattttatctgctgaatgtcctatttagttaatcacaaaactgtacaagaacacacttgtgacttatttagcagcttgtttgttcgctttccactg

SEQ ID NO: 563417 - DNA, 657 bp, Homo sapiens
ggacaatcagtatgaatctattttttagacatgcaaatggataactttaaatagcagtagcgatataatcagagtgcacagttgctctgggacaaaacttggaaatgagcatatttttagattcttaatgttttacacactttagcattccacagcaccattacatactcatttttctactagaataccttggtagaaattcacagtagagatcaggcttgtccttcatacattaactaatcaagtagaaaagtgcaaatgagaacacagtgccaaaaataggcaccacatggaaaaaagcatggaacttccaggaagccatttttgtagctttatagcccaaattatatttttcctaatgtatgcacacaaaactgggggaaaaaaaaagaggcagagagaaaacaggttatatcagccctatctcacaatccacaagttcatcctrttagaggattaactatgtaaaacaaattttatctgctgaatgtcctatttagttaatcacaaaactgtacaagaacacacttgtgacttatttagcagcttgtttgttcgctttccactggcttcacaaatgtcctttggaaagagaaagtacatttggaaccctgtacaccttttctttctccagtaccctcttgtcacttccatcac

SEQ ID NO: 563418 - DNA, 595 bp, Homo sapiens
gcttgtccttcatacattaactaatcaagtagaaaagtgcaaatgagaacacagtgccaaaaataggcaccacatggaaaaaagcatggaacttccaggaagccatttttgtagctttatagcccaaattatatttttcctaatgtatgcacacaaaactgggggaaaaaaaaagaggcagagagaaaacaggttatatcagccctatctcacaatccacaagttcatcctattagaggattaactatgtaaaacaaattttatctgytgaatgtcctatttagttaatcacaaaactgtacaagaacacacttgtgacttatttagcagcttgtttgttcgctttccactggcttcacaaatgtcctttggaaagagaaagtacatttggaaccctgtacaccttttctttctccagtaccctcttgtcacttccatcactaaggtgacagaagcaactaggggcaatgcatttttagcacaccttggtcagaggtatcctccaggagaaggatcagacctgcttgaaagcatgtcgttggaattgggaggcttctagtagctataacataagcactgatgtttactgttccct

SEQ ID NO: 563419 - DNA, 595 bp, Homo sapiens
gcttgtccttcatacattaactaatcaagtagaaaagtgcaaatgagaacacagtgccaaaaataggcaccacatggaaaaaagcatggaacttccaggaagccatttttgtagctttatagcccaaattatatttttcctaatgtatgcacacaaaactgggggaaaaaaaaagaggcagagagaaaacaggttatatcagccctatctcacaatccacaagttcatcctattagaggattaactatgtaaaacaaattttatctgctgaatgtcctatttagttaatcacaaaactgtacaagaacacacttgtgacttatttagcagcttgtttgttcgctttccactggcttcacaaatgtcctttggaaagagaawgtacatttggaaccctgtacaccttttctttctccagtaccctcttgtcacttccatcactaaggtgacagaagcaactaggggcaatgcatttttagcacaccttggtcagaggtatcctccaggagaaggatcagacctgcttgaaagcatgtcgttggaattgggaggcttctagtagctataacataagcactgatgtttactgttccct

SEQ ID NO: 563420 - DNA, 595 bp, Homo sapiens
gcttgtccttcatacattaactaatcaagtagaaaagtgcaaatgagaacacagtgccaaaaataggcaccacatggaaaaaagcatggaacttccaggaagccatttttgtagctttatagcccaaattatatttttcctaatgtatgcacacaaaactgggggaaaaaaaaagaggcagagagaaaacaggttatatcagccctatctcacaatccacaagttcatcctattagaggattaactatgtaaaacaaattttatctgctgaatgtcctatttagttaatcacaaaactgtacaagaacacacttgtgacttatttagcagcttgtttgttcgctttccactggcttcacaaatgtcctttggaaagagaaagtacatttggaaccytgtacaccttttctttctccagtaccctcttgtcacttccatcactaaggtgacagaagcaactaggggcaatgcatttttagcacaccttggtcagaggtatcctccaggagaaggatcagacctgcttgaaagcatgtcgttggaattgggaggcttctagtagctataacataagcactgatgtttactgttccct

SEQ ID NO: 563421 - DNA, 595 bp, Homo sapiens
gcttgtccttcatacattaactaatcaagtagaaaagtgcaaatgagaacacagtgccaaaaataggcaccacatggaaaaaagcatggaacttccaggaagccatttttgtagctttatagcccaaattatatttttcctaatgtatgcacacaaaactgggggaaaaaaaaagaggcagagagaaaacaggttatatcagccctatctcacaatccacaagttcatcctattagaggattaactatgtaaaacaaattttatctgctgaatgtcctatttagttaatcacaaaactgtacaagaacacacttgtgacttatttagcagcttgtttgttcgctttccactggcttcacaaatgtcctttggaaagagaaagtacatttggaaccctgtacaccttttctttctccagtaccctcttgtcacttccatcactaaggtgacagaagcaactargggcaatgcatttttagcacaccttggtcagaggtatcctccaggagaaggatcagacctgcttgaaagcatgtcgttggaattgggaggcttctagtagctataacataagcactgatgtttactgttccct

SEQ ID NO: 563422 - DNA, 511 bp, Homo sapiens
atacctgttgtaaggaattataattttaaaatcgttctaaagaagcaccttggtttctaaggtgatttmtactgaacaagcagttcaaacaaagtagacagtgaagagaaatggctatcagtcatgtatggctcaacaggcaaaacttgctgccttctaaaatggctctacttgtaagattctgaagattccattagaaatacttgtatttaaagggtaataatgtgggaaaatgaatatgttgatttgcttgattataggaaccacttcaatagaaataattatatcaaaacatcatgttgtactccttaatgtaggttaagaaaactaaaatgaacaaaaaaaaatctaggaatacttgtgtttagtaaaccagttttagatttcacccttgtacatttcacccattatctaggaccaattaaacatttggcactgaggaataattcagagcaacaactcctaggggagaactagattgtctggttggtgatcaaaaagaactaaagca

SEQ ID NO: 563423 - DNA, 511 bp, Homo sapiens
atacctgttgtaaggaattataattttaaaatcgttctaaagaagcaccttggtttctaaggtgatttatactgaacaagcagttcaaacaaagtagacagtgaagagaaatggctatcagtcatgtatggctcaacaggyaaaacttgctgccttctaaaatggctctacttgtaagattctgaagattccattagaaatacttgtatttaaagggtaataatgtgggaaaatgaatatgttgatttgcttgattataggaaccacttcaatagaaataattatatcaaaacatcatgttgtactccttaatgtaggttaagaaaactaaaatgaacaaaaaaaaatctaggaatacttgtgtttagtaaaccagttttagatttcacccttgtacatttcacccattatctaggaccaattaaacatttggcactgaggaataattcagagcaacaactcctaggggagaactagattgtctggttggtgatcaaaaagaactaaagca

SEQ ID NO: 563424 - DNA, 402 bp, Homo sapiens
aatatgttgatttgcttgattataggaaccacttcamtagaaataattatatcaaaacatcatgttgtactccttaatgtaggttaagaaaactaaaatgaacaaaaaaaaatctaggaatacttgtgtttagtaaaccagttttagatttcacccttgtacatttcacccattatctaggaccaattaaacatttggcactgaggaataattcagagcaacaactcctaggggagaactagattgtctggttggtgatcaaaaagaactaaagcatctctgaaggcaattagctctcaacactgtgaccaaggccctggaggtggggcatgttctttctgccttccacacaccccttcaggctgaacaaggtgttattttttaactgctttgtgaattaca

SEQ ID NO: 563425 - DNA, 497 bp, Homo sapiens
tataggaaccacttcaatagaaataattatatcaaaacatcatgttgtactccttaatgtaggttaagaaaactaaaatgaacaaaaaaaaatctaggaatacttgtgtttagtaaaccagttttagatttcacccttgtacatttcacccattatctaggaccaattaaacatttggcactgaggaataattcagagcaacaactcctaggggagaactagattgtctggttggtgatcaaaaagaactaaagcatctctgaaggcaattagcyctcaacactgtgaccaaggccctggaggtggggcatgttctttctgccttccacacaccccttcaggctgaacaaggtgttattttttaactgctttgtgaattacacttctttaaattcctgtgataattattccctatttcacaaggatgcctttctgtaacatcttgaatatgttacacaaatagtctttcttgaggcaccctctgatgataatactaa

SEQ ID NO: 563426 - DNA, 497 bp, Homo sapiens
tataggaaccacttcaatagaaataattatatcaaaacatcatgttgtactccttaatgtaggttaagaaaactaaaatgaacaaaaaaaaatctaggaatacttgtgtttagtaaaccagttttagatttcacccttgtacatttcacccattatctaggaccaattaaacatttggcactgaggaataattcagagcaacaactcctaggggagaactagattgtctggttggtgatcaaaaagaactaaagcatctctgaaggcaattagctcycaacactgtgaccaaggccctggaggtggggcatgttctttctgccttccacacaccccttcaggctgaacaaggtgttattttttaactgctttgtgaattacacttctttaaattcctgtgataattattccctatttcacaaggatgcctttctgtaacatcttgaatatgttacacaaatagtctttcttgaggcaccctctgatgataatactaa

SEQ ID NO: 563427 - DNA, 402 bp, Homo sapiens
aatatgttgatttgcttgattataggaaccacttcaatagaaataattatatcaaaacatcatgttgtactccttaatgtaggttaagaaaactaaaatgaacaaaaaaaaatctaggaatacttgtgtttagtaaaccagttttagatttcacccttgtacatttcacccattatctaggaccaattaaacatttggcactgaggaataattcagagcaacaactcctaggggagaactagattgtctggttggtgatcaaaaagaactaaagcatctctgaaggcaattagctctcaacactgtgaccaaggccctggaggtggggcatgttctttctgccttccacacaccscttcaggctgaacaaggtgttattttttaactgctttgtgaattaca

SEQ ID NO: 563428 - DNA, 408 bp, Homo sapiens
aattacatgagacttttcaggggaaaaagccatacaaaaacaaacaaaaaaaaaatgagaggagagacaaaaactatctttgactaacattttaaaggtaarattatttactaacattatttttcaaaaaaacattgtcaaattagcattcacttcctagtaatatcctgaagccatctcactaaaaattatgcttttgaaacaaattaacgagcttaattcattttctatgagtgtatgtttggacttgcttcgttaatttttttgacatggaattgttagctttcaatgctgctgcaaaggcttccttatattcttctaactcagttgtaacctcttcataagcagtttacattttgtagaatttacattccacatctttaagtgtgagttccttcttatttagtg

SEQ ID NO: 563429 - DNA, 408 bp, Homo sapiens
aattacatgagacttttcaggggaaaaagccatacaaaaacaaacaaaaaaaaaatgagaggagagacaaaaactatctttgactaacattttaaaggtaagattatttactaacattatttttcaaaaaaacattgtcaaattagcattcacttcctagtaatatcctgaagccatctcactaaaaattatgcttttgaaacaaattaacgagcttaattcattttctatgagtgtatgtttggacttrcttcgttaatttttttgacatggaattgttagctttcaatgctgctgcaaaggcttccttatattcttctaactcagttgtaacctcttcataagcagtttacattttgtagaatttacattccacatctttaagtgtgagttccttcttatttagtg

SEQ ID NO: 563430 - DNA, 408 bp, Homo sapiens
aattacatgagacttttcaggggaaaaagccatacaaaaacaaacaaaaaaaaaatgagaggagagacaaaaactatctttgactaacattttaaaggtaagattatttactaacattatttttcaaaaaaacattgtcaaattagcattcacttcctagtaatatcctgaagccatctcactaaaaattatgcttttgaaacaaattaacgagcttaattcattttctatgagtgtatgtttggacttgcttcgttaatttttttgacatggaattgttagctttcaatgctgctgcaaaggcttccttatattcttctaactcagttgtaacctcttcataagcagtttwcattttgtagaatttacattccacatctttaagtgtgagttccttcttatttagtg

SEQ ID NO: 563431 - DNA, 514 bp, Homo sapiens
aaacaacaataataaaaccccaagcataaacaaacaaaaagagttaagcaaaacaacaaatgcacaattcatatgattactgagtgttctaatggtaaggagaaattaaaagcagaaattaaaagcagctggtgagtaatcttaaattttagtcattaaggaaaaattttaagacaaaactctaattcagctacttacctggaaataaggctcaggctggtgatcgttctctgccatmttagaagctggaaaaaacttacactcaccttccctgtcagaagcaagctgaaactcaggaaaggaggtgcctgctctccatcatcgtggaagcaggaaaacttgccttccttgttggaaatgagtaaaacttcagaaaaggagttgtacagcaaaatcaaacttagatctcaactagattttgggagatcagggaccctctgcaggggagaaactccacaacctcagcaaattatcctgttgatttgggcaataaagatagcccaggttggtatca

SEQ ID NO: 563432 - DNA, 514 bp, Homo sapiens
aaacaacaataataaaaccccaagcataaacaaacaaaaagagttaagcaaaacaacaaatgcacaattcatatgattactgagtgttctaatggtaaggagaaattaaaagcagaaattaaaagcagctggtgagtaatcttaaattttagtcattaaggaaaaattttaagacaaaactctaattcagctacttacctggaaataaggctcaggctggtgatcgttctctgccatattagaagctggaaamaacttacactcaccttccctgtcagaagcaagctgaaactcaggaaaggaggtgcctgctctccatcatcgtggaagcaggaaaacttgccttccttgttggaaatgagtaaaacttcagaaaaggagttgtacagcaaaatcaaacttagatctcaactagattttgggagatcagggaccctctgcaggggagaaactccacaacctcagcaaattatcctgttgatttgggcaataaagatagcccaggttggtatca

SEQ ID NO: 563433 - DNA, 514 bp, Homo sapiens
aaacaacaataataaaaccccaagcataaacaaacaaaaagagttaagcaaaacaacaaatgcacaattcatatgattactgagtgttctaatggtaaggagaaattaaaagcagaaattaaaagcagctggtgagtaatcttaaattttagtcattaaggaaaaattttaagacaaaactctaattcagctacttacctggaaataaggctcaggctggtgatcgttctctgccatattagaagctggaaaaaacttacactcaccttccctgtcagaagcaagctgaaactcaggaaaggaggtgcctgctctccatcatcgtggaagcaggaaaacttgccttccttgttggaaatgagtaaaacttcagaaaaggagttgtacagcaaaatcaaacttagatctcaacyagattttgggagatcagggaccctctgcaggggagaaactccacaacctcagcaaattatcctgttgatttgggcaataaagatagcccaggttggtatca

SEQ ID NO: 563434 - DNA, 370 bp, Homo sapiens
gtttctaatgaacttttaatcaggcaaagcttctctaattaatttcttcccaataaatcacccaacactattcttttcaattatgttaatatgatactatcctatgaagttacaacattttctatraaaacaaattatagccatacatggctgaccatttacggtgatgttcatctatggtagataaaacacaggtctgcgtggtaaagtacctcaatccttaatgcctccccactagcgattatgacagcaagagaaggaaaatgttactgtaattatatgacatattttggtactggaagctcactttatcttccttcctatttctaacaccctgttcttccttcttctacagatcattttgacttta

SEQ ID NO: 563435 - DNA, 370 bp, Homo sapiens
gtttctaatgaacttttaatcaggcaaagcttctctaattaatttcttcccaataaatcacccaacactattcttttcaattatgttaatatgatactatcctatgaagttacaacattttctataaaaacaaattayagccatacatggctgaccatttacggtgatgttcatctatggtagataaaacacaggtctgcgtggtaaagtacctcaatccttaatgcctccccactagcgattatgacagcaagagaaggaaaatgttactgtaattatatgacatattttggtactggaagctcactttatcttccttcctatttctaacaccctgttcttccttcttctacagatcattttgacttta

SEQ ID NO: 563436 - DNA, 370 bp, Homo sapiens
gtttctaatgaacttttaatcaggcaaagcttctctaattaatttcttcccaataaatcacccaacactattcttttcaattatgttaatatgatactatcctatgaagttacaacattttctataaaaacaaattatagycatacatggctgaccatttacggtgatgttcatctatggtagataaaacacaggtctgcgtggtaaagtacctcaatccttaatgcctccccactagcgattatgacagcaagagaaggaaaatgttactgtaattatatgacatattttggtactggaagctcactttatcttccttcctatttctaacaccctgttcttccttcttctacagatcattttgacttta

SEQ ID NO: 563437 - DNA, 370 bp, Homo sapiens
gtttctaatgaacttttaatcaggcaaagcttctctaattaatttcttcccaataaatcacccaacactattcttttcaattatgttaatatgatactatcctatgaagttacaacattttctataaaaacaaattatagccatacatggctgaccatttayggtgatgttcatctatggtagataaaacacaggtctgcgtggtaaagtacctcaatccttaatgcctccccactagcgattatgacagcaagagaaggaaaatgttactgtaattatatgacatattttggtactggaagctcactttatcttccttcctatttctaacaccctgttcttccttcttctacagatcattttgacttta

SEQ ID NO: 563438 - DNA, 264 bp, Homo sapiens
gtgtgcgtgcgcgtgtgtatgtgtgtgtttgtcttgcttctctggacaggcctagcttctccactcatgggtgcmcccaggtcctcatcactgtcaccttagagcattagagcctctataggtgctccccaatctctgccctccccacccatggtggtcctggggatgcagacagaggaggggcactgcatattgctgagagggctggcatcctctctaggtggaacacaggtcatttgtaaagttgtaggcctgccaagcaat

SEQ ID NO: 563439 - DNA, 546 bp, Homo sapiens
gagctggggcagagaaaatacaagatgagcttagaaaatcttctgccagaaagtaaaaaagtgctgacagagtaatggagacaaatcaaagagacataaagtcaggttggaatgtctactactggcctaatcttggggaattggagcatcagaatcatgagctttccttctcccttatttattggttttatttctccatgtagaacaaagaagagaataagaaaataatcatctggcaaccatcawagtaataattgttcaaacacaagtcatccatgaaatgctaaatctagtgggttctgaggagttaccagatatttacagagcctcaaagtatctccatacaaaatacggttgaactacaaaaagaaaatcataacattagtatggacaaacctggcaggtactccttaagtctcctaagtaataaaaactgtaaaatgcaaataagcctttgatgacctttactaacctttactaaagtatcgatgacgtggttgtttaaacagctgacatttgggcaatttgagtatgtcaaactcaata

SEQ ID NO: 563440 - DNA, 606 bp, Homo sapiens
ataattgttcaaacacaagtcatccatgaaatgctaaatctagtgggttctgaggagtwaccagatatttacagagcctcaaagtatctccatacaaaatacggttgaactacaaaaagaaaatcataacattagtatggacaaacctggcaggtactccttaagtctcctaagtaataaaaactgtaaaatgcaaataagcctttgatgacctttactaacctttactaaagtatcgatgacgtggttgtttaaacagctgacatttgggcaatttgagtatgtcaaactcaataatactggttttcatttgcaagatccacttaaaacttaaggaggttaaaaaacatcatttaaaataccctataaattatcttcatacatatgatacaaaaatatcctacttcagtaaatgttgtaatgttatatattttgtgagaaacaattaaaacgtgtaaatagcctggtaataaagttttataatcctttaaatcatacaatttttccttaagactttatggttaaatattctctttgttagatatggcttaccagtggattctagagaagaaagtagatgggagcaagtgtccaacacagcaacag

SEQ ID NO: 563441 - DNA, 606 bp, Homo sapiens
ataattgttcaaacacaagtcatccatgaaatgctaaatctagtgggttctgaggagttacmagatatttacagagcctcaaagtatctccatacaaaatacggttgaactacaaaaagaaaatcataacattagtatggacaaacctggcaggtactccttaagtctcctaagtaataaaaactgtaaaatgcaaataagcctttgatgacctttactaacctttactaaagtatcgatgacgtggttgtttaaacagctgacatttgggcaatttgagtatgtcaaactcaataatactggttttcatttgcaagatccacttaaaacttaaggaggttaaaaaacatcatttaaaataccctataaattatcttcatacatatgatacaaaaatatcctacttcagtaaatgttgtaatgttatatattttgtgagaaacaattaaaacgtgtaaatagcctggtaataaagttttataatcctttaaatcatacaatttttccttaagactttatggttaaatattctctttgttagatatggcttaccagtggattctagagaagaaagtagatgggagcaagtgtccaacacagcaacag

SEQ ID NO: 563442 - DNA, 606 bp, Homo sapiens
ataattgttcaaacacaagtcatccatgaaatgctaaatctagtgggttctgaggagttaccagatatttacagagcctcaaagtatctccatacaaaatacggttgaactacaaaaagaaaatcataacattagyatggacaaacctggcaggtactccttaagtctcctaagtaataaaaactgtaaaatgcaaataagcctttgatgacctttactaacctttactaaagtatcgatgacgtggttgtttaaacagctgacatttgggcaatttgagtatgtcaaactcaataatactggttttcatttgcaagatccacttaaaacttaaggaggttaaaaaacatcatttaaaataccctataaattatcttcatacatatgatacaaaaatatcctacttcagtaaatgttgtaatgttatatattttgtgagaaacaattaaaacgtgtaaatagcctggtaataaagttttataatcctttaaatcatacaatttttccttaagactttatggttaaatattctctttgttagatatggcttaccagtggattctagagaagaaagtagatgggagcaagtgtccaacacagcaacag

SEQ ID NO: 563443 - DNA, 477 bp, Homo sapiens
taatgaggtaatgacccaccactgccccatccctttcttaatagctascagtggggcattctctgggaagactctggaacctgggaatgacaacacaggcaagtccacaagcacacagggaatgctacaccatggctgctcaagtgataggctcctagggttatataaccttgtatttcccatactgaagacttcatgcttgctttcttttctctcagaggccacaggttccacaggagggatcagggccactatatcagaagctccaggaggtaaggttcacgagtcccaggcctcagggttctcctaattttcctgttgtgctgaggtgaacacataaatgagaatgggggccaaagaaagggggttacttcttgcctggaagcacaacatgtattctgaccatcctgagtattcctgctaaagaatttgagacactgggttatgtatgtcaggcattgctccatggcctgtgtg

SEQ ID NO: 563444 - DNA, 477 bp, Homo sapiens
taatgaggtaatgacccaccactgccccatccctttcttaatagctagcastggggcattctctgggaagactctggaacctgggaatgacaacacaggcaagtccacaagcacacagggaatgctacaccatggctgctcaagtgataggctcctagggttatataaccttgtatttcccatactgaagacttcatgcttgctttcttttctctcagaggccacaggttccacaggagggatcagggccactatatcagaagctccaggaggtaaggttcacgagtcccaggcctcagggttctcctaattttcctgttgtgctgaggtgaacacataaatgagaatgggggccaaagaaagggggttacttcttgcctggaagcacaacatgtattctgaccatcctgagtattcctgctaaagaatttgagacactgggttatgtatgtcaggcattgctccatggcctgtgtg

SEQ ID NO: 563445 - DNA, 477 bp, Homo sapiens
taatgaggtaatgacccaccactgccccatccctttcttaatagctagcagtggggcattctctgggaagactctggaacctgggwatgacaacacaggcaagtccacaagcacacagggaatgctacaccatggctgctcaagtgataggctcctagggttatataaccttgtatttcccatactgaagacttcatgcttgctttcttttctctcagaggccacaggttccacaggagggatcagggccactatatcagaagctccaggaggtaaggttcacgagtcccaggcctcagggttctcctaattttcctgttgtgctgaggtgaacacataaatgagaatgggggccaaagaaagggggttacttcttgcctggaagcacaacatgtattctgaccatcctgagtattcctgctaaagaatttgagacactgggttatgtatgtcaggcattgctccatggcctgtgtg

SEQ ID NO: 563446 - DNA, 518 bp, Homo sapiens
atgtctaagtcactgttacattatttgttaaaagctcattgaccatctcaaaactatttctatatctacttctttctgaagtgaataatggtcgtcttgagaattattactaattattggggcaaattaatgatagtatctaaaatatgtattttgcttctgctgtacacagagtgactatttaagataattatatcttgtttatgtatacagaagcaagttaaaaaccaaaggcattttctgacaatatgtccaactacatgcagccagaaagcatcactgccaccaaaaaagaccaaattattgagtaaatcaaccctatctgggcagatcttcagagagaaaaccgagagtgaaaggggaggtggcactgacaccacagcgaaagagtgaggacgctgggaaccctgcatgaaatatccgaatgccaaggctagttcctggtcctgaatggctcctggggaagagatgtgtgagggaactgaggaacagcytactcttgccatgggcctctggga

SEQ ID NO: 563447 - DNA, 613 bp, Homo sapiens
gctaaatgacgagttaatgrgtgcagcacaccagcatggcacatgtgtacatatgtaactaacctgcacaatgtgcacatgtaccctaaaacttaaagtataataataataaaaaaataaataaataaaagaataactgctgctgagaataactgggagtgtttcttcaataagttcaaagttaaactagatctcagtggttgggaaacaatttgagaaaaggaggagagacgttataggtggggtatgcaagactaagcataggctgtttctgaggtagtaccagatagctacgagctagtgagcaaaatgaagtctacatgctcatttggttatcaattcagcaaatatttacagagatcctactacgctagatactgacagcacagaaagaaagaaagaaaagaaagaaagaaggaaagaaaaggaaagaaagaaagagaaagaaagaaagaaagacaaaattcctattttatgtatggccccagcgggaagcacatggcatacctaaacagagtaagagaggagagcataataaaaaggtttatttacaaagatgctagtgggttttagggaaaccagcaaaggatagtataatgctgtatggctagca

SEQ ID NO: 563448 - DNA, 249 bp, Homo sapiens
tagagatgtgttctcattatgytgcccaggctggtctcaaactcctgaactcaagcaatccacccaccttggccttgcaaagggctgagattacaggtgtgagccaccatgcctgggcaacattgagattgatttaaagaaattgattagggctgggtgtggtggtgcacactgcttatctcaacactttgggaggcagaagtggaagattgacttgagcccaggagcttgagaccagcctgagcagta

SEQ ID NO: 563449 - DNA, 249 bp, Homo sapiens
tagagatgtgttctcattatgctgcccaggctggtctcaaactcctgaactcaagcaatccacccacsttggccttgcaaagggctgagattacaggtgtgagccaccatgcctgggcaacattgagattgatttaaagaaattgattagggctgggtgtggtggtgcacactgcttatctcaacactttgggaggcagaagtggaagattgacttgagcccaggagcttgagaccagcctgagcagta

SEQ ID NO: 563450 - DNA, 249 bp, Homo sapiens
tagagatgtgttctcattatgctgcccaggctggtctcaaactcctgaactcaagcaatccacccaccttggccttgcaaagggctgagattacaggtgtgagccaccatgcctgggcarcattgagattgatttaaagaaattgattagggctgggtgtggtggtgcacactgcttatctcaacactttgggaggcagaagtggaagattgacttgagcccaggagcttgagaccagcctgagcagta

SEQ ID NO: 563451 - DNA, 443 bp, Homo sapiens
tcctctcctcccctaaatgttgtgaacaatatcacaggaggttgtacacaacctgcgatattgtttgtagtatccagagggaaagaggatgctattactccccatatcacagggggtgtacacccccactgtgatatattcaataacatccagaagtaatattactgacaaaattgcagggggtgtaaaccccacctgtgataccgttcctaatatcccggggaagagaggatgatrttattcccaatattgcagggggtgtacacccaccctatgatattgttcttaatatccaggaggggagacaatggtattactcacagtatcaaagaggttgtacagcccccctggtgatagcttctaatatccagggggtgtacacaccccttgtgatattggtccaatatgtaggggaaggacaatgatataactgtctgtatcac

SEQ ID NO: 563452 - DNA, 403 bp, Homo sapiens
ttaatttcttttttctccatttaaacctttagtctcttttccattgcctcccactatagttatattttcagtaagttttggtyacaggatctgctgacatagtctaatattagtgcattatgttttactaactcattataattcatagaaccttccatagatgtttaccatctaggaaggagaagtttaagtctgaaccaccagctttcctcagtggaaatcaagtgaagtaatcatcttgcagtttacagaccctctttcctcctggtagctggttctcttgggtaacactgtggctaatccttttcttagtgcagatcttgcattctcagaaaccacagttccctgtattgacctccttttactgaaacagagatgcacagctctgctttctagctcagta

SEQ ID NO: 563453 - DNA, 403 bp, Homo sapiens
ttaatttcttttttctccatttaaacctttagtctcttttccattgcctcccactatagttatattttcagtaagttttggtcacaggatctgctgacatagtctaatattagtgcattatgttttactaactcattataattcatagaaccttccatagatgtttaccatctaggaaggagaagtttaagtctgaaccaccagctttcctcagtggaaatcaagtgaagtmatcatcttgcagtttacagaccctctttcctcctggtagctggttctcttgggtaacactgtggctaatccttttcttagtgcagatcttgcattctcagaaaccacagttccctgtattgacctccttttactgaaacagagatgcacagctctgctttctagctcagta

SEQ ID NO: 563454 - DNA, 398 bp, Homo sapiens
tcaagtgaagtaatcatcttgcagtttacagaccctctttcctcctggtagctggttctcttgggtaacactgtggctaatccttttcttagtgcagatcttgcattctcagaaaccacagttccctgtattgacctccttttactgaaacagagatgcacagctctgctttctagctcagtagaggattcttggaataaaaagtttaactcattccaagaaaaggtcttaggagtgcagcacttcaaaatcaggtaaygttcaggcaatttatcagagacacatagtagattagtattttgactttcaaaatttcagagccaagttgtgtgctatagagaagcattgtggcatagcatagagatgggatggtctttacttctccatacaaacaagct

SEQ ID NO: 563455 - DNA, 335 bp, Homo sapiens
tagctgcctgtgatttatgagtwaggcattagatccctatgttcagactgaggggtggcaggcttcacgtacagtgggaatggagtaatcacaggagggagttgtaggagctctgaagtcagagagggaggtaaaggcctgtttacctaggatctcaaaggccattggaattttacttttattctgagataggaatctgttggaaggatttgaacaggtgattgaatatgttaggaactttgaggttgagttgagcttctaagatgattgaatggtgggatgaatctgttgtgtaagtaagagaataccaatttggcaggaagaaaacatattct

SEQ ID NO: 563456 - DNA, 335 bp, Homo sapiens
tagctgcctgtgatttatgagttaggcattagatccctatgttcagactgaggggtggcaggcttcacgtacagtgggaatggagtaatcacaggagggagttgtaggagctctgaagtcagagagggaggtaaagrcctgtttacctaggatctcaaaggccattggaattttacttttattctgagataggaatctgttggaaggatttgaacaggtgattgaatatgttaggaactttgaggttgagttgagcttctaagatgattgaatggtgggatgaatctgttgtgtaagtaagagaataccaatttggcaggaagaaaacatattct

SEQ ID NO: 563457 - DNA, 401 bp, Homo sapiens
aacacaagcacagaactcaactttctactaaagagtcaaaggctatatttttagctaagaaattatgcttcttacatgataaaaatcatacatgccaaaacttaccatactttattaaacaacataatgcaaggtctgattcaacagaaatattggagtggtgatttttttaaatatgtggaaattatttttttgttttcaaagtattggaaataaccatgatggaactataaattcaaayagtttgagctaagcagatatacttacatgcatgaaaactcattaaacagactcatttggctgggaatattcattgcaaccctcaaggctagacgtgtttttgtggctcatctcagtcattgcttccctcccattgtatctccattttatcattaaataaa

SEQ ID NO: 563458 - DNA, 379 bp, Homo sapiens
tttctactaaagagtcaaaggctatatttttagctaagaaattatgcttcttacatgataaaaatcatacatgccaaaacttaccatactttattaaacaacataatgcaaggtctgattcaacagaaatattggagtggtgatttttttaaatatgtggaaattatttttttgttttcaaagtattggaaataaccatgatggaactataaattcaaatagtttgagctaagcagatawacttacatgcatgaaaactcattaaacagactcatttggctgggaatattcattgcaaccctcaaggctagacgtgtttttgtggctcatctcagtcattgcttccctcccattgtatctccattttatcattaaataa

SEQ ID NO: 563459 - DNA, 379 bp, Homo sapiens
tttctactaaagagtcaaaggctatatttttagctaagaaattatgcttcttacatgataaaaatcatacatgccaaaacttaccatactttattaaacaacataatgcaaggtctgattcaacagaaatattggagtggtgatttttttaaatatgtggaaattatttttttgttttcaaagtattggaaataaccatgatggaactataaattcaaatagtttgagctaagcagatatacttrcatgcatgaaaactcattaaacagactcatttggctgggaatattcattgcaaccctcaaggctagacgtgtttttgtggctcatctcagtcattgcttccctcccattgtatctccattttatcattaaataa

SEQ ID NO: 563460 - DNA, 401 bp, Homo sapiens
aacacaagcacagaactcaactttctactaaagagtcaaaggctatatttttagctaagaaattatgcttcttacatgataaaaatcatacatgccaaaacttaccatactttattaaacaacataatgcaaggtctgattcaacagaaatattggagtggtgatttttttaaatatgtggaaattatttttttgttttcaaagtattggaaataaccatgatggaactataaattcaaatagtttgagctaagcagatatacttacatgcatgaaaacwcattaaacagactcatttggctgggaatattcattgcaaccctcaaggctagacgtgtttttgtggctcatctcagtcattgcttccctcccattgtatctccattttatcattaaataaa

SEQ ID NO: 563461 - DNA, 401 bp, Homo sapiens
aacacaagcacagaactcaactttctactaaagagtcaaaggctatatttttagctaagaaattatgcttcttacatgataaaaatcatacatgccaaaacttaccatactttattaaacaacataatgcaaggtctgattcaacagaaatattggagtggtgatttttttaaatatgtggaaattatttttttgttttcaaagtattggaaataaccatgatggaactataaattcaaatagtttgagctaagcagatatacttacatgcatgaaaactcattaaacagactcatttggctgggaatattcattgcaacyctcaaggctagacgtgtttttgtggctcatctcagtcattgcttccctcccattgtatctccattttatcattaaataaa

SEQ ID NO: 563462 - DNA, 612 bp, Homo sapiens
ctggaaagcaaccccacatctcctaggcatgactgcagccttcctccatgtccctccacctacccctgttgtaggcaaccaccatctatctacttttgtctccatatgtttgcctgtttggcatatttcatatacatagagttatacaatatttagtcctttgtgactggctttttcacttagcataatgttttcagaattcatgtctgttttagcacactttggtagtttatttcttcttatagttaaatgatattctattccatggctatactggttttccattcattcatcgattgatggacctttaggttagtttccactttttagctattatgaaaaatgctgctgcaaacattcacttacaggttattatgtggacacgggtttttatttccctgccattggactttatcctcagagttaattgggcagatatcagcacttgtcttgcttatgctatcctttctgccttctcagtytctgttcatctagcctcattcattcagacgtggcagacaatttattgttttcatgaagctttctctgagtgttctctcattgactttatgcgttagcaatcgttgtctagtctgtgcagaaaaacttaat

SEQ ID NO: 563463 - DNA, 612 bp, Homo sapiens
ctggaaagcaaccccacatctcctaggcatgactgcagccttcctccatgtccctccacctacccctgttgtaggcaaccaccatctatctacttttgtctccatatgtttgcctgtttggcatatttcatatacatagagttatacaatatttagtcctttgtgactggctttttcacttagcataatgttttcagaattcatgtctgttttagcacactttggtagtttatttcttcttatagttaaatgatattctattccatggctatactggttttccattcattcatcgattgatggacctttaggttagtttccactttttagctattatgaaaaatgctgctgcaaacattcacttacaggttattatgtggacacgggtttttatttccctgccattggactttatcctcagagttaattgggcagatatcagcacttgtcttgcttatgctatcctttctgccttctcagtctctgttcatctagcctcattcrttcagacgtggcagacaatttattgttttcatgaagctttctctgagtgttctctcattgactttatgcgttagcaatcgttgtctagtctgtgcagaaaaacttaat

SEQ ID NO: 563464 - DNA, 307 bp, Homo sapiens
aaaaataaaacgatattaacaaatattggtatactggtgaaggccgggctcggtggctgctttccaaagtggttacaccagtcgggtatggtggcacacacctgtaatctcagcacttctggaagctgaagcaggcagatcacttgagctcaggagtttgacacaaacctgggctacatcacaamaccccatttctaccaaaaactgtaaaaatcagctgcacatgatagcatgcacctgtaagtcccagctacttaggaggctgaggtgagaggatcacttgtgcctggaaggtcacagctgcact

SEQ ID NO: 563465 - DNA, 241 bp, Homo sapiens
tttccctatacatacatatctatgataaactttaatttataaattaaattaaatctgatgttatctgtagatagggtgtgagaattgaattgtgtcatcagcaggaatgattacttacttgttggtggggaaaaactctccacacatttggtcacagaagccttctttgytgatgattgttgctgtggtgtgacagcagagaaaaacttgtcaagtatgtctttctgtgcatatagtggat

SEQ ID NO: 563466 - DNA, 241 bp, Homo sapiens
tttccctatacatacatatctatgataaactttaatttataaattaaattaaatctgatgttatctgtagatagggtgtgagaattgaattgtgtcatcagcaggaatgattacttacttgttggtggggaaaaactctccacacatttggtcacagaagccttctttgctgatgattgttgctgtggtgtgacagcagagaaaaacktgtcaagtatgtctttctgtgcatatagtggat

SEQ ID NO: 563467 - DNA, 644 bp, Homo sapiens
ttgttataaagctcaaggttagttttcattgaatattttatagatttagacaggtggagacagaagtaggtaaatagaatctatttttagaacagaggacatattttaattatatcaagaatcataatttaatatatagatcactgacctttccccagattatgttttcctttttttgagggggaagctggatataaaccggcagttaaaaaaattgtaaagaaatcaacttgctcattttcattgtgtatttttgctctcaagcattttgcatgaactgtgtgtggatttattgcctgcattggatgatgaagacttgagtgttgctactaaggtaaagtggtctcttgtaaaattaattttctcactctgaatgtagttttgcaagtgtttacttttcaaatttagcagtggttcacctataattgttttatggtggtaatggaaagttgctcagagaaaaacatacatatggctagttgattcaaaaaatgtgyttaactttggtaactaacagagattgataagtactgtgacagggtgggagctgaaaaataaatgaactggaaaataagtagttgcaggaaaatcacattaggaaattctttctccagtagaggaaatatgaaatttggttaaggttt

SEQ ID NO: 563468 - DNA, 618 bp, Homo sapiens
agtgaaaaagagatgcccagacttcttaggaattgtttaagctatggaacatgatgaatttatggtgcataagtacagtcttctctgtgaaagtttttgttttcacatctttcatttgaagtgtgtaagaaaaaaatgcttgatgtagtatctactaacccaagaatgaaaaggaatgtcatttgctatttacactttatttctaaaataaacctgaatttaattaataaattttggcaatgtacttctctttgtttctctaattatttgttctacacagtctgcctccatctacaataagtaaaaataatattaatgtttaagttaaacaaaaacattatcatgaaaataaggtatctcttataaaatgtggcctttagtatttttagtgactagacataacttgaaatttgcttaaatagaaaaataatcacattaataaagtaaaatttctacttattttaagtttagataacagaggatgtatatgtgtaatgctgtttagagtaatctgacaaaaatgcagttaatattratctattgcatatacatggttttagaaaggaagtgttttattagaacaaaggttaaacaatggccaggcatggtggctcatac

SEQ ID NO: 563469 - DNA, 592 bp, Homo sapiens
tctttcctcgttactgtcggcgactactcctgccatatgaaacatttcattgccgcttggccttctggtataattgggaggcttcctgagtctcctacaagcagaaaccactatgctttctttacagcctgaagaactgtgagtcaawtagacctcttttctttatgtagatacagaaaattaatgctgtgaagtgaagttatgaaatgacttctaggagtttcccccattctcttggctattagcactgagcttttttcaatgcaaatattggaggccatcttgatgtttccccctgataatggacttttcttcttttaccacattgccaggctgcaacaaagatagctgacagtgtagaagcaggttccaaattgggtagtggcgagaggttagagagtttggagagcttggaagaagacaggaagatgagggaaagtttggaccattgcagagacttgttaaatagttgtgagtaaaaggctgacagaaggatggacagtgaagatagccttgtaaggtctcagatgaaaatgaggaacttactgggaaaaggagctaaggtttttttttttttttgacttagcaaagt

SEQ ID NO: 563470 - DNA, 592 bp, Homo sapiens
tctttcctcgttactgtcggcgactactcctgccatatgaaacatttcattgccgcttggccttctggtataattgggaggcttcctgagtctcctacaagcagaaaccactatgctttctttacagcctgaagaactgtgagtcaattagacctctwttctttatgtagatacagaaaattaatgctgtgaagtgaagttatgaaatgacttctaggagtttcccccattctcttggctattagcactgagcttttttcaatgcaaatattggaggccatcttgatgtttccccctgataatggacttttcttcttttaccacattgccaggctgcaacaaagatagctgacagtgtagaagcaggttccaaattgggtagtggcgagaggttagagagtttggagagcttggaagaagacaggaagatgagggaaagtttggaccattgcagagacttgttaaatagttgtgagtaaaaggctgacagaaggatggacagtgaagatagccttgtaaggtctcagatgaaaatgaggaacttactgggaaaaggagctaaggtttttttttttttttgacttagcaaagt

SEQ ID NO: 563471 - DNA, 428 bp, Homo sapiens
acatagtgggataacatctctaaaaaattaaaaaatcagcccagcacagtagcgcatgcctgtggtcccagctacttgagaggctgaggtgggaggatcgttgagtccagcagatcgaggctaraggatcgtgccactgcactccagcctgggcaacagagtgagatcttgtctcaaaaaagaaaaaaaaaattaaaaaaaaaaaaactaaatctatcggtaacacaattgactaaagttctccagttaaaaaataaagattgtcattcagaacaaaaataaaactcaaccttattctatttacaaaactccaatcaaaatacatgaaaaactaaagaatgaaaatactggccgggtgcggggactcacgcctgtaatcccagcactttgggaggctgaggcgggcgatcacctgaggtcaggaattc

SEQ ID NO: 563472 - DNA, 586 bp, Homo sapiens
ggaggagcggtacactcctgtccaaatactatgcttttcccatggtcttcacaactggcagaccaggagattccctcmcgtgcctcaaccaccaggggccttgagtttcaagcactgtcacttaatagccgtttgggcagacactgagctagctgcaggagttttttgtttttgttttttctttttcatactccagtggcccctggaaagccagtgagacagaagtcttcactcccctggaaaagggggctgaagccagggagccaagtgttcttgctcagtggatcccacccccactgagtctagcaagctaagatccactggcttgaaattctcattgctagcatagcagtctgaagccaacctgggatgcttgagcttggtgggaggaggggtgtccaccattactgaggcttgagtaagtggtttttcctcacagtgtaaacaaagccgccaggaagttcggactgggcagagcctactgcagcatggcaaagctgctacagccagactgcctctctagattccccctctctgggcaggctatctctgaaagaaaggcagcagccccagtcaggaactaata

SEQ ID NO: 563473 - DNA, 586 bp, Homo sapiens
ggaggagcggtacactcctgtccaaatactatgcttttcccatggtcttcacaactggcagaccaggagattccctccsgtgcctcaaccaccaggggccttgagtttcaagcactgtcacttaatagccgtttgggcagacactgagctagctgcaggagttttttgtttttgttttttctttttcatactccagtggcccctggaaagccagtgagacagaagtcttcactcccctggaaaagggggctgaagccagggagccaagtgttcttgctcagtggatcccacccccactgagtctagcaagctaagatccactggcttgaaattctcattgctagcatagcagtctgaagccaacctgggatgcttgagcttggtgggaggaggggtgtccaccattactgaggcttgagtaagtggtttttcctcacagtgtaaacaaagccgccaggaagttcggactgggcagagcctactgcagcatggcaaagctgctacagccagactgcctctctagattccccctctctgggcaggctatctctgaaagaaaggcagcagccccagtcaggaactaata

SEQ ID NO: 563474 - DNA, 714 bp, Homo sapiens
gcagtggcaggatctcagctcactgcaacctctgcctcccaggttcaagcaattctcctacctcagcctcctgagtagctgggattacaggcgtgcgccaccacacccagctaatttttgtatttttagtagggacggggttttgccatgttggccaggctggtctcgaactcctgacctcaagtgatccgcccacctcggcctcccaaagtgctgggattaggcccagccagcatacacgttgcctatgtgcacaggaagcacccagggaatgcctggttctcaaagagatggctttgaatcccagatcatgttgcatcttccacagagaacagtacatctttggagaagtcacaagacaaagggaaaggactttgggtgcagccccctggagaggcacagagctggcgggtgcaggctggctggggaaacctgttcttgtggatgcctctggagctggcctcaggcccacaagggtgcaaaggtgtcttcagwggctcagctttgctccgtggtagaaaggggagtgggacagcttctgtctctacaaatctatgtcctgcttttaggcaaacagagggagtgcagagcttcctgcacctgcttcttcttaactgcccgcagctcaacagcctgatgccaaaaggtgcacattttggggcggcacatttctgatcttccacaagctgaatattctgaagaccaaattaagac

SEQ ID NO: 563475 - DNA, 510 bp, Homo sapiens
gtgggcctgtaaggtaatggactgaagaagggaataaaaaaaaaagctttcactgggaaattgccctaaatataaaaatcacaagaaatggaaatgtataagaattcaatctgaaaacttttaaagggagaacaggctaactggaaaagtaagaaaaaaaaagtggtcagatcttttcaggatctgaaaatcaaatgcttctcctcatcatttctgtcatttttcttcagaagatgtaatatatcccccacatttgaagtatatattaaaattcaaatggttaacactttatacttcttcattctactttctccctctctctctcacacacacacatacattctgaaccctyccccaacacacacacacacacacctaccccacatattctcaaatctcccccaccacacacatacacacacacacacacacacacacacacacacacacacacaccaccttttgagggagaactagttctaaaccatcaaaatcgctcctgagattggt

SEQ ID NO: 563476 - DNA, 503 bp, Homo sapiens
cagcatctcccaccagaatggtacatttgttacaattgatgaacctacattgacacattattatcaccctaagtccatgcgttagggctcactcttggtgttgtacattctatgagtttggacaaatgtataatgacatgtatccaccattatagtatcatacagagcagtttcactgcctaatatggtttggttctctgtccccacccaaatttcatcttgtagctcccataattcccatgtgttgtgcgagggaccyggtaggagatgatggaattctgagggtgggtcttaccattgctgttcttgtgatggtgaatgggtctcacaagatttgatggttttaaaaatgggagttgccctgcacatgctctctttgcctcccgccatccacgtaagatgtgacttgcccctccttgcctaccaccatgattgtgaggtctccccagccatgtggaactgtgagtccaattaaacctgttttttttttgtaaattgccgag

SEQ ID NO: 563477 - DNA, 593 bp, Homo sapiens
atataactgggaggggcttatctcacaggtgatgttagaaggaagacctgggcaagtggaacccacatcttccttcgctgtttctcttaagaaacagctgctcccatgttctactttacttctctgtgggtgacttctgttttcataggtagagcctgcccagtcaagcactgctgtgacaaggtgaataaggctatataaatcaggccttcggtgcagaagtccacatgctcccagatacaaaacacattctctaatttcaattttgactgtaataagggtgattatattttattctctgtacgtgaactaatttattacrtttcttaattgaagctgaatgggtaaatggagcacaatttgttgcatctcccaaataacctcagaaaggtagcatattgttttatttactgaaatatattcactgttaacctttatagtagcattctttttttactgttactataaaacaactactactttagacctgatattcagtgatattaatacattattagaatgtgtagctactgataaacttttcatagaaaattctgtaaaattctatcagtttgaagtaaaatatgtcaata

SEQ ID NO: 563478 - DNA, 583 bp, Homo sapiens
tctggctccctgatccaaacaccccccactgggccctacctcccaccacagccatgctgggggattaaattttaacatgagatttggtgtggacaaacaaaccatatccaaacctcagcggcaaatgacccatgctctacctcttgctaactgccctacctaaaccaagcagttcaacctccctttgcctctttccttatctataagatagaaattataataatgaagcttttttaggattaagtgagttgatttatataaaacacattgtaaatttcaaagaatgttgattatcagctgggcatggtgactcacaygtgtaatcccagcactctgggaggccgaggctggtagatcacttgaggtcaggattcaagaccagactggccaacatggtgaaaccccatctctactaaaaatagaaaaatgagctgggcatggtggtgcatgcttgtaagcccagctactcccaggagagtcactggaaccctggaggcagaggttgcagtgagccgagatcgtatcactgcactccagcctgggtgacacagtgagactccatctcaattaaaaaaaaaaaaaa

SEQ ID NO: 563479 - DNA, 553 bp, Homo sapiens
ttgtacagaatttttattatttatttttaaatgtttggtagaattygccagggaacttatctaaacctagacttttctttgtggggataatttaaccatacattcaattcaattaccaaatatagggctatataggttatctttttcttcttgggtgagctttgatagttatgtctctcaagaaatttttccatttcatctaagttgtccaatttattggcacaaagttgttcgtagtatttccttgttatcctttgcatatctacagaaattgtaggaatttcgcctctcatttctgatactggtcatttgtgtcttctctctttttcttatcagtctggattggattttttgtttgtttgtttgttttgttttggcagagtctcgctctgtcatcgggctggagtgcagtggtgtgaccttggctcactgcaacctccaactccctggttcaagggattctcctgcctcagcctcccacgtagctgggattacgggcaggtgccaccacacccaactaaatttttgtatttttagtagagacagggttaca

SEQ ID NO: 563480 - DNA, 553 bp, Homo sapiens
ttgtacagaatttttattatttatttttaaatgtttggtagaattcgccagggaacttatctaaacctagacttttctttgtggggataatttaaccatacattcaattcaattaccaaatatagggctatataggttatctttttcttcttgggtgagctttgatagttatgtctctcaagaaatttttccatttcatctaagttgtccaatttattggcacaaagttgttcgtagtatttccttgttatcctttgcatatctacagaaattgtaggaatttcgcctctcatttctgatactggtcatttgtgtcttctctctttttcttatcagtctggattggattttttgtttgtttgtttgttttgttttggcagagtctcgctctgtcatcrggctggagtgcagtggtgtgaccttggctcactgcaacctccaactccctggttcaagggattctcctgcctcagcctcccacgtagctgggattacgggcaggtgccaccacacccaactaaatttttgtatttttagtagagacagggttaca

SEQ ID NO: 563481 - DNA, 635 bp, Homo sapiens
cacatggaacattccccaggacagaccatatgttaggccacaaaattaatctcagtaaattttaagcatcaaaatcctatcaagtatcttttcagatcacagtggaataaaactagaactcaataataaaaggaaatatggaaatacgtgaaattaaacaacatgctcttgaatggccattgagtcaaggaagacactgagaaggaaatttraaaattcttgaaataaatgaaagtaaaattacaacataccaaaatctgtggaatacagtaaaagtggtgctaagagaagtttatagcaaaaaagtgactatgtcaaaaaagtagaaaatttcaaataaacaatttagtgatgcacctcaaggaactagaaaagcaagaacaaaccaaacccaaaattagtagaaagaaaggaataataaagatcagagcagaactaaatgaaatagagactaaaaaaatacaaaggatcaatgaaatgaagtttttaaaaaataaataaaatcaataaactgctaactgactaacaaaaaagagagaagacccaaataaataaagtcagaaatgacacaggaggtattactcctgataccacagaagtacaaagaataattagatgctattatgaacaactat

SEQ ID NO: 563482 - DNA, 600 bp, Homo sapiens
gctccccttccttgattttgtttgtttgattgtttgtttgtttgagatggagtcttgctctgttgcccaggttggagagcagtggcgcgatcttggctcactgcaacctccacctcccgggttcaagtgattctcctgcctcagcctcccaagtagctgggactacaggtgcatgccaccacgcctggctaatttttgtatttttagtagagacaggctttcaccatgttggccaggatggcttcgatctcttgayctcgtgatccgcccgtctcggcctcccaaagtgctgggattataggcatgagccactgcgcctggccatgctcccgctccttgttagctatagatcttggagcattttccagtcatctctcttgacctcaatttatttgcattttacaagaagagaaactggagcacctaaacgtatccacttgaaattaatagtgagcttctgagcccctgacttcctaggttaaggatgcaccaatgtcctgggactacaggaggtatttgtagggtgcactctaatctcctatattctggcatactaaattattcctcaatgattagtctagcctatacctttatgtcttt

SEQ ID NO: 563483 - DNA, 605 bp, Homo sapiens
ataaaaatcaactcaagatggattaaagacttaaacataagacccaaaactataagaccactagaagaaaccttaggggagacactttaggacattggcccaaagcaaagattttatggctaagacctcaaaagcacaggcaacaaaaccagaaatagayaaatgggactatagtaaactaaaaagctgctgtgcagaagaggaaacaatcaacagaatgaggagataacttgttaatcaggagaaatatttgcaaactattcatccaagaagggactaatatccagaatatacaaggaactcaatggcaaaaaaaaaataaatagttttattacaaagtgggcaaagggtttgaataaacattcctcaaaataagacatacaaatggtcaacaagtatatgaaaaattactcagcatcactaaacatcagggaaatgcaaatcaaaactacactgagataatatcttaccccaggaagaatggatattattaaaaagacaaaaactatcagatgctagtgaggatgcacagaaaaattaactcatatgcatttggtgggagtgtaaattagtacagccactgtggaaaacagtatggagatttc

SEQ ID NO: 563484 - DNA, 605 bp, Homo sapiens
ataaaaatcaactcaagatggattaaagacttaaacataagacccaaaactataagaccactagaagaaaccttaggggagacactttaggacattggcccaaagcaaagattttatggctaagacctcaaaagcacaggcaacaaaaccagaaatagataaatgggactatagtaaactaaaaagctgctgtgcagaagaggaaacaatcaacagaatgaggagataacttgttaatcaggagaaatatttgcaaactattcatccaagaagggactaatatccagaatatacaaggaactcaatggcaaaaaaaaawtaaatagttttattacaaagtgggcaaagggtttgaataaacattcctcaaaataagacatacaaatggtcaacaagtatatgaaaaattactcagcatcactaaacatcagggaaatgcaaatcaaaactacactgagataatatcttaccccaggaagaatggatattattaaaaagacaaaaactatcagatgctagtgaggatgcacagaaaaattaactcatatgcatttggtgggagtgtaaattagtacagccactgtggaaaacagtatggagatttc

SEQ ID NO: 563485 - DNA, 316 bp, Homo sapiens
tctagacattgccaaacatcccctgggggcaaaattgccctggaacagccactggaattgagtgaaaagaacaagtattatctgaaaatcagatggaggttttatctcattaggactcaaggtaggtctaaaaatcttctgcattatatcaaccctccttctccatgctcccccagaatatcatgcatgaaaattgctttgatcataggtacagkgggtacatccaaatgcattttgttctaggtaatggggaatttagcattcctgaaaggaattctagggatcacatcttacaaagaccaagcacatataatgt

SEQ ID NO: 563486 - DNA, 568 bp, Homo sapiens
aagcttccagaggaaggatcaggcagcaatatttgctgttctgcagtatttgctgttctgcagcctctgctggtgatacccaggcaaacaaggtctggagtggaactccagcaaactccaacagacctgcagttgagggacctgactgtcaggaggaaagctaacaaacagaaaggaatagcattgatatcaacaaagatcatctacaccaaaacctcatctgtagatcaccaacgtcaaagaccaaaggtagataaaatcasaaagatggggagaaaccagagcagaaaagctgaaaattctaaaaatcagagcatctcttctcttccaaaggattgcagctccttgccagcaacagaacaaaattggatggagaatgactgatgagctgacagaaatgggcttcaaaaggtcggtaataacaaacttttctgaggtaaagaaggatgttcgaacccattgcaaggaagctaatcttgaaaaaagattaggcgaatggctaactagaataaacagtgtggaggagaccttaaatgacctgatggagctgaaaaacatggcacaagaa

SEQ ID NO: 563487 - DNA, 613 bp, Homo sapiens
aggaacatggctgtgctgcagccaagcaggcatagggcagcaggcataggccaaggtaaacagcctggatgactcagcgagtttgtagcacaggcgcatagtcccatgccttatataatcatagccatgttgacataacatagaaaagcaccctatctggctctcagccactattgtttgtgtagtgtataaatgtaacactgaccctgagaagaggcttctgaataaagccatgtctcatttacctgctgtctctcaagtgttcttccagctccctgccccatgtccacccactcccctcaaccctcagctgggctggaacctgaccctcagcatgacaccatacctagtcaaagtagcactaactgagcttcaaagtgggcagtatgcacaaagatattattttgtactcttacaagtttcataatattactaatttttgggatataattcctataattacatcatcaggcaggcagtccagttccaaactctggttaaggccttctataaacatgtagaataatctcccataataagtgcataacttgtctttgaggraaaaaatgattttttaaaaaagatagtgtattcattttcttttgtagcataa

SEQ ID NO: 563488 - DNA, 569 bp, Homo sapiens
agaaaaagtaaaaactaaaaagcaaaaatgaagtacacaagcagacagcccggggccacaccctgggcctggtagttaaagatcgacccctgatctaatcggttatgttatctatagactacagacattgtatagaaaagcactgtgaaaatccctatcctgttttgttccgatctaattaccggtgcatgcagcccccagtcacatacctcctgcttgctgaatcgatcacgaccctctcacgtgcacccccttagagtggtgagcccttaaaagggacaggaattgctcactcrgggagctcggctcttgagacaggagtcttgctgatgcccccggctgaataaaccccttccttctttaactcggtgtctgaggagttttgtctgcagctcgtcctgctacaatatgaatgaaaaattgtacccagcatatcttgtgctatttggcaaaccaccccttgagtgtggattcctgataagaagatgtcaggctcactaacctcctctacagactgaattaaaatcaatttacagacatatacatcacattgttcctattaaaataaa

SEQ ID NO: 563489 - DNA, 558 bp, Homo sapiens
tgctttgttttgctttttctctgtcttgatttcttttgaagtaatcaaatatgtttgctacatttacttaattacttcttttaatagtcttttagtggttattagacattatagctggcatccttcacttaccctagtttaatgcaaattactattttccacttctctaatgttaaaacctttgcacattttaaccccatttacctcctaccgtctttccatttctgccaccatggattttaattctataaatattttaagtttcacaaaatattattgccactatttgtactgtcaatattactttacatatactaatgtatttacatattctgtgtttttcattcttttccacacatgtgtgtttccatatgggatcattttcttctggttgaacaataccatttatttagtaaaggtctgctggcgacaaattacctcagtatttgtcagaaagtgtcgtgcctttattttacagtttaaaaaaygttattttcggccaggtgcgattgcccacgcctataaactttgggaggcccaggcaggcggatcacctga

SEQ ID NO: 563490 - DNA, 528 bp, Homo sapiens
ttttatattccatatgtgagagacgtttgctaaccaccgcactgctggagttcacatccaaagtcaccataagcatctaaagaaactgtcatagaaacactgaggattttggaaaycacagattttcgaaacaacgctgaggcatctttctgctcttgttcagtagtgttgctcccactactgatgaaagaaaacaatcattagtctttcctctcattcctgcatgcctaacccagaaatatcacctttgctttatcaaagaagtaattctaacacattttatattattacattttatactactagctgaaatatatagttttaatcaaatcactagtaaaaacagtgtccacaaaggaaaggcaaactggagcactggaattgataaaactttattcatggcagccacaacttacttacgcagatgtcaaccctctggaaactttcattctctgtagcctaaaccagaagtcactggttgaacactggaagtaaccagcactgagcactttacagacaattgtgttc

SEQ ID NO: 563491 - DNA, 528 bp, Homo sapiens
ttttatattccatatgtgagagacgtttgctaaccaccgcactgctggagttcacatccaaagtcaccataagcatctaaagaaactgtcatagaaacactgaggattttggaaaccacagattttcgaaacaacgctgaggcatcttyctgctcttgttcagtagtgttgctcccactactgatgaaagaaaacaatcattagtctttcctctcattcctgcatgcctaacccagaaatatcacctttgctttatcaaagaagtaattctaacacattttatattattacattttatactactagctgaaatatatagttttaatcaaatcactagtaaaaacagtgtccacaaaggaaaggcaaactggagcactggaattgataaaactttattcatggcagccacaacttacttacgcagatgtcaaccctctggaaactttcattctctgtagcctaaaccagaagtcactggttgaacactggaagtaaccagcactgagcactttacagacaattgtgttc

SEQ ID NO: 563492 - DNA, 528 bp, Homo sapiens
ttttatattccatatgtgagagacgtttgctaaccaccgcactgctggagttcacatccaaagtcaccataagcatctaaagaaactgtcatagaaacactgaggattttggaaaccacagattttcgaaacaacgctgaggcatctttctgctcttgttcagtagtgttgctcccactactgatgaaagaaaacaatcattagtctttcctctcattcctgcatgcctaacccagaaatatcacctttgctttatcaaagaagtaattctaacacawtttatattattacattttatactactagctgaaatatatagttttaatcaaatcactagtaaaaacagtgtccacaaaggaaaggcaaactggagcactggaattgataaaactttattcatggcagccacaacttacttacgcagatgtcaaccctctggaaactttcattctctgtagcctaaaccagaagtcactggttgaacactggaagtaaccagcactgagcactttacagacaattgtgttc

SEQ ID NO: 563493 - DNA, 603 bp, Homo sapiens
aaaaggaacaacaacaaatcctggaaagaggtgagaatatgacttctagttttaccatactgttttgtttaaaatgtccagttttccacagaaatgtttgagacaagcaaagaaacaagaaagaatgccccacacagaggaaaaacaaatcagtcaataataactgtccctgagttasctcagttatcagacttactagacaaaaactaagctagatatttttaataatttaaagaagtaagttaagccatgtctaaagattgtatgaggatgtatgactctataaacagaatactaataaagacacagacattgttaaaataaaagaaccaaggaaaattctggatttgaaaaacacgataacttaaatgaaaaatttactagaagggcttagtagaaatgtgagcaggcagatgaaaatgtcagcaaacctgaagatatctagtctgaagaccagtaagaaaagagaatgaagaaaaatgaacagagtttcaaaggtctgtaggacatgatcaaatgtaccaacatatgcataataagtttcagagaagaaaagagaaaggggaagaaagaatatttgaagaaattacggctgaatatttc

SEQ ID NO: 563494 - DNA, 552 bp, Homo sapiens
ttttatcaggggcataagtagggatgagagagaactaaatgttaaaaagctttacacatcttgtctaagtaaatattacasaaagattttttttttttgaggcgaaatctcgctctgtcacccacgctgcagtgcaatggcatgatctcggctcactgcagcttctgcctccccagttcgagtgattctccttcctcagcctcccaagtagctgggattagaggcgcctgctaccacacctagctaatttttgtatttttagtagagatggggtttcatcatgttgaccagagtggtcttgaactcctgacgtcaggtaatgcacccgcctcagcctcccaaagtgctggcagaaagactggcaaacattacagaaagattactgaaaatgttatagattaataagaaggtgggtatatctcttactgcacaaatcgtctcacaaataaccactatgaactctggacaaaacactggtaattacctcaaagcacttcacagcaaaaaaaagcaagcagacactggagagaggtcgacatctggaagaaggaa

SEQ ID NO: 563495 - DNA, 552 bp, Homo sapiens
ttttatcaggggcataagtagggatgagagagaactaaatgttaaaaagctttacacatcttgtctaagtaaatattacacaaagattttttttttttgaggcgaartctcgctctgtcacccacgctgcagtgcaatggcatgatctcggctcactgcagcttctgcctccccagttcgagtgattctccttcctcagcctcccaagtagctgggattagaggcgcctgctaccacacctagctaatttttgtatttttagtagagatggggtttcatcatgttgaccagagtggtcttgaactcctgacgtcaggtaatgcacccgcctcagcctcccaaagtgctggcagaaagactggcaaacattacagaaagattactgaaaatgttatagattaataagaaggtgggtatatctcttactgcacaaatcgtctcacaaataaccactatgaactctggacaaaacactggtaattacctcaaagcacttcacagcaaaaaaaagcaagcagacactggagagaggtcgacatctggaagaaggaa

SEQ ID NO: 563496 - DNA, 516 bp, Homo sapiens
cctgctgcagaaatttgcataagtaatgaggaatcaaatgttaatcaccaagacaatggggaaaatgtctccagagcacatcagagaccttcacggcagcccctcccatcacaggcccagaggcytaggaggaaaaaatggtttcatgggccgggcccagggctttgctgttttgggcagtctcgagatgagatgtggtgccctgcatcccagccgtggcttaaaaagggccaatttactgctcaggccattgcttcagagggtgcaagccccaagccttgtcagtttacatgtgatgttgatcgtgaaggcacgcaaaagtcaagagttgaggtttgggaacctccacctagatttcagaggatggatggaaatgcctggatgtctaggcagaagtttgctgtaggggtggggccctcatggagaacctctgctagggtagtgcagaagagaaatgtggggtcagagccctcacacagagtccccactggggagctgcctagtggagctgtaaga

SEQ ID NO: 563497 - DNA, 596 bp, Homo sapiens
atgctcctccaagacccagaagcaggctaaaatagaagccagttgactgaggccactttataccacaatcaaacctctaaaggartcaaaaaagataaaagcaaaaaaactcatccaaaggacagcaacttcaaaaatcatcagcccacacggatgagaaataaccagtgcaaaaactctggcaactcaaaaactcagtgtcttcttacctccaaatgattgcactagttccccagcaataattcttaaccaggctgaaatggctgaaatgtcagaagtagaatttagaatatgaataggaatgaaggtcatcaacacttaggagaaagttgaaacccaatccaaggaatctaagaaatacaataaaatgatacaggagataaaaaattaaatggccatttcaagaaagagccaacctgaactgagctaaaaaaattctcttcatgaatttcataatacaatcacaaatattaacagcagaaatgaccaaattgaggaaagaatgtccaagtttgaagaccaattctctgaaataacagtcacaataatttaaaaaataaaggaaaatgaaaaaacctctgagaaatatgagatta

SEQ ID NO: 563498 - DNA, 596 bp, Homo sapiens
atgctcctccaagacccagaagcaggctaaaatagaagccagttgactgaggccactttataccacaatcaaacctctaaaggagtcaaaaaagataaaagcaaaaaaactcatccaaaggacagcaacttcaaaaatcatcagcccacacggatgagaaataaccagtgcaaaaactctggcaactcaaaaactcagtgtcttcttacctccaaatgattgcactagttccccagcaataattcttaaccaggctgaaatggctgaaatgtcagaagtagaatttagaatatgaataggaatgaaggtcatcaacacttaggagaaagttgaaacccaatccaaggaatctaagraatacaataaaatgatacaggagataaaaaattaaatggccatttcaagaaagagccaacctgaactgagctaaaaaaattctcttcatgaatttcataatacaatcacaaatattaacagcagaaatgaccaaattgaggaaagaatgtccaagtttgaagaccaattctctgaaataacagtcacaataatttaaaaaataaaggaaaatgaaaaaacctctgagaaatatgagatta

SEQ ID NO: 563499 - DNA, 565 bp, Homo sapiens
atgaatgcattgcctaataaatgaatctatccattcatatattattggattaataggtgaatacattaatgggttataatgggagtggtactggtggctttttaagaagaagaagagagacctgagctagcatattcagccccgttgctatgggatgccctgtgtggcctcgagatgctgcagagagttcccaccagcaagaaagggctcaccagatgtggtcccttgaccttggacttyccagcctcctgaactgtaagaaacacatttgtttctttataaattatccagtgtgaggtattctgttataatcaacacaaaacagattaagatagataggtagagtcttagatacctttctgagtagccttaattcttggcgttgaggcagcacttacttttaattgcaatgtggaaatttttatttaaagtccaaagactggagtttgatgtcctagactcgacattattttttggatgacatttatgagtcatttaagacccactttctgcatatgtaaaataagaattacatatttaataataataatgtcttcatggacta

SEQ ID NO: 563500 - DNA, 565 bp, Homo sapiens
atgaatgcattgcctaataaatgaatctatccattcatatattattggattaataggtgaatacattaatgggttataatgggagtggtactggtggctttttaagaagaagaagagagacctgagctagcatattcagccccgttgctatgggatgccctgtgtggcctcgagatgctgcagagagttcccaccagcaagaaagggctcaccagatgtggtcccttgaccttggactttccagcctcctgaactgtaagaaacacatttgtttctttataaattatccagtgtgaggtattctgttataatcaacasaaaacagattaagatagataggtagagtcttagatacctttctgagtagccttaattcttggcgttgaggcagcacttacttttaattgcaatgtggaaatttttatttaaagtccaaagactggagtttgatgtcctagactcgacattattttttggatgacatttatgagtcatttaagacccactttctgcatatgtaaaataagaattacatatttaataataataatgtcttcatggacta

SEQ ID NO: 563501 - DNA, 565 bp, Homo sapiens
atgaatgcattgcctaataaatgaatctatccattcatatattattggattaataggtgaatacattaatgggttataatgggagtggtactggtggctttttaagaagaagaagagagacctgagctagcatattcagccccgttgctatgggatgccctgtgtggcctcgagatgctgcagagagttcccaccagcaagaaagggctcaccagatgtggtcccttgaccttggactttccagcctcctgaactgtaagaaacacatttgtttctttataaattatccagtgtgaggtattctgttataatcaacacaaaacagattaagatagataggtagagtcttagatacctttctgagtagccttaattcttggcgttgaggcagcacttacttttaattgcaatgtrgaaatttttatttaaagtccaaagactggagtttgatgtcctagactcgacattattttttggatgacatttatgagtcatttaagacccactttctgcatatgtaaaataagaattacatatttaataataataatgtcttcatggacta

SEQ ID NO: 563502 - DNA, 570 bp, Homo sapiens
gtggggacacagagccaaaccatataatatatgtttgtgtgtgtgtgtgtgtgtgtatacatatatatatattccctctctgaaaaaaaattatttttttatccaaagtttaagattatttcagatgtgataggaacaaaagaggaagagattcatagagaaattaatgttaatgtgtctctaaatcttgatgtttctggagtagagttttcaaaaatccctcactgggattttttttttttctagttctgcktgctctgcctttgagataattcttccgaaataattttttatattagacactaaattaaatgtccacctaagataccttattgaacttgaaataatttaagtagtggatggattaaaataaaacacacaagaagaattttatagctattttgaaaatatgggaatagtattttaatatctcaactaaaggtttaatttaattggataatatataaatgaaattagacctaatagtttacagtcttatttagttcataatactgacatttttctcaaaacttagcacttacctacaatttaggaatataattgtggtga

SEQ ID NO: 563503 - DNA, 470 bp, Homo sapiens
gctgccattatataatgaaaaatctttatatattctacttctagtacaactttaaagcattaatatatttggtatgtctagtgtctggaaccaataacctacgtgttttagtttcagttttcagcagtatttttattatttttcttttttaaaatttatttttcacattgkttagagtattttacatcatatattctcaaaaacattatttttgtaatgtaagattgtttaaactacaaaatttaaaaaagtgtttaagtatcttttctttctgtcagtgtatcagtcctttggacagtcaattttgtttaatattttcttcattagcctggtgtttgttgacatgtttacatagagacaaaaactatcttcatgaaaactgtaataagtttactggtagatatataagtattttaaattttaatttgaaagatattataactttagctgaatttagagttatatgttta

SEQ ID NO: 563504 - DNA, 591 bp, Homo sapiens
gtacagcaatgcattttggttcaatttttaaaaatatatagaaaaacaatttgaataaattatatacaagtaagtatagtatctatgaaaatatctgagcaaacattttaataaaaattgcagcaaaagaatacatttgatgaatttcattgttgagcttaagcatgcaacaaaaamcagtgcgtaagataatactgctttcacaataattaattaataagatggaatccattataacaaaaattgccttaacacagaagttgcaatggattcatttctcttgactcagggattgacataatacatttaaaaaagatatattcaatgaacatattcatttataagatcaaccgtatgtttagtagctgtgtttatagagggtgaaaaactcttaggtaagaatctttcttcgctatgatattatattgtcatgatctatctcttatgatagcatcaatgcttctgttttgtaatccacaaagtttttgtctgactatctaagtctttctttctcagaagttacatgatttttagattgacaataatatatctacttataagataatgtatttcatactctttcaaataagt

SEQ ID NO: 563505 - DNA, 411 bp, Homo sapiens
aatttttttatgactatcaagattatatcaatgtttgttcggtgagggcaaccagctaactgaaaatagaatactgaagtcatgtagcaggatttctctcaaattattgaccaaatctacctatgaatttatgcacgtccttactcattttttaamtcatttcctccaggctcaatataaaatatattctccttatgttcaaggtaatattccttaatattgtcctaaagcctcaacaacatcctatagtcattaactcaactttgtgatgttccccatttaatagctaagtccaaaaaccttaggtagcaggtctttaacttttttttagctttcatcctttaaaaaatatatgtgtacctttatgcttcaagtccttgtaatctgaatttaacacagagaacataagca

SEQ ID NO: 563506 - DNA, 290 bp, Homo sapiens
tggtccacatgtgaagtctgcaatgactaactagaggtcaggaagccctcctgccaagttacccctcagctaataatcacagccacacyactcctgaaactggatgaataggctgtggaatggggagttcggatgctactctcattcatatctgcagagcctcttgtccatgcgcacctcctgagaaaagtgggactgacattcgcacccctccagcattctaaactgtatacatgtacctttcattctaggttcactacatgaaacttagaaccatagcagcaagtgag

SEQ ID NO: 563507 - DNA, 290 bp, Homo sapiens
tggtccacatgtgaagtctgcaatgactaactagaggtcaggaagccctcctgccaagttacccctcagctaataatcacagccacactactcctgaaactggatgaataggctgtggaatggggagttcggatgctactctcattcatatctgcagagcctcttgtccatgcgcacctcctgagaaaagtgggactgacattcrcacccctccagcattctaaactgtatacatgtacctttcattctaggttcactacatgaaacttagaaccatagcagcaagtgag

SEQ ID NO: 563508 - DNA, 435 bp, Homo sapiens
ttttatactaagcttgatggattcatctgaaaatgaaattcatttattacataagaaaaataaagttttagtgatatatttatttcattgacctgttattgaaattttcccctaaaatcattgcataataaatatagataacaaatgcaaccaatctcgctcaaatattgaagctatgacattctgaggattgacaaacaaatacagttttaaattatatattcatatatctttagggtgatgaaaggctagaagtacatttgaaaatgcattggaaaacgtgggaagtaataatctattttacaaatgtgtttaagattgctttaattatttgtctatggtgtgtctttcatttgaccccaaaataatgaaaaaaaamcaaacacttcattataatgtaatttaaaaattgtattagtagtccgtgtgtcaatt

SEQ ID NO: 563509 - DNA, 510 bp, Homo sapiens
cgctttgtcacccaggctggagtgcagtggtgtgattttggctcactgcaacctccacctcctgagttcatgccattctcctgcctmagcctcccgagtagctgggactacaggcacccgccaccacacccggctaattttttgtatttttattagagacggggtttcaccgtgttagccaggatggtctcgacctcctgaccttgtgatccacccgccttggcctcccaaagtgctgggattacaggcatgagccaccacgcccagcccattctcaaccacttttctatagggtggcagataggggagctcttgatagttagcgagagttagtttttgcaaatattttcagctttatctctcatcgattggctcataacacttactgtgagggaaaaatggtgtggttgacattctgccttctcaatgtagaaattaaaacacaacatgagagaaagttaagagtttaattctggaaaaaatagtcatagcagatgtctttcaagagcc

SEQ ID NO: 563510 - DNA, 413 bp, Homo sapiens
cagaaagacaaatagtacatcatgccacttatataatgaatctaaaatagactcagaagcagagggttgaaaggtggttgccaggggtttgcaggttgcacgggggcgggggaggtgcagaactgaaaggtattagtcaaaggtacaaaatttcagttatwcaagatgaataagttccagagacctactgtgtagtatagagcctatgtaacaatactgtattttatgtttaaaaatttgctaagatggtagatatgttaagtattcttataacaaaaggaaaaaataataataaacaaatagagtaagagaaattttggaggtgataggcttaaggcatagattggtatgattatatttagcaaattgaatgtatttttaatttaattgtaatattttatattattttgaaa

SEQ ID NO: 563511 - DNA, 338 bp, Homo sapiens
ttctgtgttcaggttggtgatgtaacgttgctttgctctgcttggtttgagkgaagaaaccatttccttgtcaaatatacagaagtggagggtttcccatgcagtaaaatccaatcatttatccaccagagctcggcacatgcatcattggccaagggatggtatgttgagggaagcacacaccacctaaaaatcttgttcttgctcaccctcaatgactaagaccattaatgacataatggccttctcacatctaccttctacccaattaaaaccagttttggactatgagatagaatctcccacttcttgcaaatgctaggacaaacaattctcat

SEQ ID NO: 563512 - DNA, 622 bp, Homo sapiens
ttttagtgactctatcctacctccctcatttgtaatagattcagatatggctacaacataaatgacaatttttcagcatatctctgttcttatacaacaaatgtgactgaatttatcaatgacagttaagatgagtgaagaagagtgtataatctgaagatacatttttaatggatttactcagtatagtcattgtacttataggtggcctagacatgtggattaaaataaatgaggctaatctatgaattttagaaaaaatacattcctttcactaattgaggggagtgaaaaagcatgtcttcaattattgacaaacttctattcaactaaaagcatttactttaatagaaaaagtgtcattggtccacaaccaaaaccaaaaatttctctttatgctgtagcatagccaacctcttagtggcctagaacaagtcattatctctaacagttctgtgggttacctggattcgggtgtttcttgtgtgggatctttcctgtggtttcagtcagatggcaactaggcatagagttacstggatacttagacagaaagcagaagctgccaggccagcaccatttccattgtattctattggtcaaagccgttgtagtgcctgag

SEQ ID NO: 563513 - DNA, 496 bp, Homo sapiens
cagtgaccaagctgagagtcaaatcaaaaactcaaaccattttacaacagctgctcaaaaataaaatgcttaggaatatacctaaccaaagaggtgaaagatctctgcaaagaaacttacaaaacactgctgaaagaaatcatcaacagcacaaacaaatggaaacacatcccatgctcatcgatgggtagacaaatattgtgaaaatgaccatactgccaaaagcaatctaaggattcaatgcaattcccatcaaaataccatcagtgttcttcataaagctagaaaaaaacaaccctaaaatttatatggaactaaaaatgagyctgcctagccaaagcaaggctaagcaaaatcgcaaatctggaggtatcacattacccaaattcaaactatactacaaggctacagttaccaaaatagcatggtactggtaaaaaaaaataggccatagaccaatggaacagaatagagaacccagaagtaaagtaaaatt

SEQ ID NO: 563514 - DNA, 477 bp, Homo sapiens
tgtgtattttgtttcctttttctgcctaagagccatgacaaagctaaacaaatggacttagaaaaaggacatgtaatctctgattgaagcaacatcttgttgacagtacagttgtcccttgaacaacacaggattgagcttcacgggtctacttatatgtaggtatttttcaaccaaacatggatcgaaactacagaaacccacacataaggaggaatgactgcaacacttgagtattcatggactttgatatacataggtgtcatggaaccaatccccaggtatattgaagaatgactctattcactttctaatgccttgaaatttagatgaaattggatttagtattcatttgacatcttgtgaaatgaccttaagatacatgcaaattcctgagtccttagtttctcacattaatataatttgcacaattactmcaaatctcctgccttttaactttccttatcactccttcat

SEQ ID NO: 563515 - DNA, 611 bp, Homo sapiens
taatttttttgtatttttagtagatacagggtttcaccatgttgcccaggctggtcttgaactccagagctcaaagtaacccacccactttggcctcccaaagtgctgggattacaggtgtgagccaccacgcccagccgtaagttgcctttcaatagacagaagatgtattaattgtcagaggctctgaggtactgagccattcattatccctggccaaccatgagaatctctccctcccctgtacacaaagacccttactgcccagtctaaacctgcccattccattagcttcctactccrgtttacatgctgtcatgagagcaaccgctgcctagttaaacattcttcagaacttccagccaccactggaatcaagctttcatcctttctgtctccctgagtagcggcactgtccagtagaactttccgtggtgatggaaatgttctgtatctgtgccattcaatgcagcaggcactggccacatgtggtcattgatcacttaaaatgtagctagtgagactactgaacttgatttaagctttccatttaattttaatgaattagaatttaaaaagccacaagtggctagtgcctactctactggaca

SEQ ID NO: 563516 - DNA, 564 bp, Homo sapiens
taagttggtctgaaatggttgaaatgacaaatgtacaattaagaatccaggtagcaamaaagattatcaagattcaggagaaagttgaaacccaatacaaggaatctaaaagaatccaacaaaatgatacaagagctgaaagatgaaatagccattttgagaaccaaactgaccttctagagatgaaaaactcactacaagaatttcataatataatcagaagtattaacaccagaatagaccaagctgagagattttcagtgcttgaagaccagttctttgaatcaactcagtcagaaaagaataaagaagactgggcatggtgactcatgcttgtaatcccagcactttggaaggctgaggtgggcagatcaccagaggtcagaagttcgagaccagcctggcaaacatagtgaaaccccgtctctacataaaatacagaaaaaaaaaatagccaggcatattggtgcatgcctgtagtcctagctacttgggaggctgaggcaggaaaatcacttgaacccaggaggtgaaggttacagtgaaccaagatcatgccactgc

SEQ ID NO: 563517 - DNA, 550 bp, Homo sapiens
agtagtgacactggcaatgcagatatgccaaaggsaagccatgatgtgctttgttgaaatgaaaatattaagtacttgacttaataagaaaggaaaaatattttgcactgagtttgctaagatctacagtacaataagatattttgagagacagcagtcacataacttcaattatagtatattgatatcattgttttattttagtattattgttataatctcttactgtgcccaatttataaattaaactttgtcataggtatgtatgtataggaaaaaacatagaacataaaaagggttcaatactatctgaggctacgggcatccactgggggccttggaacgtatcccccaagactttaatgtgggacaatggtactaattgctggtgtagatggagagcgacagaattctcattcattgttgatgaaaatgcttacatattttaaaagaaaactcaaatttatttcttttatacagactgtttttaagattctatttcacatattactatagcaactcattttggaaatcagaatttatatactat

SEQ ID NO: 563518 - DNA, 572 bp, Homo sapiens
ctccccgcccccacgtctccttctccacgtttttttttttttttttttcccagcaaaccctacaaggcagaacttaccctgctgacctcaccagcgtggtttcttctgttgtgtgtgtgtttttgttttgctgtgatgccgatgacttgcggtttgcctcacactttgtagtgtgcgtggcagtygtataagaaaacagcaaatttgtcagttaggcttgttatttattacaggaaccatggggatgccaggcagccaggctggcccctccgcccgccacctaccccacggttgaaggggctgcactggccggggatgccagaccaagggcccagagaagaggcacggcttccgagggtgaggaacagcgaggtcctggcagctgcctctcttcgaacacaatgttgaggagatgctttttgtttttgtttttaaaattcatttccattggtttttggggaacaggtggggtttgattacctaagttctttggtggtgatttgtgagattttggcgcacccatcacccgagcagtatccactgcacctgattcgtagtcatttatccctcac

SEQ ID NO: 563519 - DNA, 572 bp, Homo sapiens
ctccccgcccccacgtctccttctccacgtttttttttttttttttttcccagcaaaccctacaaggcagaacttaccctgctgacctcaccagcgtggtttcttctgttgtgtgtgtgtttttgttttgctgtgatgccgatgacttgcggtttgcctcacactttgtagtgtgcgtggcagtcgtataagaaaacagcaaatttgtcagttaggcttgttatttattacaggaaccatggggatgccaggcagccaggctggcccctccgcccgccacctaccccacggttgaaggggctgcactggccggggatgccagaccaagggcccagagaagaggcacggcttccgagggtgaggaacagcgaggtcctggcagctgcctctcttcgaacacaatgttgaggagatgctttttgtttttgtttttaaaattyatttccattggtttttggggaacaggtggggtttgattacctaagttctttggtggtgatttgtgagattttggcgcacccatcacccgagcagtatccactgcacctgattcgtagtcatttatccctcac

SEQ ID NO: 563520 - DNA, 572 bp, Homo sapiens
ctccccgcccccacgtctccttctccacgtttttttttttttttttttcccagcaaaccctacaaggcagaacttaccctgctgacctcaccagcgtggtttcttctgttgtgtgtgtgtttttgttttgctgtgatgccgatgacttgcggtttgcctcacactttgtagtgtgcgtggcagtcgtataagaaaacagcaaatttgtcagttaggcttgttatttattacaggaaccatggggatgccaggcagccaggctggcccctccgcccgccacctaccccacggttgaaggggctgcactggccggggatgccagaccaagggcccagagaagaggcacggcttccgagggtgaggaacagcgaggtcctggcagctgcctctcttcgaacacaatgttgaggagatgctttttgtttttgtttttaaaattcatttccattggtttttggggaacaggtggggtttgattacstaagttctttggtggtgatttgtgagattttggcgcacccatcacccgagcagtatccactgcacctgattcgtagtcatttatccctcac

SEQ ID NO: 563521 - DNA, 549 bp, Homo sapiens
  misc_feature 1, 2, 3, 4, 5, 6, 7, 8, 9, 10, 11, 12, 13, 14, 15, 16, 17,18, 19, 20, 21, 22, 23, 24, 25, 26, 27, 28, 29, 30, 31: n = A,T,C or G
nnnnnnnnnnnnnnnnnnnnnnnnnnnnnnntaactatttgggaggctgaggcaggagaatcacttgaacctgggaggcagaggttgcrgtgagctgagatctcaccactgcactccagcttgggcaacagagcaagactccatctcaaaaaaaaaaaaattctggatttgaaaagtacaactgactaaatatgggacactatttagtgcaccagcagccacataatgtgagtagaaagaggaaaaagaaagaagaatagagaaaagagacaaaggggaaagtatatgcaaataaatagtgattgaaagcttcccaaatctgatgtttttcatcagatttacacatccaaaaagtacgacaaactgcaaattagataaatgtatagagatccacacccaggcacatcacattcaaaatgttgaaagcaagagacaaagaagaaatctgaaaaacagcaagagaaaaatgactcatcaagaacaagggaacccagataagattaacagcagactttttataagaaaaaatagaagccacaggcaatggga

SEQ ID NO: 563522 - DNA, 549 bp, Homo sapiens
  misc_feature 1, 2, 3, 4, 5, 6, 7, 8, 9, 10, 11, 12, 13, 14, 15, 16, 17,18, 19, 20, 21, 22, 23, 24, 25, 26, 27, 28, 29, 30, 31: n = A,T,C or G
nnnnnnnnnnnnnnnnnnnnnnnnnnnnnnntaactatttgggaggctgaggcaggagaatcacttgaacctgggaggcagaggttgcagtgagctgagatctcaccactgcactccagcttgggcaacagagcaagactccatctcaaaaaaaaaaaaattctggatttgaaaagtacaactgactaaatatgggacactatttagtgcaccagcagccacataatgtgagtagaaagaggaaaaagaaagaagaatagagaaaagagacaaaggggaaagtatatgcaaataaatagtgattgaaagcttcccaaatctgatgtttttcatcagatttacacatccaaaaagtacgacaaactgcaaattagataaatgtatagagatccacacccaggcacatcacattcaaaatgttgaaagcaagagacaaakaagaaatctgaaaaacagcaagagaaaaatgactcatcaagaacaagggaacccagataagattaacagcagactttttataagaaaaaatagaagccacaggcaatggga

SEQ ID NO: 563523 - DNA, 585 bp, Homo sapiens
ctttcttgtctcctgtgttgagaacacttttttttaatttgaacaaaagatggacaagagagatttttaggcgacaataggaatgaactgttctggacgctttcaaaataccatccaaatccatcctctggctttctttaatctgctttgtacccaaagaggctgaagttgatggacttcctsatggctcacttgccagccatcttcttgttgatttagattcatgggaattgtcggcaggagattggcttgggggagagggtgaaatcaagtaactattctctggattcttccatgatgggttgccaaaggttaaataagtttcccttccaatgtcatacctctttcccaccacaacagctactatctctgagttctggtcaactttcctcccctttagcccttcagtcctaaaagtggtaatgactcccaaccattggtaggttaggagtgcttcaactatcccttcttggtttcctgtaaccctgttgacacatttgtaagtagccccttcattaaactttccttaattacccccattggaatgtggcatctgtttcctgttaggactgtaactaatacaca

SEQ ID NO: 563524 - DNA, 632 bp, Homo sapiens
atctgggcttttctagataaagtattagaaatgtttatttctcacatttatcatcagagaatatactttctatgatttcatttctttgaaactaattaaaaattattttagagcccagtatgtggttggttgtcataaatatttatgaatacatgtgtttgtgtgcattattctattcatgttagttaggctaagttggttgatagcaatgttcaaaagctctatatctttactattttttttattttttgaaacatggtctcattctgtcacccaggctggagtgcagtggtgcagtcatggctcactgtagcctctacctcccaggcttcaggaaatccacctgctttagcctcctgagcagctgggwccacaggtgcatgccaccatgcctggataattttttaaaattatttgtaggggtgggggtcttgctatgttgtccaggctggtctcaaactcgtaacctcaagccatcctctcaccttggccccctcaaagtgctgggattacagacatgagccactatgcccagcctattattttttaatgagttgtttcattccttactgagagggatattaaaatcttcaattcaggttataaatttatatatttcttttttacttcca

SEQ ID NO: 563525 - DNA, 619 bp, Homo sapiens
tcacttcaggtcaagagttcaagaccagcctggccaacatggtgaaaccccatctctactgaaaatacaaaaaattagccaggtttggtggcacgcacctgtaatcccagccactcaggaggctgaggcaggagaattgcttgaacctgggaggtggaggttgcagtgagctgggatcaggccactacactcyagcctgagcaacagagtgagactctgtctcaaagaaaaaaatgtatacgattaaagaagtaactttctggctaaatagacattgtgcctttggttagcttatagatatggtggttttaaaaccccgtgtgtgtatgtgtgtgtgtgtgtgtgtgacaaagagggagagaatgtgcactggaaatggtacaggactgacactgctgccactctgtggttctttgaatctttggacagtgttaacaaaccttgggatggaagaaatgaagatgatgggtgagtcaggcagcatccattaagccctgaagctacacagcagtaaaatgtgcagttggcacaagacaataaggagtggagtacactagccatataatgaacaaagagtgcaatccctatccatttcccctataaaaatacccaagtacac

SEQ ID NO: 563526 - DNA, 570 bp, Homo sapiens
ttatcaggtcaggactcagacttggcaatamggagtttgctcagacacaggtacaacttctgccttgaggcattgaactctttggtcccatgctagagaattgatccccattggcagggacagaatgggatgcaaaatgtagcaagtactccaacagtgacctggtggggtttctttcagaagcttttcctggcgcagtacagctgccctttagaatggcaagagttgaccaccaaccagaaagaagccctgattccaccaagcctgcgggccacatctgttgcaacaggagccacttttcagtcccatcagctccttctcttctagctatgacttttatcatgggctccacttcaatcattagcaataaatagaaaatacccaaaagccccaaaataaaggtccccttttcatttaaaacattcagatttcattgcttgtgctgtggctaacatcaagtcacaaagtggcagggcagttccccaagcccgttctgcttccaagcttgttaaactttggaatgggttttgtcctttgggtgtgcatgtgttttaaagctgttttatgaca

SEQ ID NO: 563527 - DNA, 580 bp, Homo sapiens
gcccttgctttctcttcctatctttaatttttttgttgtttattccttcttkgtaacttcaccaaaacaagaaaaaccatcaggtataagaatagaaaatatactaatatttaatccccatagtagaaataaatgcttagtagggaaagtataaaattaaaaacttgtagagtatttccctgcttctttacaatatttctggaattttacagtttgcaacatattttcaaacagattttaaaatataatattcatcataccttaaaatattagtttgcatatgagataatggaggctcaaggaggctctatgtcttgcccaaggtcacacaattaggctaggactcacacaattaggcgaggactcatacacagacaaaagtccattgttggttgggtgtggtacatcatgcctgcaatgccaggactttgggaggccaaggcaggagtatttcttgagcctaggacttaaagaccagcctggcaacatagaaaagtcccatctctccaaaaaaataaaaataaaaaatgagcaaggtgtggtacattcctgtggtcctgtggtctaagctacttgggag

SEQ ID NO: 563528 - DNA, 580 bp, Homo sapiens
gcccttgctttctcttcctatctttaatttttttgttgtttattccttctttgtaacttcaccaaaacaagaaaaaccatcaggtataagaatagaaaatatactaatatttaatccccatagtagaaataaatgcttagtagggaaagtataaaattaaaaacttgtagagtatttccctgcttctttacaatatttctggaattttacagtttgcaacatattttcaaacagattttaaaatataatattcatcataccttaaaatattagtttgcatatgagataatggaggctcaaggaggctctatgtcttgcccaaggtcacacaattaggctaggactcacacaattaggcraggactcatacacagacaaaagtccattgttggttgggtgtggtacatcatgcctgcaatgccaggactttgggaggccaaggcaggagtatttcttgagcctaggacttaaagaccagcctggcaacatagaaaagtcccatctctccaaaaaaataaaaataaaaaatgagcaaggtgtggtacattcctgtggtcctgtggtctaagctacttgggag

SEQ ID NO: 563529 - DNA, 580 bp, Homo sapiens
gcccttgctttctcttcctatctttaatttttttgttgtttattccttctttgtaacttcaccaaaacaagaaaaaccatcaggtataagaatagaaaatatactaatatttaatccccatagtagaaataaatgcttagtagggaaagtataaaattaaaaacttgtagagtatttccctgcttctttacaatatttctggaattttacagtttgcaacatattttcaaacagattttaaaatataatattcatcataccttaaaatattagtttgcatatgagataatggaggctcaaggaggctctatgtcttgcccaaggtcacacaattaggctaggactcacacaattaggcgaggactcatacacagacaaaagtccattgttggttgggtgtggtacatcatgcctgcaatgccaggactttgggaggccaaggcaggagtatytcttgagcctaggacttaaagaccagcctggcaacatagaaaagtcccatctctccaaaaaaataaaaataaaaaatgagcaaggtgtggtacattcctgtggtcctgtggtctaagctacttgggag

SEQ ID NO: 563530 - DNA, 305 bp, Homo sapiens
gcagggagaactcgatgcaaaggagagtsctgcatgctacagtcacactgacaggcggtatctaatgatttatttattccatatttgcctcttacaagttgaacccagataaagggtaggattaggatatatgaatatttattagccagagtcttattgagtaaaagccaggaataagtgcatttctaggaccttctaatagattctttccatcctctctcttcaacctctctaatgcatttacatagttgatttaaaaaccaaatctacattatttctccattcctacttttcataaattataa

SEQ ID NO: 563531 - DNA, 305 bp, Homo sapiens
gcagggagaactcgatgcaaaggagagtgctgcatgctacagtcacactgacaggcggtatctaatgatttatttattccayatttgcctcttacaagttgaacccagataaagggtaggattaggatatatgaatatttattagccagagtcttattgagtaaaagccaggaataagtgcatttctaggaccttctaatagattctttccatcctctctcttcaacctctctaatgcatttacatagttgatttaaaaaccaaatctacattatttctccattcctacttttcataaattataa

SEQ ID NO: 563532 - DNA, 450 bp, Homo sapiens
cttgctgactcttatctatcaacaatgtccagttgctttaccatattacacatggtaaatattcacaatgggatcgtgctctttctttgtagccatttttaattgaaccctgccaargggcttcaactgggttcaatattttaatatgtttacttttaaatatctgaagttaatatggaaagctgctaaaatgtttgaaacaggattgtgtttcattatctctgtgatttccttcaagttgaaaacattgtaaaatcaaaaaaaaaaacacaggagtcttgccttcagcatttaggtgatgccctactgaaaagggtgtctttgatgcttacaaagttatttaattatttatttatttatttttgagacaaggtctggctctgtcacccaggctagagtgcagtggcacaatcttggctcactgcaacctccacctcctgggctcaagcc

SEQ ID NO: 563533 - DNA, 549 bp, Homo sapiens
tgcaaactgatatgcataatgacaatatctagagaatgaaaatgttcaaatatatcaattatttatttgttcatttgcttctaacattagaaagaaactctttagcaaagagtttagtagggtcagtgtcttaacacaatacctggccagaaggcaggtactctttatatgttggttaaatgaataacatcattagtcacatattacaaaatctatggtttcataccaaaatgactttgccaagcaataaaaaaaaatagaaaacacctcaagcaaacaatgattacatatttcctatgtttaggcatcccatgaagacccattatcttgatttcactatccatggttggttggttgttttgtttgtttgtttgctttttgagacaaaatctcactctgtcacttaggttggagtgcagcagcaccatttcggctcactgcaacctccaccttctgggttcaagggattctcatgcctcaayctcctgagtagctgggattacaggcatgcaccaccatgctcagctaatttttgtatttttagtagag

SEQ ID NO: 563534 - DNA, 392 bp, Homo sapiens
ttaagattcggtcacgccgaagcagggtgggcccttaacccaatataactggttgccttataagaagagaagagatacagagacagacacacagaagagaacctgatgtgaagacaaacacacacacggagaaaggcacatgactacggaggcarggactgaagttatgcagctgcaaacaaaggaatgccaaagattaccagcaaccaccaaaagctaccaggaagagcaggttcctgctaacagcctgatttcagacttttggccttctgtgaaagaatatatttctgttgttttaagccacccaagtttgttgtaatttttatggcagtcttaggaaactcatacacactgctaaagaaatcatgagagacttcataatactctatttt

SEQ ID NO: 563535 - DNA, 585 bp, Homo sapiens
gctgggtctttagcatagtgtttttccttactacatcgttttggacttggggttaatggctgggatgtttgaggtgctgatggaatctgaaagcatagatgtggcttaaaaatacaatacataaattgtaatctactaagctataaactagattagaaccgtcaatttttgcctttacttctgttaccaraccctcacttgagccagtgtagtttaccattaatccattcatgtgactcactagtttctactctcaggaattaaactgtccacttggaaaacaggttaacttgactctgagtaggacgtatgaaagatttgcaacatgagatactgattatcttgatttaaaaaacacagcctctattttgcatctgtgttgctatcttctattagtctgaattttaatgctctgacttactatggcttcctgtgctagactactgcaagaatccttatctagggctctgaacctagagaattctgcactgatgtcaactaaaacccctgattcccttctcttctgggagaatcttttttcctttttcaacttttattttaggttcatgcacaggtttgttacat

SEQ ID NO: 563536 - DNA, 585 bp, Homo sapiens
gctgggtctttagcatagtgtttttccttactacatcgttttggacttggggttaatggctgggatgtttgaggtgctgatggaatctgaaagcatagatgtggcttaaaaatacaatacataaattgtaatctactaagctataaactagattagaaccgtcaatttttgcctttacttctgttaccagaccctcacttgagccagtgtagtttaccattaatccattcatgtgactcactagtttctactctcaggaattaaactgtccacttggaaaacaggttaacttgactctgagtaggacgtatgaaagatttgcaacatgagayactgattatcttgatttaaaaaacacagcctctattttgcatctgtgttgctatcttctattagtctgaattttaatgctctgacttactatggcttcctgtgctagactactgcaagaatccttatctagggctctgaacctagagaattctgcactgatgtcaactaaaacccctgattcccttctcttctgggagaatcttttttcctttttcaacttttattttaggttcatgcacaggtttgttacat

SEQ ID NO: 563537 - DNA, 606 bp, Homo sapiens
tgtggcctctctgcctatagagtagccatttttttgtttctttacttctctaataaacttgatttcactttactctatggacttgatctgaattctttctttcacgaggtccaataaccctttcttggggtctggattgggatctctttttggtaacaggactagtttgactgtaccctttaagatggctacaacactttagccagggctactcttgggccaacactcacatcctcaaaattaagtgtctaattgttcccacagtggtctaacctgggctgcaattaactgcaggtgcaatctttgcacgtgtagctaatagaaggactaaaccaccccaaacaagctgcctcgggagagtctcaggctatatccttaaagttccacaattatttgaagttgtctgcttttaaattaaatacactatttaatactaaattagcttgtccttttttttttttcatttgatgttagagtgtatccacacactagaatagagygaacctggacaggtacattttttcaaaactcgaatgaaatttttgttaaatagttcctataaagagtagatgccactctggttgtacatctcaaagcctctcatta

SEQ ID NO: 563538 - DNA, 609 bp, Homo sapiens
ttcaaaccagcgaaaggctcagaataataaagtgagttcagataggacaaaatctcccagtttgttgagttccagtaagcagcaccatgattggttaaggtggctctccattctaaaggtcagcaaagtcttgctgtcagtgccgtgctgcaactacaaagcacaaagattctgataatcaatgttttaatctttgttagtaaaatcatgggctgaattctgcacccagtgttgacctgtgtttgtaattgtgtaagctgatgagctaaaagatttgtcaaggtattatttctcaccttttagaaattttaattcattggtcaccttgttgagtgtgccataccctgatcctacagcaaaaagctaattaatataattagtcaaacattctttgatcatttgagttaaaataagggaagtgatctaacaggttttaaacactattttcagtaaaattaatcaaattagcatctaaattatgttttcttttgattttcattagttaaatcatttaacatacattattataatggcctttgatarctctattttattttatttatcattattattttttgtgacagggtttcactctgtcacccaggctgg

SEQ ID NO: 563539 - DNA, 584 bp, Homo sapiens
agataaaaggagactatgtaaatcagtcttctcgtgatttagtagcaattgaaaaggcacaggtttttttgagtatttagatttatggtgtactgaaaggattaactgcagaaccactgtaaaattgattctgcagtggataggagaaaaaaaagtatttctctctttttttttggtggcggcagggggtactgcaggttacttggtatttaagaaacataatttagaggtaaatgaagagcgtattctgacttctttggacaagcctcttttaggcaatattttgtttaccttatcccagttcgttcttgcaaatggtgcttgccaaggtggaattacaggactctctactgcccagctcgcctgctggggctttcttttattctctctttcactgggaggctgcaggtcattccccaaragcattcctggggctgggtgccctggaggacaagcctatgctctgagttacatcttgctttctgagagccctttattcaagccactgctcagcaaatgccaccattgtgagtgtgcctggaacccttagaatgagaaaagtgatctccctatgggaggaagag

SEQ ID NO: 563540 - DNA, 608 bp, Homo sapiens
gattagtgcccttattgaaaaggctccagaaaattccatccacccttttgccatgtgaggacacagtaagaagaaggttatttatgacccaggaagtgggccttcattagaccaaggctgccgcctgcatcttgtacttccctgactccagaacggtgagaaaaaatagatttctsttatttgtaagccagccagtctatgatatttttgttacaggagtgcaaatggactaagacaatagacaaggaagatagaaaaagacacaaatcagacttctacagtgttttagattaaaaacacatagattgagattaatggaaaattagacattgcaaaagaaaatactagttaggttgaagaaataggaacagaaatgatccaaatagaaattatgtagtacacaaagataatagaaattatctaaagaatttactttggaaagttcttttccaaagaaaaaaacaaataaaatgaactgagaatcagtgaattacagaacaaattaaagtggcttcatatgtatgagtaattgaagtccctgaaaaggggaagggagtacacagaaaagatttgaaaataatggcaaaaaaaccttctaaatttaatga

SEQ ID NO: 563541 - DNA, 608 bp, Homo sapiens
gattagtgcccttattgaaaaggctccagaaaattccatccacccttttgccatgtgaggacacagtaagaagaaggttatttatgacccaggaagtgggccttcattagaccaaggctgccgcctgcatcttgtacttccctgactccagaacggtgagaaaaaatagatttctgttatttgtaagccagccagtctatgatatttttgttacaggagtgcaaatggactaagacaatagacaaggaagatagaaaaagacacaaatcagacttctacagtgttttagattwaaaacacatagattgagattaatggaaaattagacattgcaaaagaaaatactagttaggttgaagaaataggaacagaaatgatccaaatagaaattatgtagtacacaaagataatagaaattatctaaagaatttactttggaaagttcttttccaaagaaaaaaacaaataaaatgaactgagaatcagtgaattacagaacaaattaaagtggcttcatatgtatgagtaattgaagtccctgaaaaggggaagggagtacacagaaaagatttgaaaataatggcaaaaaaaccttctaaatttaatga

SEQ ID NO: 563542 - DNA, 518 bp, Homo sapiens
gttgttttctccacaatatttaaaacatttaataaaatttggggaaacttccactggggtgtgttgattagaatttaacaggtcaactatgatgtaaagtcactataggaagtatcatctgtagaactagataaaataattattagtaatttcctctcatcttcagaatcatgcccttctaaagattagctaaggacttcagggtggggcmgaccctgagggtatgccgagctgatccagaaacacctgtggtacctcacgtctaagccttctggagaaatggaatacaaattatggcaactcagcagcaaagcagttcggtcagggctggggtggagtgggtgtaatttgggtacaaaatatgcatcgccacaatgaaaataaaagctaatcttgaaaatgagatgcaagatcaacatagctattttgggcctctgaacttgttttattccttccattgcttgcctgctcagtcaacctgcctgctttcccttctcctcccatctctaccatgcaca

SEQ ID NO: 563543 - DNA, 313 bp, Homo sapiens
acaagtgaaattttgagaagcttttgttgttgttgttgttgttttctccacaatatttaaaacatttaataaaatttggggaaacttccactggggtgtgttgattagaatttaacaggtcaactatgatgtaaagtcactataggaagtatcatctgtagaactagataaaataattattagtaatttcctctcatcttcagaatcatgcccttctaaagattagctaaggacttcagggtggggccgaccctgagggtatgccgagctgatccaraaacacctgtggtacctcacgtctaagccttctgga

SEQ ID NO: 563544 - DNA, 518 bp, Homo sapiens
gttgttttctccacaatatttaaaacatttaataaaatttggggaaacttccactggggtgtgttgattagaatttaacaggtcaactatgatgtaaagtcactataggaagtatcatctgtagaactagataaaataattattagtaatttcctctcatcttcagaatcatgcccttctaaagattagctaaggacttcagggtggggccgaccctgagggtatgccgagctgatccagaaacacctgtggtacctcacgtctaagccttctggagaaatggaatacaaattatggcaactcagcagcaaagcagttcggtcagggctggggtggagtgggtgtaatttgkgtacaaaatatgcatcgccacaatgaaaataaaagctaatcttgaaaatgagatgcaagatcaacatagctattttgggcctctgaacttgttttattccttccattgcttgcctgctcagtcaacctgcctgctttcccttctcctcccatctctaccatgcaca

SEQ ID NO: 563545 - DNA, 441 bp, Homo sapiens
gtcccatctctcatctgtggccagaggaaacttggccttaacattctttgactcccaagtctaatgtcactacaagactttattgagtacaagggaaactccttttgggggcattgtgcctgacactgggagatgtggtctctccctgacatagtttaaactctatctactgggagagtacctgcttacaaatagcagagaagggggccaggcgcaggtggctcaagcctgtaatcccagcactttggtaggccgaggtgggcgaatcacgaggtcaggagtttgagaccagcctgcccaacatggtgaaaccccgtctctgcactaaacatrcaaaaaattagccgggcatggtggcgcgcctttaatcccagctacttgggaggctgaggcaggagaatcacttgaacgcaggagacggagcttgcagtgagcagagat

SEQ ID NO: 563546 - DNA, 441 bp, Homo sapiens
gtcccatctctcatctgtggccagaggaaacttggccttaacattctttgactcccaagtctaatgtcactacaagactttattgagtacaagggaaactccttttgggggcattgtgcctgacactgggagatgtggtctctccctgacatagtttaaactctatctactgggagagtacctgcttacaaatagcagagaagggggccaggcgcaggtggctcaagcctgtaatcccagcactttggtaggccgaggtgggcgaatcacgaggtcaggagtttgagaccagcctgcccaacatggtgaaaccccgtctctgcactaaacatgcaaaaaattagccgggcatggtggcgcrcctttaatcccagctacttgggaggctgaggcaggagaatcacttgaacgcaggagacggagcttgcagtgagcagagat

SEQ ID NO: 563547 - DNA, 562 bp, Homo sapiens
tttctcatgtctagtaagaaatgtttgcacttatttatcttatttattgacttaacagtactaatttttttctgtttctgaagctatttcacaagagcatatcatagatagtaatcaaataactcttggatgctcctttatttgctttcaaatgagttgaatcaatttagtagaatatttttgatgggtattttgtccccaaaatggagaaaaaaaggtcgttttttgttattttccacgtgaaaaaaattaacattaaaaaatgtatcttctgctaaaagtcacaaacacttggttccattttgaaatgcaaatttgctaccaatttgtcactaccaatttgtgatgtgtcatcagggcctrtatttcaagaatggcattttcattgccagctctcccagactatctcagtaatcaccacaattacgcagagttgcagaaggatctatggaagacaagaggttcctaccagctgaggagtcagataagaaagtgctatgccactgtaatggtatccccagcatggagatatcacagcatcatgctgctctaggtgactcac

SEQ ID NO: 563548 - DNA, 562 bp, Homo sapiens
tttctcatgtctagtaagaaatgtttgcacttatttatcttatttattgacttaacagtactaatttttttctgtttctgaagctatttcacaagagcatatcatagatagtaatcaaataactcttggatgctcctttatttgctttcaaatgagttgaatcaatttagtagaatatttttgatgggtattttgtccccaaaatggagaaaaaaaggtcgttttttgttattttccacgtgaaaaaaattaacattaaaaaatgtatcttctgctaaaagtcacaaacacttggttccattttgaaatgcaaatttgctaccaatttgtcactaccaatttgtgatgtgtcatcagggcctatatttcaagaatggcattttcattgccagctctcccagactatctcagtaatcaccacarttacgcagagttgcagaaggatctatggaagacaagaggttcctaccagctgaggagtcagataagaaagtgctatgccactgtaatggtatccccagcatggagatatcacagcatcatgctgctctaggtgactcac

SEQ ID NO: 563549 - DNA, 550 bp, Homo sapiens
caaattcatgcatgatggatacttcacaaatcagtcatggaacagttttattaacagaagttttataggaaaatgatctcattccaagcggtgctcatggacccaaactctgaggtaatgggagaactatcataatggaaagactttatggaatgataaattaaacactagaaaagcagttgagagtttaagtctgactcagagaccacagcccgagcctcatgytggaggaagtccctggacaagtcatttcacctttctgggttcagggtcctcatttatgaagtggggattataaacttccagtttcccttgcagtattattataaataacaaaaggcaaatgagtgctctgcaaataacttatcactgcattattacattaatgagagaagtgcaaagagtttatgagcctgggtactaaggttgtaatgtttcacggcatcacattttctcctaacaatgacactacatattgagtgttactggaagataatcctttttcagattagataattttttgcaaagtttggctaatatctgttttact

SEQ ID NO: 563550 - DNA, 550 bp, Homo sapiens
caaattcatgcatgatggatacttcacaaatcagtcatggaacagttttattaacagaagttttataggaaaatgatctcattccaagcggtgctcatggacccaaactctgaggtaatgggagaactatcataatggaaagactttatggaatgataaattaaacactagaaaagcagttgagagtttaagtctgactcagagaccacagcccgagcctcatgttggaggaagtccctgracaagtcatttcacctttctgggttcagggtcctcatttatgaagtggggattataaacttccagtttcccttgcagtattattataaataacaaaaggcaaatgagtgctctgcaaataacttatcactgcattattacattaatgagagaagtgcaaagagtttatgagcctgggtactaaggttgtaatgtttcacggcatcacattttctcctaacaatgacactacatattgagtgttactggaagataatcctttttcagattagataattttttgcaaagtttggctaatatctgttttact

SEQ ID NO: 563551 - DNA, 603 bp, Homo sapiens
cagcattgaactcctcctctagttcttcaatctcttctttgggctttatcccttcaatatgtgacatgctgagatctatcccttttgtgaggaaaaaaaaatcttttatcggatctttgtcacctcagagatatgaccctgtttcttcccttccattcacagctaagttttttgacagtgttttgtgtgccattagcctctaaatattttgatcatattcctaatcaataaaaatttttgaatacaccctcaagtatatttatttacatataccttatatatatatgctgctaaactgacatacgaaataatgaaattatatacaaataataaaaagggataacatagagattaatattttaaaatagatttttaaaattaacctgccacaaactttcaaaattatcagctgggygtggtggctcacgcctgtaatcccagcactttgggaggctgaggtgggcagatcacttgaggtcagaagttcgagaccagcctgaccaacatggagaaaccctgtctctattaaaaatacaaaattagcaaggcatgatgacgcatgcctgtaatcccagctacttgggaggctgaggcaggagaatc

SEQ ID NO: 563552 - DNA, 583 bp, Homo sapiens
caaatcctgaaatgtttatttgctaaatatctgatgctgtggcaatcacttaagtacccaagtgtcagttttctcgtcagtaaaatgagttaaaaatgcctgcatgccaagttttctgtcaggaataaatgggataatacatgcaaaacatttcacaaaatacattgtacatagtaagtgatcattaaatgatagacatgcttttgtagtactcataggataatcactatttttatttcatgtgttttatgtcttctattgggttgcattcttttcttgttttgtttgtttgtttgtttgtttgtttgaaataggattttgctctcttgtccaggctggagtgcaggagatctattatagctcactgtagcctctaactcccagacccaagcattcctcctccatcaactttctgaatagctggaactagagacatgcaccatgatgcctagctaatttaaaaaaaaatgtttgaatgttttgtagagacagagtctcactatgttcacyagacttgagttgaactcctgggctcaagcagtccttccatctcagcctctcaaagtgctgggattacaggcat

SEQ ID NO: 563553 - DNA, 580 bp, Homo sapiens
tgtgattctcttctagtaacaatttctatcccttaataggagatgatttcagagaagttagagaagaaaaacagagaaaacaatactgttgctatgaaatgacgaatttgatataatcaaatgcaagatcattaatataaacacttataataatgaaaatataaattattaattatgcagcatgctttagggccatttctacagttattatgaattacaaatattaaatgcctttaatctatccactgttcataattctgtaagccatgtttacataataaacaaaaaacatttcctacatattctgtctcttctgacttttaacrattaaagtatttatcttgggctggcaagttaccctgaccctaaccagtaagtacaaacagggcattgtacacccattctaaaagctggaatcaaagaataatgttagaagtatttgcaggatttatccaaagaaatgtttagcagacaaatgcaatagaaaaaaatcaagcatttcccaaaatggtgtttgtattagaaagttttaaacttttgtcttcattgtaaaggtatcactttattttatttttaaaag

SEQ ID NO: 563554 - DNA, 574 bp, Homo sapiens
tttaactactgttaacctacatttgatgcctattttctactttattaatttctgctcttattttttacactttctattacattttaggtatgctgttttacaaactttatgatttgcatgattagctaagatgcaaccttccgtcttttccaatatgttcttcaatgctatttcccataatgttatggattccgcaatcaagttttcattattttttacaaacacaataccaactatatttatcttaacataatttttatttaaaartatagaattttaaatatatatttcctcagtgtgatttttttttttttggtggacctataggttactttgaaggatgtttccagacttgcacattatttggtgttctttatttatactgagttctaatttaatttcattctgatcaaagaatgtagtttatatgataattgttttaatatgttctcagatttgctttattaactaatatatggtcaactttgtaaaagtgtaatcagttcttgaaaataatgtatattccttttatcatgagatcgaggtgttcaccagagtatataagttagtttgt

SEQ ID NO: 563555 - DNA, 574 bp, Homo sapiens
tttaactactgttaacctacatttgatgcctattttctactttattaatttctgctcttattttttacactttctattacattttaggtatgctgttttacaaactttatgatttgcatgattagctaagatgcaaccttccgtcttttccaatatgttcttcaatgctatttcccataatgttatggattccgcaatcaagttttcattattttttacaaacacaataccaactatatttatcttaacataatttttatttaaaaatatagaattttaaatatatatttcctcagtgtgatttttttttttttggwggacctataggttactttgaaggatgtttccagacttgcacattatttggtgttctttatttatactgagttctaatttaatttcattctgatcaaagaatgtagtttatatgataattgttttaatatgttctcagatttgctttattaactaatatatggtcaactttgtaaaagtgtaatcagttcttgaaaataatgtatattccttttatcatgagatcgaggtgttcaccagagtatataagttagtttgt

SEQ ID NO: 563556 - DNA, 574 bp, Homo sapiens
tttaactactgttaacctacatttgatgcctattttctactttattaatttctgctcttattttttacactttctattacattttaggtatgctgttttacaaactttatgatttgcatgattagctaagatgcaaccttccgtcttttccaatatgttcttcaatgctatttcccataatgttatggattccgcaatcaagttttcattattttttacaaacacaataccaactatatttatcttaacataatttttatttaaaaatatagaattttaaatatatatttcctcagtgtgatttttttttttttggtggacctataggttactttgaaggatgtttccagacttgcacattatttggtgttctttatttatactgagttctaatttaatttcattctgatcaaagaatgtagtttatatgataattgttttaatatgttctcagatttgctttattaactartatatggtcaactttgtaaaagtgtaatcagttcttgaaaataatgtatattccttttatcatgagatcgaggtgttcaccagagtatataagttagtttgt

SEQ ID NO: 563557 - DNA, 595 bp, Homo sapiens
ggcagctctcctgggccaccaacgattcagtctaggtgtctgatggcaaattgcccatcccgaggcagcacttttcacgatggttgtggtgtgtgttctggagtcccagagggctggcttttgagtttcctgaagtgcaatgacaggagcaaataggaccagagaccaaattctttccaacgtaaacatgccgtattaagggggaggaatagacttacgtgggattcattggtttttttgacaacagaaaggtttagaagcatcttagctatacatataattcccaggttgatgctggtaaaackacatgatctctaaacatctctaataatctttcattacttcaaagtacatttcttgaacatttaccctatggacaagacaatgtgattcttgtcctaaaaaaactatctttactcacacttcactaaaaaaaaataatgataacagaggctattggagaaaaattcatcaacttccagccacaagacttacacattttccacccacctatatctaccctctctcttataaccttagaagaggcagattgcttgtgtttggggccaattctgtcttacatgttttcttgata

SEQ ID NO: 563558 - DNA, 445 bp, Homo sapiens
attttttttacaccgattacatgttgacatgctatgctgggttaaataaagcatattattataattcatttcatctgtttcttgggtgtgtatggcctctagaaaatgtaaaatcaaatgtatggcttgtgttgtatttctactggacagtgcttatctataatgtttataggactgttttcatcaaagccactgggtgacactgtttcttcactaaattgayacaaccaaagcaattttctgccaggggaaaatcacacatgcacacacacaaatcataaatgcacatacaggtacacacatgcacatgcacatacacacacttcagcaaacaatatgtgccccctgtaaccagtcatcttctcaggaggaaagaacatgagtgcccttaatgtaatattattattatgttagcaggactggctatacttgaaagctttaataa

SEQ ID NO: 563559 - DNA, 613 bp, Homo sapiens
aactaactgcaaaaatcatttcattatggcttggcatccccgggatacagtgatgaaagaaataataaataagccactatgtgatgaatacttgtccaaatgaaaatgcctctgataatacccttttagaggacaggaatgttattaagctagtgagaacatctagtccagttccagctaggtgggtcagggcccattctggtaggctgatgtctgtgccataccagttgttaaacgtactgaatatcattcctccagcagaacctgacacctcctattcaacatcccttctgcagccggtccccatttctgtactggcaatacctccatcctagtcttagctcagacttctcaacagcactccgtgcttggccagagttaacaaagacacaaataacacactgtgtcatcttgtagtaaacagagaggctttccattctaccatgttacagctgtggaatcttgggtggctaatgagcttcactttccctgagctycctcactttttaaacagctttactgagacgtaactcaaatatgtattaatcaggattctagaaagagaaccgacaggatatgtgtgtgtatatgtgtctgtgtatatgtgtatata

SEQ ID NO: 563560 - DNA, 427 bp, Homo sapiens
ctttagctgatacaaacaaaatatacatctatagattattatgctgacaaaaaaaagcaagtgcagtcctagtatgtgttaagggtctcattaactagactagtggttcgtaagtaggcatacgacaaaattacacgtcccccttcctgctcacccacacgttgatgctctgtaggttgagggttgatgcttaggcaagtgtatattgtaaaaaaggttcacaaattattgttctacaaaagaggtgacagccacccttcgctttgttccagtcataccatatctgttgtaccagattctggactcctcaatttcaaaagaccatatctaaacagagaggaggggaaaagggragaacaaaatggcatggaaggggacttagttccctattatggtagtgattaggcaaaagcttaacaatgatcac

SEQ ID NO: 563561 - DNA, 571 bp, Homo sapiens
ctcttttagttattttaaaatatacaatgaatattgttaactattttattcattctatatattttttacttattaaccatttctactttattccccactccccactacccttcctagcctctggtagccaacagtttactctttatatccatgatttttatttattctcattttttatttttagcttccacaaatgagtaagaatatgtgaaatttgtytttcggcttgtgcttggcttatttcacttaacataatgtccaccagttccatccatgttgttgcaaatgacaggatttcattattttttataaattaatcatattccaatatgtatacgtacaacattttctttatctgttcaaccattgatggacccatagactgatttcatatcttagttattgtaaataatgctgcaatgaacatggtactggcataaaagtaggcacatagacacttgcaacataatagagaacccagaaataaatccacacatttagcagtgatctcatttttgacaagggtaccaagaacttacactgagcaaaggatagtctctttaataaatgg

SEQ ID NO: 563562 - DNA, 411 bp, Homo sapiens
tttacaactctcaaaatgtattagcctctctataagttcatgtataataagtgtttttttcaaaatgatatctaaacatcataaaatctgatatatagtattatacatgtatacatatttgtgtgtgtatatatatatgtgtatgtatttgagcagatacagtactcttctacctctatgtaaaaaatggacagatttcactgaaaagattaagaaagccccaacctctgtaataagatatatattcaaatacaagtgtaaaggtgaaagacaattgtacatataaatatatgtatataaaaatagaaataaacaaatgagtttctgtagtgacactatttgtaaaaaaaaaaaaaagcccaaaataagtaattataaaagtattycattttaataggataaaaataaaac

SEQ ID NO: 563563 - DNA, 585 bp, Homo sapiens
tattattgactaaaaaactacaaataagcaattatctcaaaagaccaagtgtgcatatgtacttttactgacttatkatgattacaaaattatatgagctgaatgttaaaaggaatttgaagtcactctgtgtgtatatgtggcggggtggggggaagacctagaatgcaaaacaaagaaataatctattttaaaaagaatctattttattactttaaaatttatttattttaaattgttttaaaacaagaacaattaccaattgagcaatttatttattagcagttgttattagaaaataaattacaattttaaatttagatgaaaatataatgattaacgaaagaaaatatatttaacaatataaatagaatatattatatgactggtgtgtctagacttttaaaatcaccagtggtcaattgtactttctggatttgctatgagttgaggataaataatcccatggcttataaaattgacaaaaaaaagaaaagaagtaaaattaagaattttcatagctattttagaaaaaaattcttcacatatatgtagtgtaccattgtataatacagaaaaatagat

SEQ ID NO: 563564 - DNA, 585 bp, Homo sapiens
tattattgactaaaaaactacaaataagcaattatctcaaaagaccaagtgtgcatatgtacttttactgacttattatgattacaaaattatatgagctgaatgttaaaaggaatttgaagtcactctgtgtgtatatgtggcggggtggggggaagacctrgaatgcaaaacaaagaaataatctattttaaaaagaatctattttattactttaaaatttatttattttaaattgttttaaaacaagaacaattaccaattgagcaatttatttattagcagttgttattagaaaataaattacaattttaaatttagatgaaaatataatgattaacgaaagaaaatatatttaacaatataaatagaatatattatatgactggtgtgtctagacttttaaaatcaccagtggtcaattgtactttctggatttgctatgagttgaggataaataatcccatggcttataaaattgacaaaaaaaagaaaagaagtaaaattaagaattttcatagctattttagaaaaaaattcttcacatatatgtagtgtaccattgtataatacagaaaaatagat

SEQ ID NO: 563565 - DNA, 570 bp, Homo sapiens
aattaggagaggagtatcacatggatatgtagagtttagagtgataaatttatgatgaggcatataaatgcactatatattcaaagagatctctagaggtatgagtacagaaaaagmacagatatatctaattgtgcttcgtggcccacctcaactttaggaggtaaggtgaacacagggcacctgcaaaggatattgtgaagaagtcgtcagtgaggtagaaacccaggagggtgtgacagcctctaagacgagtaacaaaagcaatacaaggaggcagggatgatgatctgtttcagatgttattcacagtcaagtaaaataaaggttgagaatcattggacttagcaatatggaaacaataagtggtattaataaaagcatttatgatgaagtcatggtgaaaagaagctgcttggagtatctttacaaaagaaactgtgaactgaattcagagaccatgagtacagaaaattttgtcaagatgattctgtctgaacttctccatagcgatgtttgaaaactaagtgatacagcacttgtgctttgaattcatggcatgctacgtag

SEQ ID NO: 563566 - DNA, 570 bp, Homo sapiens
aattaggagaggagtatcacatggatatgtagagtttagagtgataaatttatgatgaggcatataaatgcactatatattcaaagagatctctagaggtatgagtacagaaaaagcacagatawatctaattgtgcttcgtggcccacctcaactttaggaggtaaggtgaacacagggcacctgcaaaggatattgtgaagaagtcgtcagtgaggtagaaacccaggagggtgtgacagcctctaagacgagtaacaaaagcaatacaaggaggcagggatgatgatctgtttcagatgttattcacagtcaagtaaaataaaggttgagaatcattggacttagcaatatggaaacaataagtggtattaataaaagcatttatgatgaagtcatggtgaaaagaagctgcttggagtatctttacaaaagaaactgtgaactgaattcagagaccatgagtacagaaaattttgtcaagatgattctgtctgaacttctccatagcgatgtttgaaaactaagtgatacagcacttgtgctttgaattcatggcatgctacgtag

SEQ ID NO: 563567 - DNA, 570 bp, Homo sapiens
aattaggagaggagtatcacatggatatgtagagtttagagtgataaatttatgatgaggcatataaatgcactatatattcaaagagatctctagaggtatgagtacagaaaaagcacagatatatctaattstgcttcgtggcccacctcaactttaggaggtaaggtgaacacagggcacctgcaaaggatattgtgaagaagtcgtcagtgaggtagaaacccaggagggtgtgacagcctctaagacgagtaacaaaagcaatacaaggaggcagggatgatgatctgtttcagatgttattcacagtcaagtaaaataaaggttgagaatcattggacttagcaatatggaaacaataagtggtattaataaaagcatttatgatgaagtcatggtgaaaagaagctgcttggagtatctttacaaaagaaactgtgaactgaattcagagaccatgagtacagaaaattttgtcaagatgattctgtctgaacttctccatagcgatgtttgaaaactaagtgatacagcacttgtgctttgaattcatggcatgctacgtag

SEQ ID NO: 563568 - DNA, 570 bp, Homo sapiens
aattaggagaggagtatcacatggatatgtagagtttagagtgataaatttatgatgaggcatataaatgcactatatattcaaagagatctctagaggtatgagtacagaaaaagcacagatatatctaattgtgcttcgtggcccacctcaactttaggaggtaaggtgaacacagggcacctgcaaaggatattgtgaagaagtcgtcagtgaggtagaaamccaggagggtgtgacagcctctaagacgagtaacaaaagcaatacaaggaggcagggatgatgatctgtttcagatgttattcacagtcaagtaaaataaaggttgagaatcattggacttagcaatatggaaacaataagtggtattaataaaagcatttatgatgaagtcatggtgaaaagaagctgcttggagtatctttacaaaagaaactgtgaactgaattcagagaccatgagtacagaaaattttgtcaagatgattctgtctgaacttctccatagcgatgtttgaaaactaagtgatacagcacttgtgctttgaattcatggcatgctacgtag

SEQ ID NO: 563569 - DNA, 489 bp, Homo sapiens
ttgttttgttttgttttgttttaaactctccaggtataggccgggtgcartggctcacgcctgtaatcccataactttgggaggccaaggcaggcagaacacctggggtcaggagttcaaaaccagcctgaccagccatggcaaaacccctatctctcctaaaaatacaaaaattagcttggcatggtggtgcatgcaagagaatcgcttgaacctgggaggcagaggtggcagtgagccgagagatcgtgccactgcactctagcctggggacacagcgagactcagtctgaaaaaaaaaaaaataaaataaaataaatgacctctccaagtatagccaggattgggaaccacagtgctaaacacataaaaacaaactagtctttatccccagctttttacaaaaatctaacttttaaaaatgaaacacaaaaatctaaatgtgttatttctgttagtaaacctgtctttgaaatccaaggcagcaat

SEQ ID NO: 563570 - DNA, 214 bp, Homo sapiens
ttttaggtcgttgatccattctaagttaatttttgtgtaccatgtgaagtagagggkccaatattactcttttacatgtggtattcaattgtcctatcatcttttgttaagactattattatccatttgtcttagaatcctagttaaaaaaaatcaattaatagtaaatgcagggtttatatctgaactgtccattccattgatttatatgttt

SEQ ID NO: 563571 - DNA, 597 bp, Homo sapiens
ttctctttcctttattattgtcatgtatttacttctacatttatttaaaaattgagaaggcattgtgtacagattcacctcatttatattaacacacatatgttaccattttcagttctctttatttatagcttcagttccatttttcatgtagaatcattcccttcagcttgaagaaatttctttggtatttcttttagtcagatatgctagtgatgaatcctccaagcttatttgtctgaaaatatctttatttcaacttcattgtgatagagtagtttttgttgtatttagaatactagtcagacacattttcttgtagcactataaaattgtgatttcattgtttcttgattcarttgtttctgttgagaaatcagctgtcgatcttatggtcacttttctgaagataacatattcttttccctggttactttaaaaaatttatctttatctttggtttccagtggtttcactgtaatgttatatgtggggtttttgtttgtttatactgcttggattacttgagcttcttgaatctgtagaatatcttcgatcagttttgaaaaattctcaacaatcaccagttaaagtact

SEQ ID NO: 563572 - DNA, 430 bp, Homo sapiens
acagagtctcgttctgtgacccaggctggagtgcagtggcatgatctcagctcactgcaacctccgcctccttagtttaagccattctctgcctcagcctcccaagtagctgggattacaggcgcatgccaccatgcctggctaatttttgtacttttagtagagacagggtttcaccatcttggccatgaactcctgaactcttgatacatccacctcggcctcccaaagtggtggrattacaagcgtgagccaccgtgtccggcctaggtgtgttttttaattggtgttcatccatacagtcatttttggattattaaattagaagattatgacatcttaaattgatatttatttcctaaatctctttgttgggttaagtccattctgatataagagaagtggaatgatgacttagcaggtggaacca

SEQ ID NO: 563573 - DNA, 430 bp, Homo sapiens
acagagtctcgttctgtgacccaggctggagtgcagtggcatgatctcagctcactgcaacctccgcctccttagtttaagccattctctgcctcagcctcccaagtagctgggattacaggcgcatgccaccatgcctggctaatttttgtacttttagtagagacagggtttcaccatcttggccatgaactcctgaactcttgatacatccacctcggcctcccaaagtggtggaattacaagcgtgagccaccgtgtccggcctargtgtgttttttaattggtgttcatccatacagtcatttttggattattaaattagaagattatgacatcttaaattgatatttatttcctaaatctctttgttgggttaagtccattctgatataagagaagtggaatgatgacttagcaggtggaacca

SEQ ID NO: 563574 - DNA, 350 bp, Homo sapiens
tggtctgaggtgcctgacgtccaggcattcttttacacatcagtcccttcctagtctctgtgcccagtgcaactcgtcccaaatcttccttctttccctccckcctgtcccctcagtcccaaccccaagcatcactgagtctttctaatcttccttttctacagacccatctgatctctcccctccttgccagcccaagctaggtcccaattcttcctcagcctccgctcctccaccctgtaatctttttatcgcctcccctcctcacacctggtctggcttacagtttcattctgtgactagccctcccccacctgcccagcaatttactcttaaaaaggtggctggag

SEQ ID NO: 563575 - DNA, 350 bp, Homo sapiens
tggtctgaggtgcctgacgtccaggcattcttttacacatcagtcccttcctagtctctgtgcccagtgcaactcgtcccaaatcttccttctttccctccctcctgtcccctcagtcccaaccccaagcatcactgagtctttctaatcttccttttctacagacccatctgatctctcccctccttgccagcccaagctaggtcccaattcttcctcagcctccgctcctccaccctgtaatcttttyatcgcctcccctcctcacacctggtctggcttacagtttcattctgtgactagccctcccccacctgcccagcaatttactcttaaaaaggtggctggag

SEQ ID NO: 563576 - DNA, 350 bp, Homo sapiens
tggtctgaggtgcctgacgtccaggcattcttttacacatcagtcccttcctagtctctgtgcccagtgcaactcgtcccaaatcttccttctttccctccctcctgtcccctcagtcccaaccccaagcatcactgagtctttctaatcttccttttctacagacccatctgatctctcccctccttgccagcccaagctaggtcccaattcttcctcagcctccgctcctccaccctgtaatctttttatcrcctcccctcctcacacctggtctggcttacagtttcattctgtgactagccctcccccacctgcccagcaatttactcttaaaaaggtggctggag

SEQ ID NO: 563577 - DNA, 465 bp, Homo sapiens
tccaggggtaggaaagtccagttccctttccttggtttggacaaccttgtggtataaagtatattccagagttcccatgcaagacaacttttgtctgaggctgcactgtgccaggcttccttctctttcctgtcctgaccttcgtttataaacacttgcatacaagtcttcatctcctagcttaagacagtctcctcaatgtgtgtgcacaggtcgatyacttggcaaaaaaatccaataaaaatattagaactcagagaataaatgctctattcacctctgaatttcactagtggatattgtactttcaaaaaatgcaattatgaaagtattcaatgtaatccagagagaatagagagagcctgattgcactgcagtttcaggctcttcctaccaaaaattcagttttgagtgtgtgtttcccaaaatatacactgttttaaaatttcaaattcataaaaactt

SEQ ID NO: 563578 - DNA, 602 bp, Homo sapiens
tatcatttcacagactaatgccatggaatttttggcttctaaggacatagatagatcacttttttttttttttttttttttttttttgcaaatcagcctctataattggacataagtgatatgagacctttttacaaagcatctgctactttttctgttgaaacgtttactaaatcttgctccaaaagagcaaggagataataaaggctctttactcttttctggttttcataaaaattctgkgataaaaccctgttttttcactattggaaagagtaaacacatgaactatttagtatatatagatcccgaatacagagtggtggtgaataaaaactttttcctttccctattcccagaatgtgtaaattatttaatagagactttgctaaacttttaccacaactaaaaattcctcagtattaaagctcagtgaaaagaaatctcagtgcctgaagacaaggaaatcaaaccatgtgacagtcccatatgcaactccaaatctgtcctcataactgtctgtagagctcacaaaagagtcacacatgtagctattggaagaatatcttacacaatttggcacacaagttctaagattagca

SEQ ID NO: 563579 - DNA, 542 bp, Homo sapiens
gctgaataggaacagctccggtctgcagctcccagcgagatcaacrcagaagatgggtgatttctgcatttccaactgaggtacccatttcgtcttattgggactggttggacagtgggttcagcccatggagggcgagcttaagcagggtggggcatcgcctcacccgagaagcacaagggatcaggggattgcccttccccaggcaagggaagccgtgacagactgtaccgggaagaatggtgcactccagcccagatactgtgcttttcccacggtcttctcaaccagcgaaccaggagattccctctggtgcctactccaccagagccctgggtttcaagcaaaaaactgggcagccatttgggcagacaccgagctagctgtaggagtttttatgtttgtttgtttcataccccagtggcacctggaacaccagcaaaacagaaccattcactcccctggaaaaagggctgaagccagggagccaagtggcctggcttggcaggtcccatcctcctggagcccagcaagcttagatc

SEQ ID NO: 563580 - DNA, 550 bp, Homo sapiens
tagaagaaaaactaacaaacagaaaagaatagtatcaacatcaccaaaaatggacgtccactcagagaccccatccaaaggtcaccaatgtgaaagaccaaagacagataaatccacgaagatggggagaaaccagtgcaaaaaggctgaaaattccaaaaaccgggacacgtcttctcctccaaaggatctaactccttgctagcaagggaacaacacgggatagagaatgaatttgacaaatcgacagaagtagacttcagaagttgggtaataatgaactcctctgagctaamggagcatgttctagcccaatgcaacgaagctaagaaccttgaaaaaacggttagaggaatttctaactagaataaccagtttagagaagaacataaatgacctgatggagctgaaaaacacagcatgagaacttcatgaagcatacacaagtatcaatagcccaatcaattaagcagaagaaaggatatcagagattgaagatcaactcaatgaaataaagtgaggagaaaaatgagtgaaaagaaacacacaa

SEQ ID NO: 563581 - DNA, 583 bp, Homo sapiens
ttgcatatatatactataaatattggagttcaaaatacacatttccagatttcatagactcgtgaagaacacaaatctaacttaatyacactcagatctttcttttctaaaagaaaaaagattttgtgtagaacaaatgagcctctaaaatcacattaatgagtctttaccatttattcatagaaaatcatcatgtggaaagatgatcattatatcaaattagtctaatgagaagatctttctaattcattcatcctttatagaatttactataacaataataagaaaagaggatttgaggcctgagagaaaccactatccagaagaatgatttccatataacccaaacaaaacattgcttaagcccacaaatatgggtgacagtctttcgtagaagatctttacaactatcgaataaaatgatttgccatatcaataaagcaccagaatgcaacatcatgaaaagttttcttgctaaaggccatgctgtgacaatttcctaagtttttcctaagcttacttctcaatattgccaaattcacattttaagcaacagtttcattagtctttcatattcacaaaa

SEQ ID NO: 563582 - DNA, 583 bp, Homo sapiens
ttgcatatatatactataaatattggagttcaaaatacacatttccagatttcatagactcgtgaagaacacaaatctaacttaatcacactcagatctttcttttctaaaagaaaaaagattttstgtagaacaaatgagcctctaaaatcacattaatgagtctttaccatttattcatagaaaatcatcatgtggaaagatgatcattatatcaaattagtctaatgagaagatctttctaattcattcatcctttatagaatttactataacaataataagaaaagaggatttgaggcctgagagaaaccactatccagaagaatgatttccatataacccaaacaaaacattgcttaagcccacaaatatgggtgacagtctttcgtagaagatctttacaactatcgaataaaatgatttgccatatcaataaagcaccagaatgcaacatcatgaaaagttttcttgctaaaggccatgctgtgacaatttcctaagtttttcctaagcttacttctcaatattgccaaattcacattttaagcaacagtttcattagtctttcatattcacaaaa

SEQ ID NO: 563583 - DNA, 594 bp, Homo sapiens
gtaatttttccacaaatgacacaagaaatattggatattcagataaagacattgaactttgacttaaactttggaccatttacaaaaattatatcaagtttatcgccaacctaaatgttaaacccaaaaccattaaacatatagaagggaacatagaagaaagccttttttttttttttttttttttttttttttttgagacagagtctcattctgtcaccaggctggagtgcagtgatgcgatcttggctcactgcaacattcacctcctgggtttaagcaattcccctgcctcagcctcctgagtatctgggactacaggtgtgcagcaccatgcccagctaattttttgtgttttagtagagacagggtttcaccatgttggccaggatggtcaygatctcctgacctcataatccacccacctcgccctcccaaaatgtttcttaattacaacaagaaaagtacaattcataaaagaacaaattgataaatggacttcatcatttttgttctttgaaataacattgtttaaaaatgaaaagggaagctatatactgggagaagataatttcaaatcatacagctaataaa

SEQ ID NO: 563584 - DNA, 594 bp, Homo sapiens
gtaatttttccacaaatgacacaagaaatattggatattcagataaagacattgaactttgacttaaactttggaccatttacaaaaattatatcaagtttatcgccaacctaaatgttaaacccaaaaccattaaacatatagaagggaacatagaagaaagccttttttttttttttttttttttttttttttttgagacagagtctcattctgtcaccaggctggagtgcagtgatgcgatcttggctcactgcaacattcacctcctgggtttaagcaattcccctgcctcagcctcctgagtatctgggactacaggtgtgcagcaccatgcccagctaattttttgtgttttagtagagacagggtttcaccatgttggccaggatggtcatgatctcctgacctcataatccacccacctcgccctcccaaaawgtttcttaattacaacaagaaaagtacaattcataaaagaacaaattgataaatggacttcatcatttttgttctttgaaataacattgtttaaaaatgaaaagggaagctatatactgggagaagataatttcaaatcatacagctaataaa

SEQ ID NO: 563585 - DNA, 615 bp, Homo sapiens
atttttgtaaatgttgtctggaaaggaaatgagagggctttggggtttttggggtgctgtcccctttcaattttgaacaaaagatattgtttcactaggctaacttcacagcaagtagctgagtcagggctagaacccagaattcaaaaatatttgtctccctgtcattgaatcacactgtactcaaatggttagctctctcttatgttagtatagcatggcttaccagatcatctagggttgttaacatttagtcttacatcacagagaagaaggctggaatattttatgtaataaactccatttgtagcaccactggaatttcaaatatcgtctgaagccaccaacagattagcttcagacatagcaaaaacttaggactgaggcacacattttgcagttctcttgaataagaaagtttgtatccacattttaagtgtcagacacgttgctaattatgattttagcatgtctctgatgaagggagtaaaataattctggtaaatgcattgaactcrtatgttgcatgattttccttgatctctttagatttgcaaaagtattagtatacaggtcttttgaccttgttcttgatgtatttttaaatgacattta

SEQ ID NO: 563586 - DNA, 546 bp, Homo sapiens
cagtggcacagtcttggctcactgcaacctctgcctcctgggttcaggcaattctcctgcctcagcctcctgagtagcagggactacaggcaccygccaccacacctgactaattttttgtatttttagtagagacggggtttcactgtgttagccaggatggtctctatctcctgacctcatgatccggctgcctcggcctcccaaagtgctgggattacaggtgtgagccatcctgcctggccaggaactgccttttataaaaccatcagatctcataagacctattcactgtcacgagaacagcatgggaaaaacccatacccatgattcaattacctccagctgggtccctcccatgacacgtggagattatgggagctacaattcaagattgtcacaaaccatatcacatatcaatgtgaatgtactcaatgccactgagctatacactgaaaaatgattaaaatggtaaatttcatattatgtgtattttaccacaacaaaaaatagcacttacccctactgttgttaggagaactaaat

SEQ ID NO: 563587 - DNA, 222 bp, Homo sapiens
aatctatttaacaagacattagtcaagggtatatcttctggaccctcccagctgggatgagtaggtctaatgtgactaatccactccaccatcccartctccctaagcctttggatcccttcctctacattaaaccaagggagatcaggcatttccagcttgctcacagtgggccatcttttaatccatatttcagctaaccaagcaaataaactgtaagaa

SEQ ID NO: 563588 - DNA, 573 bp, Homo sapiens
tgatggataagaccctcaaaggtctgtcgtttggatcaagtgagacaatgtaaagggtagagctgggtgtggtgaccagactccacacactgcagagatctaggaatgggcattagatggtccatagatccactgacattataagcaattatttatatgttggtgatgagtatctcgaaaatgaataagaaccaatgttatgaagcacggtgcaaatttaaggtagggctctttctaggcatgctttttaaatcacagtgaataaaattctttttgtttgtttttagatgaaaaaataaccttggactcttttcactaagcagcagaattttaatcaaaagtttgggaggccaaagcaggtggatcacctgtcaggagtttgagaccagcctggccaacatggtgaaaccctgactctactaaaaatataaggattagccaggtgtggtgacaggcacctgtaatcccagcgacttgggaggctgaagcaggagaagcgcttgaaccygggaggcggcggttgcagtgagccgagatcatgccactgcactccagcctgggtgacagagtgaa

SEQ ID NO: 563589 - DNA, 573 bp, Homo sapiens
tgatggataagaccctcaaaggtctgtcgtttggatcaagtgagacaatgtaaagggtagagctgggtgtggtgaccagactccacacactgcagagatctaggaatgggcattagatggtccatagatccactgacattataagcaattatttatatgttggtgatgagtatctcgaaaatgaataagaaccaatgttatgaagcacggtgcaaatttaaggtagggctctttctaggcatgctttttaaatcacagtgaataaaattctttttgtttgtttttagatgaaaaaataaccttggactcttttcactaagcagcagaattttaatcaaaagtttgggaggccaaagcaggtggatcacctgtcaggagtttgagaccagcctggccaacatggtgaaaccctgactctactaaaaatataaggattagccaggtgtggtgacaggcacctgtaatcccagcgacttgggaggctgaagcaggagaagcgcttgaacctgggaggcggcggttgcagtgagccgagatcaygccactgcactccagcctgggtgacagagtgaa

SEQ ID NO: 563590 - DNA, 646 bp, Homo sapiens
tgtaggtgcactagtttttgtagcccaagttagttgatctgaaaccccaagagtttgcccacccagagaatgatgttctctcacttgaatagagagagacaccatctcatatataaatacaggaggatgtcttctcacatgtgagcacagagagatttttccagtatgaaaatgttgagttaaagtgttctggtgccaaggtcagtagtagttactgtttctcagggaaaagcccaactcaagggtatctactgttcaaccccattcctgtatcccatggctcttcctgaggtcattcccaaggagagcaaaagcctcatactcttatcttgtaaagagtcggaaacctgtggtaaaacaacatggcacatgtatacctatgtatcaaacctgcacattgtgcacatgtaccctagaacttaaagtataataaaaaaaagaaaaaaaacacgcaaaggaatattaatctcttggaggaaatctgcctctagctggaatcccagaagggttcttcccccagtcycccatcccatggcccctttgaaatcccactcttggtttgttcacctctagtctctccttagtaagctttctctagcataagaatgtcctgctataggaacaactgctgatgtggtgagaagat

SEQ ID NO: 563591 - DNA, 561 bp, Homo sapiens
attactttattgtagtaactgatacatatggatgatagaaaaaaataacagccttaaagtacattttaaattagacaataaaaatatttttaaatataggtctattttattttatttaagtttgagggtacatgtgaaggcttgttacataggtaaacaagtgtcatggaggtttgttktacagattattttattacccaggttattaagcccagtactcaatggttatcttttctgctcctctacctcctcccaccttcccccatcaagtagaccccagtgtctattttttccttctttgtgttcttaagttctcaacatttagcttccacttataagtgagaacacgaggtatttagttttctgttcctgcattagtttgctagggataatagcctccagctccatccatgtttttgcaaaagacatgatcttgttcttttttatggctgcatagtattccatggtgtatatgtaccacattttctttatccagtctatcattaatgggcatttaggttgattccatgcctttgctattgtaaatagttctgcaatgag

SEQ ID NO: 563592 - DNA, 561 bp, Homo sapiens
attactttattgtagtaactgatacatatggatgatagaaaaaaataacagccttaaagtacattttaaattagacaataaaaatatttttaaatataggtctattttattttatttaagtttgagggtacatgtgaaggcttgttacataggtaaacaagtgtcatggaggtttgttgtacagattattttattacccaggttattaagcccagtactcaatggttatcttttctgctcctctrcctcctcccaccttcccccatcaagtagaccccagtgtctattttttccttctttgtgttcttaagttctcaacatttagcttccacttataagtgagaacacgaggtatttagttttctgttcctgcattagtttgctagggataatagcctccagctccatccatgtttttgcaaaagacatgatcttgttcttttttatggctgcatagtattccatggtgtatatgtaccacattttctttatccagtctatcattaatgggcatttaggttgattccatgcctttgctattgtaaatagttctgcaatgag

SEQ ID NO: 563593 - DNA, 561 bp, Homo sapiens
attactttattgtagtaactgatacatatggatgatagaaaaaaataacagccttaaagtacattttaaattagacaataaaaatatttttaaatataggtctattttattttatttaagtttgagggtacatgtgaaggcttgttacataggtaaacaagtgtcatggaggtttgttgtacagattattttattacccaggttattaagcccagtactcaatggttatcttttctgctcctctacctcctcccaccttcccccatcaagtagaccccagtgtctattttttccttctttgtgttcttaagttctcaacatttagcttccacttataagtgagaacacgaggtatttagttttctgttcctgcattagtttgctarggataatagcctccagctccatccatgtttttgcaaaagacatgatcttgttcttttttatggctgcatagtattccatggtgtatatgtaccacattttctttatccagtctatcattaatgggcatttaggttgattccatgcctttgctattgtaaatagttctgcaatgag

SEQ ID NO: 563594 - DNA, 573 bp, Homo sapiens
actggctagccatatgcagaagattgaaactggacccctttctttcaccatgttaaaaaagtaactcaagatggactaaagatgtaagacctaaaactataaaagtttcatagaagaaaacctagaaacaccattttggacatcagccttggcaaaraatttatgacaaagtcaccaaaagcaattgtaacacaaacaaaaatggacaaacagggcctagttttaatttttaattaaattaaaacaggtaatagtcttgtttagtttgagtgtttaagtacaatgaagaacacatcgacttgttttctcatcttattgggaatttctaaataagcaactctgctatatgactcattaataaaacatatacttttgccctgtgaaaaacaccttgaagctgcttttatatatttatgacagatttcacttgctgtcatgactcatggatggtaataattataatttatttgaaggtcattgttttcttttcttagtatgggggtagttttaaatgagacattcaatctaagctgaaaattttaatgtactatatatatatatctggagtattta

SEQ ID NO: 563595 - DNA, 514 bp, Homo sapiens
tttccaggcagcatttatgaagccacatgagatgaggaaacactgctcattaagagagtgaaaaaagccattgctgtagaactgctaagtgtgagggaggaacaaagagttgaggtgaagatgtcatagaaggggttgcttgtatcttgcatgggcttagagttttaaatggagcaggatcatgaacatacccaattgaaaagatgaccctcactgcaatgagaagaatggattggagagcagcatgagtggacatgtgtaagccaataggaggccagtttaggagtttaggcaagagagagtggcagtttgagctagggtaacaatagtggaaatggagatgagatactggatttgagttcataagtacaggacttgaagttcaatttaatatggctttattgcgaaatgcctgggacactatcccttatcccttctctctttcttttctaaatgtctatttcataccttctctttttttcaacrctcttcctcctccgttctcactctcaga

SEQ ID NO: 563596 - DNA, 431 bp, Homo sapiens
gagccaccacacctggataacagttaaattctgtattttattttattttactgacaggctcttgctctgttgcccaggctggagtgcagtggcatgatcttggctcactgcaacctccacctccctggctcaggtgatcttcccacctcaagcctcctgagtagctgggaatacacacgtgtgccaccacaactggctaacttttgtatttttagtagtgatggggtttcatcatgttgcccaggctggactcgaactcctgggctcaagtgatctgcccacctcagcctcytaaagtgctgggatcacaggtgtgagccactgtgcctggccagttacattcttaaactgagagtatggggacattatgtatactttgagtatctggttagaggtctttcagacacaaaactggggatggaaaacattta

SEQ ID NO: 563597 - DNA, 623 bp, Homo sapiens
gttctcctgccacttttaaaagagagatatttactgtatactgaggaatatgttattatcattattcactagaattttaagtaattttatattatatagttaaggaataggttatttttkaacatggcattttcaatagagaagagcagttgtttgacattctttggcttttacacatttatgtgaattttgctaatttattttatcttaacacccaagacacaatatacatgtgcataacagcaccacatcagaaacagttattgaacaaggatcactctttataaatgaacacaaggtaaaatcctaacaattaaaaataataaaatactaataacagctaggtaaagggtttttttcaatgtactttaaacctacaacaagcaaagacatatgaaagactgtgtttctgtattcatacatctttgttgaaattagcttgactaaacacctacaagtaaattttttatcacattcattctcttagattttactgagtaaaatcagctttttactatgaaaatgtagctggctgcacaaaataccatcattttccttttaatagattctgtattgtctacatagttttttaatgctgttttatctaaaattttaaaaatata

SEQ ID NO: 563598 - DNA, 522 bp, Homo sapiens
cgccgcgccaggcgggagtgggcsgagagtctggatggggagagaggagcgctggattctgcccgcacccctgcgatcctgcccaggctttctgcagaggggcggggtgagagcagcaggagccgggagggcgggctaccctggcatgcactccttcccggccaacggaattgggactgagggtttggaagcttgcctgtgtctagacctcaccacgatcctaccttctctggccctaaccccatctttttccttcagcccctagtgaatccgacctccttccgcttttctcaggcaccccaacccacttcggcctcggggcctctctccacagccctccctgcctgcttgctcctcggcctccccacttcagctcatctttttaagcctgttctcttcttgacaatcagcagtggcctctcaccttttctaagccgggacagatgaccttgaggaaggggcaagaggggaacttgaaccttgtaactggacctcaagattacggaaaaggggggcagattt

SEQ ID NO: 563599 - DNA, 226 bp, Homo sapiens
acttgcccctgaaatgggaaataaaagactgaaatatataccctgtgttcagacttytcaggaggctgcctaagggaatgaccagtctcagggcatggacaggacccagcatactgttgatgcctggggactactggaaacaaaaaaaagaactcaggacatgctgcttcctcagaagacacatgttatgacagaaggacactggagggaacaagagattatgaat

SEQ ID NO: 563600 - DNA, 580 bp, Homo sapiens
ataccatcctgactcaggagaaattggtcacgtaaatcactttgtttcaagtgctttggcctctgagcatctcaaatggacacatacttcattggcttattaactcattgccggagtcactgaaggcccaaactacaacttcatgcctgaccacacaccaaggcttttttattgcttagttttctggctctttgcctattctgctctccctacccataaccatgtgagtatcatgtccagcaaactaacttactccttctctctgcccactacacacacacacacacacacacacacacacacacaccacactccacacgcacacatacacagagcatttttcatgggtatgttgtcagacagatttctctgttctgaaggctcatctccttagagaaccttaccgtgtcaatgttgcatttagtttagtttagtgttkttgttgttgttgttgttgttgctgtttttaaatcttgctctgttgcccacagtggcgcgatttcagctcactgcaacctctgccttttgggttcaagcaattctcctgccgcagcctgctgagtagctgggattacaggcc

SEQ ID NO: 563601 - DNA, 580 bp, Homo sapiens
cactcttgttgcccaggctggagtgcaatggtgccatctcggctcactgcagcctctcctcccgggttcaagcgattctcctgcctcagcctcctgaatagctggtattacaggcatgtgccaccatgcccggctaattttgtagtttttagtagagacagggtttctccatgttggtcagtctggtctcgaactcccaacctcaggtgatccgcccgcctcggcctcccaaagtgctgggattacaggcgtgagccaccacgcccgactgattcttatgtaactttttaaagagaaatgtcaatgtagatcctttgcccattttggggtctttggagttttttttttaattgagttgtaggagttctattatattctagctacaagtccttattagatatataacttaccaatattttctcacatttactggattatatttttacyttcctgatggtgtactttgaagcatgagctttaaattcaattaaacataatttccatcccatttttccaacaaggatgcctactttcaccactatttttcaacataatactggaagtcctggccagaacgatt

SEQ ID NO: 563602 - DNA, 532 bp, Homo sapiens
actctgggtagttcagctactgttccagaggtaacttacaaaccgactggcccagctatggaactccagcatggaattaataaaacaaaactgcttgttcgctgatttctcagccaacggcccccacttcaagacttactcagctgayggtcctcttcacttctcccccataaatgaactcagtaaagtgtttttgtctttgaatcctggtgccctagatggaccagggtttttgtggctgggtttgaattccagccccaccatggtgggggaccacggacctcatgttccttagctgtgaattgggcttattttaggcaaagtcatctggtgcctgtgaggatgttcagaaatgatgtgtaaagagccccaataatggaatttatccctattggtagtgctggtaccagttgtgatattagtcatagatgcaacactagcagcagagtgtcaggcccgattataacttttaggaacctgagcccatgcttctctcatgcacttcatttgttgagaggaaagggaacaagag

SEQ ID NO: 563603 - DNA, 624 bp, Homo sapiens
aaaggctagggaaaacaaaaacaaaaacgaaacaaccacagtaagagtctcactacttactttcaacaatagcaatgttcaagttaatcaccagaaaaaaaattagctctgtatgccaccaaaagatagccaaaattgttgtgtagtgtccctcttaacttrgatatgtgagtatcgctcaggtaagtacccttaagacaaattcttcccagagactgggtcaggaaaggctttctcctgatgaaactgtaggactccttccacttgacaatgagagctatgcaaaccttcatttcccctatttcactgctatgaggaagcttgggctcagttttatgctcaaatactattgtttgtctcagccagaatttcaacttttcttttttaaaaaatatttgtctttcattgtaaataaaccaccttaagtcccttttggaagaaggcacggtataaataaacaaaagacaggctgggcgtggtggctcatgcatgtaatcccaacactttgggaggccgaggtgggtggattatgaggtcaggagttcaagaccagcctggccaagatggtgaaaccctgtctctactaaaaatacaaaaaaattagccagacgtggtggcggacac

SEQ ID NO: 563604 - DNA, 540 bp, Homo sapiens
aatattttaagaaacaacaaaactcagtttagagtgagtcactgggcctgaccatggtggctaaactgaccacaaaagtttgtgaatagtctatatggtgtccttcaaacatctgcacaaaccttttatttccagtgctttgaacagaaataaacatagtcattaagccaaattctacattctacaaaacagatgaaaagttaaagcataacgttaagtccaaaacattagtgtggagtcctcagctgaatacctcttgccwgcatgcccatgtgagcagtcagttaaatgcctggtgtctgttatatgagcagtgggaaatctttgcatacaaaaaagtgtgagttgtactaaagtaaaatcagtattctggatcccttaatgtgcacataattaccacttaggcttctaagcgaaatgatttgctaatggcaactaaaatgtgacatggcccagagtgaaaaaattgattcataacttgggaaggtttgactagattgcccttaggcaagtgcctagagggctttcctgtctctccct

SEQ ID NO: 563605 - DNA, 540 bp, Homo sapiens
aatattttaagaaacaacaaaactcagtttagagtgagtcactgggcctgaccatggtggctaaactgaccacaaaagtttgtgaatagtctatatggtgtccttcaaacatctgcacaaaccttttatttccagtgctttgaacagaaataaacatagtcattaagccaaattctacattctacaaaacagatgaaaagttaaagcataacgttaagtccaaaacattagtgtggagtcctcagctgaatacctcttgcctgcatgcccatgtgagcagtcagttaaatgcctggtgtctgttatatgagcagtgggaaatctttgcatacaaaaaagtgtgagttgtactaaagtaaaatcagtattctggatcccttaatgtgcacataattaccacttaggcttctaagcgaaaygatttgctaatggcaactaaaatgtgacatggcccagagtgaaaaaattgattcataacttgggaaggtttgactagattgcccttaggcaagtgcctagagggctttcctgtctctccct

SEQ ID NO: 563606 - DNA, 590 bp, Homo sapiens
aaccccgtctctattaaaaatacaaaaaaattagccgggaatggtggcacacgcctgtaataccagctactcgggaggctgaggctggagaatcgcttgaacctgggaggcggaggttgcagtgagccgagatcatgccactgtactgcagcctgggtgacagagtgagacactgtctcaaaaaagaaaaaaaaaaagaaaggaaaataggaaacaaatattactaccacatgtaagagaataactgtttatgatagaaaaattgaaatgaatcataaaatttgggaaatgtctaaaattataaccataatatttgtaagtgaaaagctatattttatagcaaaataagaatatgtgtgtgtatgtttataaaagcatatattatrtttaggtgctgagtcaaaagtcaaatatattaaaaaagtattaagtagcatctatttgttggaacagccttcaaatataaactgtatatagattttgcattatcttttgaaataacaacttagctgaaaaaattatctttgagaccaaacagttttgatcttcaaggtggttttgaggtagcaagaaagagaatttctttggga

SEQ ID NO: 563607 - DNA, 531 bp, Homo sapiens
ctcaaactcctggactcaagtgatcatcccacctcagcctcccaaggagctgggacyacaggggcaaacaccaggttctgctctgataattctaaaccttgatacataaagtagagtcaggagatgggtttctaagagctttcattcatctgatttcccagcaccacgaacatggcaaattcagattatcgcagcagaactgtagcacaagggcaagaatgaccaaaggcccttcaaagcctggggttgaccaagaagaaattcctatttctgagcagttattctgaggcaggctctgattcagtcaactggatgaagaagtgagcagtatttccacccagaagacccaggcagcctttaacttcatgacagcttgtctttcaaaccgcaaaccagaacatggccaaaatcccataaggtgcagtccccctgctctgaggtatagcattattctctacgaaactttagaagaaggaaagtgtgaaagtctgagagtctagcctacccccatcccaggaggccattatgggc

SEQ ID NO: 563608 - DNA, 544 bp, Homo sapiens
ttctttcagttttgcagagccttsactaatcatgttgcatatcaatgataaaaataacagagaatggccaaagtacaaattcataaggagttccctttgctagattacatgacaaatctgctttttatatgatatttctaaagtgacttgcagataagatggagatagaaattaattgcttgggaaatagagattaagcatttcacttacacctttatggactttcattacaatttgccttcaatttattgctttcataacaaagtatttactgagtgcaggacatttaatccaaaaagcatgtttactgtgttcacattgcttcattacaaatttaagaattatgtgtggtaagcgtagttcctttaaatctcatgagacttcttttaaaatttttgtgtcgtaaagttttgcctaggtgggagaaggaacaagggagactctttacatatataattgccttttgccttgtgggagaagagtacatgtaaatgaacaggcatgggcagatcaagagttgagaaaaggataccaatataattca

SEQ ID NO: 563609 - DNA, 395 bp, Homo sapiens
cctttgttttttgcataatgtggtataactaaataattctgagcaggaaagtgaaacgatctgctccatagttaaagaaaataactggcagcaatgtggaggtgagataggcaggcaagtgtggataaagataaaattgaaaagccactgcaaagatttaggtaagacaccataagctgcggaactaagacaaaggcactcataattttaaaatgaggatgggaattaactaacagaactgataggaagtgttaacatataaaaggggagtctaagatgggagtctaagatggcttccaattttcacttagatgggtaagggtaccattaayttaagataattaatacagaaaaattaatcagatttggagtttatcaaggtttgcttttggttg

SEQ ID NO: 563610 - DNA, 625 bp, Homo sapiens
tatgtccccttatctctagcccctgctactgacttagttcaggtcctccctgtagctcacttatactgtctaaaaaatccttctgaccartgttcaccatccagtctttctccctgccgtccatcctccccactgctgctcacatgatcttcctaaaacgtgactctaacacctgtctaaaacactccaacagctcctcattgcttccaggattacatcagagctctctaatgcctcctagcatttgcacacaagatttcctttacctggaatgtttcttccttccaggctccccacctagactccttcattcagcctctggtactctcccaattcttcttttctttttttttctttttagacaaggtctcactctgtcactgaggctggaatgcagtggtatgattgcacctcaccacagcctcgacctccaggactcaagcaatcctcttacctcagcctcccttgtagctaggactacaggtaccacatctggcttaatttttaaaaattatttttgtagagacagggtcttgctgtgttgcccaggctggtctcgaactcctggcctcaggcaatcctcctacttcagcctcccaaagtgctaggattacaggcgtgagcc

SEQ ID NO: 563611 - DNA, 625 bp, Homo sapiens
tatgtccccttatctctagcccctgctactgacttagttcaggtcctccctgtagctcacttatactgtctaaaaaatccttctgaccaatgttcaccatccagtctttctccctrccgtccatcctccccactgctgctcacatgatcttcctaaaacgtgactctaacacctgtctaaaacactccaacagctcctcattgcttccaggattacatcagagctctctaatgcctcctagcatttgcacacaagatttcctttacctggaatgtttcttccttccaggctccccacctagactccttcattcagcctctggtactctcccaattcttcttttctttttttttctttttagacaaggtctcactctgtcactgaggctggaatgcagtggtatgattgcacctcaccacagcctcgacctccaggactcaagcaatcctcttacctcagcctcccttgtagctaggactacaggtaccacatctggcttaatttttaaaaattatttttgtagagacagggtcttgctgtgttgcccaggctggtctcgaactcctggcctcaggcaatcctcctacttcagcctcccaaagtgctaggattacaggcgtgagcc

SEQ ID NO: 563612 - DNA, 625 bp, Homo sapiens
tatgtccccttatctctagcccctgctactgacttagttcaggtcctccctgtagctcacttatactgtctaaaaaatccttctgaccaatgttcaccatccagtctttctccctgccgtccatcctccccactgctgctcacatgatcttcctaaaacgtgactctaacacctgtctaaaacactccaacagctcctcattgcttccaggattacatcagagctctctaatgcctcctagcatttgcacacaagatttcctttacctggaatgtttcttccttccaggctccccacctagactccttcattcagcctctggtactctcccaattcttcttttctttttttttctttttagacaaggtctcactckgtcactgaggctggaatgcagtggtatgattgcacctcaccacagcctcgacctccaggactcaagcaatcctcttacctcagcctcccttgtagctaggactacaggtaccacatctggcttaatttttaaaaattatttttgtagagacagggtcttgctgtgttgcccaggctggtctcgaactcctggcctcaggcaatcctcctacttcagcctcccaaagtgctaggattacaggcgtgagcc

SEQ ID NO: 563613 - DNA, 582 bp, Homo sapiens
aaccctctgccttgagattgctgtactgtggtgactacaagggaatacaattagtcatgttcactagtaacttgttaaatcagctttataatcatgagaaactaagaaagttatgaggagccaataatgccaaggtgataaaatatgaaggcrcatttgtaaatgtgaattactcagaatacaaggtagataatttattgttgcctgttgctataataattccttacgaatgagactttattaatttgtagtttgagatgatttggaatcttggctgagatttgtccttctattcactgtgaagatgagatttggaaagcaagttagcagccaaaaatgaggataatatttttgaaagtccaagtcctacattctcattcttttttttttttttaatgttttttttttattatactttaagttttagggtacatgtgcacattgtgcaggttagttacatatgcatacatgtgccatgctggtgcactgcacccactaacgtgtcatctagcattaggtatatctcccaatgctatccctcccccctcccccgaccccaccacagtccccagagtgtgatat

SEQ ID NO: 563614 - DNA, 582 bp, Homo sapiens
aaccctctgccttgagattgctgtactgtggtgactacaagggaatacaattagtcatgttcactagtaacttgttaaatcagctttataatcatgagaaactaagaaagttatgaggagccaataatgccaaggtgataaaatatgaaggcgcatttgtaaatgtgaattactcagaatacaaggtagataatttattgttgcctgttgctataataattccttackaatgagactttattaatttgtagtttgagatgatttggaatcttggctgagatttgtccttctattcactgtgaagatgagatttggaaagcaagttagcagccaaaaatgaggataatatttttgaaagtccaagtcctacattctcattcttttttttttttttaatgttttttttttattatactttaagttttagggtacatgtgcacattgtgcaggttagttacatatgcatacatgtgccatgctggtgcactgcacccactaacgtgtcatctagcattaggtatatctcccaatgctatccctcccccctcccccgaccccaccacagtccccagagtgtgatat

SEQ ID NO: 563615 - DNA, 582 bp, Homo sapiens
aaccctctgccttgagattgctgtactgtggtgactacaagggaatacaattagtcatgttcactagtaacttgttaaatcagctttataatcatgagaaactaagaaagttatgaggagccaataatgccaaggtgataaaatatgaaggcgcatttgtaaatgtgaattactcagaatacaaggtagataatttattgttgcctgttgctataataattccttacgaatgagactttattaatttgtagtttgagatgatttggaatcttggctgagatttgtccttctattcactgtgaagatgagatttggaaagcaagttagcagccaaaaatgaggataatatttttgaaagtccaagtcctacattctcattcttttttttttttttaatgttttttttttattatactttaagttttagggtacatgtgcacattgtgcaggttagttacatatgcatacatgtgccatgctggtgcrctgcacccactaacgtgtcatctagcattaggtatatctcccaatgctatccctcccccctcccccgaccccaccacagtccccagagtgtgatat

SEQ ID NO: 563616 - DNA, 620 bp, Homo sapiens
catgaggttacttggggttgcttgaggagctcttgataaaaagagaaaggggaataatataaaggggtcacagcaatgatggagccttggaaaaagtatggaagtcctctttgggcatagtggctaagtgtagtcgagatttttaatctcatgaatatgaccaatctacctggatatctgagtcattcacactaaatgtgccactttttcttaaatagcagtacccaaccatttgcaacacccccaatttcactttgcctatgatgaggaagaaggagcacctaagaggactactgtacccatgccaaatacctcaactccacagtgttcaactctgctggcctcggctaatgatgatcatatagctaatttatttttaagtctgtctgttttggaagaggtggagtaattatttaaaggtcatttacaaaatgcaataggagtaacaatcataggtcttgggcctttaggarctcacatttttaacagagaaacagtgcttatgaagaagtagtagccagagaccctataagacaagggttaaattattggtacaaaatataatgttttaattgctaataatttcattctgcactatgttaattaggaagaaaagtact

SEQ ID NO: 563617 - DNA, 427 bp, Homo sapiens
aaacaaaaagtttgtcaacctttaaatatgctttaaaaactaaagtaaaccrtggacaaagaacacgagaaaggaaaataatgtataaacaaagtgaaagtatcagtaaatagaaaacatgaaaaattctggagctgaaaaatttcttagagggctttacagattttaaacaggcagaagaatcagcaaatttgaaaataggacaaatgtaattatccagtccgaggaacagaaagaaaaaagaatgaagagtgaacagagcttgagggatctgtggcatgctatcaagttaccaacatatgcattaaaggagttccagaaaacgaaaagaaaaaggcagaaataatatttgaggaaataatggctgagacttcccaaattcaatgaaatacatgagctacacattcaagaagatcaacaaattata

SEQ ID NO: 563618 - DNA, 427 bp, Homo sapiens
aaacaaaaagtttgtcaacctttaaatatgctttaaaaactaaagtaaaccatggacaaagaacasgagaaaggaaaataatgtataaacaaagtgaaagtatcagtaaatagaaaacatgaaaaattctggagctgaaaaatttcttagagggctttacagattttaaacaggcagaagaatcagcaaatttgaaaataggacaaatgtaattatccagtccgaggaacagaaagaaaaaagaatgaagagtgaacagagcttgagggatctgtggcatgctatcaagttaccaacatatgcattaaaggagttccagaaaacgaaaagaaaaaggcagaaataatatttgaggaaataatggctgagacttcccaaattcaatgaaatacatgagctacacattcaagaagatcaacaaattata

SEQ ID NO: 563619 - DNA, 473 bp, Homo sapiens
ttaaaccaagttttaaaaataacaggcacatattacatgaaagaaatcaaggaaatgtctcgggaagaaaaaaatcttagtgttaaaattcctaaatatcagtatagtcattatatattgttcaaaaatagcaatattctgattagttatatgtttgtttgaaaataaaataatttggtaaatttcccacatatttagtctagtacttagtcttaatataaaaagctggatttgccagcagaaaattgtaattacttttttatgaagtaaacacacattatatcactatcattgcatggaagagaaagtgaacaaaaaaagattaaggaataaaaaaaagaatatcactatcatataactacatacattaacaaagagacaaacatwtcccactggagattaggagtttagcagaagtctctgaaaatactaaaaaccgaaacaaaattaataattgctttttgtttgtttgt

SEQ ID NO: 563620 - DNA, 473 bp, Homo sapiens
ttaaaccaagttttaaaaataacaggcacatattacatgaaagaaatcaaggaaatgtctcgggaagaaaaaaatcttagtgttaaaattcctaaatatcagtatagtcattatatattgttcaaaaatagcaatattctgattagttatatgtttgtttgaaaataaaataatttggtaaatttcccacatatttagtctagtacttagtcttaatataaaaagctggatttgccagcagaaaattgtaattacttttttatgaagtaaacacacattatatcactatcattgcatggaagagaaagtgaacaaaaaaagattaaggaataaaaaaaagaatatcactatcatataactacatacattaacaaagagacaaacatatcccactggagattaggagtttagcagaagtctctgaaaatactaaaaacygaaacaaaattaataattgctttttgtttgtttgt

SEQ ID NO: 563621 - DNA, 473 bp, Homo sapiens
ttaaaccaagttttaaaaataacaggcacatattacatgaaagaaatcaaggaaatgtctcgggaagaaaaaaatcttagtgttaaaattcctaaatatcagtatagtcattatatattgttcaaaaatagcaatattctgattagttatatgtttgtttgaaaataaaataatttggtaaatttcccacatatttagtctagtacttagtcttaatataaaaagctggatttgccagcagaaaattgtaattacttttttatgaagtaaacacacattatatcactatcattgcatggaagagaaagtgaacaaaaaaagattaaggaataaaaaaaagaatatcactatcatataactacatacattaacaaagagacaaacatatcccactggagattaggagtttagcagaagtctctgaaaatactaaaaaccgaaacaaaattaataattgytttttgtttgtttgt

SEQ ID NO: 563622 - DNA, 592 bp, Homo sapiens
agctattcacaggcacgatcccactactgatcagcacaggagttacttatgacctgctccatttccgacctgggctggttcacccttccttagcaaatctggtggtgccccgctcccaggaggtcaccatattgatgccgaacttagtgtgaacacctgatcggcatagcacactacggcccagaatgcctggcctcaaacgatcctcctgccttaggctccctagtagctgagactacaggtgtttgccaccacgcctgctagatacatttttatatctctwcttagtcattgcttcctttctactgtattcccatcttattgttagacacaactcatctttaagtcggtaaaaggaaaaagccctcaagctcatcacatttcctttagcgattttcttgatgcctctcctggttctgaaggtcacatgatatatggctacatgagtttcacaatccatacgccacttggaagactgacagagagacttaggtcaattaagaaacaacgattatgagaaagttttcctaaactcctattacttagaaatcctctgtttctacacacaattacagatttagacaaccaaact

SEQ ID NO: 563623 - DNA, 592 bp, Homo sapiens
agctattcacaggcacgatcccactactgatcagcacaggagttacttatgacctgctccatttccgacctgggctggttcacccttccttagcaaatctggtggtgccccgctcccaggaggtcaccatattgatgccgaacttagtgtgaacacctgatcggcatagcacactacggcccagaatgcctggcctcaaacgatcctcctgccttaggctccctagtagctgagactacaggtgtttgccaccacgcctgctagatacatttttatatctctacttagtcattgcttcctttctactgtattcccatcttattgttagacacaactcatctttaagtcggtaaaaggaaaaagccctcaagctcatcacatttcctttagcgattttcttgatgcctctcctggttctgaaggtcacatgatatatggctacatgagtttcacaatccatacgccacttggaagactgacagagagacttaggtcaattaagaaacaamgattatgagaaagttttcctaaactcctattacttagaaatcctctgtttctacacacaattacagatttagacaaccaaact

SEQ ID NO: 563624 - DNA, 541 bp, Homo sapiens
gctataaccttgagggctattgcattagcaactagtcagtaagtacgaatcaaacctctccaaatgtgtgattggattacatttctccctttaggagactagagcatttgaaattttttcttttttttcagtagagacgaggtttcactatgttggccaagctggtctcaaactcctgacctcaagtgatctgcccaccttggccctccaaagtgctgatgtgagctaccatgcctagccagagactagactatttgaaaagtaaattctcagttaccctataaccctaatgcctggcacagtgacgggcagacttgcaacatttcatgggtggatgcactgaaagattgayctatgggttccagagtttccacttcatttgagtgttatttgctaaaaaatacaatgaaagtagaatttacgactgaacttaaagatctagtgtatgcattacttactttaatgtaatttaaatattcacattatcacttaaattttaatattgcattctgtttcactggattattatataaggtaatat

SEQ ID NO: 563625 - DNA, 584 bp, Homo sapiens
cctttgacaaaattcaacagcccttcatgctaaaaactctcaacaaactaggtattgatgggacgtacctcaaaataataagagctatttatgacaaacccacagccaatatcatactgaatgagcaaaaatcggaagcattccctttgaaaactggcacaagacaggatgccctctctcaccactccttttcaacatagtgttggaagttctggccaggacaatcaggcaggagaaagaaataaaggatattcaattaggaaaagaggaagtcaaattatcccagtttgcagatgacatgattgtatatttagaaaaccccatcttcccagcccaaaatctccttaagctgataagcaacttcagcaaagtctcaggatacraaatcaacgtgcaaaaatcacaagcattcctatacaccactaacagacagagagccaagtcatgagtgaactcccattcacaattgcttcaaagagaataaaatacctaggaatccaacttacaagggatgtgaaggacctcttcaaggagaactacaaatcattgcgcaatgaaataaaggaagacacaaacaaatggaa

SEQ ID NO: 563626 - DNA, 588 bp, Homo sapiens
gcagatcaccaggtcaggagttcaagatcagcctgaccaatatgctgaaaccccatctgtactaaaaatacaaaaattaaccaggaatgatggcatgcacctataatcccagctactcaggaggctgaggcaggagaatccctcaaacctgggaggtggaggttgcagtgagccaagatcgcaccactgcactccagtctgggtgacagagcaagactctgtctaaaatattaaaaaaaaaaaaaaaaaaaaacacttctcagaggtatgaaagatgacacaaacaaatggaaaaaaaaattccatgctcatggataggaagaatcaatatcattaaatggccaaactgcccaagcaatttgcagattcagtgcattcccatgaagttaccaatacactaagcaaaaagaacaaaagtagagtcatcatgctacccartgtcaaactatactacaaggctacagtaaccaaaacagcatggtacttgtacaaaaatagacacatagaccaaagaacagaatagagagacccaaaacaatgctgcatacctacagccatctgatcttcaacaaagctgaaaaaaacaag

SEQ ID NO: 563627 - DNA, 613 bp, Homo sapiens
agacctatctttgttctctggataaagagtagtcaattgaaagtaaagattcttgaagaaggcatctttcataattacttaaagtcatttgaaaatgccaccagactgacactatgtggtatgaaaggaagcactacygttaacttcattagggagagaaaacttgagccctagcactggtttctattttttgcagtaacttgatcccagacatttcttcctctatacaactacgtcaatcaaactttcacaaagttgttgtgaaacccaaaagcaaaaagtctttataaagtgacatacaaatataagaggtgatgattatatcttgtaatatggctgtgtagtttggctaaatatatcacaactggtgcttcccatgaagaaatctcagacatggacagaacctggatctggttcacaagccagtactacttatcttctccccacaagatgcggccagagacacacttccaacattactctgcctgcttggatgatgggaaatgtaaaaacaaacaaacaacaaacaaataaaaaacacagatacaaacaaacaaaaacctcagggaaagaaaagagacataaaaagtctcttttcacttttcactgagtt

SEQ ID NO: 563628 - DNA, 596 bp, Homo sapiens
tgggtctgttcctaactaaatgtcacatcgtctccattggcctccatttccttattagtaaaatgaccggttacctttaaaatcccatccaactctgctgccctctctcagctggtttcttcaactatgtagtagagatatgttactgtgaagtttaaggagtttctttaaaaagaccttttacccctagcaaactaatgcaggaacagaaaacsaaacactgcatgttctcatttataagtgggggctgaacaatgagaatacatgaacacagggagggcaacaacacacactggggcctgtaggggtagggggccctgggggagggagagcatcaggataaatagctaatgtatgcagggcttaataccttggtgatgggttgataggtgcagcaaaccaccatggtgcatgtttacctatgtagcaaacctgcacatgtatcctggaacttaaaataaaataaaatttaaaaaaactaaaatgtaatacttacgtaagacatacttattacaaataggacttttatgaaaaatggagggtatccttacagctagacgtaggaagggacatagggttattgcttatccccactt

SEQ ID NO: 563629 - DNA, 596 bp, Homo sapiens
tgggtctgttcctaactaaatgtcacatcgtctccattggcctccatttccttattagtaaaatgaccggttacctttaaaatcccatccaactctgctgccctctctcagctggtttcttcaactatgtagtagagatatgttactgtgaagtttaaggagtttctttaaaaagaccttttacccctagcaaactaatgcaggaacagaaaacgaaacacygcatgttctcatttataagtgggggctgaacaatgagaatacatgaacacagggagggcaacaacacacactggggcctgtaggggtagggggccctgggggagggagagcatcaggataaatagctaatgtatgcagggcttaataccttggtgatgggttgataggtgcagcaaaccaccatggtgcatgtttacctatgtagcaaacctgcacatgtatcctggaacttaaaataaaataaaatttaaaaaaactaaaatgtaatacttacgtaagacatacttattacaaataggacttttatgaaaaatggagggtatccttacagctagacgtaggaagggacatagggttattgcttatccccactt

SEQ ID NO: 563630 - DNA, 596 bp, Homo sapiens
tgggtctgttcctaactaaatgtcacatcgtctccattggcctccatttccttattagtaaaatgaccggttacctttaaaatcccatccaactctgctgccctctctcagctggtttcttcaactatgtagtagagatatgttactgtgaagtttaaggagtttctttaaaaagaccttttacccctagcaaactaatgcaggaacagaaaacgaaacactgcatgttctcatttataagtgggggctgaacaatgagaatacatgaacacagggagggsaacaacacacactggggcctgtaggggtagggggccctgggggagggagagcatcaggataaatagctaatgtatgcagggcttaataccttggtgatgggttgataggtgcagcaaaccaccatggtgcatgtttacctatgtagcaaacctgcacatgtatcctggaacttaaaataaaataaaatttaaaaaaactaaaatgtaatacttacgtaagacatacttattacaaataggacttttatgaaaaatggagggtatccttacagctagacgtaggaagggacatagggttattgcttatccccactt

SEQ ID NO: 563631 - DNA, 596 bp, Homo sapiens
tgggtctgttcctaactaaatgtcacatcgtctccattggcctccatttccttattagtaaaatgaccggttacctttaaaatcccatccaactctgctgccctctctcagctggtttcttcaactatgtagtagagatatgttactgtgaagtttaaggagtttctttaaaaagaccttttacccctagcaaactaatgcaggaacagaaaacgaaacactgcatgttctcatttataagtgggggctgaacaatgagaatacatgaacacagggagggcaacaacacacactggggcctgtaggggtagggggccctgggggagggagagcatcaggataaatagctaatgtatgcagggcttaataccttggtgatgggttgataggtgcagcaaaccaccatggtgcatgtttacctatgtagcaaacctgcacawgtatcctggaacttaaaataaaataaaatttaaaaaaactaaaatgtaatacttacgtaagacatacttattacaaataggacttttatgaaaaatggagggtatccttacagctagacgtaggaagggacatagggttattgcttatccccactt

SEQ ID NO: 563632 - DNA, 184 bp, Homo sapiens
cgggcggatcgcttgaacccaggagttcaagaccaacctgggcaatatgatgaaaycccttctctacaaaaaatacaaaaattagctgggcatggtggcacctgcctgtggtcccagctactcaggaggttgagtcagaatgattgcttgagtctgggagtcagaggttgcagtgagccaagat

SEQ ID NO: 563633 - DNA, 399 bp, Homo sapiens
aaaggcaataatatcttggtgtccaagtggccccaatttaaaaataatagttacttayatgttttgtattcgaatgggtctgctactctcccattctcccacctaccttatcccacaaaagaatagtccatagagaggtattatgtatatgtgggatattttttctcttttaatttttatcttgtcttctaaataaaaggcataaagatttatgtaaaatggtaagtgtaaacagaatataaagtctgctcaactgtaagtatcagaagcttcaggatattatttttctaattttgaagttcagaaatgtagcaacaaaacctcacttgcaagaacagatgatcaagtttcaacagatcatagatcagatcaagtgagaaaaacaagatgacaacgata

SEQ ID NO: 563634 - DNA, 399 bp, Homo sapiens
aaaggcaataatatcttggtgtccaagtggccccaatttaaaaataatagttacttatatgttttgtattckaatgggtctgctactctcccattctcccacctaccttatcccacaaaagaatagtccatagagaggtattatgtatatgtgggatattttttctcttttaatttttatcttgtcttctaaataaaaggcataaagatttatgtaaaatggtaagtgtaaacagaatataaagtctgctcaactgtaagtatcagaagcttcaggatattatttttctaattttgaagttcagaaatgtagcaacaaaacctcacttgcaagaacagatgatcaagtttcaacagatcatagatcagatcaagtgagaaaaacaagatgacaacgata

SEQ ID NO: 563635 - DNA, 399 bp, Homo sapiens
aaaggcaataatatcttggtgtccaagtggccccaatttaaaaataatagttacttatatgttttgtattcgaatgggyctgctactctcccattctcccacctaccttatcccacaaaagaatagtccatagagaggtattatgtatatgtgggatattttttctcttttaatttttatcttgtcttctaaataaaaggcataaagatttatgtaaaatggtaagtgtaaacagaatataaagtctgctcaactgtaagtatcagaagcttcaggatattatttttctaattttgaagttcagaaatgtagcaacaaaacctcacttgcaagaacagatgatcaagtttcaacagatcatagatcagatcaagtgagaaaaacaagatgacaacgata

SEQ ID NO: 563636 - DNA, 399 bp, Homo sapiens
aaaggcaataatatcttggtgtccaagtggccccaatttaaaaataatagttacttatatgttttgtattcgaatgggtctgctactctcccattctcccacctaccttatcccacaaaagaatagtccatagagaggtattatgtatatgtgggatattttttctcttttaatttttatcttgtcttctaaataaaaggcataaagatttatgtaaaatggtaagtgtaaacagaatataaagtctgctcaactgtaagtatyagaagcttcaggatattatttttctaattttgaagttcagaaatgtagcaacaaaacctcacttgcaagaacagatgatcaagtttcaacagatcatagatcagatcaagtgagaaaaacaagatgacaacgata

SEQ ID NO: 563637 - DNA, 607 bp, Homo sapiens
ctttagaaacacatgaaaggataagtgcaaataaaacatagtatatatatcaaaagagcagaaacaaggaatcataaaatatgaaataggataacagaaataagatgctaaatgtcagttgtgaattaatgaattcatatggattatggttttgtattaaaagacagaaacttttagattgagtcaaaagagataggttacaactggtgcaatggctcatgcctgtaatcccaacactttgggaggccgaggcaggtggattgcctgagctcaggagttggagaccagcctgggcaacactgtgaaaccccgtctctactaaaatacaaaaaattaactgggcrtggtggtgtgcgcctgtattctcagctacttgggaggctgaggcaggagaattgcttgaacctgggaggcagaggttgcagtgagctgagatcgtgccactgcactccagcctgggcgacagaacgagactccatcttcaaaataaatcaataaatacatataaaaccaaacaggaataaccatattaatcttaggcaaagtagaattaagagcaaagacattacaaacagtgaaaaagatttacttgtgtcattaagcaata

SEQ ID NO: 563638 - DNA, 437 bp, Homo sapiens
ttactccaaagcccatataccacccacaaccattaactgtaaccaagaaagagaaggaaagccccaattaacctttgtacgtaaagcctaaagaatgaaaaaatatacctgaatcctcaatcatcaaacaacgtagtatatactaagtaatttgtaataattaaactctagaaaattgtgtggctttggtagtaagagagcttcatgatgtaaaatggcaagtggagacagagacawaagtaagatgtggactgagagggaaggttagcacaggtggaacagtaaggcaaccatactatcaattgctgctgacatagaatccagagagactattggcaaaagctcaaatgagacacagtaacagtttagattcagacagtggctgtggcatacatctggaaaattgatggccgcatgatccctctttgcatgggact

SEQ ID NO: 563639 - DNA, 437 bp, Homo sapiens
ttactccaaagcccatataccacccacaaccattaactgtaaccaagaaagagaaggaaagccccaattaacctttgtacgtaaagcctaaagaatgaaaaaatatacctgaatcctcaatcatcaaacaacgtagtatatactaagtaatttgtaataattaaactctagaaaattgtgtggctttggtagtaagagagcttcatgatgtaaaatggcaagtggagacagagacataagtaagatgtggactgagagggaaggttagcacaggtggaacagtaaggcaaccatactatcarttgctgctgacatagaatccagagagactattggcaaaagctcaaatgagacacagtaacagtttagattcagacagtggctgtggcatacatctggaaaattgatggccgcatgatccctctttgcatgggact

SEQ ID NO: 563640 - DNA, 364 bp, Homo sapiens
aacttggcaacacccctaggtaccctttagaagcctccaattggctacaccctrtgaaggattggcctgtgaccaatcagaggctgaagtggaggcgtagctcatggtcaagcagaggctgaagtggaaacttctgtctttttatcacaggcatgaggatgtggcctgcatgctgcctgatcttgcctagaaccagctgcacctgctgttctcttgcttatgcaaactggctgcacctgctattcctttgcttatgccccaacccttggctatcctaactccctgttctcctgcctattactgtattctctacttctaaataaaaataaaacaaaatacaaattatttgcatgtagtatagtca

SEQ ID NO: 563641 - DNA, 364 bp, Homo sapiens
aacttggcaacacccctaggtaccctttagaagcctccaattggctacaccctatgaaggattggcctgtgaccaatcagaggctgaagtggaggcgtagctcatggtcaagcagaggctgaagtggaaacttctgtctttttatcacaggcatgaggatgtggcctgcatgctgcctgatcttgcctagaaccagctgcacctgctgttctcttgcttatgcaaactggctgcacctgctattcctttgcttatgccccwacccttggctatcctaactccctgttctcctgcctattactgtattctctacttctaaataaaaataaaacaaaatacaaattatttgcatgtagtatagtca

SEQ ID NO: 563642 - DNA, 364 bp, Homo sapiens
aacttggcaacacccctaggtaccctttagaagcctccaattggctacaccctatgaaggattggcctgtgaccaatcagaggctgaagtggaggcgtagctcatggtcaagcagaggctgaagtggaaacttctgtctttttatcacaggcatgaggatgtggcctgcatgctgcctgatcttgcctagaaccagctgcacctgctgttctcttgcttatgcaaactggctgcacctgctattcctttgcttatgccccaacccytggctatcctaactccctgttctcctgcctattactgtattctctacttctaaataaaaataaaacaaaatacaaattatttgcatgtagtatagtca

SEQ ID NO: 563643 - DNA, 364 bp, Homo sapiens
aacttggcaacacccctaggtaccctttagaagcctccaattggctacaccctatgaaggattggcctgtgaccaatcagaggctgaagtggaggcgtagctcatggtcaagcagaggctgaagtggaaacttctgtctttttatcacaggcatgaggatgtggcctgcatgctgcctgatcttgcctagaaccagctgcacctgctgttctcttgcttatgcaaactggctgcacctgctattcctttgcttatgccccaacccttggctatcctaaytccctgttctcctgcctattactgtattctctacttctaaataaaaataaaacaaaatacaaattatttgcatgtagtatagtca

SEQ ID NO: 563644 - DNA, 474 bp, Homo sapiens
aaactatattacatttttaaagagacaataacaaaagccattaactttttcaaaactaaatacatatatacatatatatacatatatacatatagcaacaagacagttgctagtacacatctccctaacagagttacattagtctacatggggttttacttataattgacatagttaccctaatctatgcattctttgactatgttgcrtgtctaacatgttccagtgaccattcaattgtggattacagagaactgtcattgtccaaattagaggcaggaatttcagtcctgtgggaagcatccaaaaagttcttcagcacagataggtttaggaataaaactggagatcttttgagtggttctcatttttataagcttggtcatgaacttatctgccccttagttatttttagaattgatttcatgctcaggtcaatcatttcacagtgaagaatataccatttctcaaact

SEQ ID NO: 563645 - DNA, 474 bp, Homo sapiens
aaactatattacatttttaaagagacaataacaaaagccattaactttttcaaaactaaatacatatatacatatatatacatatatacatatagcaacaagacagttgctagtacacatctccctaacagagttacattagtctacatggggttttacttataattgacatagttaccctaatctatgcattctttgactatgttgcatgtctaacatgttccagtgaccattcaattgtggattacagagaactgtcattgtccaaattagaggcargaatttcagtcctgtgggaagcatccaaaaagttcttcagcacagataggtttaggaataaaactggagatcttttgagtggttctcatttttataagcttggtcatgaacttatctgccccttagttatttttagaattgatttcatgctcaggtcaatcatttcacagtgaagaatataccatttctcaaact

SEQ ID NO: 563646 - DNA, 474 bp, Homo sapiens
aaactatattacatttttaaagagacaataacaaaagccattaactttttcaaaactaaatacatatatacatatatatacatatatacatatagcaacaagacagttgctagtacacatctccctaacagagttacattagtctacatggggttttacttataattgacatagttaccctaatctatgcattctttgactatgttgcatgtctaacatgttccagtgaccattcaattgtggattacagagaactgtcattgtccaaattagaggcaggaatttcagtcctgtgsgaagcatccaaaaagttcttcagcacagataggtttaggaataaaactggagatcttttgagtggttctcatttttataagcttggtcatgaacttatctgccccttagttatttttagaattgatttcatgctcaggtcaatcatttcacagtgaagaatataccatttctcaaact

SEQ ID NO: 563647 - DNA, 474 bp, Homo sapiens
aaactatattacatttttaaagagacaataacaaaagccattaactttttcaaaactaaatacatatatacatatatatacatatatacatatagcaacaagacagttgctagtacacatctccctaacagagttacattagtctacatggggttttacttataattgacatagttaccctaatctatgcattctttgactatgttgcatgtctaacatgttccagtgaccattcaattgtggattacagagaactgtcattgtccaaattagaggcaggaatttcagtcctgtgggaagcatccaaaaagytcttcagcacagataggtttaggaataaaactggagatcttttgagtggttctcatttttataagcttggtcatgaacttatctgccccttagttatttttagaattgatttcatgctcaggtcaatcatttcacagtgaagaatataccatttctcaaact

SEQ ID NO: 563648 - DNA, 474 bp, Homo sapiens
tggggttttacttataattgacatagttaccctaatctatgcattctttgactatgttgcatgtctaacatgttccagtgaccattcaattgtggattacagagaactgtcattgtccaaattagaggcaggaatttcagtcctgtgggaagcatccaaaaagttcttcagcacagataggtttaggaataaaactggagatcttttgagtggttctcatttttataagcttggtcatgaacttatctgccccttagttatttttagaattgatttcatgctcaggtcaatcatttcacagtgaagaatataccatttctcaaactgccttctttccaaattttatgactagagttcagcctgagttcacayaatcagctgatgaacatcactcaatggagcatattaactagaattgttgtctctatctgggtctcttccagatggtcttgtcaaatgctatcagagcatcat

SEQ ID NO: 563649 - DNA, 474 bp, Homo sapiens
tggggttttacttataattgacatagttaccctaatctatgcattctttgactatgttgcatgtctaacatgttccagtgaccattcaattgtggattacagagaactgtcattgtccaaattagaggcaggaatttcagtcctgtgggaagcatccaaaaagttcttcagcacagataggtttaggaataaaactggagatcttttgagtggttctcatttttataagcttggtcatgaacttatctgccccttagttatttttagaattgatttcatgctcaggtcaatcatttcacagtgaagaatataccatttctcaaactgccttctttccaaattttatgactagagttcagcctgagttcacataatcagctgatgaacatcactcaatggagcatattaactagaattgttgtctctatctgggtctcttccaratggtcttgtcaaatgctatcagagcatcat

SEQ ID NO: 563650 - DNA, 545 bp, Homo sapiens
gtgggtacatggctgtatacattagaaaaaaattatcaaactctattcttaagatcagtgccttacatgctctttattgtatgggtattacatgtcagataggtaaagaggctgtaaaaatacagaaatttcatgtagctatattaatatcaaataaaatagatgatagataaagcattttcaaagataaaggggccactacgtaatgamaaaaggaatcatcttggaagtaatgtcagaggcatttgaaccagagtgtctccatcttggataggggcctggtaaaataaggctgagatctgctgggctgcattcccaggcagttaggcattctaagtcacaagatgagatgggaggttggcacaagatacaggttataaagaccttgctgataaaacaagttgcagtcaagaagctggccaaaacccaccaaaaccaagatggtgatctgacctctggttgtcctaactgctacactcccaacagcaccatgacaatttacaaacgccatggcaatgtccagaatttaccctatatggtctaaa

SEQ ID NO: 563651 - DNA, 545 bp, Homo sapiens
gtgggtacatggctgtatacattagaaaaaaattatcaaactctattcttaagatcagtgccttacatgctctttattgtatgggtattacatgtcagataggtaaagaggctgtaaaaatacagaaatttcatgtagctatattaatatcaaataaaatagatgatagataaagcattttcaaagataaaggggccactacgtaatgaaaaaaggaatcatcttggaagtaatgtcagaggcatttgaaccagagtgtctccatcttggataggggcckggtaaaataaggctgagatctgctgggctgcattcccaggcagttaggcattctaagtcacaagatgagatgggaggttggcacaagatacaggttataaagaccttgctgataaaacaagttgcagtcaagaagctggccaaaacccaccaaaaccaagatggtgatctgacctctggttgtcctaactgctacactcccaacagcaccatgacaatttacaaacgccatggcaatgtccagaatttaccctatatggtctaaa

SEQ ID NO: 563652 - DNA, 545 bp, Homo sapiens
gtgggtacatggctgtatacattagaaaaaaattatcaaactctattcttaagatcagtgccttacatgctctttattgtatgggtattacatgtcagataggtaaagaggctgtaaaaatacagaaatttcatgtagctatattaatatcaaataaaatagatgatagataaagcattttcaaagataaaggggccactacgtaatgaaaaaaggaatcatcttggaagtaatgtcagaggcatttgaaccagagtgtctccatcttggataggggcctggtaaaataaggctgagatctgctgggctgcattcccaggcagttaggcattctaagtcacaagatgagatgggaggttggcacaagatacaggttataaagaccttgctgataaaacaagttgcagtcaagaagctggccaaaacccaccaaaaccaagatggtgatctgacctctggttgtcctaactgctacactcccaacagcaccatgacartttacaaacgccatggcaatgtccagaatttaccctatatggtctaaa

SEQ ID NO: 563653 - DNA, 545 bp, Homo sapiens
gtgggtacatggctgtatacattagaaaaaaattatcaaactctattcttaagatcagtgccttacatgctctttattgtatgggtattacatgtcagataggtaaagaggctgtaaaaatacagaaatttcatgtagctatattaatatcaaataaaatagatgatagataaagcattttcaaagataaaggggccactacgtaatgaaaaaaggaatcatcttggaagtaatgtcagaggcatttgaaccagagtgtctccatcttggataggggcctggtaaaataaggctgagatctgctgggctgcattcccaggcagttaggcattctaagtcacaagatgagatgggaggttggcacaagatacaggttataaagaccttgctgataaaacaagttgcagtcaagaagctggccaaaacccaccaaaaccaagatggtgatctgacctctggttgtcctaactgctacactcccaacagcaccatgacaatttacaaaygccatggcaatgtccagaatttaccctatatggtctaaa

SEQ ID NO: 563654 - DNA, 606 bp, Homo sapiens
ctaaacttaccagagatcttcttccaaatggagaaccattttttctaatatgacttgattcgcagtccctgaattcctgcactcatttgatgattcagtcactacatgtcagattgtgaaccagacactgagcccagggcaggaagaaaaatgggctcccatggaggatacacggaggttgggcrcagtggatggtgggagggaacgcagataataaatggaacaacaactatcttattaaaatacagataaacacagtcaaaaataatacagagcatataaacccaggtaagatgatacacatgaatgccgaaaactgcttaagaaaagggtagcagggagttattttctgagtagatgacatttatgctaaacgtggaacaaggagaatggagccaaccctgaaaattctgggaaaagaggacagaaggcagagggaagagcaagagcaaaaattctgaaacaggaggtaagttagtgttttcaaggaaaagctggagcttttatctgaaaatcagattctgaagctaagaaccaatttgaaaatacagtactatatcacttcaactaggaaattatggcataaaccaggagtctccaaaagct

SEQ ID NO: 563655 - DNA, 606 bp, Homo sapiens
ctaaacttaccagagatcttcttccaaatggagaaccattttttctaatatgacttgattcgcagtccctgaattcctgcactcatttgatgattcagtcactacatgtcagattgtgaaccagacactgagcccagggcaggaagaaaaatgggctcccatggaggatacacggaggttgggcacagtggatggtgggagggaacgcagataataaatggaacaacaactatcttattaaaatacagataaacacagtcaaaamtaatacagagcatataaacccaggtaagatgatacacatgaatgccgaaaactgcttaagaaaagggtagcagggagttattttctgagtagatgacatttatgctaaacgtggaacaaggagaatggagccaaccctgaaaattctgggaaaagaggacagaaggcagagggaagagcaagagcaaaaattctgaaacaggaggtaagttagtgttttcaaggaaaagctggagcttttatctgaaaatcagattctgaagctaagaaccaatttgaaaatacagtactatatcacttcaactaggaaattatggcataaaccaggagtctccaaaagct

SEQ ID NO: 563656 - DNA, 606 bp, Homo sapiens
ctaaacttaccagagatcttcttccaaatggagaaccattttttctaatatgacttgattcgcagtccctgaattcctgcactcatttgatgattcagtcactacatgtcagattgtgaaccagacactgagcccagggcaggaagaaaaatgggctcccatggaggatacacggaggttgggcacagtggatggtgggagggaacgcagataataaatggaacaacaactatcttattaaaatacagataaacacagtcaaaaataatacagagcatataaacccaggtaagatgatacacatgaatgccgaaaactgcttaagaaaagggtagcagggarttattttctgagtagatgacatttatgctaaacgtggaacaaggagaatggagccaaccctgaaaattctgggaaaagaggacagaaggcagagggaagagcaagagcaaaaattctgaaacaggaggtaagttagtgttttcaaggaaaagctggagcttttatctgaaaatcagattctgaagctaagaaccaatttgaaaatacagtactatatcacttcaactaggaaattatggcataaaccaggagtctccaaaagct

SEQ ID NO: 563657 - DNA, 606 bp, Homo sapiens
ctaaacttaccagagatcttcttccaaatggagaaccattttttctaatatgacttgattcgcagtccctgaattcctgcactcatttgatgattcagtcactacatgtcagattgtgaaccagacactgagcccagggcaggaagaaaaatgggctcccatggaggatacacggaggttgggcacagtggatggtgggagggaacgcagataataaatggaacaacaactatcttattaaaatacagataaacacagtcaaaaataatacagagcatataaacccaggtaagatgatacacatgaatgccgaaaactgcttaagaaaagggtagcagggagttattttctgagtagatgacatttatgctaaacgtggaacaaggagaatggagccaaccctgaaaattctgggaraagaggacagaaggcagagggaagagcaagagcaaaaattctgaaacaggaggtaagttagtgttttcaaggaaaagctggagcttttatctgaaaatcagattctgaagctaagaaccaatttgaaaatacagtactatatcacttcaactaggaaattatggcataaaccaggagtctccaaaagct

SEQ ID NO: 563658 - DNA, 580 bp, Homo sapiens
tgaggcaccaaatgctgtgggccatgttctagaatttggactttatctttaaggcagtggaaagagaatgaatggtttgaagsagttttttatttagggaaaatcactgtcagtagtatggaggataacttaggggaaaaaaaaacatgccagagctttgcagtagagggtcccatcttgtgttcaagagtggccaagataagcagtccctttgcaaacaagccacttctgctcacagaaggtccttatcacttcttaacattcctttggtggagaagccctatagcctgaggctttaaagggggcagaaaattacagcagattgtcaaaagaatatggcaaagaaccaataatgggagctaacatctcttaaaattggcactttaattattttaattttaaatgaagtcagaggaggtgaaaagtattttaaatttttaagcaaagtatatgtaactgttttataaaaatgaaaacatgcttagggagagagagcttatttagataagttttgagctttatcaaaacaattttaacactctagcaaataggtagacttctttcttcttcaacagtttct

SEQ ID NO: 563659 - DNA, 415 bp, Homo sapiens
gaataaattgtcaaatatactataayactcaagtattgggtgtatttgaaattaatttgaagattctaggtcactcactaagaaaaaataaaatggtaacttaaaatagaaactttgaatcggcaaaatttatttttctcttcatatttgctattttaatcattattaagattttacttatatctaaagatttctttgtttacagtaataatatcacattaaggaatatagaccaaataataaagcacattctttaaataactctattgattgctacaacatacactttcagtctttaaagtattgtttcgtgcaatgaaatcacttaatagcttcagagaatgagataaagaagtgcagttgtttctctaaggtaattcaaggttgactgtataaaacaagcaacggtaggtat

SEQ ID NO: 563660 - DNA, 415 bp, Homo sapiens
gaataaattgtcaaatatactataatactcaagtattgggtgtatttgaaattaatttgaagattctaggtcactcactaagaaaaaataaaatggtaacttaaaatagaaactttgaatcggcaaaatttatttttctcttcatatttgctattttaatcattattaagattttacttatatctaaagatttctttgtttacagtaataatatcacattaaggaatatagaccaaataataaagcacattctttaaataactctattgattgctacaacatacactttcagtctttaaagtattgtttcrtgcaatgaaatcacttaatagcttcagagaatgagataaagaagtgcagttgtttctctaaggtaattcaaggttgactgtataaaacaagcaacggtaggtat

SEQ ID NO: 563661 - DNA, 415 bp, Homo sapiens
gaataaattgtcaaatatactataatactcaagtattgggtgtatttgaaattaatttgaagattctaggtcactcactaagaaaaaataaaatggtaacttaaaatagaaactttgaatcggcaaaatttatttttctcttcatatttgctattttaatcattattaagattttacttatatctaaagatttctttgtttacagtaataatatcacattaaggaatatagaccaaataataaagcacattctttaaataactctattgattgctacaacatacactttcagtctttaaagtattgtttcgtgcwatgaaatcacttaatagcttcagagaatgagataaagaagtgcagttgtttctctaaggtaattcaaggttgactgtataaaacaagcaacggtaggtat

SEQ ID NO: 563662 - DNA, 415 bp, Homo sapiens
gaataaattgtcaaatatactataatactcaagtattgggtgtatttgaaattaatttgaagattctaggtcactcactaagaaaaaataaaatggtaacttaaaatagaaactttgaatcggcaaaatttatttttctcttcatatttgctattttaatcattattaagattttacttatatctaaagatttctttgtttacagtaataatatcacattaaggaatatagaccaaataataaagcacattctttaaataactctattgattgctacaacatacactttcagtctttaaagtattgtttcgtgcaatgaaatcacttaatagcttcagagaatragataaagaagtgcagttgtttctctaaggtaattcaaggttgactgtataaaacaagcaacggtaggtat

SEQ ID NO: 563663 - DNA, 224 bp, Homo sapiens
ttcgtgcaatgaaatcacttaatagcttcagagaatgagataaagaagtgcagttgtttctctaaggtaattcaaggttgactgtataaaacaagcaacggtaggtataacaaatctgtttctttgaagcaagagatggtgttaatgttaagacagtctaggaaacagacagactcctagttagcatkgtaattatgagttcttaatatcacctaagatgcata

SEQ ID NO: 563664 - DNA, 620 bp, Homo sapiens
aaacgctaaaagaaaataactgcagcctagaattttgtatctaacaaaaatattcccccaaatgaatgttaaataaaaacatttttatacaagcacaaaacaaaaagaaaatgttaccagtagggctgcagcaaaacaaattctaaagggagcccttcaagtcaaaaaaaataatttcaagtgaaagcacagaaataaaaaagaataaataaatacataaatagcaataaaaaaactaaatgaatattaaacatgtaaaataacaatcatatattgaggagtttatagaataatatacaaatagcactaaaataaatracaatagaagaaaatgggagaagtagaaaagtaagtgaaatcattttaaatccttagattgtccaaaaaggggaaaaattactaatttttattagaattaaataagccaggaattcatgtataatctctagggtaacaccttaaaaaaattaacagtaaaagaatggttaagaagcaaaagagaaaaactcatttttaagaaaggagaggacaataaaaggtaagaacaaagaaaaaaacacacattgacaaattttgaaggattgaagttatacagtgtgtagtcactggaaatgaggtag

SEQ ID NO: 563665 - DNA, 525 bp, Homo sapiens
gtccacacaaaatactttgaaaactttaggaaagtaagtgttgcaatggtcagagtgattgtggaaaaagggctacagggtgactaatgaaaagttcaagataaatagctagaatttttctttcccttttcctttcaatctgaatttttcaactttaaacattttcttcaaattttcattctgttaataaagtgaacttttagacaatcaaacagcttacctcattctataagagtaacatttaataaaatggcaattaaacctctttgctgcttaatttacatattaattgacaattattatattcacatttttgccattattgatgctacaaaatactctaactcaacacaaacaataattacaacagtttacaataactaytcagttttaattgggaataaatgatgtttatgttcctgaacttgtgcttttaaagaaaagccatatcaatagccaaactatacaagagttgactcagctcagcttcaaaccacaaatattgcattaactgacattgatgat

SEQ ID NO: 563666 - DNA, 525 bp, Homo sapiens
gtccacacaaaatactttgaaaactttaggaaagtaagtgttgcaatggtcagagtgattgtggaaaaagggctacagggtgactaatgaaaagttcaagataaatagctagaatttttctttcccttttcctttcaatctgaatttttcaactttaaacattttcttcaaattttcattctgttaataaagtgaacttttagacaatcaaacagcttacctcattctataagagtaacatttaataaaatggcaattaaacctctttgctgcttaatttacatattaattgacaattattatattcacatttttgccattattgatgctacaaaatactctaactcaacacaaacaataattacaacagtttacaataactacwcagttttaattgggaataaatgatgtttatgttcctgaacttgtgcttttaaagaaaagccatatcaatagccaaactatacaagagttgactcagctcagcttcaaaccacaaatattgcattaactgacattgatgat

SEQ ID NO: 563667 - DNA, 415 bp, Homo sapiens
tcaagtagaatatggttattgcttaactcagtttactactgctacctaaaaccatggttgatatttaactggctttcactgttacattgcgttaccaagtattcattctgattgattggtaccatgtggtcaaaggggttaaagtttttgaacattatttctgccccaarttaataaacaacacttcttactagcatgatttagatatgggtttacctgtacattgggagttttttccaagtgtgtttattccaagcattgtggaatttctcagttccttataagactaccttacagacgtagtttataatattttcaataataatttgtcagactgtattctcactcattcaattttgggatattatttgatgactcctccccagaagcctcttttaatgactagtctgactga

SEQ ID NO: 563668 - DNA, 415 bp, Homo sapiens
tcaagtagaatatggttattgcttaactcagtttactactgctacctaaaaccatggttgatatttaactggctttcactgttacattgcgttaccaagtattcattctgattgattggtaccatgtggtcaaaggggttaaagtttttgaacattatttctgccccaaattaataaacaacacttcttacyagcatgatttagatatgggtttacctgtacattgggagttttttccaagtgtgtttattccaagcattgtggaatttctcagttccttataagactaccttacagacgtagtttataatattttcaataataatttgtcagactgtattctcactcattcaattttgggatattatttgatgactcctccccagaagcctcttttaatgactagtctgactga

SEQ ID NO: 563669 - DNA, 547 bp, Homo sapiens
gaggcaggctttacctgaatctcttcatgctaggagcccatcgttagcaatgaaaacctctcccacarctgagttgccattgaaacatgtgttttctacatagcaggccaatgtttatagacccttatggatttaaccccatctgacaatgtaagagttcactaaacaaaacttggtttcatttccaaagccacttatctcacctactttgcccacctctgttccacacaccccatcccaccccaattcaaagaaagcttcaccattccctatttattcatacacctggtttcttctttggcttagtgtttccctgctgcaccttccttacctcgtttaactacactggaccactgtttacactatatttttaattgcctgtttcatttgtcagtcgcctcaccttaacagtttcaaacacagggactaactcctcctgctcaccatggtgttcattgcacctcgcatagtaactgacatacagtgggcatttataaacactcactgtgtgactgaatgaataagtaaattaactaattagctaatt

SEQ ID NO: 563670 - DNA, 547 bp, Homo sapiens
gaggcaggctttacctgaatctcttcatgctaggagcccatcgttagcaatgaaaacctctcccacagctgagttgccattgaaacatgtgttttctacatagcaggccaatgtttatagacccttatggatttaaccccatctgacaatgtaagagttcactaaacaaaacttggtttcatttccaaagccacttatctcacctactttgcccacctctgttccayacaccccatcccaccccaattcaaagaaagcttcaccattccctatttattcatacacctggtttcttctttggcttagtgtttccctgctgcaccttccttacctcgtttaactacactggaccactgtttacactatatttttaattgcctgtttcatttgtcagtcgcctcaccttaacagtttcaaacacagggactaactcctcctgctcaccatggtgttcattgcacctcgcatagtaactgacatacagtgggcatttataaacactcactgtgtgactgaatgaataagtaaattaactaattagctaatt

SEQ ID NO: 563671 - DNA, 547 bp, Homo sapiens
gaggcaggctttacctgaatctcttcatgctaggagcccatcgttagcaatgaaaacctctcccacagctgagttgccattgaaacatgtgttttctacatagcaggccaatgtttatagacccttatggatttaaccccatctgacaatgtaagagttcactaaacaaaacttggtttcatttccaaagccacttatctcacctactttgcccacctctgttccacacaccccatcccaccccaattcaaagaaagcttcaccattccctatttattcatacacctggtttcttctttggcttagtgtttccctgctgcaccttccttacctcgtttaactacactggaccactgtttacactatatttttaattgcctgtttcatttgtcagtcgccycaccttaacagtttcaaacacagggactaactcctcctgctcaccatggtgttcattgcacctcgcatagtaactgacatacagtgggcatttataaacactcactgtgtgactgaatgaataagtaaattaactaattagctaatt

SEQ ID NO: 563672 - DNA, 573 bp, Homo sapiens
ttctgtcatttttctttaatttatataacttcgattataatagtcatcttcagaataatgatggctagcattagcatagagtgctctgggtcacaaasctttgcacttattatttcatttagtttgatgctgatgaaaccatgtaaaggacgcagaattgttatgctagtttcactaatgaggagactaaagctctgagagcttaaatgactttttcaatgacacacctggtaaatgagttccatccaggtctactgactccaaatccactgttctatctctcagtacatcaccctaataattccctggagagggactcaacaaaactaaagctcttctacaatactgatcagaaaagcaaaaatgggggcccctcagcaacccaactaaaagacatcctgtatgtagcttatttaaatttattccaaataatatatttacttatgcaacattcatgagaattctgagttgttttggtttcatttgtgggtttttttgcatatatatttgcaactgagaatgaataccatagatcttctggataaaggacacttcttacctgttacttatata

SEQ ID NO: 563673 - DNA, 573 bp, Homo sapiens
ttctgtcatttttctttaatttatataacttcgattataatagtcatcttcagaataatgatggctagcattagcatagagtgctctgggtcacaaagctttgcacwtattatttcatttagtttgatgctgatgaaaccatgtaaaggacgcagaattgttatgctagtttcactaatgaggagactaaagctctgagagcttaaatgactttttcaatgacacacctggtaaatgagttccatccaggtctactgactccaaatccactgttctatctctcagtacatcaccctaataattccctggagagggactcaacaaaactaaagctcttctacaatactgatcagaaaagcaaaaatgggggcccctcagcaacccaactaaaagacatcctgtatgtagcttatttaaatttattccaaataatatatttacttatgcaacattcatgagaattctgagttgttttggtttcatttgtgggtttttttgcatatatatttgcaactgagaatgaataccatagatcttctggataaaggacacttcttacctgttacttatata

SEQ ID NO: 563674 - DNA, 620 bp, Homo sapiens
cgcatatttttctaaacgcttttttgaggttcattactatgtatttgccaactcctgactcatcatctggctcaattcctttcaaatgagtggcacccaataaatacgtatagagcattttctaaaatatatatgcaacagatgcacaaagaaagtggcctagggagacagacattattttccttcattctgtgactatcttcaggatactatgtcctgtgactcataaattctattaaracagtgggaagactaagaagaattaagacaagtaacactgccagattcaaccagcattcttttcttctcagtgcaatgaactcagtcggtgtgcaaggacacaaacatttgaaacataactgccaatcaagaataattattcactaatgtaatgattactgtttaacacaactgcaaagaggagaattaaactttctccccaacttctcatgttctgcatagggcgattttggttagatctttctgaagagatctattttcatatatgacccttgttaaggcaggttttcaggcaatgccttgatgaaaaagtaagacagtctcaggatctgtcacactgttgacaggaaaaccctctgaaaccacaaccaaggtgttag

SEQ ID NO: 563675 - DNA, 620 bp, Homo sapiens
cgcatatttttctaaacgcttttttgaggttcattactatgtatttgccaactcctgactcatcatctggctcaattcctttcaaatgagtggcacccaataaatacgtatagagcattttctaaaatatatatgcaacagatgcacaaagaaagtggcctagggagacagacattattttccttcattctgtgactatcttcaggatactatgtcctgtgactcataaattctattaagacagtgggaagactaagaagaattaagacaagtaacactgccagattcaaccagcattcttttcttctcagtgcratgaactcagtcggtgtgcaaggacacaaacatttgaaacataactgccaatcaagaataattattcactaatgtaatgattactgtttaacacaactgcaaagaggagaattaaactttctccccaacttctcatgttctgcatagggcgattttggttagatctttctgaagagatctattttcatatatgacccttgttaaggcaggttttcaggcaatgccttgatgaaaaagtaagacagtctcaggatctgtcacactgttgacaggaaaaccctctgaaaccacaaccaaggtgttag

SEQ ID NO: 563676 - DNA, 680 bp, Homo sapiens
actcaatattagggtgatattatgttagcactagacaataggcttgatggggctggcatcgttaaaggagaaaaggcccaagcctagggcagatttatggtttgaggctgccaataaggatttatagcaacagatgagggttaggggtgtgaggcatgcaaaaatgagctgaattgagaaaagttgctcatgaaatgaataggttgagatggactggggaaaagccatggctgccagtaggtatgtttctgtttyggactttggtttttagatgctatcacctcaaactctctttagcattattttcagctgaattctctgaaggacatttttaaatatgaaattctacatgtgagctttaaaaatatggccaggcaaggtggctcaggcctataatcccagtactttgggaggccaagacaagaggatcacttgagcctaggagtttgagaccagactgagcaacatagtgggatcctgtccttacaaaacatttttaaaaactaaaaaaaatagccaggtgtggtggcacacacctgtagtcctagctacttgggaggctgaggtgggagattcgcttgagcccagaagtttgaggctacagtgagccatgatggcaccactgcactccagcctgggtgacagagtgagaccttgctctctctctctatatatatatg

SEQ ID NO: 563677 - DNA, 420 bp, Homo sapiens
agaattcaaaaaaatcccattttgttttcttatacttctctttccttttactctcctttttaataatctttactttttgcccctccttccttccttccttccttccttccttccttccttccttccttccttcctttcttctttccttccttccttttttttgtgactgcagaaggaagaactcattgtacagagggagtcatgttgtggkgtaatgatgtgagctcaagtcactttgtgaccttctaaattacatgggcccttcttagactcctgcattgcttcttatttttgagcagcaaatgaccctaattgacagagtttcaatgtcaaacaatattttacacagaaactgaactgaatacgaaaagaaaaatgttacaggaggacagggaaatagtatagtccaaaatggactca

SEQ ID NO: 563678 - DNA, 529 bp, Homo sapiens
aggagaaagagtttggcatttccttttgaacgttcttctgccagctgtagtcttaggctggttaggatgatataattatcattaaggaatatgtatcatatttcrgatttaagtgatgggcaggtaaaatataatttgtgtgatgaatattttagaagctcttaattgcatctgaagcacctatttacggggccagggtatcagataaattgctcaccacctccacattttctttgagatgaagatctgtgggtggagaagggaaagagagagggccaccatcagccttgagtgagcccataaatggcaagtccttcagattgcattgttggcacttccctctgacgtctataacttaacttcaataaaggaaaacaaatgtaagcacacctccaggcaaatgaatatttttgccagagacagtatggggtggggaagataaaatggaatttggaattctgacagccctaggttcaaatctggcctcattgctaatgagctctatgagaccaagtaagttatggttgtt

SEQ ID NO: 563679 - DNA, 529 bp, Homo sapiens
aggagaaagagtttggcatttccttttgaacgttcttctgccagctgtagtcttaggctggttaggatgatataattatcattaaggaatatgtatcatatttcggatttaagtgatgggcaggtaaaatataatttgtgtgatgaatattttagaagctcttaattgcatcygaagcacctatttacggggccagggtatcagataaattgctcaccacctccacattttctttgagatgaagatctgtgggtggagaagggaaagagagagggccaccatcagccttgagtgagcccataaatggcaagtccttcagattgcattgttggcacttccctctgacgtctataacttaacttcaataaaggaaaacaaatgtaagcacacctccaggcaaatgaatatttttgccagagacagtatggggtggggaagataaaatggaatttggaattctgacagccctaggttcaaatctggcctcattgctaatgagctctatgagaccaagtaagttatggttgtt

SEQ ID NO: 563680 - DNA, 584 bp, Homo sapiens
acctttcctccagtgggctatctttggacacaggagcatgctttgtccctgcacaggtcagatgggaagtaactgagccagaatgccttggagtacctccaaactactaagggctggtgaataaatacttcacatctttgccttttgttggaacaatcctaagttgtgttccatatggcctttccatgggtctccagaataattgagcccaattgcccatacagtagggtaaccaacttatctctgcttttctagaactgtcccarttttagcattggaaattctgtgtcctgggacaccccattgattccatgcaaactgtgatagttgaccacactacgaatagaggtaactggctagtcaatgttctgtctatttgttccccacttcttgtcttactccttgcaacctcatagtgattcctggaattaacttcaaaataaactacagatgctcccccatttacaatggggttatgtcctgataaaccattgtaagttgaaaatatgactaagtcaaaaatgcatttaatatacctaacctaccaaacatcatactttagcttagcccaccttaaacatgct

SEQ ID NO: 563681 - DNA, 373 bp, Homo sapiens
gacacaggttgtgactattttgaataatgctgtcatgaacatgagggtgcagataactcttcaaggtatttamttcattttctttggatatatacccagaagtgggattgatggatcatactgtagttatatttttaattgtttgcagaactttcatactgagtggctgtaccaatttacattcccaccaacagtgtacaagtactcccttttctccacatcttcaccaacacttgttatctcttgtctttttgataacagccattctaacaggtatgtctctgtggttttgatttggatccctctgatgattagtaatgttgagcacctctccatatacgtgttggctgtatgtatcttcttcttttgagaa

SEQ ID NO: 563682 - DNA, 549 bp, Homo sapiens
ttacttggcaataaaaaggaatgaaatactgatacatgttgcaacatggatgaaccttggaaacatcatgctaagggaaagaagccagactcaaaaggtcacgtattrtatgatttcatttatatgcaacgtccagaataggcaaatccatagaaatagatttgtggttgccagggactggtgggaaggaatggggagtgactgctcatggttacagggcttctttttggggtgataaaaatattgtgaaattagtgaggatgattttacaatcttgtgaatatactaacaactactggattctatggcacagtttatggcatgtgaataaataaatcagttaaaacactgtgtacatgtaaagagttattattattattcaacagaaatcacagctttcataaagcccttcaccaaattctctgcagttctccagccttagagtctggattgtgcacttgtcactcatatgctgctgccttgggtgtgatttaaataatgtttaatagtgatgaaataataaatggttttaaatagattaataaataa

SEQ ID NO: 563683 - DNA, 549 bp, Homo sapiens
ttacttggcaataaaaaggaatgaaatactgatacatgttgcaacatggatgaaccttggaaacatcatgctaagggaaagaagccagactcaaaaggtcacgtattatatgatttcatttatatgcaacgtccagaataggcaaatccatagaaatagattygtggttgccagggactggtgggaaggaatggggagtgactgctcatggttacagggcttctttttggggtgataaaaatattgtgaaattagtgaggatgattttacaatcttgtgaatatactaacaactactggattctatggcacagtttatggcatgtgaataaataaatcagttaaaacactgtgtacatgtaaagagttattattattattcaacagaaatcacagctttcataaagcccttcaccaaattctctgcagttctccagccttagagtctggattgtgcacttgtcactcatatgctgctgccttgggtgtgatttaaataatgtttaatagtgatgaaataataaatggttttaaatagattaataaataa

SEQ ID NO: 563684 - DNA, 481 bp, Homo sapiens
tgggtcactggcctagccctagggagcactttggagcagaactgaaattaaaattcatgacttctacacagtattggagtcctgcctrgtatgcaaacattaatgaaaaatagctatgatttatagaatgcttaaaatgtgctagacaatgaattaaaaacttttcatatattagctcattttgttcttacagtggccctattaggtagttattatcattaaccttgttttacaaatgaggaagctaaagcacagagtttaagtcatgtccaaaattgcatggttggaaattgacagaggaggaggattggaacccatgtccctgactgtagagccagtaatcttaactgctctgttgtaatgcctgccagcaacctcagctgcgctgcaccgctctttcagatgaatgggaccttaggcactcactcacaggagaccgggaatatttttccttctaccagagaaaaataaaattgttttc

SEQ ID NO: 563685 - DNA, 518 bp, Homo sapiens
tgctttgatgaaaatggcattttataaagattgatctggcagcagtaaagtctcccaaagaggctactcaaaaaaccactgcaatacattgttgagttttctctcattcatttcccttaatttatacaagttatataatttaattaattttgtgaatatgttagaaataatcattgcttctaatatggatgagtcctttacactgttccaactcaacaaaaactaatcatgctaggaaaaaaaatatattggaagcattgtaatgtaatgtacttctgggagataaattcttaacagttctaggtagaatctaatagcataaaaggcactgcaaaataagctatccttgtctatggaatgagaaccatttcttcataagactcattgcttttagatacctgagagtgcttctcctcrttgtaacacttcttcgatattggccaccatgatcctctgcacatcttgcaattcagtgttgatggagcctaggtttcttcgagcacaactgtcaatgtaga

SEQ ID NO: 563686 - DNA, 634 bp, Homo sapiens
gcataagtaactaggagccaactgttaatcaccaagacaatagggaaaatgtctccagggcatgtcagagacctttgcagcagcccctcccatcacaggccctgaggcctgggaaggaaaaatggtttcaaggactaagccgagggcctccctgctggatgcagcctagggacttcgtgtcttacatctcagccgctctagccatggggaaaagtgtcaagggagtgtagaagagatgtctattacttatatggtactctagtacaattgtgaatgataaccaggtacatgtattactccctagctagtgtaatttactaacaacaatttttttataataaatatttaattttgcttcagattgcatgatctattgagtggtgatgggataattcacagtgttacactgtatattgaatatttgcatttttcaaagtttatggactatgtaaatctgatggaactaatgatttaacttctctaactaggtagctcattcttacgtttaacaatcttaagcatgrtatggttagaaacagctgcagagccataaagtaaaatagatgcctgagtctttcaaaatatacatccgaatataccttcaaacacttttaaatatgattgcctccaataa

SEQ ID NO: 563687 - DNA, 671 bp, Homo sapiens
atctagtaactagactctgctctgctgtgttagattcttttggtctctcctcataaatcactctctctagactctagaagactcttgtttttcttctgaactcattccagatttgctttttttaaaaaaatttcttcttaattttaaataatgaagtgagtagccctaaatgttgtatttcagagtttcattgaaaaggaatcttgtatatttttggctgcttgcctgattttatatatatrcatccatacaaagaagaagtagtatataatagagtgaaaagagcacaggacacaaaattaaaaacctggttccagacctagctgttatactggtttgctatgttgagaaaatcacctaatcactctggtctctcctgtcttcatttattcactcactcattcattcaagaagcacatataaggtgcttagggatgcagccatgtataagataggctaggtctctgccccattttaacttatagtctagtgagggttggcaaattacaaactagtaagaaaaacatttagaatgttgagatttgatatttgcttttaatgagtgtcttagttcattttgtattgctatcaagaaatacctgaggttgggtaatttatagagaaaaatggtttacttggctcacagttctgcaggctgtacaagaagcacg

SEQ ID NO: 563688 - DNA, 603 bp, Homo sapiens
tgataagggacttacatctagaatatttaactcttataactcaattataaacagaaaagtagttctattgaaatttggcagtgttagctttgctgagctaaaaagaaatggcaatgaattttagtagatatttctccaaggaagatatacaaatagctaataagcacattaatatcattagttaccagggacctgctaccccaaagcatagagatgccattttatatccactagaatagctgcaatgaaaagatagatattaacaaagtaaggtaccctgraatgatggctcatgatttcagagtaaagacacacagtaagtacatatggtgtgcaagtatctatgtagattcatgtgtgtatgtataatacacaaatacatacatttatgtggaagaattctagacattaaaagctaaaaaatgtgactagcacataagtaatcttaactatgaagactctaatttgacaatgtagggccagaaatatgtatgcaactattaacaacagcattatcattaatagcccaaaagtagaaacagtgtaaatgtctatcactggacaaatggataaacctagtgtgataaatccatacaatagaat

SEQ ID NO: 563689 - DNA, 633 bp, Homo sapiens
tcacattatgagggatgttgtgaggattaattgatgtttgcagtacacatcaaagcccagggctgcaagatgctttataaattcaaaatacccctatgttaatagcaggctctgttatgagaaacctgctaaacacaagccttccactctctggagctccatgacctttctatctagcctactaattccatagcatctcccagagggttattctctgcccctccagcctggatttgtctctaacttaataaatgyagcaaacctgaaaagcaagtatagaaaaaaaagaagggatttatttatttaagtaatgcttgttcacctggaacataatagcagctggattcctgctgaatcaagaatctatttgttccagcaggtcacccaatgttgtttatcaattttcattctcactaacagaattaagctcccaaaccatttcaaatcagttttctccccttcattttggaggctttcaattgaagggatacatttagcacggtcagagcccattaattaccagaggaatggtggcttctcctttgtgccaaagctgagctttccaagagagcatcccctacccaagatatcaactatatcttagtgcaaataccatctattccaaatgtactt

SEQ ID NO: 563690 - DNA, 522 bp, Homo sapiens
ccactgcactccagcctgacagagtcagactccttctcaatacatacatacatacatacatacatacatacatacataaattcaggtgtgggcatgatagctgtcattggtcagttctcttttttaaactgtgtgctggccccacagcatacccagccaggtacaatgtgaaagaaaatgtcttgattttagtctttgctgggctccaaaagcaacacacttatgcaaaakaaagattctttccagaccaatttctttcccatccttgtgtgtttcgttttgcgattgctctcttctgaactttacagcacattactataccacgacagttcctacgtgtttggaagaggttcaatgcagtgatgttttactctctccccacatgaaaatccaccaagctttcagttgagtttcagatggcctatcccactgactcaaaagaagaagggcgtaacatgactgaaatgtctacaatacagtttgttttgattgggaaagagaggattattctatttggatggc

SEQ ID NO: 563691 - DNA, 585 bp, Homo sapiens
attctccatgtaccagcaaaggtggttgctgacagttgtagacttaggtatttttggctcacattccaagagaaattgagaactacattttatcttccaatgcagaaaattccaggggaggcttgtaattggctacgttttatgattagtaggtgcatcacacatctctttgtaggtgactccatattacaattagtccagcttgtgttccacacccatgcctgttactgcgggaaaggaaagagcactgtgtttgataatccacagcaacatggagaatggcatatgtgtttcaaaggaaattgcatatcatttccaggagaaaaaagaaaatatatgttgggcagacaaaaatcccaggacatacactrtattaattaggtaccccagtatatcaagatggtagttttctgagttcataaagaggtacattggccttggtcagtcttcttttctaaagtataatcctcttaggcgtactacatagtggaaaatgtcatctgtagcttgatgtacacatttgtttatcactaatggctattatctatgaaacaataggcacacacacatataccacatatacac

SEQ ID NO: 563692 - DNA, 390 bp, Homo sapiens
aactaagaattacatttttgtaagtttttagtttgaagtattcaaagtgtttttcttatcaagaatagcattacttagaagaacctactatgtactctaatgaaatgtaagccaatcatattccatgtgacatttgctagttgccagaaaataaagaaaataaaaaaatacacctcaaggttgactattaaatggcataatacttctctttataaaagcaccggggaaggcctagccagatctgtaaagctgcttaaggatgctttccaaatggatgattacttccatgatgtgacgtgagcaacattygcttaactctacatccttggaaatacactcaagaagtatgttcacccttgttgtactttacaattccctagggagttaaaa

SEQ ID NO: 563693 - DNA, 566 bp, Homo sapiens
actgcctttaataattcaataatcttagcagcagagttacccacaaagttatgtctgcsagtgacttcaggaggcaagacaataatttggttgatgtttggtctgaataacaggctgcatagtctgacactagcaaacccaataggatgaaaacaactcactacgcgaagaataattcagcaggagttgagccttaaactctagtcagctctcaatgagtccctaccctctcaaactccacctactcaaatgcacagcatggtagattagtaatccaaagaccccctgagcaaactaaacacacgttttctttcttctttgggatgaacaaaacccacagagcctttcttcttgcaagattctgtgaccctgaaatctaagtagattttttttttagactgactggcagcccattactagcatttgcaagtagagaaaatgtttttactttagagatttaattctaaaaatgaagagaataagctgaggactgtacccagcagaaatcaaaataagcatttggagaaaattacccgttgctgatatgtgggaaatatttatatcca

SEQ ID NO: 563694 - DNA, 610 bp, Homo sapiens
ttacttctctttaagtgtcattgagtcatatcagaaacctgaaaataatcaattctgtgtataccaaaacttagttgacacattcttttgtaaaacattgaaataagttatccaataaccatttccactgctattttttcctttctaattggactgattttttttttttttttttttttttttgtctctgcaacaaagcttttgcctctttggtgctaaggccttaggagtgttgattgttcaaagccctcacacctattcccataaactttgctttggtgcaagcatgggcatgctatagaatcctggcaaaataattcattcaactaatatttgctgagcactgcaatgtaccatccactgctccgggtgctgggcagactgcagtgaataaaagagacaaacaaattccagccctcatgggatcaagaagaacacaagggagggacagttgttttttttcttaaggatgttggcgtagctgcacctgacatcagtaacagttgcagccatctcgaggctacaaagatagactgaagatgaaacagaacactaaggatggcgacaagaaaaaaaaaaaaaaargcagaaagattctgagtcccagatg

SEQ ID NO: 563695 - DNA, 563 bp, Homo sapiens
cctagctgaccacaccctctttgttttgttttgttttgttttgctttgtttgtgagatggagtctcagtctgtcgcccaggctggagtgcagtggtgcaaccttggctcactgcaacctctgccttctgggttctagcgattctcctgcctcagcctcccaagtagctgggattacaggctcccgccaccacgtccgagtaatatttgtctttttagcagagacggggtttcaccatattggtcaggctggtctcgaactcttgacctcaggtgatccatccgcctcagcttcccaaagtgctgggattacaggcatgagctaccgcgcctggccgaccatgccctcttaacggtatttccttccttggggttctattataccagactataccamatgtttctcttttttgccttttgtcttcttcctcttacccatagatgtgcagcttttccaaagacctctcttttctttatctcttcctccccagttttttggagtgacctccctgcttgtagctgcatctggtacctgtatttaggtgacttccacagtgacatcaca

SEQ ID NO: 563696 - DNA, 617 bp, Homo sapiens
tctgacaaataatttgtatccaaaacttaaaaataagaaaataaataacctaatgaaaaatgcaaaaatttgagcagccayttcactaaggaagatacccaggtgctcactgtgccagcatgtatactaaaattggagtgatacagagattagcatggcccgtgcacaaggatgacatgcaaatgcatgaagtggtccatttctttaaatgaagatgcccagatggcaaataaatacatgaaaagtgttcaacacaaataagctctaaggaaatgcaaatcaaaactatactgagatatcactatgtacctattagaatggctgattaaacaaaaactgacaacattaaatgctgatggggatgcagaagcaactggaacgctcaaatttctggtgagagaaaaaactggaaaacattttgacttggcagtttttataaaatcaaattaaacacatgcttataatatgatccagtaatcccactccaaggcatttttcaaagggaaatttaaaattatgttcccacaaaaattcatatgcacatattgtacttacctgaatcttcaatagaatgttgactaggaatgctgagaatggtggacatgttttgtttttga

SEQ ID NO: 563697 - DNA, 617 bp, Homo sapiens
tctgacaaataatttgtatccaaaacttaaaaataagaaaataaataacctaatgaaaaatgcaaaaatttgagcagccatttcactaaggaagatacccaggtgctcactgtgccagcatrtatactaaaattggagtgatacagagattagcatggcccgtgcacaaggatgacatgcaaatgcatgaagtggtccatttctttaaatgaagatgcccagatggcaaataaatacatgaaaagtgttcaacacaaataagctctaaggaaatgcaaatcaaaactatactgagatatcactatgtacctattagaatggctgattaaacaaaaactgacaacattaaatgctgatggggatgcagaagcaactggaacgctcaaatttctggtgagagaaaaaactggaaaacattttgacttggcagtttttataaaatcaaattaaacacatgcttataatatgatccagtaatcccactccaaggcatttttcaaagggaaatttaaaattatgttcccacaaaaattcatatgcacatattgtacttacctgaatcttcaatagaatgttgactaggaatgctgagaatggtggacatgttttgtttttga

SEQ ID NO: 563698 - DNA, 526 bp, Homo sapiens
gtccattggggctgatgtaattccctttctttgctaaggtatgtctcaaatgaataattgtttttatgccaatgttccccagagtgatcactgaggatcaaaaccatctttggtggagttaygccatttaaagaaatacatgtaaggactaggtttataggaatatatattaaaaaatcagaacatcttttttcctggaggaagagaggatttaaacttcatggcctgatgagacctggaaacagttaataggaatgtgacattttggtttttgagttttcttcactcaatctgatgatcagctgcctccaaaagtacagcctacaatctttcctctcctggcaggtagaaatctttcctctcctggcaggtagaaaaccagagagaatgctctctctggatcaaagccaactttttccaacaacaagaaaatcaagattataggaaaatttcatcttgttttactagtgatccacagcaaaatttgtccaaatgaaaaccccaaactcaccagtctgtgaagcca

SEQ ID NO: 563699 - DNA, 547 bp, Homo sapiens
caaaaactccaatttaagattttttaattaaagtttttatcttcccacatttctcgtatttcttggatctgacctaaatgttgaacttttattaagttcaaaggaatttctattttcatgtaacctaaaagaaggcataatatttatgtgtaacatgtctagaatcacacctttttaatacttgccytagtttgctttattctttggaatatatacagtccagaaagtgtctccgtcatgatactttttcactggttccattttgaaatttgataaccaaagaaagacacaatgagaacacttggacccagggtggggaacatcacacactggggcctgtcatggggttgggggctgggggagggatagcattaggagaaatacctaatgtaaatgacgagttaatgggtgcagcacaccaacatggcacatgtatacatatataacaaacctacacgttgtgcacatgtaccctagaacttaaagtataataataataaaaaaattgatataccttttaataaaatataaatagcaaaaaattttt

SEQ ID NO: 563700 - DNA, 699 bp, Homo sapiens
aaggctgggtaatattccatttaatatgtatgtatcacattttgtttatctattcatttcttttcttaaaaaattattttgaggttttatggatatatccattcatttgtcagtgcactcttgggttgcttccaccttttggctattacaaacaatgctgwtcagaacatcagtgtacaatatctgttcgagtccctgtttttaattctttggggtatagaccaataagtggaactgctggatcatatggtaatcctatttttacttttttgaggaactgccatactgtttttcaaagtggctgcactattttatattcttccagagcctttggaatggtggctagcactgacggcagcttagtcaatttaatttaattttatcaaatcaaacccatgagtcactcaaattaagattgaaatgtacaattatgttgttttgaactaaggcttaaaggttaaaaaacggcattagtgtttgtgacttgtttccctttagtaacccattagtctgagtgttatttgtatcatttcgaaaatgtaagtcagaagaaacaaaatagggatattcgtatttccctgtatacatcttactgtatctgtacttagtgaagcatctaccttaatcaaatgactagttaacacagatcggatctagaaaactacctctccccaggagaatagaagccttgcttgggca

SEQ ID NO: 563701 - DNA, 549 bp, Homo sapiens
aacaggcgggggatgggataccgcagcacygaacggccggagggattcttagcttcctgggcttcttcctgcctgccccgcccagaaggaacccagactttggttggcctcctgtggaggtcaaggctagggtttgggggtcacccccttgggagctcagagcgggatggaggacttttcagctcctagcaattcttgaatttcgttatcctggctttctgaggctgtgcattgtcagcgacctaggagacgcctctctgaagccaggcttctgaaacaggtgagcccttgtggagagccatcgtcactagcactcaggtgcactctggccttgtcctgttgtggccttgctgaccagctccaggcagaggtggtcatgatttctctgggaggcacagcctgggggaccaacaccaaccttgcttccatctactctacatctgctctacaacctgctctacatctactaagttctagagacctgagtcaggatcagttttcaagataatctggcaaagcagtggtgaaacaactcggttgcatgtttct

SEQ ID NO: 563702 - DNA, 437 bp, Homo sapiens
aaatttcagttactttgacaggaatatgcaagatattttggaaaagaacaccttttttttttcacytccagtcgtatctgtggtgttcttatagagtgcagacctccagaagcttctgagaactacatccaaggatgtctgctggggctatgaaagctcaagccttcttattgcaatggtggtagctaatatgaggcctaaatattggggtgaaaaatatggaggggcttcaggccttctaaaggtatccgaatttcttctttcatctttaaaataaataccttcccaccattcaaaaataaataattctctcagaatcaggaagtttgtgcatatttatatccttatccatgtaggcttctgaaaaggagcagaaatgtgattcctgtttaatagacgtatacaccccattgtctaattatgtgcattaatacttc

SEQ ID NO: 563703 - DNA, 432 bp, Homo sapiens
cagcttccgcttaggcaggagaaagcrttgaggaaattgaaaaagcagtcttggctttagaatcagaagacctagtttttggagccctggctctgccagttctcattgtgtagactagggcaagtcatttaacctctctgcacctcactttccccatgaatacaatgggggcagtaataatgctatttatgattgccatatttctctgaggagttaaagacattgcaccaacaaaggcaacaaaggacccagacaccattgtttcagggaagtaagagtacatgggatgtagccctgggaaacactttgagatgcttttgaggatgggccagtttggaggactattccaatggtagaaattggagttaatgcagagttgaagcaggcatgatatgactgattaacagatgcagtccgtaaatatggttaata

SEQ ID NO: 563704 - DNA, 601 bp, Homo sapiens
aaaactacttcgggttctattattattgctattttaatactgtttaatactgatggaaagcttatacttcagaatcttctggcgatggctgtgcctttgcctttttaaggatcactcgttgtaattgacgaaactattcagaaagacagtataatgtatttattgccattatttaatcaaacaactatttgctaagcttctattgtgtatccagcaatgttttagacactgtgggaaatgaaaacactgtactagatggacgtcattcttgtcttaargcggctgaacagtttatttagagaaatgaagctagcatatagaagactattagcagggaatgaaatagtaatgaatcagtaataagcaggctcagagcccagttggagtttggagaagagaaagatcttggaggtgtgagtgtttcacaaaatcttcctggaaaaagtgggaccttgaggagttcagaagagctggctaaccagagaggagaaaggtgattgcaactgctatggctaccctatggttttttagactctcccgaactataagggctttcttgatttagttgtcaattattagaaagtatgtggcttagaagtag

SEQ ID NO: 563705 - DNA, 601 bp, Homo sapiens
aaaactacttcgggttctattattattgctattttaatactgtttaatactgatggaaagcttatacttcagaatcttctggcgatggctgtgcctttgcctttttaaggatcactcgttgtaattgacgaaactattcagaaagacagtataatgtatttattgccattatttaatcaaacaactatttgctaagcttctattgtgtatccagcaatgttttagacactgtgggaaatgaaaacactgtactagatggacgtcattcttgtcttaaggcggctgaacagtttatttagagaaatgaagctagcatatagaagacwattagcagggaatgaaatagtaatgaatcagtaataagcaggctcagagcccagttggagtttggagaagagaaagatcttggaggtgtgagtgtttcacaaaatcttcctggaaaaagtgggaccttgaggagttcagaagagctggctaaccagagaggagaaaggtgattgcaactgctatggctaccctatggttttttagactctcccgaactataagggctttcttgatttagttgtcaattattagaaagtatgtggcttagaagtag

SEQ ID NO: 563706 - DNA, 597 bp, Homo sapiens
cacagccaaattctaggctgcctgcagactgggttcggggcacgatccccaaaatatctgagaaaacagcagaagcaggaaggtcactctcaccttttccctgcccttctcccctgaagcaggtcaaacgactggtgggcggaccacctgaggtcgggagttcgagaccagcctggccaacatggtgaaacyccatctctaccaaaaatacaaaaaagttagccaggcttggtggtgcacacctgtagtcccagctactggggaggctgaggtgggggaatcacttgaacctgctaggcggaagttgcaatgagccgagatcgggccactgcactccagcttgggcgacagagtgagactccatctcaaaaaaagagaggtgacccccttatacctggaggaaaggaatatccttttctttgaagacacaaggaagaatctgaacaaacagaccttgctaagttcccccagtttatcaccattaggtgataaatccctttgtgcaatcatacttctccacaactatccacttcttcatcaaacctggcacacaaaacatgcaggtttacctatttcttcaggttttcgtttccttat

SEQ ID NO: 563707 - DNA, 597 bp, Homo sapiens
cacagccaaattctaggctgcctgcagactgggttcggggcacgatccccaaaatatctgagaaaacagcagaagcaggaaggtcactctcaccttttccctgcccttctcccctgaagcaggtcaaacgactggtgggcggaccacctgaggtcgggagttcgagaccagcctggccaacatggtgaaaccccatctctaccaaaaatacaaaaaagttagccaggcttggtggtgcacacctgtagtcccagctactggggaggctgaggtgggggaatcacttgaacctgstaggcggaagttgcaatgagccgagatcgggccactgcactccagcttgggcgacagagtgagactccatctcaaaaaaagagaggtgacccccttatacctggaggaaaggaatatccttttctttgaagacacaaggaagaatctgaacaaacagaccttgctaagttcccccagtttatcaccattaggtgataaatccctttgtgcaatcatacttctccacaactatccacttcttcatcaaacctggcacacaaaacatgcaggtttacctatttcttcaggttttcgtttccttat

SEQ ID NO: 563708 - DNA, 597 bp, Homo sapiens
cacagccaaattctaggctgcctgcagactgggttcggggcacgatccccaaaatatctgagaaaacagcagaagcaggaaggtcactctcaccttttccctgcccttctcccctgaagcaggtcaaacgactggtgggcggaccacctgaggtcgggagttcgagaccagcctggccaacatggtgaaaccccatctctaccaaaaatacaaaaaagttagccaggcttggtggtgcacacctgtagtcccagctactggggaggctgaggtgggggaatcacttgaacctgckaggcggaagttgcaatgagccgagatcgggccactgcactccagcttgggcgacagagtgagactccatctcaaaaaaagagaggtgacccccttatacctggaggaaaggaatatccttttctttgaagacacaaggaagaatctgaacaaacagaccttgctaagttcccccagtttatcaccattaggtgataaatccctttgtgcaatcatacttctccacaactatccacttcttcatcaaacctggcacacaaaacatgcaggtttacctatttcttcaggttttcgtttccttat

SEQ ID NO: 563709 - DNA, 638 bp, Homo sapiens
agaagaaggtgaggtttatgcatcttcaggagcctctggctcactcccaggtatatcagacaacacctagtgggaaatggggctccaaggaacccttggacttggttcacagaatgaggctcatctgtgcctgcagattgctagatcctgtgcctatagtttagcagaatgggggccagctgggcctgacacagtgactgcttacacatcccagcatatttaatgagtgcaaccgggtcccagctccttttctaggaactgggtacaccgtgaagaataaggccrtgttcctgccatcaaagctctcacagacaagggccagtgcagcacagagcatgagctctgtgtagaaagagagctgggttcaaacctggctgctgtgttgctcagtttaactagggccttggttttcttggccacaaaatgggattacaactgtcctcactcaaagagggttataagaattggagttaacactgggtgagcatttggtatttcctgaaggtgcaaatattgttatggtgatgataaccattttttttagcttaaggtcagcctgaataagtaagaacttcagtcagccaagcagcaaatatgtatttattgaacattctagcaagaaccagacattgaaaatt

SEQ ID NO: 563710 - DNA, 618 bp, Homo sapiens
aaggattggatgaaagtccctaagcagcactggcttgggtgaatgaatccgagcatgcaaggactccggaagccagggatgtccaactgctgaagtaagggcagggaggtggcagagaagccaggtgccctgtggctgtcacctccttgagttcacatgaagcatctggtggcgggcctggggctgctgttgctcagtagggccaacagtcgagagggtgtgtgctgtatgtggaataagagaagacaaacacaaactgggctccattggcacctctgtgtctgtctctcctgtccctcaacctgcagtcgtctccagactttggtgactttacttatgcctcccatagctcatgcaactgctcgtttgcccaactcaaatctggagccacacagggaaaggcattctgagaaatgtagctgccagcctaagtatgccacaaaaagcttagcacatccktaagacccattccctttgttctggttctatatgtgtaaagcaacatcatgattgtcagtttgtctcctcaaatacctccgtaccaggaaggaagaggcctggatggtaaatgcaaatatttcagtcactggacaagtagagcatcccctgaaaatgaac

SEQ ID NO: 563711 - DNA, 610 bp, Homo sapiens
agagggtcttgtcttgatgttgatgactgctgactgatcagggtggtggttgctgaatgttacagtggctgtgccaatttcctaaaataacagcgaagtttgctgcattgattgactttttctttcataatgatttctctgcagcatgcaatgctgtttaatagtactttacccgcagtagaayttctttcaaaattagaatcaatcctctcaaatcctgctgctcctttatcaacaaagtttatgttatactctaaattgtttattgttatttcaacaatgttcatagcatctccaccaggagtagtttccatttcaagaaaccactttctttgctcagccataagaagcaacttctgatctgctaaagtttgatcatgagatggcagcaattcagccccatcttcaggctccacttctaattctagttctcttgctatttccatcacatctgcagtgacgtgttccattcaagtcttgaacctcttggtcatccatgagggttggaatcgaattcttccgaactcctgttcatgttgatattttgaccttccatgagtcatgaatgttcttaatggcatctagaatggtaaatcctttccagaagctt

SEQ ID NO: 563712 - DNA, 596 bp, Homo sapiens
ctttcataatgatttctctgcagcatgcaatgctgtttaatagtactttacccgcagtagaacttctttcaaaattagaatcaatcctctcaaatcctgctgctcctttatcaacaaagtttatgttatactctaaattgtttattgttatttcaacaatgttcatagcatctccaccaggagtagtttccatttcaagaaaccactttctttgctcagccataagaagcaacttctgatctgctaaagtttgatcatgagatggcagcaattcagccccatcttcaggctccacttctaattctagttctcttgctatttccatcacatctgcagtgacgtgttccattyaagtcttgaacctcttggtcatccatgagggttggaatcgaattcttccgaactcctgttcatgttgatattttgaccttccatgagtcatgaatgttcttaatggcatctagaatggtaaatcctttccagaagcttttcaatttactttgcgcagatccatctgaggaatcactgtctatggcaactatggccttaagaaatgtgtttcttaaataataaaacttgggagttgaaatgactcc

SEQ ID NO: 563713 - DNA, 610 bp, Homo sapiens
agagggtcttgtcttgatgttgatgactgctgactgatcagggtggtggttgctgaatgttacagtggctgtgccaatttcctaaaataacagcgaagtttgctgcattgattgactttttctttcataatgatttctctgcagcatgcaatgctgtttaatagtactttacccgcagtagaacttctttcaaaattagaatcaatcctctcaaatcctgctgctcctttatcaacaaagtttatgttatactctaaattgtttattgttatttcaacaatgttcatagcatctccaccaggagtagtttccatttcaagaaaccactttctttgctcagccataagaagcaacttctgatctgctaaagtttgatcatgagatggcagcaattcagccccatcttcaggctccacttctaattctagttctcttgctatttccatcacatctgcagtgacgtgttccattcaagtcttgaacctcttggtcatccatgagggttggaatcgaattcttccraactcctgttcatgttgatattttgaccttccatgagtcatgaatgttcttaatggcatctagaatggtaaatcctttccagaagctt

SEQ ID NO: 563714 - DNA, 596 bp, Homo sapiens
ctttcataatgatttctctgcagcatgcaatgctgtttaatagtactttacccgcagtagaacttctttcaaaattagaatcaatcctctcaaatcctgctgctcctttatcaacaaagtttatgttatactctaaattgtttattgttatttcaacaatgttcatagcatctccaccaggagtagtttccatttcaagaaaccactttctttgctcagccataagaagcaacttctgatctgctaaagtttgatcatgagatggcagcaattcagccccatcttcaggctccacttctaattctagttctcttgctatttccatcacatctgcagtgacgtgttccattcaagtcttgaacctcttggtcatccatgagggttggaatcgaattcttccgaactcctgttcatgttgatattttgacyttccatgagtcatgaatgttcttaatggcatctagaatggtaaatcctttccagaagcttttcaatttactttgcgcagatccatctgaggaatcactgtctatggcaactatggccttaagaaatgtgtttcttaaataataaaacttgggagttgaaatgactcc

SEQ ID NO: 563715 - DNA, 581 bp, Homo sapiens
tcgaagacccctgatcacagatcaccataactgtatcataatgttgaaattttgaattgttgccagaattaccaaaatgcgacacagaaacaggcagtgagagcacacgttctcacagggttgccaccgactttcaattcgtaaaaactgcagtatctgtgaagtacagtgaagtgagaagcagtaaagggaggtatttctgtgctgtaatcagtcatgaattagacgggcttttctggattcacttgggaatccagcgttggrtgatatgtgtgtaaggaaatatagtctcagttttaaacaaccactttacaaatgaatatgtggagcacaacccatttatcatgtgaggattatccaggtgaaactgcccttaccaaagtcatcttttgactcctctgggaatgattcttccttgtacgtgttcctcagggccctaagtctacttgctgcttgtctattgaccatgttttcttattgaatgcctacaaaagttaagtgatgaataaaaagagaaggatgcatttaaaccacttctgctatttggaaattctgcataatcccttagtttggtgaagagt

SEQ ID NO: 563716 - DNA, 624 bp, Homo sapiens
agaattctataagatggaagagtgggtgacgagggtgatttctcaagcttatccccttccagcgtcctaccatgaagacctgttaggggcagtgtacagagggttgtaggctctcaaagagggtacctcaaaagatagagacaagaaagctgcagaaatgaaagccaaacaatgggtttgcccctctgagcagtgcctacctcacaccctaatcaccctaatcagtcattacctacctacccacctccctaatcaggttctattgttacagcaagaagactgaaaagtaatttagatacaatcaaccatggttcagggacaaaagataatttattagagtttctrtgttcaccaagtgctgctgtttttagcagatatgactttaaggtttgaacatggcctgagcgagctatctgtccaaacttcacagtctctgctgtggtttctgattcagaaattactgggcaatcttctgattaggtttctggggaccttggtgtgcagaagggcgttccctaggtggggaactctcgtgctctgggtcctggaaagctgtgcccctttctagcattctgatttagaaattggtcctttgttgatttcatcatcttgattcagttttcc

SEQ ID NO: 563717 - DNA, 521 bp, Homo sapiens
tcgtcatcactggtagtggattcaatgtgcagagagcatgtcccatctccttctcgcctcattttgcagtgctcatttctcttagaaatctgcttcccatctttgaaccagtaaacctgaaatgaaaaattatcaagatgtacactgttttgtttatctttagaggttaatgaactagggtctggggtgaggaaagggccaactgccatcttttaagtgaccatactttatgaagcacttgaaaaaaagttataaaacatattaaaaatggctgtataatatgcccctccactygtacctgtataatactatttaatattaaatattatattatttaagtcaagaatccaatataatttaggactaagatgaagcttttgactatttttcttgtacttcacacatagttttaaaagccaccctaaggactggacatgccttcagaagcaaaataatgaaaaccaggagagtggatattctcattaccttatttacaagctcaagtttcctgcagttgcaga

SEQ ID NO: 563718 - DNA, 521 bp, Homo sapiens
tcgtcatcactggtagtggattcaatgtgcagagagcatgtcccatctccttctcgcctcattttgcagtgctcatttctcttagaaatctgcttcccatctttgaaccagtaaacctgaaatgaaaaattatcaagatgtacactgttttgtttatctttagaggttaatgaactagggtctggggtgaggaaagggccaactgccatcttttaagtgaccatactttatgaagcacttgaaaaaaagttataaaacatattaaaaatggctgtataatatgcccctccactcgtacctgtataayactatttaatattaaatattatattatttaagtcaagaatccaatataatttaggactaagatgaagcttttgactatttttcttgtacttcacacatagttttaaaagccaccctaaggactggacatgccttcagaagcaaaataatgaaaaccaggagagtggatattctcattaccttatttacaagctcaagtttcctgcagttgcaga

SEQ ID NO: 563719 - DNA, 609 bp, Homo sapiens
ttgggtcattcatgcatccgatccttttaccaattctctacgaatggcccttgttcctatgggactatgtgaagaaaagggcatatcaaggtggatatcagactctttttactctcacatagtctgtttccagttattcctgaaaacctttacaaaggctttgcttgctttgtatcagkatattacgtatctgaatccaaattaccaggaacaaaagaaaaacttgatggatgaagagaaacaagaataccagtccctgaggtctatagaataaaataaagggagtaaccaaggagccagcccaaaatggagaagtattctgagggattttcttttttttctttttgagacagggttctcactctgtcacccaggctggagtgcaatgacatgatcacagctcactgtagcctcaactccctgggttcaagcagtcctcccatcttggcctcccaagtagcagagaccacaggtatgcaccatcatgcccagctaatttttaattttttttctagggatgaggtctccctatattgcccaggctggtcttgaactgggctcaagcaatcctcccactttggcttcccagagtgttgggattacaggcct

SEQ ID NO: 563720 - DNA, 609 bp, Homo sapiens
ttgggtcattcatgcatccgatccttttaccaattctctacgaatggcccttgttcctatgggactatgtgaagaaaagggcatatcaaggtggatatcagactctttttactctcacatagtctgtttccagttattcctgaaaacctttacaaaggctttgcttgctttgtatcaggatattacgtatctgaatccaaattaccaggaacaaaagaaaaacttgatggatgaagagaaacaagaataccagtccctgaggtctatagaataaaataaagggagtaaccaaggagccagcccaaaatggagaagtattctgagggattttcttttttttctttttgagacagggttctcactctgtcacccaggctggagtgcaatgacatgatcacagctcactgtagcctcaactccctgggttcaagcagtcctcccatcttggcctcycaagtagcagagaccacaggtatgcaccatcatgcccagctaatttttaattttttttctagggatgaggtctccctatattgcccaggctggtcttgaactgggctcaagcaatcctcccactttggcttcccagagtgttgggattacaggcct

SEQ ID NO: 563721 - DNA, 446 bp, Homo sapiens
aaaccccatctctactacaaatacaaaagttagccaggcatggtggcgagcacctgcagtcccagctactcaggaggctgaggcaggagaatcttgaacctaggaggcrgagattgcagtgagccgagatcatgccactgcaattcagcctgggcaacagagcaagactccatctcaaaaaaaaaaattaaaattaaatgtaaaggtattttctgcactgttctgcacaaatgtttcactatcaatccactgtttgtaaatgtccattttaaatgtccagtactgggtttatgccgtgttctccattttcccttgcctcatctcctttgtgagtaaaaacaggagtttttgtgttagctgctcatagatgacgtctacactcaaaggaaagaatattttttctgtgtaaatctgggtgttatagaaattaaatcaatgagaaatga

SEQ ID NO: 563722 - DNA, 427 bp, Homo sapiens
cttaaaaggagttgcagcaccttaattctgccagtttctatcttagctgcatttagtttaatggacaaagatcagggccttgtggggatgggacagagaagagattcctgggaaatgccctaaaacaggagatggaagcagccacaaacaagcatagacagcaaacggaaatggaaacaaggaaagaaacaggatgataggacagaatgtcactgtgggggatgggcaaaaccccgtctctactaaaaatacaaaaattagctgagcatggtggcgggcgccggtagtcccagctactcaggaggctaaggcrggagaatcgcttgaacctgggaggccgtggttgcagtgagccgagattgtgccattgcactccagcctgggcgacagagcgagactccacctcgaggaaaagaagaaaaagaaa

SEQ ID NO: 563723 - DNA, 406 bp, Homo sapiens
gggagcagagggatgagtcaaagrtgggcagaaatgtcatgactcctactctccctctctttgggaacagtgggctgcactgcaaaggacgagaatgcttgatgtgggaggatggtgggtgggatggtgaaggggccacaggaggctgggcagacccttcagggctcctgttctggtcagatggcagggcctggatggctcagttactctctgagtaacaaaacacgtgaaattcaaaactcagcaaacaagcacttttaagactcaggaaaatgcccaaccatatccagagtgcagcttccccatggaagaaaagttccaagcagattgcacaagcacagctgcttcacaaagattttaattggcacagagtgcaagtttgtttgtttgtttgtttgtttgtttt

SEQ ID NO: 563724 - DNA, 364 bp, Homo sapiens
ggatgagtcaaaggtgggcagaaatgtcatgactcctactctccctctctttgggaacagtgggctgcactgcaaaggacgagaatgcttgatgtgggaggatggtgggtgggatggtgaaggggccacaggaggctgggcagasccttcagggctcctgttctggtcagatggcagggcctggatggctcagttactctctgagtaacaaaacacgtgaaattcaaaactcagcaaacaagcacttttaagactcaggaaaatgcccaaccatatccagagtgcagcttccccatggaagaaaagttccaagcagattgcacaagcacagctgcttcacaaagattttaattggcacagagtg

SEQ ID NO: 563725 - DNA, 585 bp, Homo sapiens
agattgggtccatttatctgtgacaactctgaagctgggcaaaattctgaccaagagattgaaatctttctcctacctccctcaaatagggagaccttctatatgatatcatcaaaggctgggtaactttgtagctgagctgaagctagaatttcttgtaaaggccaattcatttccttctcttctctggcatggaaatcatcccccatgggtggccatgacataacccatcctcacttctgcaggagttagcctcagcagcattgctttagcttatgatacatatcacaggatctaccaaaacctcctctaagcttccaagggttttcatgcttccgtgtcaggaattagcagttacaaccttcttatggcctcctcatcttgagggctcccgtaccttacatttatctctctaagtctcctttccttccccctccccgcaacacacatggtaggtaacatcaggactgggatcagyccagcagggagcagctaggggtgtctccaggcaggttgtgaaatcagcaaagagttggattaatatctgggaccccagagggaggttctgtgaggttcactgacctg

SEQ ID NO: 563726 - DNA, 567 bp, Homo sapiens
tacctaatgtaaatgaagagttaatgggtgcagcacaccaacaygacacatgtatacatacgtaacaaacctgcatgttgtgcacatgtaccctagaacttaaagtataataaaaaaagaaaaaaaattgcttgtgaaaaatgaggaggttgtgttaaaagagaaccttccaattccaatgtctgtgggtctgtgttatgtggacatacagtgtgtgtgcacactgaattttagccaaactcctaatatagatcagaaatatgatgggagaagggggtgggggcagggacgcaggcccagatgagaccctcaccaccaagaggcagaagtcagtgagtggttgttaagaaggtgaccagcagtgttcagactgcccagattggaggacaggctctaccctctacccaccagctgtgtgatcttgagagctcgcataacctgggcgggtgtccatatcctcacctgtagattggatctgatgacatatcacccttacaggctattgtgaaaattaaacaaaataatgcccgtgagttactagtgccaatcaaaggtatgttttgtgat

SEQ ID NO: 563727 - DNA, 567 bp, Homo sapiens
tacctaatgtaaatgaagagttaatgggtgcagcacaccaacatgacacatgtatacataygtaacaaacctgcatgttgtgcacatgtaccctagaacttaaagtataataaaaaaagaaaaaaaattgcttgtgaaaaatgaggaggttgtgttaaaagagaaccttccaattccaatgtctgtgggtctgtgttatgtggacatacagtgtgtgtgcacactgaattttagccaaactcctaatatagatcagaaatatgatgggagaagggggtgggggcagggacgcaggcccagatgagaccctcaccaccaagaggcagaagtcagtgagtggttgttaagaaggtgaccagcagtgttcagactgcccagattggaggacaggctctaccctctacccaccagctgtgtgatcttgagagctcgcataacctgggcgggtgtccatatcctcacctgtagattggatctgatgacatatcacccttacaggctattgtgaaaattaaacaaaataatgcccgtgagttactagtgccaatcaaaggtatgttttgtgat

SEQ ID NO: 563728 - DNA, 567 bp, Homo sapiens
tacctaatgtaaatgaagagttaatgggtgcagcacaccaacatgacacatgtatacatacgtaacaaacctgcatgttgtgcacatgtaccctagaacttaaagtataataaaaaaagaaaaaaaattgcttgtgaaaaatgaggaggttgtgttaaaagagaaccttccaattccaatgtctgtgggtctgtgttatgtggacatacagtgtgtgygcacactgaattttagccaaactcctaatatagatcagaaatatgatgggagaagggggtgggggcagggacgcaggcccagatgagaccctcaccaccaagaggcagaagtcagtgagtggttgttaagaaggtgaccagcagtgttcagactgcccagattggaggacaggctctaccctctacccaccagctgtgtgatcttgagagctcgcataacctgggcgggtgtccatatcctcacctgtagattggatctgatgacatatcacccttacaggctattgtgaaaattaaacaaaataatgcccgtgagttactagtgccaatcaaaggtatgttttgtgat

SEQ ID NO: 563729 - DNA, 567 bp, Homo sapiens
tacctaatgtaaatgaagagttaatgggtgcagcacaccaacatgacacatgtatacatacgtaacaaacctgcatgttgtgcacatgtaccctagaacttaaagtataataaaaaaagaaaaaaaattgcttgtgaaaaatgaggaggttgtgttaaaagagaaccttccaattccaatgtctgtgggtctgtgttatgtggacatacagtgtgtgtgcacactgaattttagccaaactcctaatatagatcagaaatatgatgggagaagggggtgggggcagggacgcaggcccagatgagaccctcaccaccaagaggcagaagkcagtgagtggttgttaagaaggtgaccagcagtgttcagactgcccagattggaggacaggctctaccctctacccaccagctgtgtgatcttgagagctcgcataacctgggcgggtgtccatatcctcacctgtagattggatctgatgacatatcacccttacaggctattgtgaaaattaaacaaaataatgcccgtgagttactagtgccaatcaaaggtatgttttgtgat

SEQ ID NO: 563730 - DNA, 561 bp, Homo sapiens
ctctgtggtccttgtacctgtaggggaccctccttggtccccaggaatcctggaaccaaaatggggaacacctcaatgaaatgaacccctaaaatatctctccctatcgcccacccccagccagctatgtagctaatgcttatcctgcctaagttgtcttttgccggctcttctaaacatcctatcactggactcttttaaacagctgtattgaggtrtatttcatgtattatagaaattaattgaattgaattgaatttgaatttatataattcagcagtttttaatgtagtcacagagttatgcaactatcaccaaaatctaattttagaacattgtcatcaccccggaaagaaaccccatgcctgttggtagtcatgtctcattccagaaacaaccctccccgtgtcccctcgtccccagccctgcagcctaggcaaccatgaaactgttttcatacaataaatatattgtatttttgtgattgacttctttcacttagcataatgttttcaaggttcatctatgtatggctacttcattcctttttaaggctgagta

SEQ ID NO: 563731 - DNA, 580 bp, Homo sapiens
aattttgaaatgtcttactctgccattttaactgacaccattttcctcagctatttattttaaaaatgagtgttctgtattatatttagcatgctgagtatggggcwtttttcataaggggatttgggtagcatgtaatccataatgttcctggaactggaattcaccagtcattttcaatccacttcagtttggcaccctactccactcctacaatgaatctattcttgttaaggttataaacaactctcctttgccaaatctggtaaatactgtcctcttctcaactgtctaactctctcatcagcatttgacagagtgagacactaccttgtgaaaacactaaacctgttttggcttttatgataccatattccccagggttttctcccatctctctgcccatatttgattagctccctattttagtccattttatgctgctataacagaataccacagactgagtaatttatagtgaacataaatgtatttggcttatagttctggaggatgggaagcccaagagcatggcaccagcatctggtgagggccttcatgctatgtcagccccaggcga

SEQ ID NO: 563732 - DNA, 580 bp, Homo sapiens
aattttgaaatgtcttactctgccattttaactgacaccattttcctcagctatttattttaaaaatgagtgttctgtattatatttagcatgctgagtatggggcttttttcataaggggatttgggtagcatgtaatccataatgttcctggaactggaattcaccagtcattttcaatccacttcagtttggcaccctactccactcctacaatgaatctattcttgttaaggttataaacaactctcctttgccaaatctggtaaatactgtcctcttctcaactgtctaactctctcatcagcatttgacagagtgagacactaccttgtgaaaacactaaacctgttttggcttttatgataccatattccccagggttttctcccatctctctgcccatatttgattagctccctattttagtccattttatgctgctataacagaataccacagactgagtaatttatagtgaacataaatgtatttggcttatagttctggaggaygggaagcccaagagcatggcaccagcatctggtgagggccttcatgctatgtcagccccaggcga

SEQ ID NO: 563733 - DNA, 483 bp, Homo sapiens
tgatgctgacctctgctcagcttctggagatgcctcaggaaacttagaatcatggcggaaggcaaagagggagcagtcatgtcayatggccagagcaggagcaaaagagagagcagggaggtgccacacacacttttaaaccaccagatttcgtgagaattcactctattttgaggacagcaccaagaagatggtgctaaccactcaagagaaaccgcccccatgatccaaataccttccgccaggccccacctccaacactggggattacaattaaacatgagatttggatggagacacagagccaaaccatatcacgctccttccctgagtccttgacctggagtagatgcctgggttgtctccatttctcaaatgaggaaactgaaggactgacatcaggccaagactaacaggtactcactctcagatagcgcctgaaagctgacacaagttcagtgagactgctaggacaaccccctg

SEQ ID NO: 563734 - DNA, 463 bp, Homo sapiens
ggcgagatccaactctactaaaatagcttctatctgtataatgaaaagaactttttaatggaatatcaggagaagctagaaaaataaaaccatcaagtttattaatacagacacttctagtttacagaatttcaagtctacatgtggtaactttcttccactgaaatttatttatgaaaataaatttggtgtacattatttggaagtctattgatgttcttgctgaaaaatgatttcataaaaaataataatgcttatctttgtgcttgatagagtctacttgatakgtcaaataggaaatatttacatttctaatagctgggctggttgcagtggttcatgcctgttatcccggcactttgggaggccgaggcggttggatcacatgagcctaggaattcaagaccaggctggccaacatagtgaaaccccatctctactgaaaatacaaaaattagccaga

SEQ ID NO: 563735 - DNA, 593 bp, Homo sapiens
gatgtgatggttggtttcccaattttgcacatgctctttctctcaacttaaaagaccattaaatcttctgatatctgatggtagataaattgatatacaaatgaactgatagataaatttaccaaacaaggatttgttaactccatatatccaattgttctccaaatacattctttcatgctttgggtactatatccttcaaggaggaggtggtgtaaatatataatcagactgagaataaagatgagatggtaagtcctcatgttaacaggttatcagaatagcaataaagcactacactaacaatccacaaagagacataaaaagatgaaaacttttttttttttgagacggagtctcgctctgtcgcccaggctggagtgcagtggcgcaatcccggctcactgcaagctccgcctcccaggttcatgccattctcttgccccagccttccaagtagctgggactacaggcgcccaccaccacacctggctaatttttttgtgtttttagtagagacggggtttcrccgtgttagccaggatggtctcgatctcctgacctcgtgatcctcctgccttggcctcccaaag

SEQ ID NO: 563736 - DNA, 489 bp, Homo sapiens
aggaagtaaagaattcaggtaggcttgaaaattatactcaagaaagaaaattggtcctagttacttgtacatggaaacaactggaaataaataaattagaatctactaagattttgagggattctaattgttaaaatccttatgaactggccaagaaaaagcctatgactataatactcttttccagtcctcaaacttgcaccagcaggaaagagtttctggaagttgtataggtccccaaaactggctcactcttcaatattcacagaagataaggtacaaggacaaacttctcagggctggaaccagagacaaaagacaacgacgggcaagagagttttttttttaccaggcagcaggtttatagtctaatctgtgaatattctctactgacaaataggagaacgcctacccagcaggagttagctatttctgtaragttttactgttttcccttttcttttccagttgggagtttttaattatagt

SEQ ID NO: 563737 - DNA, 561 bp, Homo sapiens
gaaaacaagcgggaggaaagtcgtatctttagtcaagtcttgtttactaacgtactattaatgattatcttttctttttctttatacctttttgcatttttcaatttcctaaaatagccttacatgccttttatcaccaggagaaaaattacttctaaagtaatttcagtcaacatgcatactaagaactcttcagatttatctgttagaagctgtgcatgaatgccagtccttgcatctgtcttggaactcacagagagctcttttcccatggctttaagcaatactcaaaaagactagcatacctgaatttcctagtcctatgtttttttcatccaacagccagtcttgtatttctagctgttttctaaacatttcaaccaaaccattttacagataactcatacagtcatcctttgatatgcatggggaattggttccaggatcccccttgtatrccaaaatccatggatgctcaagttactggtataaaatagtgtagtatttgcatataacctacacacatcctcctatatactttaaataatctctagattactt

SEQ ID NO: 563738 - DNA, 552 bp, Homo sapiens
agataaagaagaaaaataaatcctaaagttaatattcaatacatgatgatgtcacccttactaaagccaaagagggcattatcctatcattctcatcgctaagaactcttctcctcttggcacatgcttattcagttaaagataagccaagcctttcttttgtattttttttttaagagaamaaatttacttcggttttgagttttattcctggctctgggtagcttatttttttgacccttattttccccaatttataaaatgaaatagttatcttcactccccaggattgttgtgaagagtaagtcaaaagataaaatgaggtgactcaggcaaaagtacctggccctgtgtagtgagtacattgtatgtgttacatatattcttattgctgagaatccacgaaagaatgaattaaataatgaggaccctttcatcagggtttttgagtgagttttttaaaatacaaggtagtagtttgtgtaaatactaaatccattggtacctgtgcagaatgtaggaaatggagttgctaattccaaaaaaaacagc

SEQ ID NO: 563739 - DNA, 552 bp, Homo sapiens
agataaagaagaaaaataaatcctaaagttaatattcaatacatgatgatgtcacccttactaaagccaaagagggcattatcctatcattctcatcgctaagaactcttctcctcttggcacatgcttattcagttaaagataagccaagcctttcttttgtattttttttttaagagaaaaaatttacttyggttttgagttttattcctggctctgggtagcttatttttttgacccttattttccccaatttataaaatgaaatagttatcttcactccccaggattgttgtgaagagtaagtcaaaagataaaatgaggtgactcaggcaaaagtacctggccctgtgtagtgagtacattgtatgtgttacatatattcttattgctgagaatccacgaaagaatgaattaaataatgaggaccctttcatcagggtttttgagtgagttttttaaaatacaaggtagtagtttgtgtaaatactaaatccattggtacctgtgcagaatgtaggaaatggagttgctaattccaaaaaaaacagc

SEQ ID NO: 563740 - DNA, 634 bp, Homo sapiens
gtttattcaggtgaatgcaatttttaactgattaatgatttatcaatggttttgttacatagttgttgctattagcgatggttggtcttattaaaatatgtcacttgatacagaatctcctgtgggaaaagaatgtgagaaacaaggacaatcactgcatggaggtcataaggctgaaggtacagtttactgttgcagactttyggacaaagtccttttcttggctgttataaaaactatatttggttttaaacagaaacactggttttagtacaaatcatctttgtctactttcatttttctttattattttcatgactgaaaaggagctttggaaatcactgcataaggcttgatttatttgcacaactttctttagggttgcagctagaacaaacctgtgcgctttgaaatgttaccttctgctctctgttcccaagtacagagaaataatgttgcaaatctcacttctgctgaacattatgcttcctgatgcatttagcagacactaaacatttgtcatactctaaacaaagttacaaaggactagaagaattcttgttctgtatttagaaacccactcacattacttgatatttgggtatttaagtcatgaaaggtatttcttctagga

SEQ ID NO: 563741 - DNA, 634 bp, Homo sapiens
gtttattcaggtgaatgcaatttttaactgattaatgatttatcaatggttttgttacatagttgttgctattagcgatggttggtcttattaaaatatgtcacttgatacagaatctcctgtgggaaaagaatgtgagaaacaaggacaatcactgcatggaggtcataaggctgaaggtacagtttactgttgcagacttttggacaaagtccttttcttggctgttataaaaactatatttggttttaaacagaaacactggttttagtacaaatcatctttgtctactttcatttttctttattattttcatgactgaaaaggagctttggaaatcactgcataaggcttgatttatttgcacaactttctttagggttgcagctagaacaaacctgtgygctttgaaatgttaccttctgctctctgttcccaagtacagagaaataatgttgcaaatctcacttctgctgaacattatgcttcctgatgcatttagcagacactaaacatttgtcatactctaaacaaagttacaaaggactagaagaattcttgttctgtatttagaaacccactcacattacttgatatttgggtatttaagtcatgaaaggtatttcttctagga

SEQ ID NO: 563742 - DNA, 634 bp, Homo sapiens
gtttattcaggtgaatgcaatttttaactgattaatgatttatcaatggttttgttacatagttgttgctattagcgatggttggtcttattaaaatatgtcacttgatacagaatctcctgtgggaaaagaatgtgagaaacaaggacaatcactgcatggaggtcataaggctgaaggtacagtttactgttgcagacttttggacaaagtccttttcttggctgttataaaaactatatttggttttaaacagaaacactggttttagtacaaatcatctttgtctactttcatttttctttattattttcatgactgaaaaggagctttggaaatcactgcataaggcttgatttatttgcacaactttctttagggttgcagctagaacaaacctgtgcgctttgaaatgttaccttctgctctctgttcccaagtacagagaaataatgttgcaaatctcacttctgctgaacattatgcttcctgatgcatttagcagacactaaacatttgtcatactctaaacaaagttacaaaggactagaagaattcttgttctgtatttagaaacccactcacrttacttgatatttgggtatttaagtcatgaaaggtatttcttctagga

SEQ ID NO: 563743 - DNA, 374 bp, Homo sapiens
gctaagtaataaaggtacacaaagggcaaattatactagatttctttcccacttgttttctatgtctcwtgcaattcaccttgattcccttcagtttctgtttaatgtagaaagtggcattttcattattttaagcttctagcacaatgaaagaatttctctttttcatgaacaggatcataaatggaagggaggaagagtgtcctatatcatatttattgttcaacaaaacactgctccacggcttcaattcagtttaaaaaagagaatttattgaatatctaacacatacataaaaggcagtaaagacaaatgagaagaggggaggatattgaagtatacggacttcaatgctgagttttacatcttaggaa

SEQ ID NO: 563744 - DNA, 541 bp, Homo sapiens
aggtgtgatttctagtgtagctgaacatcrtttatttgacaatattgcacttgtgtgtgggtgtgtgcgtgtgtagctactctttaattttgttctcacataatgattagatattaacaattaattcagtaaaatgtatgttttgcaatatttctccatgttatcatgctttaaattagtttaatcatgcccctataatgtgtacattttaacctttgactataggtctcaatcttactttggttcctgtatttgaatttatgctaataaagtcctacagctaaaaaagattatataaacttatctacatttttactagtattctggtgtcattttaaattatgtaataaaatcaaattttaatttggattattcttatctgagttaaggatctaaatttttaatattcttataaatattacataattatttctgaaccatatattgactaatctgccctttatatgatgtgcattataagagcttgggattgtttcatttgcaaagatgaatgcttgagaagtagatatttaatcataac

SEQ ID NO: 563745 - DNA, 541 bp, Homo sapiens
aggtgtgatttctagtgtagctgaacatcatttatttgacaatattgcacttgtgtgtgggtgtgtgcgtgtgtagctactctttaattttgttctcacataatgattagatattaacaattaattcagtaaaatgtatgttttgcaatatttctccatgttatcatgctttaaattagtttaatcatgmccctataatgtgtacattttaacctttgactataggtctcaatcttactttggttcctgtatttgaatttatgctaataaagtcctacagctaaaaaagattatataaacttatctacatttttactagtattctggtgtcattttaaattatgtaataaaatcaaattttaatttggattattcttatctgagttaaggatctaaatttttaatattcttataaatattacataattatttctgaaccatatattgactaatctgccctttatatgatgtgcattataagagcttgggattgtttcatttgcaaagatgaatgcttgagaagtagatatttaatcataac

SEQ ID NO: 563746 - DNA, 541 bp, Homo sapiens
aggtgtgatttctagtgtagctgaacatcatttatttgacaatattgcacttgtgtgtgggtgtgtgcgtgtgtagctactctttaattttgttctcacataatgattagatattaacaattaattcagtaaaatgtatgttttgcaatatttctccatgttatcatgctttaaattagtttaatcatgcccctataatgtgtacattttaacctttgactataggtctcaatcttactttggttcctgtatttgaatttatgctaataaagtcctacagctaaaaaagattatataaacttatctacatttttactagtattctggtgtcattttaaattatgtaatraaatcaaattttaatttggattattcttatctgagttaaggatctaaatttttaatattcttataaatattacataattatttctgaaccatatattgactaatctgccctttatatgatgtgcattataagagcttgggattgtttcatttgcaaagatgaatgcttgagaagtagatatttaatcataac

SEQ ID NO: 563747 - DNA, 541 bp, Homo sapiens
aggtgtgatttctagtgtagctgaacatcatttatttgacaatattgcacttgtgtgtgggtgtgtgcgtgtgtagctactctttaattttgttctcacataatgattagatattaacaattaattcagtaaaatgtatgttttgcaatatttctccatgttatcatgctttaaattagtttaatcatgcccctataatgtgtacattttaacctttgactataggtctcaatcttactttggttcctgtatttgaatttatgctaataaagtcctacagctaaaaaagattatataaacttatctacatttttactagtattctggtgtcattttaaattatgtaataaaatcaaattttaatttggattattsttatctgagttaaggatctaaatttttaatattcttataaatattacataattatttctgaaccatatattgactaatctgccctttatatgatgtgcattataagagcttgggattgtttcatttgcaaagatgaatgcttgagaagtagatatttaatcataac

SEQ ID NO: 563748 - DNA, 248 bp, Homo sapiens
aatgcttgagaagtagatatttaatcataacrtttcaaaatctattggataacttagaattgaaaaatagcctataggttgaaaaactcctgtagtgaaggaagaaaataactaatatacagtgacaatataaatattataagtatttattttattatcaccctgaaatttgataatacaaacatgtaatatctacatatcatccatatatcatgtcataaaaaatcaatacattcttcaaaaattta

SEQ ID NO: 563749 - DNA, 248 bp, Homo sapiens
aatgcttgagaagtagatatttaatcataacgtttcaaaatctaytggataacttagaattgaaaaatagcctataggttgaaaaactcctgtagtgaaggaagaaaataactaatatacagtgacaatataaatattataagtatttattttattatcaccctgaaatttgataatacaaacatgtaatatctacatatcatccatatatcatgtcataaaaaatcaatacattcttcaaaaattta

SEQ ID NO: 563750 - DNA, 248 bp, Homo sapiens
aatgcttgagaagtagatatttaatcataacgtttcaaaatctattggataacytagaattgaaaaatagcctataggttgaaaaactcctgtagtgaaggaagaaaataactaatatacagtgacaatataaatattataagtatttattttattatcaccctgaaatttgataatacaaacatgtaatatctacatatcatccatatatcatgtcataaaaaatcaatacattcttcaaaaattta

SEQ ID NO: 563751 - DNA, 248 bp, Homo sapiens
aatgcttgagaagtagatatttaatcataacgtttcaaaatctattggataacttagaattgaaaaatagcctataggttgaaaaactcctgtagtgaagraagaaaataactaatatacagtgacaatataaatattataagtatttattttattatcaccctgaaatttgataatacaaacatgtaatatctacatatcatccatatatcatgtcataaaaaatcaatacattcttcaaaaattta

SEQ ID NO: 563752 - DNA, 571 bp, Homo sapiens
ccttggatatgaactccctttggagctttgcaacaagcagtttcttaaaggcaaaaaagggtccagaagtgggatgatscaaagaggtttgtcacaaattctcattggcttatggaaataacatttattagtgactggctatacactgttacactattattgggtgtggattatactatctggtgtggcgttattggttaattaatagctactgtggcaacagcaagcagcctagatgaacacacagctcaaagaggagcaggacagaactgctgtctcatttgaatatctctctgggcctgattatttaaaaggacttgcatttctcacatgaaagttattttcttttctcaatgtccataaatgagaataaatagacgtaaaatagatcttttcgaggatgaagtaaatggaatgaaaaacaaaacccaagctgaccagaaatcatagagggaagaaaaggttataaatatatggatttgtcagagtgattttaagctattaggaatcagttaaatgttgggggattttgtctgagaatgggctaaaggagaatgtcccttttgccttc

SEQ ID NO: 563753 - DNA, 571 bp, Homo sapiens
ccttggatatgaactccctttggagctttgcaacaagcagtttcttaaaggcaaaaaagggtccagaagtgggatgatgcaaagaggtttgtcacaaattctcattggcttatggaaataacatttattagtgactggctatacactgttacactattattgggtgtggattatastatctggtgtggcgttattggttaattaatagctactgtggcaacagcaagcagcctagatgaacacacagctcaaagaggagcaggacagaactgctgtctcatttgaatatctctctgggcctgattatttaaaaggacttgcatttctcacatgaaagttattttcttttctcaatgtccataaatgagaataaatagacgtaaaatagatcttttcgaggatgaagtaaatggaatgaaaaacaaaacccaagctgaccagaaatcatagagggaagaaaaggttataaatatatggatttgtcagagtgattttaagctattaggaatcagttaaatgttgggggattttgtctgagaatgggctaaaggagaatgtcccttttgccttc

SEQ ID NO: 563754 - DNA, 571 bp, Homo sapiens
ccttggatatgaactccctttggagctttgcaacaagcagtttcttaaaggcaaaaaagggtccagaagtgggatgatgcaaagaggtttgtcacaaattctcattggcttatggaaataacatttattagtgactggctatacactgttacactattattgggtgtggattatactrtctggtgtggcgttattggttaattaatagctactgtggcaacagcaagcagcctagatgaacacacagctcaaagaggagcaggacagaactgctgtctcatttgaatatctctctgggcctgattatttaaaaggacttgcatttctcacatgaaagttattttcttttctcaatgtccataaatgagaataaatagacgtaaaatagatcttttcgaggatgaagtaaatggaatgaaaaacaaaacccaagctgaccagaaatcatagagggaagaaaaggttataaatatatggatttgtcagagtgattttaagctattaggaatcagttaaatgttgggggattttgtctgagaatgggctaaaggagaatgtcccttttgccttc

SEQ ID NO: 563755 - DNA, 438 bp, Homo sapiens
gttattttcttttctcaatgtccataaatgagaataaatagacgtaaaatagatcttttcgaggatgaagtaaatggaatgaaaaacaaaacccaagctgaccagaaatcatagagggaagaaaaggttataaatatatggatttgtcagagtgattttaagctattaggaatcagttaaatgttgggggattttgtctgagaatgggctaaaggagaatgtcccttttgccttctgaagtttccctgaaaatcactaataggaggcagataaatagtagaaaaggcatacaggtttctgcaatgtgtgtacactggagccmttagaacgaagacccagacacatgatgcgtgcagaagcttatctaccacatgaagtttacagaaagaatggggtcttggatcacaggaaaaaaaaaaaggttatgtgagaaaacca

SEQ ID NO: 563756 - DNA, 363 bp, Homo sapiens
ctcacaaattcagtgttgatgagagcccatttcatggatcatagatggtgccttctttctatgtcctcacacagtggaagtcacacaagaactccattgagcttcttttataaaggcactaatcccattcataagggctcggcccccaagacctggtcacctcccaagtgttctgctctccctgatctgtrtcatatacagactctcttggattccttaccaattgcttgagagatcacagtgggtttgtggggaaaaagttttcaagatgatggatctttcccaacttctgcaactgtcagcggtctcccaatctcaccagccccactttgtctttaggaatttattgattattccagcttt

SEQ ID NO: 563757 - DNA, 516 bp, Homo sapiens
agtgttgatgagagcccatttcatggatcatagatggtgccttctttctatgtcctcacacagtggaagtcacacaagaactccattgagcttcttttataaaggcactaatcccattcataagggctcggcccccaagacctggtcacctcccaagtgttctgctctccctgatctgtgtcatatacagactctcttggattccttaccaattgcttgagagatcrcagtgggtttgtggggaaaaagttttcaagatgatggatctttcccaacttctgcaactgtcagcggtctcccaatctcaccagccccactttgtctttaggaatttattgattattccagctttacttgtcatagtggtgtctatttgcatctgtcctatgtaagtgcatctgtcctctttctccttgcaggtgcttgttttccctcacattttgactcagttcttggcaacctggttgctctaaaaataaagtcatgactttgaagttagtttggttctttcattgt

SEQ ID NO: 563758 - DNA, 422 bp, Homo sapiens
ttttataaaggcactaatcccattcataagggctcggcccccaagacctggtcacctcccaagtgttctgctctccctgatctgtgtcatatacagactctcttggattccttaccaattgcttgagagatcacagtgggtttgtggggaaaaagttttcaagatgatggatctttcccaacttctgcarctgtcagcggtctcccaatctcaccagccccactttgtctttaggaatttattgattattccagctttacttgtcatagtggtgtctatttgcatctgtcctatgtaagtgcatctgtcctctttctccttgcaggtgcttgttttccctcacattttgactcagttcttggcaacctggttgctctaaaaataaagtcatgactttgaagttagtttggttctttcattgt

SEQ ID NO: 563759 - DNA, 422 bp, Homo sapiens
ttttataaaggcactaatcccattcataagggctcggcccccaagacctggtcacctcccaagtgttctgctctccctgatctgtgtcatatacagactctcttggattccttaccaattgcttgagagatcacagtgggtttgtggggaaaaagttttcaagatgatggatctttcccaacttctgcaactgtcagcggtctcccaatctcaccagccccactttgtctttaggaatttattgattattccagctttacttgtcatagtggtgtctatttgcatctgtcctatgtaagtgcatctgtcctctttctccttgcaggtgcttgttttccctcacattttgactcagttcttggcaacctsgttgctctaaaaataaagtcatgactttgaagttagtttggttctttcattgt

SEQ ID NO: 563760 - DNA, 611 bp, Homo sapiens
gctttgtaactttaatagatgtaatgtgtaaagtgataatactttaaaatggaggaaataaaagagatttayataagaatgatgtttctatgtattaccagaagtttactagtataaattggaagatgatttgaataattaattttccatatacctatatggtaaacttacaacaacaacaaaaattctcaaaaatatataataaaataattcattagtaatctaaagttccctattttagaaaatattctttcattgcaaaataaagcaataaagaaaaatatttgagaaatatataaaacaaacggtaaaatggcagacataaatagaattataccaattataatcttaaatgtgagcagattaaaatccattccagaggcagagatagtcagactggattaaaacaagtgatcccaatatacgctgagatgcaaggatactaatggattgaaagtaaaaagatgacaaaaaatatcatgcaaagagcaatcataagaacactgaactcattatactcataacacacaacatagactattaaaaatgtgaatagaattttaaaaattatattgtagtaaaacgggggtcaacgctttaggaagacatag

SEQ ID NO: 563761 - DNA, 611 bp, Homo sapiens
gctttgtaactttaatagatgtaatgtgtaaagtgataatactttaaaatggaggaaataaaagagatttatataagaatgatgtttctatgtattaccagaagtttactagtataaattggaagatgatttgaataattaattttccatatacctatatggtaaacttacaacaacaacaaaaattctcaaaaatatataataaaataattcattagtaatctaaagttccctattttagaaaatattctttcattgcaaaataaagcaataaagaaaaatatttgagaaatatataaaacaaacggtaaaatggcagacataaatagaattataccaattataatcttaaatgtgagcagattaaaatccattccagaggcagagatagtcagactggattaaaacaagtgatcccaatatacrctgagatgcaaggatactaatggattgaaagtaaaaagatgacaaaaaatatcatgcaaagagcaatcataagaacactgaactcattatactcataacacacaacatagactattaaaaatgtgaatagaattttaaaaattatattgtagtaaaacgggggtcaacgctttaggaagacatag

SEQ ID NO: 563762 - DNA, 611 bp, Homo sapiens
gctttgtaactttaatagatgtaatgtgtaaagtgataatactttaaaatggaggaaataaaagagatttatataagaatgatgtttctatgtattaccagaagtttactagtataaattggaagatgatttgaataattaattttccatatacctatatggtaaacttacaacaacaacaaaaattctcaaaaatatataataaaataattcattagtaatctaaagttccctattttagaaaatattctttcattgcaaaataaagcaataaagaaaaatatttgagaaatatataaaacaaacggtaaaatggcagacataaatagaattataccaattataatcttaaatgtgagcagattaaaatccattccagaggcagagatagtcagactggattaaaacaagtgatcccaatatacgctgagatgcaaggatactaatggattgaaagtaaaaagatgacaaaaaatatcatgcaaagagcaatcataagaacactgaactcattatactcataacacacaacatagactattaaaaatgtgaatagrattttaaaaattatattgtagtaaaacgggggtcaacgctttaggaagacatag

SEQ ID NO: 563763 - DNA, 611 bp, Homo sapiens
gctttgtaactttaatagatgtaatgtgtaaagtgataatactttaaaatggaggaaataaaagagatttatataagaatgatgtttctatgtattaccagaagtttactagtataaattggaagatgatttgaataattaattttccatatacctatatggtaaacttacaacaacaacaaaaattctcaaaaatatataataaaataattcattagtaatctaaagttccctattttagaaaatattctttcattgcaaaataaagcaataaagaaaaatatttgagaaatatataaaacaaacggtaaaatggcagacataaatagaattataccaattataatcttaaatgtgagcagattaaaatccattccagaggcagagatagtcagactggattaaaacaagtgatcccaatatacgctgagatgcaaggatactaatggattgaaagtaaaaagatgacaaaaaatatcatgcaaagagcaatcataagaacactgaactcattatactcataacacacaacatagactattaaaaatgtgaatagaattttaaaaattatattgtagwaaaacgggggtcaacgctttaggaagacatag

SEQ ID NO: 563764 - DNA, 541 bp, Homo sapiens
tatactcataacacacaacatagactattaaaaatgtgaatagaattttaaaaattatattgtagtaaaacgggggtcaacgctttaggaagacatagctattacaatcatgtatgcacagatatgagctaaattgtttcctytatatagatgctgaaattctaaccactgaatatgacctcattaggaaaataggttctttgcagctgatcaagttaagatacaatcagatgagcctgaattcaatatgactgatgtccttattaaaagaagagatttgagtagagggagacatacacacagggagagtaccatgtgattatgaggacagagattagccaaggaatgccaaagactgccactaaaccatcagaagcgagaaacaaggcacagaacaggctttctctcatagcccttgaagggaccatccctgctgacccctcaatctcagacttttagcttccaggactataagactataaatgtatgttgttcatggcacccagtttgtgttacttggttatggcagccctaggaaact

SEQ ID NO: 563765 - DNA, 541 bp, Homo sapiens
tatactcataacacacaacatagactattaaaaatgtgaatagaattttaaaaattatattgtagtaaaacgggggtcaacgctttaggaagacatagctattacaatcatgtatgcacagatatgagctaaattgtttcctttatatagatgctgmaattctaaccactgaatatgacctcattaggaaaataggttctttgcagctgatcaagttaagatacaatcagatgagcctgaattcaatatgactgatgtccttattaaaagaagagatttgagtagagggagacatacacacagggagagtaccatgtgattatgaggacagagattagccaaggaatgccaaagactgccactaaaccatcagaagcgagaaacaaggcacagaacaggctttctctcatagcccttgaagggaccatccctgctgacccctcaatctcagacttttagcttccaggactataagactataaatgtatgttgttcatggcacccagtttgtgttacttggttatggcagccctaggaaact

SEQ ID NO: 563766 - DNA, 541 bp, Homo sapiens
tatactcataacacacaacatagactattaaaaatgtgaatagaattttaaaaattatattgtagtaaaacgggggtcaacgctttaggaagacatagctattacaatcatgtatgcacagatatgagctaaattgtttcctttatatagatgctgaaattctaaccactgaatatgacctcattaggaaaataggttctttgcagctgatcaagttaagatacaatcagatgagcctgaattcartatgactgatgtccttattaaaagaagagatttgagtagagggagacatacacacagggagagtaccatgtgattatgaggacagagattagccaaggaatgccaaagactgccactaaaccatcagaagcgagaaacaaggcacagaacaggctttctctcatagcccttgaagggaccatccctgctgacccctcaatctcagacttttagcttccaggactataagactataaatgtatgttgttcatggcacccagtttgtgttacttggttatggcagccctaggaaact

SEQ ID NO: 563767 - DNA, 541 bp, Homo sapiens
tatactcataacacacaacatagactattaaaaatgtgaatagaattttaaaaattatattgtagtaaaacgggggtcaacgctttaggaagacatagctattacaatcatgtatgcacagatatgagctaaattgtttcctttatatagatgctgaaattctaaccactgaatatgacctcattaggaaaataggttctttgcagctgatcaagttaagatacaatcagatgagcctgaattcaatatgactgatgtccttattaaaagaagagatttgagtagagggagacatacacacagggagagtaccatgtgattatgaggacagagattagccaaggaatgccaaagactgccactaaaccatcagaagcgagaaacaaggcayagaacaggctttctctcatagcccttgaagggaccatccctgctgacccctcaatctcagacttttagcttccaggactataagactataaatgtatgttgttcatggcacccagtttgtgttacttggttatggcagccctaggaaact

SEQ ID NO: 563768 - DNA, 574 bp, Homo sapiens
tataattattataatgcccagttttcaaaaaaagttacaaggcatacaaagaacgggaaagtatggctcattcaaaggaacaaaacaaactgacagaaaatatctctaaggaaacccagacttcaaacttacyagacaaagactttaaaacaactctcttaattatactcaaatgtcacaaggaaagcataaacaaagaaataaaggattcagaaaaaatattaaaaagtaggaatatcaacagagatagcagaaattctggagtggaaaactacaatgataaaaatttaaaaatcaccagagggatttaagagtatatttgcacacacagaggaagtcatgagcttgaagataagaaaatggaaaatattgactctgagaaacagataaaaaatgagcagagactaaggaatctgtgggacatcatcaaatagaccaacgttcatattctagaaggataaattatgttgttgaaaactttagcattctttcttttcaccttcctccctcttcctcctcctttttacttttcttcctcttcctttctcttcttctttctctccttcattatccc

SEQ ID NO: 563769 - DNA, 574 bp, Homo sapiens
tataattattataatgcccagttttcaaaaaaagttacaaggcatacaaagaacgggaaagtatggctcattcaaaggaacaaaacaaactgacagaaaatatctctaaggaaacccagacttcaaacttaccagacaaagactttaaracaactctcttaattatactcaaatgtcacaaggaaagcataaacaaagaaataaaggattcagaaaaaatattaaaaagtaggaatatcaacagagatagcagaaattctggagtggaaaactacaatgataaaaatttaaaaatcaccagagggatttaagagtatatttgcacacacagaggaagtcatgagcttgaagataagaaaatggaaaatattgactctgagaaacagataaaaaatgagcagagactaaggaatctgtgggacatcatcaaatagaccaacgttcatattctagaaggataaattatgttgttgaaaactttagcattctttcttttcaccttcctccctcttcctcctcctttttacttttcttcctcttcctttctcttcttctttctctccttcattatccc

SEQ ID NO: 563770 - DNA, 574 bp, Homo sapiens
tataattattataatgcccagttttcaaaaaaagttacaaggcatacaaagaacgggaaagtatggctcattcaaaggaacaaaacaaactgacagaaaatatctctaaggaaacccagacttcaaacttaccagacaaagactttaaaacaactctcttaattatactcaaatgtcrcaaggaaagcataaacaaagaaataaaggattcagaaaaaatattaaaaagtaggaatatcaacagagatagcagaaattctggagtggaaaactacaatgataaaaatttaaaaatcaccagagggatttaagagtatatttgcacacacagaggaagtcatgagcttgaagataagaaaatggaaaatattgactctgagaaacagataaaaaatgagcagagactaaggaatctgtgggacatcatcaaatagaccaacgttcatattctagaaggataaattatgttgttgaaaactttagcattctttcttttcaccttcctccctcttcctcctcctttttacttttcttcctcttcctttctcttcttctttctctccttcattatccc

SEQ ID NO: 563771 - DNA, 591 bp, Homo sapiens
tgtaacatctttctgattttaggagaggtagcagttccccgtttagcctaaacgctatttttttttaaagctcagccaagagactccattataattttcaaatgtgtgtaacttaaattctcatatgaaataccactatgcttaaattagtcaaaacattttccccatctacaactctatcttttcattgcratcattttcacaaaagtgactgcagctcacagaccctaaaaggagaaaatccagggtaggttatctgatctagttctgaagacaggatctagagattatttaatatgaaataggtcacctgaaatgaagtgtttcctgaaaacagcttggatcagcccagttttctaccactgaaccatgcatttggtttaaaaaacacaacaactctggggaatatcggctgcttccaactgtgttgaaggtgttaaagaaaagagcataaaagtaaaaatgatcatctgaggcctttatagtctctgctcaagagactagagtcttccattcttaacgaaacacccaaatatcttaataattgggcaaaatctaaatatcagagagataattttatcttgaagattg

SEQ ID NO: 563772 - DNA, 591 bp, Homo sapiens
tgtaacatctttctgattttaggagaggtagcagttccccgtttagcctaaacgctatttttttttaaagctcagccaagagactccattataattttcaaatgtgtgtaacttaaattctcatatgaaataccactatgcttaaattagtcaaaacattttccccatctacaactctatcttttcattgcaatcattttcacaaaagtgactgcrgctcacagaccctaaaaggagaaaatccagggtaggttatctgatctagttctgaagacaggatctagagattatttaatatgaaataggtcacctgaaatgaagtgtttcctgaaaacagcttggatcagcccagttttctaccactgaaccatgcatttggtttaaaaaacacaacaactctggggaatatcggctgcttccaactgtgttgaaggtgttaaagaaaagagcataaaagtaaaaatgatcatctgaggcctttatagtctctgctcaagagactagagtcttccattcttaacgaaacacccaaatatcttaataattgggcaaaatctaaatatcagagagataattttatcttgaagattg

SEQ ID NO: 563773 - DNA, 598 bp, Homo sapiens
aagataatccaccatgatcaaggggtttcataccagggatgcagggatggtttaacatacacatgtgcgtagccaaagcaagactaagcaaaaagaacaaatctgaaggcatcacattacctgatttcaaacttatactataaggccatagtcaccaaaacagcatggtacggttataaaaataggcacatggaccaatggaacagaatagagaacccagaaataaacccaaatacttacagccaactgatcttcaacaaagcaaacaaaaacgtaaagtggaaaaaggatacccttttcaacaaatggtgctgggataattggctagccacatgtaggagaatgaaactggatcctcmtctctcactgtatacaaaaatcaacccaagataaattaaagacttaaatctaagacctgaaactataaaaattctaaaagataccattggaaaaatcattctagacattggcttaggcaaggatttcaagcaaatgcaataaaaacaaagataaatagctgggacttaattaaactaaagaaattttgcacagcaaaaggaacagtcagcagagtaaacagacaacccacagagaagga

SEQ ID NO: 563774 - DNA, 408 bp, Homo sapiens
ctcatacaccacctcccctaacgttaatatagcttccaggtcagtaaccagtgtcagagagcagcccatgcaactacaaattcaatagatgtcgaacacagggtcaagcctagaataagaagtcttagctaattaagtatgctttgttccccaaattyatattaacaaaaacttggatatgtcagagaatgcattctaagttcactcaacctaggagggagaaacataattttaaattaagagctgaagcattcttgtcctaacaaaaagcaaggaaaacgaaatatcacaccacaggagggatttcacaaattagtgtcaacatcaaaaccttaaaataggcaaggaaaatgcagatttacaatgaactcttgtacttgttttgttcagagaagagatggttctgag

SEQ ID NO: 563775 - DNA, 586 bp, Homo sapiens
ctggtttaattgatgctttcaactgctgcttctgatcaactccttcagctagaataaattgatgaggattttggcatgtggtattagagatggttattaattttttcctcttatttgcattgttcaatgtagtaaatactagctgtatagggctacttcaattcaaattaattacaatgaaatatacttaaatattgcattttttagtcactgttggttcattattgaatatcttcagctaagatttcccatctaaatacactaagaggtggcttagttaactggtcgtccacaaatattgasgctgatgttaactcctgatatattctctgcaaatagaatattcatgagcctcctcctgaaatcagcagcctagagatagttttataaattggatacaagttggaaatctatatactctttcagtgtttgaaatattagcttcccagggaagaaaatcaaattcataagctatgttaggacgatttaactcaagatgttcaaaactgaaatgacgtattctacaatatgtgataaaaccaccccctaacaacttaaagcaaaacagggattgaccttaaagacc

SEQ ID NO: 563776 - DNA, 586 bp, Homo sapiens
ctggtttaattgatgctttcaactgctgcttctgatcaactccttcagctagaataaattgatgaggattttggcatgtggtattagagatggttattaattttttcctcttatttgcattgttcaatgtagtaaatactagctgtatagggctacttcaattcaaattaattacaatgaaatatacttaaatattgcattttttagtcactgttggttcattattgaatatcttcagctaagatttcccatctaaatacactaagaggtggcttagttaactggtcgtccacaaatattgacgctgatgttaactcctgatatattctctgcaaatagaatattcatgagcctcctcctgaaatcagcagcctagagatagttttataaattggatacaagttggaaatctatatactctttcagtgtttgaaatattagcttcccagggaagaaaatcaaattcrtaagctatgttaggacgatttaactcaagatgttcaaaactgaaatgacgtattctacaatatgtgataaaaccaccccctaacaacttaaagcaaaacagggattgaccttaaagacc

SEQ ID NO: 563777 - DNA, 586 bp, Homo sapiens
ctggtttaattgatgctttcaactgctgcttctgatcaactccttcagctagaataaattgatgaggattttggcatgtggtattagagatggttattaattttttcctcttatttgcattgttcaatgtagtaaatactagctgtatagggctacttcaattcaaattaattacaatgaaatatacttaaatattgcattttttagtcactgttggttcattattgaatatcttcagctaagatttcccatctaaatacactaagaggtggcttagttaactggtcgtccacaaatattgacgctgatgttaactcctgatatattctctgcaaatagaatattcatgagcctcctcctgaaatcagcagcctagagatagttttataaattggatacaagttggaaatctatatactctttcagtgtttgaaatattagcttcccagggaagaaaatcaaattcataagmtatgttaggacgatttaactcaagatgttcaaaactgaaatgacgtattctacaatatgtgataaaaccaccccctaacaacttaaagcaaaacagggattgaccttaaagacc

SEQ ID NO: 563778 - DNA, 394 bp, Homo sapiens
ttaaagcaaaacagggattgaccttaaagacctgccttttcctcatcccccaatcagttttcaaatctygcattttatttcaaaaggtccttatccccctagtctcttgtttctagactcggcacatatttaagtttgttacctctatctactgacatttttctcttcaaacggtatctatgcctgccaaatgtgaatatacaaaaaacaaatcagaatgtgccattctgatttaaactgcttattagttaaaaccctcaagataacatccgggttcttggctgcaatgagtcaagcctacttacatctttttttgtctttggctgcacatttcctatcacatcacactccagcaaagccaagctgtgccggccttctaccccatctccactat

SEQ ID NO: 563779 - DNA, 394 bp, Homo sapiens
ttaaagcaaaacagggattgaccttaaagacctgccttttcctcatcccccaatcagttttcaaatctcgcattttatttcraaaggtccttatccccctagtctcttgtttctagactcggcacatatttaagtttgttacctctatctactgacatttttctcttcaaacggtatctatgcctgccaaatgtgaatatacaaaaaacaaatcagaatgtgccattctgatttaaactgcttattagttaaaaccctcaagataacatccgggttcttggctgcaatgagtcaagcctacttacatctttttttgtctttggctgcacatttcctatcacatcacactccagcaaagccaagctgtgccggccttctaccccatctccactat

SEQ ID NO: 563780 - DNA, 394 bp, Homo sapiens
ttaaagcaaaacagggattgaccttaaagacctgccttttcctcatcccccaatcagttttcaaatctcgcattttatttcaaaaggtccttatccccctagtctcttgtttctagactcggcacatatttaagtttgttacctctatctactgacwtttttctcttcaaacggtatctatgcctgccaaatgtgaatatacaaaaaacaaatcagaatgtgccattctgatttaaactgcttattagttaaaaccctcaagataacatccgggttcttggctgcaatgagtcaagcctacttacatctttttttgtctttggctgcacatttcctatcacatcacactccagcaaagccaagctgtgccggccttctaccccatctccactat

SEQ ID NO: 563781 - DNA, 394 bp, Homo sapiens
ttaaagcaaaacagggattgaccttaaagacctgccttttcctcatcccccaatcagttttcaaatctcgcattttatttcaaaaggtccttatccccctagtctcttgtttctagactcggcacatatttaagtttgttacctctatctactgacatttttctcttcaaacggtatctatgcctgccaaatgtgaatatacaaaaaacaaatcagaatgtgccattctgatttaaactgcttattagttaaaaccctcaagataacatcygggttcttggctgcaatgagtcaagcctacttacatctttttttgtctttggctgcacatttcctatcacatcacactccagcaaagccaagctgtgccggccttctaccccatctccactat

SEQ ID NO: 563782 - DNA, 598 bp, Homo sapiens
aagataatccaccatgatcaaggggtttcataccagggatgcagggatggtttaacatacacatgtgcgtagccaaagcaagactaagcaaaaagaacaaatctgaaggcatcacattacctgatttcaaacttatactataaggccatagtcaccaaaacagcatggtacggttataaaaataggcacatggaccaatggaacagaatagagaacccagaaataaacccaaatacttacagccaactgatcttcaacaaagcaaacaaaaacgtaaagtggaaaaaggatacccttttcaacaaatggtgctgggataattggctagccacatgtaggagaatgaaactggatcctcatctctcactgtatacaaaaatcaacccaagataaattaaagacttaaatctaagacctgaaactataaaaattctaaaagataccattggaaaaatcattctagacattggcttaggcaaggatttcaagcaaatgcaataaaaacaaagataaatagctgggacttaattaaactaaagaamttttgcacagcaaaaggaacagtcagcagagtaaacagacaacccacagagaagga

SEQ ID NO: 563783 - DNA, 599 bp, Homo sapiens
cgtgccgcggttatttgcccgcggcggctttttgccccccgcccccgtggctttttgccccatggccatcctcagaagcgtgagtggaacagagtgaagggaaagctgttttcttcraaagctcaaaaatcttgaactttcaaatagggataagtgttatttttgctccaagcacacatttgagaaatcttccatttagcggatatgatgataaacccacattttttgttttaatctgaaaatgtatttgtatggttcttggaaatattttttttgcatataaaattatagtttatcatcttatttcaagttttatttaccatttgatagttactcctaaaatgtcattgattaaagaatcatctattgctccaactgctctttactaaaggtaatttgtctttttaacctcatcaggctccttttaagctctcaaactgaccttatatttttttacagattgaatgcattaagtccatttattatttatgatgaatttatttatgtatttattttcgctatcacaagtagaaaaagcctataagttgctatgccaaaaacctgcctctagatggcaaacaaaccccgcaatacacaaa

SEQ ID NO: 563784 - DNA, 599 bp, Homo sapiens
cgtgccgcggttatttgcccgcggcggctttttgccccccgcccccgtggctttttgccccatggccatcctcagaagcgtgagtggaacagagtgaagggaaagctgttttcttcaaaagctcaaaaatcttgaactttsaaatagggataagtgttatttttgctccaagcacacatttgagaaatcttccatttagcggatatgatgataaacccacattttttgttttaatctgaaaatgtatttgtatggttcttggaaatattttttttgcatataaaattatagtttatcatcttatttcaagttttatttaccatttgatagttactcctaaaatgtcattgattaaagaatcatctattgctccaactgctctttactaaaggtaatttgtctttttaacctcatcaggctccttttaagctctcaaactgaccttatatttttttacagattgaatgcattaagtccatttattatttatgatgaatttatttatgtatttattttcgctatcacaagtagaaaaagcctataagttgctatgccaaaaacctgcctctagatggcaaacaaaccccgcaatacacaaa

SEQ ID NO: 563785 - DNA, 535 bp, Homo sapiens
aatgtcattgattaaagaatcatctattgctccaactgctctttactaaaggtaatttgtctttttaacctcatcaggctccttttaagctctcaaactgaccttatwtttttttacagattgaatgcattaagtccatttattatttatgatgaatttatttatgtatttattttcgctatcacaagtagaaaaagcctataagttgctatgccaaaaacctgcctctagatggcaaacaaaccccgcaatacacaaaagagagccaaattcttagaaaccctgggaaaggaagagggctactgtcccattaacaacttggagcccttaaggcaagaatgaggtggaccatctggaacatctgggaggagacaccagggtgcggagtagtggggaacctgctctgtgctctgagactgaaagcccagccttgcctctcaccactgccttgactgtgtccccatctgctgtgaagtgaatggtgtcttctaaattcatgctgagccctaattgctgaaaagtgtaagacatgcaa

SEQ ID NO: 563786 - DNA, 603 bp, Homo sapiens
ctggaacatctgggaggagacaccagggtgcggagtagtggggaacctgctctgtgctctgagactgaaagcccagccttgcctctcaccrctgccttgactgtgtccccatctgctgtgaagtgaatggtgtcttctaaattcatgctgagccctaattgctgaaaagtgtaagacatgcaatggggggattatgtgcatcttcctgacaccaacatgatgctcaggaaggagacttcttgttttctcttaggattcttttactaaccaagattttgcctctactgcatatttccctttgctgattgtccctcccttttgacagaagatggcccagggcattcactactaagtctcaacctcttacccaaagccctcagtctagtgttgctctttccttcatgctatttttgtttcttttcttgtcatcatcttggcaataaaatagtcacttttttctttctacctattaaagatgttaccttagttaattacagtggtttccttcagaatgataaatggtctttcaaaatgatgtaaagagatctaaatccgtgtgctccagaagttgaatgaagctctgtctagcacgggtgccagtga

SEQ ID NO: 563787 - DNA, 603 bp, Homo sapiens
ctggaacatctgggaggagacaccagggtgcggagtagtggggaacctgctctgtgctctgagactgaaagcccagccttgcctctcaccactgccttgactgtgtccccatctgctgtgaagtgaatggtgtcttctaaattcatgctgagccctaattgctgaaaagtgtaagacatgcaatggggggattatgtgcatcttccygacaccaacatgatgctcaggaaggagacttcttgttttctcttaggattcttttactaaccaagattttgcctctactgcatatttccctttgctgattgtccctcccttttgacagaagatggcccagggcattcactactaagtctcaacctcttacccaaagccctcagtctagtgttgctctttccttcatgctatttttgtttcttttcttgtcatcatcttggcaataaaatagtcacttttttctttctacctattaaagatgttaccttagttaattacagtggtttccttcagaatgataaatggtctttcaaaatgatgtaaagagatctaaatccgtgtgctccagaagttgaatgaagctctgtctagcacgggtgccagtga

SEQ ID NO: 563788 - DNA, 486 bp, Homo sapiens
tcttgttttctcttaggattcttttactaaccaagattttgcctctactgcatatttccctttgctgattgtccctcccttttgacagaagatggcccagggcattcactactaagtctcaacctcttacccaaagccctcagtctrgtgttgctctttccttcatgctatttttgtttcttttcttgtcatcatcttggcaataaaatagtcacttttttctttctacctattaaagatgttaccttagttaattacagtggtttccttcagaatgataaatggtctttcaaaatgatgtaaagagatctaaatccgtgtgctccagaagttgaatgaagctctgtctagcacgggtgccagtgactctcccagagtgctccatgcagctggacccacggagtccctctgtgctgtcatatcacccactgccttctgtgaatgagatattctgattggaatcctggtggatgctatttgagccat

SEQ ID NO: 563789 - DNA, 566 bp, Homo sapiens
cttcctgacaccaacatgatgctcaggaaggagacttcttgttttctcttaggattcttttactaaccaagattttgcctctactgcatatttccctttgctgattgtccctcccttttgacagaagatggcccagggcattcactactaagtctcaacctcttacccaaagccctcagtctagtgttgctctttccttcatgctatttttgtttcttttcttgtcatcatcttggcaataaaatartcacttttttctttctacctattaaagatgttaccttagttaattacagtggtttccttcagaatgataaatggtctttcaaaatgatgtaaagagatctaaatccgtgtgctccagaagttgaatgaagctctgtctagcacgggtgccagtgactctcccagagtgctccatgcagctggacccacggagtccctctgtgctgtcatatcacccactgccttctgtgaatgagatattctgattggaatcctggtggatgctatttgagccatgcccccacaactcctatgaaagccgaggaccacaggcccctgaa

SEQ ID NO: 563790 - DNA, 566 bp, Homo sapiens
cttcctgacaccaacatgatgctcaggaaggagacttcttgttttctcttaggattcttttactaaccaagattttgcctctactgcatatttccctttgctgattgtccctcccttttgacagaagatggcccagggcattcactactaagtctcaacctcttacccaaagccctcagtctagtgttgctctttccttcatgctatttttgtttcttttcttgtcatcatcttggcaataaaatagtcacttttttctttctacctattaaagatgttaccttagttaattacagtggtttccttcagaatgrtaaatggtctttcaaaatgatgtaaagagatctaaatccgtgtgctccagaagttgaatgaagctctgtctagcacgggtgccagtgactctcccagagtgctccatgcagctggacccacggagtccctctgtgctgtcatatcacccactgccttctgtgaatgagatattctgattggaatcctggtggatgctatttgagccatgcccccacaactcctatgaaagccgaggaccacaggcccctgaa

SEQ ID NO: 563791 - DNA, 566 bp, Homo sapiens
cttcctgacaccaacatgatgctcaggaaggagacttcttgttttctcttaggattcttttactaaccaagattttgcctctactgcatatttccctttgctgattgtccctcccttttgacagaagatggcccagggcattcactactaagtctcaacctcttacccaaagccctcagtctagtgttgctctttccttcatgctatttttgtttcttttcttgtcatcatcttggcaataaaatagtcacttttttctttctacctattaaagatgttaccttagttaattacagtggtttccttcagaatgataaatggtctttcaaaatgatgtaaagagatctaaatccgtgtgctccagaagttgaatgaagctctgtctascacgggtgccagtgactctcccagagtgctccatgcagctggacccacggagtccctctgtgctgtcatatcacccactgccttctgtgaatgagatattctgattggaatcctggtggatgctatttgagccatgcccccacaactcctatgaaagccgaggaccacaggcccctgaa

SEQ ID NO: 563792 - DNA, 486 bp, Homo sapiens
tcttgttttctcttaggattcttttactaaccaagattttgcctctactgcatatttccctttgctgattgtccctcccttttgacagaagatggcccagggcattcactactaagtctcaacctcttacccaaagccctcagtctagtgttgctctttccttcatgctatttttgtttcttttcttgtcatcatcttggcaataaaatagtcacttttttctttctacctattaaagatgttaccttagttaattacagtggtttccttcagaatgataaatggtctttcaaaatgatgtaaagagatctaaatccgtgtgctccagaagttgaatgaagctctgtctagcaygggtgccagtgactctcccagagtgctccatgcagctggacccacggagtccctctgtgctgtcatatcacccactgccttctgtgaatgagatattctgattggaatcctggtggatgctatttgagccat

SEQ ID NO: 563793 - DNA, 566 bp, Homo sapiens
cttcctgacaccaacatgatgctcaggaaggagacttcttgttttctcttaggattcttttactaaccaagattttgcctctactgcatatttccctttgctgattgtccctcccttttgacagaagatggcccagggcattcactactaagtctcaacctcttacccaaagccctcagtctagtgttgctctttccttcatgctatttttgtttcttttcttgtcatcatcttggcaataaaatagtcacttttttctttctacctattaaagatgttaccttagttaattacagtggtttccttcagaatgataaatggtctttcaaaatgatgtaaagagatctaaatccgtgtgctccagaagttgaatgaagctctgtctagcacgggtgccagtgactctcccagagtgctccatgcagctggacccacrgagtccctctgtgctgtcatatcacccactgccttctgtgaatgagatattctgattggaatcctggtggatgctatttgagccatgcccccacaactcctatgaaagccgaggaccacaggcccctgaa

SEQ ID NO: 563794 - DNA, 517 bp, Homo sapiens
ctctgtctagcacgggtgccagtgactctcccagagtgctccatgcagctggacccacggagtccctctgtgctgtcatatcacccactgccttctgtgaatgagatattctgattrgaatcctggtggatgctatttgagccatgcccccacaactcctatgaaagccgaggaccacaggcccctgaagacaatcacaggtctctagactcacagctcatgaccgtcctctgcagacacagcttctccccggatggctgagttttgtcattggctgtgtccttccttgtgcatgacaacaggagacatagaaggtctgtaagcagccctgcaagccaggttctgagcaagccctcctgtgtggggccctcttacctggacataggtgtgtaaaccaaaaatgaaactctaagctccctaaccaactgaatgaactcctcctctcagccaaggacacaccaaaatcaacctgaaatacaatacagtccatgatcggaacggatgattggacatgcct

SEQ ID NO: 563795 - DNA, 582 bp, Homo sapiens
ttatgacattgagaaaaggaggaagccagggtgtgtggagagagagagagagagagagagagagagagattgtgatgtatgtacaggactaacactgagacctggttatgtaatggtgtagtamtgagtatcatccccaaatagtgaggtttcattccaagaagactatgcatgtatctcatttgggaaaacagcttttgcaggtgtaaattaaggagcttgaaacagggagatggtcttagattaatcaactgggacttaaatgcaaactcaagtgtcctaataaaaacaagaggtagagagacatttagcatagactgaagtggagaaggcagtgtgaacacagagacagagattgcagtgatgtgtccacatcccgggagagagaagccaccagaagctggaagagctaaatcagactgctccctagagcttcagaaggagccagaactgatgactccaagatcttagcccagtgaaactgatctggacttctgaactatgagagattccattcctgttgtttgaagctaccacatttttgagaacttgttacagtagcccgaggacactaacacaaat

SEQ ID NO: 563796 - DNA, 583 bp, Homo sapiens
cattaggttgggtcccctcagtgagaaggatgccaaagattcgcatgcaggcagtatatttacaaagtgcgggaaacaagcaaatgagcccgggaggggaggagggaaagggaaagtgaaaggtgcctcagatagaggcccctctgaggatgacgasagctcaagcccacatagaaacacaggaaaaatgcctctgttattccacctgagaggtgagggagctgcgggatgtgtacacctcccttgtcatcactgattgacagccgtcctaggggatgctaattccaggccatgaggtctgcctcatttgcagcctgagctgcttccccaggttcagacagagcagtgaaggggagaaagggccatagagagtcagctgaagtataatgactagaatccccaaggcgtagtaacaatgactgctaaaattatgcacaaagaaaaagcgcatttgaatccagagatgtatctctctgaatctggatatatggatcctggcagcctgttcagtagccatttcccagaaatccagttctctggaaaagcagcaggaggtttgtgcacaggctgcactaccttggtc

SEQ ID NO: 563797 - DNA, 583 bp, Homo sapiens
cattaggttgggtcccctcagtgagaaggatgccaaagattcgcatgcaggcagtatatttacaaagtgcgggaaacaagcaaatgagcccgggaggggaggagggaaagggaaagtgaaaggtgcctcagatagaggcccctctgaggatgacgacagctcaagcccacatagaaacacaggaaaaatgcctctgttattccacmtgagaggtgagggagctgcgggatgtgtacacctcccttgtcatcactgattgacagccgtcctaggggatgctaattccaggccatgaggtctgcctcatttgcagcctgagctgcttccccaggttcagacagagcagtgaaggggagaaagggccatagagagtcagctgaagtataatgactagaatccccaaggcgtagtaacaatgactgctaaaattatgcacaaagaaaaagcgcatttgaatccagagatgtatctctctgaatctggatatatggatcctggcagcctgttcagtagccatttcccagaaatccagttctctggaaaagcagcaggaggtttgtgcacaggctgcactaccttggtc

SEQ ID NO: 563798 - DNA, 583 bp, Homo sapiens
cattaggttgggtcccctcagtgagaaggatgccaaagattcgcatgcaggcagtatatttacaaagtgcgggaaacaagcaaatgagcccgggaggggaggagggaaagggaaagtgaaaggtgcctcagatagaggcccctctgaggatgacgacagctcaagcccacatagaaacacaggaaaaatgcctctgttattccacctgagaggtgagggagctgcgggatgtgtacacctcccttgtcatcactgattgrcagccgtcctaggggatgctaattccaggccatgaggtctgcctcatttgcagcctgagctgcttccccaggttcagacagagcagtgaaggggagaaagggccatagagagtcagctgaagtataatgactagaatccccaaggcgtagtaacaatgactgctaaaattatgcacaaagaaaaagcgcatttgaatccagagatgtatctctctgaatctggatatatggatcctggcagcctgttcagtagccatttcccagaaatccagttctctggaaaagcagcaggaggtttgtgcacaggctgcactaccttggtc

SEQ ID NO: 563799 - DNA, 583 bp, Homo sapiens
cattaggttgggtcccctcagtgagaaggatgccaaagattcgcatgcaggcagtatatttacaaagtgcgggaaacaagcaaatgagcccgggaggggaggagggaaagggaaagtgaaaggtgcctcagatagaggcccctctgaggatgacgacagctcaagcccacatagaaacacaggaaaaatgcctctgttattccacctgagaggtgagggagctgcgggatgtgtacacctcccttgtcatcactgattgacagccgtcctaggggatgctaattccaggccrtgaggtctgcctcatttgcagcctgagctgcttccccaggttcagacagagcagtgaaggggagaaagggccatagagagtcagctgaagtataatgactagaatccccaaggcgtagtaacaatgactgctaaaattatgcacaaagaaaaagcgcatttgaatccagagatgtatctctctgaatctggatatatggatcctggcagcctgttcagtagccatttcccagaaatccagttctctggaaaagcagcaggaggtttgtgcacaggctgcactaccttggtc

SEQ ID NO: 563800 - DNA, 567 bp, Homo sapiens
acaatgactgctaaaattatgcacaaagaaaaagcgcatttgaatccagagatgtatctctctgaatctggatatatggatcctggcagcctgttcagtagccatttcycagaaatccagttctctggaaaagcagcaggaggtttgtgcacaggctgcactaccttggtctggccactggtagtcgtgcatgagaactactccctggagtatttctcagtccactgacactgatgtaattggctccacttcccctgctgttgagccaggccgacacgccctgggcaaaggcatctgtgtgaagtattgaggttcaaatcagtgcttaagatatgtttggaggcaaaatactttttcatctacatgggcagtgtcttggcagaagatggagattctctctaaatggatgtgagacagggtggctggcatctgggtcaggatgatgccctggtgcatggcaagaacatgcattgggcagcagctgtcctcgctaagcagagaggttcactgacctggcttttcccccctcacctgctctccagaaagccagactctagggcagatgct

SEQ ID NO: 563801 - DNA, 567 bp, Homo sapiens
acaatgactgctaaaattatgcacaaagaaaaagcgcatttgaatccagagatgtatctctctgaatctggatatatggatcctggcagcctgttcagtagccatttcccagaaatccagttctctggaaaagcagcaggaggtttgtgcacaggctgcactaccttgktctggccactggtagtcgtgcatgagaactactccctggagtatttctcagtccactgacactgatgtaattggctccacttcccctgctgttgagccaggccgacacgccctgggcaaaggcatctgtgtgaagtattgaggttcaaatcagtgcttaagatatgtttggaggcaaaatactttttcatctacatgggcagtgtcttggcagaagatggagattctctctaaatggatgtgagacagggtggctggcatctgggtcaggatgatgccctggtgcatggcaagaacatgcattgggcagcagctgtcctcgctaagcagagaggttcactgacctggcttttcccccctcacctgctctccagaaagccagactctagggcagatgct

SEQ ID NO: 563802 - DNA, 567 bp, Homo sapiens
acaatgactgctaaaattatgcacaaagaaaaagcgcatttgaatccagagatgtatctctctgaatctggatatatggatcctggcagcctgttcagtagccatttcccagaaatccagttctctggaaaagcagcaggaggtttgtgcacaggctgcactaccttggtctggccactggtagtcgtgcatgagaactactccctggagtatttctcagtccactgacactgatgtaattggctccacttcccctgctgttgagccaggccgacacgccctgggcaaaggcatctrtgtgaagtattgaggttcaaatcagtgcttaagatatgtttggaggcaaaatactttttcatctacatgggcagtgtcttggcagaagatggagattctctctaaatggatgtgagacagggtggctggcatctgggtcaggatgatgccctggtgcatggcaagaacatgcattgggcagcagctgtcctcgctaagcagagaggttcactgacctggcttttcccccctcacctgctctccagaaagccagactctagggcagatgct

SEQ ID NO: 563803 - DNA, 567 bp, Homo sapiens
acaatgactgctaaaattatgcacaaagaaaaagcgcatttgaatccagagatgtatctctctgaatctggatatatggatcctggcagcctgttcagtagccatttcccagaaatccagttctctggaaaagcagcaggaggtttgtgcacaggctgcactaccttggtctggccactggtagtcgtgcatgagaactactccctggagtatttctcagtccactgacactgatgtaattggctccacttcccctgctgttgagccaggccgacacgccctgggcaaaggcatctgtgtgaagtattgaggttcaaatcagtgcttaagatatgtttggaggcaaaatactttttcatctacatgggcagtgtcttggcagaagatggagattctctctaaatgkatgtgagacagggtggctggcatctgggtcaggatgatgccctggtgcatggcaagaacatgcattgggcagcagctgtcctcgctaagcagagaggttcactgacctggcttttcccccctcacctgctctccagaaagccagactctagggcagatgct

SEQ ID NO: 563804 - DNA, 530 bp, Homo sapiens
ctctggaaaagcagcaggaggtttgtgcacaggctgcactaccttggtctggccactggtagtcgtgcatgagaactactccctggagtatttctcagtccactgacactgatgtaattggctccacttcccctgctgttgagccaggccgacacgccctgggcaaaggcatctgtgtgaagtattgaggttcaaatcagtgcttaagatatgtttggaggcaaaatactttttcatctacatgggcagtgtcttggcagaagatggagattctctctaaatggatgtgaracagggtggctggcatctgggtcaggatgatgccctggtgcatggcaagaacatgcattgggcagcagctgtcctcgctaagcagagaggttcactgacctggcttttcccccctcacctgctctccagaaagccagactctagggcagatgctcctgagaccccaggaacaggctggtggggagcgcagctcagagcattactcaggggatgtggcctttgtcatcctactttgaaac

SEQ ID NO: 563805 - DNA, 432 bp, Homo sapiens
gcaggaggtttgtgcacaggctgcactaccttggtctggccactggtagtcgtgcatgagaactactccctggagtatttctcagtccactgacactgatgtaattggctccacttcccctgctgttgagccaggccgacacgccctgggcaaaggcatctgtgtgaagtattgaggttcaaatcagtgcttaagatatgtttggaggcaaaatactttttcatctacatgggcagtgtcttggcagaagatggagattctctctaaatggatgtgagacagggtggctggcatctgggtcaggatgatgccctggtgcatggcaagaacatgcattgggcagcagctgycctcgctaagcagagaggttcactgacctggcttttcccccctcacctgctctccagaaagccagactctagggcagatgct

SEQ ID NO: 563806 - DNA, 522 bp, Homo sapiens
ccctgtctgcatctgtaggaggcagagtcaccatcacttgccgggtgagtcagggcattagcaataatttaaattggtatcagcagaaaccaaggaaaactcctaagctcctgatctatgctgcatccagtctgcaaagtgggattccctctcggttcagtgacagtggatctgggacagattacactctcaccatcagcagcctgcagcctgaagattttgcaacytattactgtcaacagagtgacagtaaccctcccacagtgttacaagtcataacataaaccccaaggaagcagatgtgtgaggctgggctgccccaatgctccttctggtgcctctatctgctgagggaagttctcaaactcagtcaggtttggaaagtcatcgggagattttcctagaggaggccagggaggttcctctgaaccctaagcctctttcgccctcatccccagcagaaaagacgtgacaatgcctgtcctgactgaataaagaagagagataagtccagctgaggag

SEQ ID NO: 563807 - DNA, 522 bp, Homo sapiens
ccctgtctgcatctgtaggaggcagagtcaccatcacttgccgggtgagtcagggcattagcaataatttaaattggtatcagcagaaaccaaggaaaactcctaagctcctgatctatgctgcatccagtctgcaaagtgggattccctctcggttcagtgacagtggatctgggacagattacactctcaccatcagcagcctgcagcctgaagattttgcaacctattactgtcaacagagtgacagtaaccctcccacagtgttacaagtcataacataaaccccaaggaagcagatgtgtgaggctgggctgccccaatgctccttctggtgcctctatctgctgagggaagttctcaaactcagtcaggtttggaaagtcatcgggagattttcctagaggaggccagggaggttcctctgaacsctaagcctctttcgccctcatccccagcagaaaagacgtgacaatgcctgtcctgactgaataaagaagagagataagtccagctgaggag

SEQ ID NO: 563808 - DNA, 522 bp, Homo sapiens
ccctgtctgcatctgtaggaggcagagtcaccatcacttgccgggtgagtcagggcattagcaataatttaaattggtatcagcagaaaccaaggaaaactcctaagctcctgatctatgctgcatccagtctgcaaagtgggattccctctcggttcagtgacagtggatctgggacagattacactctcaccatcagcagcctgcagcctgaagattttgcaacctattactgtcaacagagtgacagtaaccctcccacagtgttacaagtcataacataaaccccaaggaagcagatgtgtgaggctgggctgccccaatgctccttctggtgcctctatctgctgagggaagttctcaaactcagtcaggtttggaaagtcatcgggagattttcctagaggaggccagggaggttcctctgaaccctaagcctctttcgccctcatccccarcagaaaagacgtgacaatgcctgtcctgactgaataaagaagagagataagtccagctgaggag

SEQ ID NO: 563809 - DNA, 399 bp, Homo sapiens
ttgccaccctgccttctctcccatggcctgcactgatgacctcatggggacttgcctttgtgcagttgacacaggaagggaggactagggcctggttcacagatggttctccacaataggcaggtactgcccaaaagtggacagcygaagcactacagcccctttctaggacatccctgaaggacagtggtgaaggacaatcttcccagtgggcagaacattgagcagtgcacctgattgtgcactttgcatggaaggagaaatttccagatgtgcggttatatactgattcatgggctgtagccaatggtttggctggatggtcagggacttggaagaagcatgattggaaaattggtgacaaagaaacttggagaaagagtatgtagatggacctct

SEQ ID NO: 563810 - DNA, 602 bp, Homo sapiens
ccactatcacggtattccacacagcattacctttgaccaagcactcactttacaggtaaagaagtgaggcagtggrctcatgctcacggaattcactggtcttaccatattccccatcttcctgaagcagctggattgatagaatggtgggacggccttttgaggtcgcgattacaacatcaactaggttgcaatactttgccgggccggggcaccatactccagaagaccatgtgtgctctgaatcagcgcccaatgtatggtattgtttctcccatagccaggattcacagatccaggattcaaggggtggatgtgaaagtggaaccactcactatgatgcactagcaaaatgtttgctttctgttcccacgacattaggttctgctttactagtcatcttaactccagagggaagaacgctgctaccaggagacacaataacgattccattaaactggaagttaagatggccacttggatgctttggggtcctcctacctttaagtcaacaagctaagaatggagttacagtgttggtggcagtgattgacccagactatcaagatgaagtcagtccgctactccacaatggaagtgag

SEQ ID NO: 563811 - DNA, 521 bp, Homo sapiens
tggtggcagtgattgacccagactatcaagatgaagtcagtccgctactccacaatggaagtgaggaagagtatgcatggaatataggagatccattagggcgtctcttggtattatcatgcactctgattaaggtaaatgggaaactatacccaatccaggtaggactacaaacggtccagatcctctccgggtcacraccttctgaggtgcttgctgaaggcaaagggaatacagaatgaatagtggaagaaagtagttatcaataccagctacaaccacctgaccagctgcagaaatgaggactggaactatcatgagtatttccttcttttgttagaaacatgtttgtgcatgtatgcacttgtactaagaaaatatcttcatttcatttcccttttctttatcaggtgacatagatttgctgacctcatatcagcatttaagtattgtttactttatgtaagagtatttgggttggggatgggtgcatttccagttgtaggaaggatagtttatta

SEQ ID NO: 563812 - DNA, 521 bp, Homo sapiens
tggtggcagtgattgacccagactatcaagatgaagtcagtccgctactccacaatggaagtgaggaagagtatgcatggaatataggagatccattagggcgtctcttggtattatcatgcactctgattaaggtaaatgggaaactatacccaatccaggtaggactacaaacggtccagatcctctccgggtcacgacctkctgaggtgcttgctgaaggcaaagggaatacagaatgaatagtggaagaaagtagttatcaataccagctacaaccacctgaccagctgcagaaatgaggactggaactatcatgagtatttccttcttttgttagaaacatgtttgtgcatgtatgcacttgtactaagaaaatatcttcatttcatttcccttttctttatcaggtgacatagatttgctgacctcatatcagcatttaagtattgtttactttatgtaagagtatttgggttggggatgggtgcatttccagttgtaggaaggatagtttatta

SEQ ID NO: 563813 - DNA, 521 bp, Homo sapiens
tggtggcagtgattgacccagactatcaagatgaagtcagtccgctactccacaatggaagtgaggaagagtatgcatggaatataggagatccattagggcgtctcttggtattatcatgcactctgattaaggtaaatgggaaactatacccaatccaggtaggactacaaacggtccagatcctctccgggtcacgaccttctgaggtgcttgctgaaggcaaagggaatacagaatgaatagtggaakaaagtagttatcaataccagctacaaccacctgaccagctgcagaaatgaggactggaactatcatgagtatttccttcttttgttagaaacatgtttgtgcatgtatgcacttgtactaagaaaatatcttcatttcatttcccttttctttatcaggtgacatagatttgctgacctcatatcagcatttaagtattgtttactttatgtaagagtatttgggttggggatgggtgcatttccagttgtaggaaggatagtttatta

SEQ ID NO: 563814 - DNA, 191 bp, Homo sapiens
gaatcgaatataccatgcttctgtgatgacagttatttcatgctggttgtcacaattttacatgaaaaactaatgaaamaatgtttttaactgtttctaaaaataacagtttccaaaacagttttacattcaaaatatgaaaaagatgtctttgtgttccttaatctgatgagattttcacactctgcaca

SEQ ID NO: 563815 - DNA, 558 bp, Homo sapiens
ttaagaatatgcagcaaaggtgcttttaaaaatacaagctagtgattgtactaaatttgtaaatcacataggatagtgggtcattttaagaatattatttcaatctataaacgtggatgtctttgcttttttatgttttctttaatttctttcattaatatttgtcatttttgttgtcgaaatcttttacttggttaaatttatttctaagtacatttttgtagctattgtaaaaggaattgctttcttaatttcttgtttcagctagtttactatcaatatatagaaatgctactgatttttgtatgttgatttatatcctgcaactttattaatttcatgtatcaccctgagaagcttttggtagagtcttatttttttccatgtataagatcacrttgtctttaaacaaggacaatttgactgtctcctttccaattcagatgtcctttatttctttctctcacctaattgtcctggctaagactttcactatgtgaaatatgattggtgagaataggcatccttttcttgttccagtaaaatctttttcttgtt

SEQ ID NO: 563816 - DNA, 556 bp, Homo sapiens
agatgttagcaataaacttttagtatagtagtcaaagtattaatttctcacattgcaatttccttcaaagacataaatacaacctttctaatgactccttgttcatcaagatacctcttcaaattattctatttgtttcattcagtatattatctgtgtataccgatattacactcttttctttttttgagatggaatctcattctgttactgatgctggagtgaggtggcatgatctcggttcactgcaacctccacctcccaggttcaagcgattctcctgtctcagccycccaagtagctaggactacaggtgcacaccaccatgcctggctaatttttgtatttttagtacagtcagagtttcaccctgttgtccaggccggactcgaactcctgacctcaggtgatccacccaccatggcctcccaaagtgctgggattacaggcataagccaccgcacccagcctgatattgcactcttggattttgaacactgaatatctttttgaaagattacacctctttacctcttcgtgcttcagaaattatttt

SEQ ID NO: 563817 - DNA, 633 bp, Homo sapiens
ggagtgaggtggcatgatctcggttcactgcaacctccacctcccaggttcaagcgattctcctgtctcagccccccaagtagctaggactacaggtgcacaccaccatgcctggctaatttttgtatttttagtacagtcagagtttcaccctgttgtccaggccggactcgaactcctgacctcaggtgatccacccaccatggcctcccaaagtgctgggattacaggcataagccaccgcacccagcctgatattgcactcttggattttgaacactgartatctttttgaaagattacacctctttacctcttcgtgcttcagaaattattttccttcaagtgttctaagaggctaatgaagaatgaagtcatgttttatcacttttgtccttaaagatttcagacatgctgaaactgattgaagtatcatttgctaccagatagattagttatctctagttgtaggagtggatacatctttaatggtatattttggtttattgtcttatttttgatgtagtattctatcaataatttattaaacctggcatccttgagtgagcatggatttttcaactttggtgttatattgtgtttgcttttaaaaactgcttttgaggccaggta

SEQ ID NO: 563818 - DNA, 517 bp, Homo sapiens
tatcaagtgcataagttcataatagaaaaaccaataatactccaggcacaagttagtactaaaaaaattatgttgaatatkctccaatacaacatgctttttcccttcatgaacaatttgtgttttactgagaagagtcattgtttatggtagacattagactacagatgaatatgcactttaaacactcttagttgctttcttaattttatatctgctgctttatgcttctgtttattttcattctttccaatgtccacattctagtaaatttgaatattttaatccaagtttatatactatttaatattgcttgtatagtttagtattgttaagactcaaaaaggtttacagaaagaagaaaaagatcaacatgttattaatcatttaaagatcattttgaaatctttgacctttatattttaatgaataaaatattagtagttattagtataaaataatttatgtcttttggacttagcatccagtatttcttttttaataaagaaaataatta

SEQ ID NO: 563819 - DNA, 517 bp, Homo sapiens
tatcaagtgcataagttcataatagaaaaaccaataatactccaggcacaagttagtactaaaaaaattatgttgaatatgctcyaatacaacatgctttttcccttcatgaacaatttgtgttttactgagaagagtcattgtttatggtagacattagactacagatgaatatgcactttaaacactcttagttgctttcttaattttatatctgctgctttatgcttctgtttattttcattctttccaatgtccacattctagtaaatttgaatattttaatccaagtttatatactatttaatattgcttgtatagtttagtattgttaagactcaaaaaggtttacagaaagaagaaaaagatcaacatgttattaatcatttaaagatcattttgaaatctttgacctttatattttaatgaataaaatattagtagttattagtataaaataatttatgtcttttggacttagcatccagtatttcttttttaataaagaaaataatta

SEQ ID NO: 563820 - DNA, 517 bp, Homo sapiens
tatcaagtgcataagttcataatagaaaaaccaataatactccaggcacaagttagtactaaaaaaattatgttgaatatgctccaatacaacatgctttttcccttcatgaacaatttgtgttttactgagaagagtcattgtttatggtagacattagactacagatgaatatgyactttaaacactcttagttgctttcttaattttatatctgctgctttatgcttctgtttattttcattctttccaatgtccacattctagtaaatttgaatattttaatccaagtttatatactatttaatattgcttgtatagtttagtattgttaagactcaaaaaggtttacagaaagaagaaaaagatcaacatgttattaatcatttaaagatcattttgaaatctttgacctttatattttaatgaataaaatattagtagttattagtataaaataatttatgtcttttggacttagcatccagtatttcttttttaataaagaaaataatta

SEQ ID NO: 563821 - DNA, 538 bp, Homo sapiens
acatcccagttgatcatgatgaattatctttttaatgtattactgaatttgattcactggtattctgttgaggatttttgcatcaatattagagatcctgtcctgtagttttcttctttgatgcttttatctgattttcgtatcacagtaataatggtctcatagaataagtttggaagtattccctcctgtttttcaaaatartttgagcaggatttgtactaggtctttaaattgtttggtatgaagccatcagcagtgaagacatcatcagttcctgggcttttctttactgggagactttttctgatggcttcaatctcattacttgttaccaatctgttctggtcttggatgttttcattgtttaacctaagtaggttgtatgcatctaggaatttgccaatttctactaggctttccaatttattggcatataatagccagttatgatcctttgaatttctgaagtattagttgtaatgtctcctttttttaatctgttgattttatttatttgaatcttgtctcttttctt

SEQ ID NO: 563822 - DNA, 538 bp, Homo sapiens
acatcccagttgatcatgatgaattatctttttaatgtattactgaatttgattcactggtattctgttgaggatttttgcatcaatattagagatcctgtcctgtagttttcttctttgatgcttttatctgattttcgtatcacagtaataatggtctcatagaataagtttggaagtattccctcctgtttttcaaaataatttgagcaggatttgtactaggtctttaaattgtttgstatgaagccatcagcagtgaagacatcatcagttcctgggcttttctttactgggagactttttctgatggcttcaatctcattacttgttaccaatctgttctggtcttggatgttttcattgtttaacctaagtaggttgtatgcatctaggaatttgccaatttctactaggctttccaatttattggcatataatagccagttatgatcctttgaatttctgaagtattagttgtaatgtctcctttttttaatctgttgattttatttatttgaatcttgtctcttttctt

SEQ ID NO: 563823 - DNA, 538 bp, Homo sapiens
acatcccagttgatcatgatgaattatctttttaatgtattactgaatttgattcactggtattctgttgaggatttttgcatcaatattagagatcctgtcctgtagttttcttctttgatgcttttatctgattttcgtatcacagtaataatggtctcatagaataagtttggaagtattccctcctgtttttcaaaataatttgagcaggatttgtactaggtctttaaattgtttggtrtgaagccatcagcagtgaagacatcatcagttcctgggcttttctttactgggagactttttctgatggcttcaatctcattacttgttaccaatctgttctggtcttggatgttttcattgtttaacctaagtaggttgtatgcatctaggaatttgccaatttctactaggctttccaatttattggcatataatagccagttatgatcctttgaatttctgaagtattagttgtaatgtctcctttttttaatctgttgattttatttatttgaatcttgtctcttttctt

SEQ ID NO: 563824 - DNA, 487 bp, Homo sapiens
ccctgcaggtaccggtcctggcccagctctgggcctggctttgtccctrattcttagatgaccctggccctgcccctgcccttgcccttgccctggcactggccttggacatgtccgtggtcctaaccctggccctgccctggagctgccactgtcttggccctgccctggctctggccctgccccggccctggccctgccccggccccagccatagacctgccctggttggtcgtgccctaccttaaccctgtgctaccctgggcctgctccaccctgccctggccctgccctccctttggccctgccctgaccccgtcttggccctcacactggccctagcacagacctggtcctatctgtggccttggcctggcattgacccctgctcctgaccctggtcctgccatggccctggccctgccaatgaccctggcagcccttaccctggccctgaactggccctgccctgaccctggccctgaag

SEQ ID NO: 563825 - DNA, 487 bp, Homo sapiens
ccctgcaggtaccggtcctggcccagctctgggcctggctttgtccctarttcttagatgaccctggccctgcccctgcccttgcccttgccctggcactggccttggacatgtccgtggtcctaaccctggccctgccctggagctgccactgtcttggccctgccctggctctggccctgccccggccctggccctgccccggccccagccatagacctgccctggttggtcgtgccctaccttaaccctgtgctaccctgggcctgctccaccctgccctggccctgccctccctttggccctgccctgaccccgtcttggccctcacactggccctagcacagacctggtcctatctgtggccttggcctggcattgacccctgctcctgaccctggtcctgccatggccctggccctgccaatgaccctggcagcccttaccctggccctgaactggccctgccctgaccctggccctgaag

SEQ ID NO: 563826 - DNA, 487 bp, Homo sapiens
ccctgcaggtaccggtcctggcccagctctgggcctggctttgtccctaattcttagatgaccctggccctgcccctgcccttgcccttgccctggcactggccttggacatgtccgtggtcctaaccctggccctgccctggagctgccactgtcttggccctgccctggctctggccctgccccggccctggccctgccccggccccagccatagacctgccctggttggtcrtgccctaccttaaccctgtgctaccctgggcctgctccaccctgccctggccctgccctccctttggccctgccctgaccccgtcttggccctcacactggccctagcacagacctggtcctatctgtggccttggcctggcattgacccctgctcctgaccctggtcctgccatggccctggccctgccaatgaccctggcagcccttaccctggccctgaactggccctgccctgaccctggccctgaag

SEQ ID NO: 563827 - DNA, 487 bp, Homo sapiens
ccctgcaggtaccggtcctggcccagctctgggcctggctttgtccctaattcttagatgaccctggccctgcccctgcccttgcccttgccctggcactggccttggacatgtccgtggtcctaaccctggccctgccctggagctgccactgtcttggccctgccctggctctggccctgccccggccctggccctgccccggccccagccatagacctgccctggttggtcgtgccctaccttaaccctgtgcwaccctgggcctgctccaccctgccctggccctgccctccctttggccctgccctgaccccgtcttggccctcacactggccctagcacagacctggtcctatctgtggccttggcctggcattgacccctgctcctgaccctggtcctgccatggccctggccctgccaatgaccctggcagcccttaccctggccctgaactggccctgccctgaccctggccctgaag

SEQ ID NO: 563828 - DNA, 528 bp, Homo sapiens
cctgccctggttggtcgtgccctaccttaaccctgtgctaccctgggcctgctccaccctgccctggccctgccctccctttggccctgccctgaccccgtcttggccctcacactggccctagcacagacctggtcctatctgtggccttggcctggcattgacccctgctcctgaccctggtcctgccatggccctggccctgccaatgaccctggcagcccttaccctggccctgaactggccctgccctgaccctggccctgaagtggatttgcaggtgtcttgtccatgrtttaacctggtcttaccatggccctgtccctcccctggctctgtcctggtcttatgctgaccctgacccagaccttggccctgccacagccttgtcctagacctggccatggccctgcgtctgccctggaccggcactggcactggcatggaccctggccctggcccttcactacttaaggccataccctggcccagccctggccctaatttggcctggctctaccctggcat

SEQ ID NO: 563829 - DNA, 528 bp, Homo sapiens
cctgccctggttggtcgtgccctaccttaaccctgtgctaccctgggcctgctccaccctgccctggccctgccctccctttggccctgccctgaccccgtcttggccctcacactggccctagcacagacctggtcctatctgtggccttggcctggcattgacccctgctcctgaccctggtcctgccatggccctggccctgccaatgaccctggcagcccttaccctggccctgaactggccctgccctgaccctggccctgaagtggatttgcaggtgtcttgtccatggtttaacctggtcttaccatggccctgtccctcccctggctctgtcctggtcttatgctgaccctgacccagaccttggccctgccacagccttgtcctagacctggccatggccctgcgtctgccstggaccggcactggcactggcatggaccctggccctggcccttcactacttaaggccataccctggcccagccctggccctaatttggcctggctctaccctggcat

SEQ ID NO: 563830 - DNA, 484 bp, Homo sapiens
ttgtcctagacctggccatggccctgcgtctgccctggaccggcactggcactggcatggaccctggccctggcccttyactacttaaggccataccctggcccagccctggccctaatttggcctggctctaccctggcatgctattctggccctagccctgaccctgtccctgtccctgtcctggtcctagccccgttgctggtcctgccatggcccttgtcctgacattgccctttcctggttctggccctggccctgtcccagccctgctctggccctggtctgaaccctggccctgcaatagacctgccttggtcctgcccagaccctggctctggccctacctctgccctggccatacccttgccctggcctggaccccggtcctggtccttgtcctgccccagccgtggccctggccctgccctgcctgtgccctgttctatcctgggctggccctgccatggcctggtcttgccat

SEQ ID NO: 563831 - DNA, 590 bp, Homo sapiens
tgccctggcctgaccccaggcctactgagtccatgaaatggccctggacctgccttgccatcctctgtcctggccctatattgtccccaccatgctctggtccagcgcttgccctagccctgttgctagtcctgccactgctatggccctgctctgtttttggccgtgccctgtgctaccctagccctgccctgccttggccttggccctaccatggccttctcctaccctggcctggccctaccctggccttttctaccctggccttgcccttccctggtsttgccctgccctggccttgccctgccctggccttggctttgccttatcctggtcctggttctgccctgaccctggccttgctctggatcctctctggttctgctttctccctggccctgcccttgctctggccctgtccctggaccagccttgaccctgaccctgacaatccccaggtctgacactggccatgcttggccctggccccctccttttggccctgccttagccctgtgctatcttagtcctgccctggccctgaactcgccctggtcctaccctcaccctacactggccctgccctatcc

SEQ ID NO: 563832 - DNA, 589 bp, Homo sapiens
gaccctgaccctgacaatccccaggtctgacactggccatgcttggccctggccccctccttttggccctgccytagccctgtgctatcttagtcctgccctggccctgaactcgccctggtcctaccctcaccctacactggccctgccctatcctggccttgccctgccctggccctgcctttggcctgctctggctctggttctgccctggacttgcccttgccctggaccctccctggccatgtttttcccatggtccttctctggccttgcccttgccctgtcccctttctggtcctgccatgtttctggccctgccctgtccaggtcctggacctgactctggccctggacctccctgtccctgccctgccataccctggcccgttccttgctctacactgaccctgccctgccttggccctgtgccaccctagccctgccctggccttctgctgaccctgatcctgccatggccctggccctgccatgtccctgccctggccctggttcttccctgcttctggacctggccttggtcctctcatgtccctggctgtgaccctgcccctggtttttctctggc

SEQ ID NO: 563833 - DNA, 589 bp, Homo sapiens
gaccctgaccctgacaatccccaggtctgacactggccatgcttggccctggccccctccttttggccctgccttrgccctgtgctatcttagtcctgccctggccctgaactcgccctggtcctaccctcaccctacactggccctgccctatcctggccttgccctgccctggccctgcctttggcctgctctggctctggttctgccctggacttgcccttgccctggaccctccctggccatgtttttcccatggtccttctctggccttgcccttgccctgtcccctttctggtcctgccatgtttctggccctgccctgtccaggtcctggacctgactctggccctggacctccctgtccctgccctgccataccctggcccgttccttgctctacactgaccctgccctgccttggccctgtgccaccctagccctgccctggccttctgctgaccctgatcctgccatggccctggccctgccatgtccctgccctggccctggttcttccctgcttctggacctggccttggtcctctcatgtccctggctgtgaccctgcccctggtttttctctggc

SEQ ID NO: 563834 - DNA, 370 bp, Homo sapiens
gccctgccctggccttggctttgccttatcctggtcctggttctgccctgaccctggccttgctctggatcctctctggttctgctttctccctggccctgcccttgctctggccctgtccctggaccagccttgaccctgaccctgacaatccccaggtctgacactggccatgcttggccctggccccctccttttggccctgccttagccctgtgctatcttagtcctgccctggccctgaactcrccctggtcctaccctcaccctacactggccctgccctatcctggccttgccctgccctggccctgcctttggcctgctctggctctggttctgccctggacttgcccttgccctggaccct

SEQ ID NO: 563835 - DNA, 370 bp, Homo sapiens
gccctgccctggccttggctttgccttatcctggtcctggttctgccctgaccctggccttgctctggatcctctctggttctgctttctccctggccctgcccttgctctggccctgtccctggaccagccttgaccctgaccctgacaatccccaggtctgacactggccatgcttggccctggccccctccttttggccctgccttagccctgtgctatcttagtcctgccctggccctgaactcgccctggycctaccctcaccctacactggccctgccctatcctggccttgccctgccctggccctgcctttggcctgctctggctctggttctgccctggacttgcccttgccctggaccct

SEQ ID NO: 563836 - DNA, 370 bp, Homo sapiens
gccctgccctggccttggctttgccttatcctggtcctggttctgccctgaccctggccttgctctggatcctctctggttctgctttctccctggccctgcccttgctctggccctgtccctggaccagccttgaccctgaccctgacaatccccaggtctgacactggccatgcttggccctggccccctccttttggccctgccttagccctgtgctatcttagtcctgccctggccctgaactcgccctggtcctaccctcaccctacactggcccygccctatcctggccttgccctgccctggccctgcctttggcctgctctggctctggttctgccctggacttgcccttgccctggaccct

SEQ ID NO: 563837 - DNA, 370 bp, Homo sapiens
gccctgccctggccttggctttgccttatcctggtcctggttctgccctgaccctggccttgctctggatcctctctggttctgctttctccctggccctgcccttgctctggccctgtccctggaccagccttgaccctgaccctgacaatccccaggtctgacactggccatgcttggccctggccccctccttttggccctgccttagccctgtgctatcttagtcctgccctggccctgaactcgccctggtcctaccctcaccctacactggccctgccctaycctggccttgccctgccctggccctgcctttggcctgctctggctctggttctgccctggacttgcccttgccctggaccct

SEQ ID NO: 563838 - DNA, 423 bp, Homo sapiens
ggacctggccttggtcctctcatgtccctggctgtgaccctgcccctggtttttctctggccatgaccctgccccagttctgtcctatccctggccctgtctcagttctgtcctagccctggcctttcacagtactttatgcttagtaagggctccatggtgtctgtgagttgaatgttgtgttcatagtatctgccaaaacagaaagaaaaaagtaaaatattttgataagaagttaaagctttgtatataatatgccttgaattgtaagtgcctgttattagttgtattacatatgggtcatggctttgtacacgtaactccaaaccattgatactgttaaaaggatatatgaatatatgaaagaatgtataaacgtaagaatgtatcagtatctaatkacctttccaaattaatttttat

SEQ ID NO: 563839 - DNA, 578 bp, Homo sapiens
atgatgaaattgaaatgagatgagttgaaatgatgagatgtaatggtgaaatgaaatgakgaaatgagatgagatgaaatgagatgaaataatgagatgaaatgagataatgagatgagatgaaatcatgagatgaaatgatgaaatgaaatgaaatgatggatgaaattatgagatgaaagatgaaatgtaatgagatgaaatgaaatgacataatgaaatgaaataatgaaatgagatgaaataaaataatgaaatgatgaaataatgaaatgaaaatgaaatggaaatgatgagatgagaagaaatgatgagatgaaatgatgaaatgatgagatgagataaaatgagatgaaatgatgagatgagatgaaatatgatgagatgaaatgccataatgaatgaaatgatgaaatggaataatgaaatggaaatgatgagctgagatgcaatgagttgaaatgagatgaaatgatgaaatgagatgaaatgatgagatgagatgtgatgaaatgatgacataaaatgagatgaaatgagatgtaatgatggaatgagatgagatgaaatgagatgaa

SEQ ID NO: 563840 - DNA, 574 bp, Homo sapiens
aaaaaaaaaaaagaaaaaaaagaccattaccagcattttaaaactgagtaagagaatgaagtaaacaaaaaagggaaagaaaaagcttcaaaagttcatttttctcctaatttcttgaactctctattccagaagtacctaatgtttttcttaaaagagaggctttcaatttttccctatgtctaaaggctgctttaagtagcttaagaccaaggacaggagagtgaaaacgaagagggttttggctctccaaggtgggggtggaattgcagctactgcttagggatattttccagtggtcatctcttcaaactccagtgagtctcacaaacagggtgcaccagccaatccaagtatccagtatctacaatgmaaactgtagatactatccaaattgacagtagatagctcagtaaatagctgagcaaactgcaatgatagctcagtcttcaactctggaaataaatttccaaaagccttccccagtggcaattcaaactcaaaaacgtttacaaaactaatcacattttccaaacctgcttccaccactacccgacctgttgctcctccttcc

SEQ ID NO: 563841 - DNA, 618 bp, Homo sapiens
tttacaaaactaatcacattttccaaacctgcttccaccactacccgacctgttgctcctccttcctgtatttcctatacctcggagattagcctcacattgaatctacctcccaagagtcattttgcttttaaaatccttcactaactccttgctccctacagaagaaaatccaaactatgtatcatggcattcaagaccctttgtggtaagttctctatctcttcagtcataccactttttctgtgctacataataccaagttttctagccattctaaaatattcaaaggtccctggaatacaaaatcttccttatacctggaaagttatccctaccctactccatctgtaaaaaccttattcattctttaagactcaggtcaatgactgccttctcggtcaatattttcctgactctttttcaagaaaagttgagcaatcattccctctattttcctattattatagaactctgtgcttttaaaattcttgtattaatattaatatctattatgttgcctttttgtttgtttgcttctgtttccccccartgactgatctccttaaaggcagagttttcgccttatccattgcttatatagtccttaaaatgcta

SEQ ID NO: 563842 - DNA, 617 bp, Homo sapiens
ataccaaattaattccccagctgttcacatgcatataagcagctgctgctgttactgcctaacacttatggcagtctggcagcacctctaatctctgccatagcagacaagccactcacctaaggcctctgctgtacttccaaagaaagaatttctcaagtagagactgagtggaactagamtgccagctgtgagcctcagagctcctggctgcctgttgctgagtctatcagctgctgagcctttctcaccaaaaaaaaaaaaaaaaaaaaaaaaaaaatgagcttaataaaataaccctgcacagaaattttctgaaattaagataacattcaatggaaaacagaatttaatctacagaaatacacttcacagatgttttaggaacagaacctagagaaaatgaaagtcaaaatttaataaaagaatttgtcaggaacttcaaggtaaagactccatgtattttttggcaactataaaacactaagaaggctttttaaatattaaaaagccatttaaacacttcaaattaagattcctcaatatacttcagatttctgtactgagttaccctctcgagtgtttggaagtcttttcttcctcattaagcaaacact

SEQ ID NO: 563843 - DNA, 611 bp, Homo sapiens
attaataggaatagcttttttaaaagtaccttgatctttgtgtttctaagatttgtcctagtccatttatgggtctgaaataaatataaatgaggaagacaaagtttaaaagtaaaaattaactttttaaaaaagtatacaaagtatattgtttctaaaacaggaaataagcatacccaaatacatctggaaccagaaaaaaattaaaaacagaaaaacaaaacttgctttaaaaaataattatgattttccttcaaacaataaatcacatatattccactcatacatcaataaaacatatatgcaaaaattcgcacaactgtcagattaagggctactttgtggttaataaaaagacgcttcactttagaaaaaatcattcataaatagtcagttatcctagtgatcttaaaaatgagtagatactcaaaatttttacggtggtcacttttttcctcaggcatacrtggtagaaatggctatatacacactaaaaataaaaacctagttgtaagttgctttgcccccagcctgtccttagtattcacagtaattctaagtcacacatcccaggttcctttatagaataacctcgtcagttccctaattag

SEQ ID NO: 563844 - DNA, 261 bp, Homo sapiens
ggtggtcacttttttcctcaggcatacgtggtagaaatggctatatacacactaaaaataaaaacctagttgtaagttgctttgcccccagcctgtccttagtattcacagtaattctaagtcacacatcccaggttcctttatagaataacctcstcagttccctaattaggctctctacccgttatgcctattctccctcttttgatactatagaatatggctttgtatggcaccaaaaagtacctgttaaattctttt

SEQ ID NO: 563845 - DNA, 261 bp, Homo sapiens
ggtggtcacttttttcctcaggcatacgtggtagaaatggctatatacacactaaaaataaaaacctagttgtaagttgctttgcccccagcctgtccttagtattcacagtaattctaagtcacacatcccaggttcctttatagaataacctcgtcagttccctaattaggctctctaccygttatgcctattctccctcttttgatactatagaatatggctttgtatggcaccaaaaagtacctgttaaattctttt

SEQ ID NO: 563846 - DNA, 261 bp, Homo sapiens
ggtggtcacttttttcctcaggcatacgtggtagaaatggctatatacacactaaaaataaaaacctagttgtaagttgctttgcccccagcctgtccttagtattcacagtaattctaagtcacacatcccaggttcctttatagaataacctcgtcagttccctaattaggctctctacccgttatgcctattctccctcttttgatactatagaatatggcttkgtatggcaccaaaaagtacctgttaaattctttt

SEQ ID NO: 563847 - DNA, 261 bp, Homo sapiens
ggtggtcacttttttcctcaggcatacgtggtagaaatggctatatacacactaaaaataaaaacctagttgtaagttgctttgcccccagcctgtccttagtattcacagtaattctaagtcacacatcccaggttcctttatagaataacctcgtcagttccctaattaggctctctacccgttatgcctattctccctcttttgatactatagaatatggctttgtatkgcaccaaaaagtacctgttaaattctttt

SEQ ID NO: 563848 - DNA, 563 bp, Homo sapiens
tttcttcccttttttactataccttgaacttactatgtaagctaagaaaaaaattacataataatagctaacagagcacttamtatgtgtcagcactgtgcaaagtttaccaacattgtctcacgtaatactcaaagcaaacttatgataggcattatgccttttacagaggaggctttaaaagggtaaataagctccctaagaagacaatgagaaacagaccaaggattagaacccaagcagattccaaggtctgtgatcttcaacactacgcaacaatacctaccctccacatggagacattatatttttttatagtaaagtttaaggacattactattaaaataagatgaaatatgtggaaaaaatgtgaatttctttcttccacaatcattaatcatggcaaataatctcctaatgagccttacctttattgattcaatttataatatatactatatgaactgagatgacagattcaaaatctaatgtcagtagaacttataaatactaagaatagtaattttgagccaccatcacgctcaaagcattgtacacattaa

SEQ ID NO: 563849 - DNA, 563 bp, Homo sapiens
tttcttcccttttttactataccttgaacttactatgtaagctaagaaaaaaattacataataatagctaacagagcacttactatgtgtcagcactgtgcaaagtttaccaacattgtctcacgtaatactcaaagcaaacttatgataggcattatgccttttacagaggaggctttaaaagggtaaataagctccctaagaagacaatgagaaacagaccaaggattagaacccaagcagattccaaggtctgtgatcttcaacactacgcaacaatacctaccctccacatggagacattatatttttttatagtaaagtttaaggacattactattaaaataagatgaaatatgtggaaaaaatgtgaatttctttcttccacaatcattaatcatggcaaataatctcctaatgagccttacctttattgattcaatttataatatatactatawgaactgagatgacagattcaaaatctaatgtcagtagaacttataaatactaagaatagtaattttgagccaccatcacgctcaaagcattgtacacattaa

SEQ ID NO: 563850 - DNA, 569 bp, Homo sapiens
tccagaacagtcagcaaaatgactgttagcacatatttgagcatcattcatattgtcctgattgtcctatgctgatcagccttggctatggacaaagaagatattaaagcaagctggaagacaaggcatggttgacagttaaggaagatgaagtcaacaagagttcagggaaaactgagaccacttgagtcagggaagacttcacataggaagsggggagagacagaataggctctatagaataaatttaaaaaaaaaaaaaacagaacaagaaagaactcagggattggcagagtgagaatacattatgagtaaagacaggaactgagaggatgcatccatgggaaagtgaattaaccatcctgggtaaagttagggaagactgacattaggaaagagtcaaagagaagacaggaaaagaaagatggagtgcgaagaccctgaatatcagtctattaactgtgaactatattctgcaagcactgaggactaattttatgtattaccatttatataacaattagccatcaacaatatatgtgattccctaacgttcttgaagcaggtca

SEQ ID NO: 563851 - DNA, 569 bp, Homo sapiens
tccagaacagtcagcaaaatgactgttagcacatatttgagcatcattcatattgtcctgattgtcctatgctgatcagccttggctatggacaaagaagatattaaagcaagctggaagacaaggcatggttgacagttaaggaagatgaagtcaacaagagttcagggaaaactgagaccacttgagtcagggaagacttcacataggaagcggggagagacagaataggctctatagaataaatttaaaaaaaaaaaaaacagaacaagaaagaactcagggattggcagagtgagaatacattatgagtaaagacaggaactgagaggatgcatccatgggaaagtgaattaaccatcctgggtaaagttagggaagaytgacattaggaaagagtcaaagagaagacaggaaaagaaagatggagtgcgaagaccctgaatatcagtctattaactgtgaactatattctgcaagcactgaggactaattttatgtattaccatttatataacaattagccatcaacaatatatgtgattccctaacgttcttgaagcaggtca

SEQ ID NO: 563852 - DNA, 542 bp, Homo sapiens
aatacatcaaaagagaaatgttaacaaattaaaaataaataaaaacacctcatgtagatcaatatatcagttaagrattatatagtgctctataggagtgattcagtttactcctaatccgctaatttttcaatgtgaatgaattgtattcattactatgcaagttcagatttcacattacccatttgcaaagtatttactaagttatgttacttgctactcttgcgctacaaagataagtctcaaaaagtttacaatcaaaaggatgattttaaactcataattttctttgtgaagaaaagcataaaattcagatatccaatatggtaaaaagaagaagagtttacctactaaaatactgtaatatttaccaaaattttcaaagaaatagaataacttcacttaatactaaaaactgtattaaacaggttttttaaaactatacttcagagctgggcatggtagagcacacctgtagtcctggctacttaggaggctgaggagggaggatcccttaagcccaggagttcaagtccaacctg

SEQ ID NO: 563853 - DNA, 555 bp, Homo sapiens
ttattaatgagaatgatatctgccaaagcaacttgcctaaaatagcaaacaaaaagaaatgttaagaaattttaaataatatacacgcatgcagattaatacatcaaaagagaaatgttaacaaattaaaaataaataaaaacacctcatgtagatcaatatatcagttaagaattatatagtgctctataggagtgattcagtttactcctaatccgctaatttttcaatgtgaatgaattgtattcattactatgcaagttcagatttcacattacccatttgcaaagtatttactaagttmtgttacttgctactcttgcgctacaaagataagtctcaaaaagtttacaatcaaaaggatgattttaaactcataattttctttgtgaagaaaagcataaaattcagatatccaatatggtaaaaagaagaagagtttacctactaaaatactgtaatatttaccaaaattttcaaagaaatagaataacttcacttaatactaaaaactgtattaaacaggttttttaaaactatacttcagagctgggc

SEQ ID NO: 563854 - DNA, 542 bp, Homo sapiens
aatacatcaaaagagaaatgttaacaaattaaaaataaataaaaacacctcatgtagatcaatatatcagttaagaattatatagtgctctataggagtgattcagtttactcctaatccgctaatttttcaatgtgaatgaattgtattcattactatgcaagttcagatttcacattacccatttgcaaagtatttactaagttatgttacttgctactcttgygctacaaagataagtctcaaaaagtttacaatcaaaaggatgattttaaactcataattttctttgtgaagaaaagcataaaattcagatatccaatatggtaaaaagaagaagagtttacctactaaaatactgtaatatttaccaaaattttcaaagaaatagaataacttcacttaatactaaaaactgtattaaacaggttttttaaaactatacttcagagctgggcatggtagagcacacctgtagtcctggctacttaggaggctgaggagggaggatcccttaagcccaggagttcaagtccaacctg

SEQ ID NO: 563855 - DNA, 609 bp, Homo sapiens
ctttcataataattatgggagatggctattttcatttataaaggacgaaactaaatctaacaccctcatcatcacaggatactatattttatatacaatcacagggacttttttttttaattgaacacacacccatcaagtaaaatgaacataattttaaagyctttgtgaaatcttttatgccacataaaatcagtctgtgtacaatgctacacaaatgtcaataaccatatatcagagccaaaccagtttcataattcatggggagatgatcattaggggtatctgaatagtttggaacctcagagcaagcaggtaataattttatttaacacgcttgattaggtctatagaagaaacattttttccttctaaaagttcagcaaattctattttgaggaaaacaaaactgaaataaaatcatggcaatgatacttctacttcaggcaaaatcttgttcaattcaactgcagacccactctgcaattatggaagtcacagaacttgacaagtattgtatcaaaaatcattccatgccaaaagatcaagtttaatatttttttcataattcatcttggcctgaggctacaacaagtcctattgttatat

SEQ ID NO: 563856 - DNA, 496 bp, Homo sapiens
  misc_feature 1, 2, 3, 4, 5, 6, 7, 8, 9, 10, 11, 12, 13, 14, 15, 16, 17,18, 19, 20, 21, 22, 23, 24, 25, 26, 27, 28, 29, 30, 31,32: n = A,T,C or G
nnnnnnnnnnnnnnnnnnnnnnnnnnnnnnnntcccaggtaaccaaaagtttccttataaagtgtaacagcagagcttcaaaggtggcatttggcaagcctctttttttgactatgccttttcagcttcctttgtgggctccttttctttcatctttatttaaataatatttccctatgttttatccccagcccattgcttgcctctgtactgcctcccygtgagacttcattaagtatcagaattttaccaatagctcatatgcttatgatgcttaccttttcagattcgtatatttaaatgttttgtgattatttcatcctggatgtccaaactcaacatgttaaaattcaaatttatcatctctcaccccgggcctgcttttggtctgcatttcctacctctattaatagcttcagttattagccaccgacaccagacagtctcggagtcatcctgaactctatcttcccctccttccccaagtcaatcacta

SEQ ID NO: 563857 - DNA, 496 bp, Homo sapiens
  misc_feature 1, 2, 3, 4, 5, 6, 7, 8, 9, 10, 11, 12, 13, 14, 15, 16, 17,18, 19, 20, 21, 22, 23, 24, 25, 26, 27, 28, 29, 30, 31,32: n = A,T,C or G
nnnnnnnnnnnnnnnnnnnnnnnnnnnnnnnntcccaggtaaccaaaagtttccttataaagtgtaacagcagagcttcaaaggtggcatttggcaagcctctttttttgactatgccttttcagcttcctttgtgggctccttttctttcatctttatttaaataatatttccctatgttttatccccagcccattgcttgcctctgtactgcctccctgygagacttcattaagtatcagaattttaccaatagctcatatgcttatgatgcttaccttttcagattcgtatatttaaatgttttgtgattatttcatcctggatgtccaaactcaacatgttaaaattcaaatttatcatctctcaccccgggcctgcttttggtctgcatttcctacctctattaatagcttcagttattagccaccgacaccagacagtctcggagtcatcctgaactctatcttcccctccttccccaagtcaatcacta

SEQ ID NO: 563858 - DNA, 496 bp, Homo sapiens
  misc_feature 1, 2, 3, 4, 5, 6, 7, 8, 9, 10, 11, 12, 13, 14, 15, 16, 17,18, 19, 20, 21, 22, 23, 24, 25, 26, 27, 28, 29, 30, 31,32: n = A,T,C or G
nnnnnnnnnnnnnnnnnnnnnnnnnnnnnnnntcccaggtaaccaaaagtttccttataaagtgtaacagcagagcttcaaaggtggcatttggcaagcctctttttttgactatgccttttcagcttcctttgtgggctccttttctttcatctttatttaaataatatttccctatgttttatccccagcccattgcttgcctctgtactgcctccctgtgagacttcattaagtatcagaattttaccaatagctcatatgcttatgatgcttaccttttcagattcgtatatttaaatgttttgtgattatttcatcctggatgtccaaactcwacatgttaaaattcaaatttatcatctctcaccccgggcctgcttttggtctgcatttcctacctctattaatagcttcagttattagccaccgacaccagacagtctcggagtcatcctgaactctatcttcccctccttccccaagtcaatcacta

SEQ ID NO: 563859 - DNA, 496 bp, Homo sapiens
  misc_feature 1, 2, 3, 4, 5, 6, 7, 8, 9, 10, 11, 12, 13, 14, 15, 16, 17,18, 19, 20, 21, 22, 23, 24, 25, 26, 27, 28, 29, 30, 31,32: n = A,T,C or G
nnnnnnnnnnnnnnnnnnnnnnnnnnnnnnnntcccaggtaaccaaaagtttccttataaagtgtaacagcagagcttcaaaggtggcatttggcaagcctctttttttgactatgccttttcagcttcctttgtgggctccttttctttcatctttatttaaataatatttccctatgttttatccccagcccattgcttgcctctgtactgcctccctgtgagacttcattaagtatcagaattttaccaatagctcatatgcttatgatgcttaccttttcagattcgtatatttaaatgttttgtgattatttcatcctggatgtccaaactcaacatgttaaaattcaaatttatcatctctcacccygggcctgcttttggtctgcatttcctacctctattaatagcttcagttattagccaccgacaccagacagtctcggagtcatcctgaactctatcttcccctccttccccaagtcaatcacta

SEQ ID NO: 563860 - DNA, 515 bp, Homo sapiens
atgccttttcagcttcctttgtgggctccttttctttcatctttatttaaataatatttccctatgttttatccccagcccattgcttgcctctgtactgcctccctgtgagacttcattaagtatcagaattttaccaatagctcatatgcttatgatgcttaccttttcagattcgtatatttaaatgttttgtgattatttcatcctggatgtccaaactcaacatgttaaaattcaaatttatcatctctcaccccgggcctgcttttggtctgcatttcctacctctattaatagcttcagtyattagccaccgacaccagacagtctcggagtcatcctgaactctatcttcccctccttccccaagtcaatcactaatcaagtcctgctaatacatttccttactatttctgaaatccatccctcttcctcattcctactaacatcctaatttaaaactttattatcttttacctggactattgtcttaagacaacaactttaacccg

SEQ ID NO: 563861 - DNA, 543 bp, Homo sapiens
tgctttaatttggagaagtactggtctagaaaacacaaattccaaggagactcaggttcttaagttgatttcttgagtacaarttcttcaaatgcattctccaagattaatttttttttttactttttaaattgacaaagattatacatattcatggctatatggggatgtttcagtacatgtagatggtgatcagatcagggtaattagcatatctatcatctcaaacatttattatttctttgtgttgggaacattcaaactactcctaggtattttaaactacataatatagtattgttaactatagtcatctacagtactatagaacactagaacttattactcctacctagctgtaattttgtatccattaacaaatctcttaccattcctcctttctccctacccttttcagcctgcagtatcctctgttctactttttacttctatgagatcaacttttctttagcttctgcgtgagtgagaacatgtggtgttgaaatttctattcctggcttattttgcttaacataatatcct

SEQ ID NO: 563862 - DNA, 303 bp, Homo sapiens
gataggacttcacatttatatactttgaatatttaaaatgtttacataaatgtcagaatcaactttcatttttcatagaaaaagaagatcctacttgttttgtagttttaatattaatcaattattattatctgagacaaattattaacaaaccrtctattaaaatatttcaccacaaataaattccataaggaaaatatctacaactgtttttatgaaagaaaaaaaggcttctctacagttgcttaggcctggtgccatggcacacacctataaatcccagcgctgtgggaggccatggca

SEQ ID NO: 563863 - DNA, 397 bp, Homo sapiens
aaatatctacaactgtttttatgaaagaaaaaaaggcttctctacagttgcttaggcctggtgccatggcacacacctataaatcccagcgctgtgggaggccatggcaagaggatcctttgagcccaggagtttgagaccagcatggacaacaaagtgagacctcatctctacaaaaaataaaaaagaaattagctggccatggtggtgcgtgcctgtggtcctagctactcgagaggctgaggaaggaggatcacttgagccagggaggtggaggtttcactgaaccatattcacaccactccrctccagcctgggcaacagagctagaccttgtctcaaaaaattaagttagttaaattaaacataaagttgcattgtatttaagaaattggga

SEQ ID NO: 563864 - DNA, 364 bp, Homo sapiens
cttgtcaggggggtgggaggctaggggagtgatagcattaggagaaatacctaatgtagatgatgggttgaygggtgcagtaaaccaccatggcatgtgtatacctatgtaacaaacctccacgttctgtacatgtatctcagaacttaaaatgtaataataacaataataaaaacctcaaaaaaaggaaatgcttcttcttagaacagattacataccctcattgctttttataatagcctgtaataacagaatatccacaaggtggcagtaatatatcagtttcatcctctgaaattaaaacttttgcctattcagtaatacaatggatcttttgaactcactctaacacgtagaatacagc

SEQ ID NO: 563865 - DNA, 364 bp, Homo sapiens
cttgtcaggggggtgggaggctaggggagtgatagcattaggagaaatacctaatgtagatgatgggttgacgggtgcagtaaaccaccatggcatgtgtatacctatgtaacaaacctccacgttctgtacatgtatctcagaacttaaaatgtaataataacaataataaaaacctcaaaaaaaggaaatgcttcttsttagaacagattacataccctcattgctttttataatagcctgtaataacagaatatccacaaggtggcagtaatatatcagtttcatcctctgaaattaaaacttttgcctattcagtaatacaatggatcttttgaactcactctaacacgtagaatacagc

SEQ ID NO: 563866 - DNA, 636 bp, Homo sapiens
tgtctcaaaaaattaagttagttaaattaaacataaagttgcattgtatttaagaaattgggaaagcagaaaatgcttctgtttttcttttgagttgaacaatgagaacacatggacacagggaggggaacatcacataccggggcttgtcaggggggtgggaggctaggggagtgatagcattaggagaaatacctaatgtagatgatgggttgacgggtgcagtaaaccaccatggcatgtgtatacctatgtaacaaacctccacgttctgtacatgtatctcagaacttaaaatgtaataataacaataataaaaacctcaaaaaaaggaaatgcttcttcttagaacagattacataccctcattgctttttataatagcctgtaataacagaatatccacaaggtggcagtaatatatcagtttcatcctctgaaattaaaacttttgcctattcagtaatrcaatggatcttttgaactcactctaacacgtagaatacagcaatttgacttaataattagcctttaaatttatagtcttgtattatcactttagtagtttgaattattttgtattttaatatatttaaatgaattagtcctatagaaattgactaatttgacatgtga

SEQ ID NO: 563867 - DNA, 514 bp, Homo sapiens
aacttacatctagcatatgtaaaaaattctcaaaactcaatrgtaataaaataccaattagaaaataggcatatgtgacctctctgtattataacttaaacctcatgtgactacaattatttcaaatgaaataaacaaaacagtaatgcctgtttttggcatataaaataatcagagaacatagaattgtccgaagttaaattattgggccatttacttaatttaaatatttttaaatgcgtgtacccattttgcttgaaggtgtgtgcaagtatgcttgtatttttttaacgataatatggtcacatgagcattaaatttattttttaaaagtttatagttaccccacacaagttcttattgattccctcattcttaacacctgcatagtatttcattttataattaatggattgtaggtttattcttttaaaatcactggggtggttctcattttttttttcactaaaaagtgttgcaatgcacaaaactaaaaatataaggagggtctttt

SEQ ID NO: 563868 - DNA, 514 bp, Homo sapiens
aacttacatctagcatatgtaaaaaattctcaaaactcaatggtaataaaataccaattagaaaataggcatatgtgacctctctgtattataacttaaacctcatgtgactacaattatttcaaatgaaataaacaaaacagtaatgcctgtttttggcatataaaataatcagagaacatagaattgtccgaagttaaattattgggccatttacttaatttaaatatttttaaatgcktgtacccattttgcttgaaggtgtgtgcaagtatgcttgtatttttttaacgataatatggtcacatgagcattaaatttattttttaaaagtttatagttaccccacacaagttcttattgattccctcattcttaacacctgcatagtatttcattttataattaatggattgtaggtttattcttttaaaatcactggggtggttctcattttttttttcactaaaaagtgttgcaatgcacaaaactaaaaatataaggagggtctttt

SEQ ID NO: 563869 - DNA, 528 bp, Homo sapiens
actgggagaaataatttgcataccatatatctgacaaagaacttacatctagcatatgtaaaaaattctcaaaactcaatggtaataaaataccaattagaaaataggcatatgtgacctctctgtattataacttaaacctcatgtgactacaattatttcaaatgaaataaacaaaacagtaatgcctgtttttggcatataaaataatcagagaacatagaattgtccgaagttaaattattgggccatttacttaatttaaatatttttaaatgcgtgtacccattttgcttgaaggtgtgtgcaagtatgcttgtatttttttaacgataatatggtcacatgagcattaaatttattttttwaaagtttatagttaccccacacaagttcttattgattccctcattcttaacacctgcatagtatttcattttataattaatggattgtaggtttattcttttaaaatcactggggtggttctcattttttttttcactaaaaagtgttgcaatgcacaaa

SEQ ID NO: 563870 - DNA, 528 bp, Homo sapiens
actgggagaaataatttgcataccatatatctgacaaagaacttacatctagcatatgtaaaaaattctcaaaactcaatggtaataaaataccaattagaaaataggcatatgtgacctctctgtattataacttaaacctcatgtgactacaattatttcaaatgaaataaacaaaacagtaatgcctgtttttggcatataaaataatcagagaacatagaattgtccgaagttaaattattgggccatttacttaatttaaatatttttaaatgcgtgtacccattttgcttgaaggtgtgtgcaagtatgcttgtatttttttaacgataatatggtcacatgagcattaaatttattttttawaagtttatagttaccccacacaagttcttattgattccctcattcttaacacctgcatagtatttcattttataattaatggattgtaggtttattcttttaaaatcactggggtggttctcattttttttttcactaaaaagtgttgcaatgcacaaa

SEQ ID NO: 563871 - DNA, 564 bp, Homo sapiens
aacaaggtattaactacgacaaaacaatgtaacagggtgtcatcatggacgttttgtgaggttaaaccacagggacccaggggaatcaccaatttttttggaagaaggaaaggaaaggaaaaaaatgtttaatggccctgggaactggaaaacctagaaatacaagygctaacatctgtgttcctaaattcagagattcttactaggcaaaaagaactcagcagattaatctgagaacagcagctgaggctggcagaaggcttcctgggcctcaactcatagctgagagtgagggtggcaaaaagcagtgctgtgagtggtctgtttcctatgaaccctacaaattaaccacccccaaaacaaagccctgtcctaaggagaaactgcaggaagtcaattataaattgagttgggaagcacactgaggctcaagaaaagggaagctccaggttaagatgcaagagaagaagggaaaaggcagttttctgcaagttcaagcacaaataatttctttaccttctagttctggaaataccaggtgctgtgtatgtaaagcaggaattt

SEQ ID NO: 563872 - DNA, 564 bp, Homo sapiens
aacaaggtattaactacgacaaaacaatgtaacagggtgtcatcatggacgttttgtgaggttaaaccacagggacccaggggaatcaccaatttttttggaagaaggaaaggaaaggaaaaaaatgtttaatggccctgggaactggaaaacctagaaatacaagtgctaacatctrtgttcctaaattcagagattcttactaggcaaaaagaactcagcagattaatctgagaacagcagctgaggctggcagaaggcttcctgggcctcaactcatagctgagagtgagggtggcaaaaagcagtgctgtgagtggtctgtttcctatgaaccctacaaattaaccacccccaaaacaaagccctgtcctaaggagaaactgcaggaagtcaattataaattgagttgggaagcacactgaggctcaagaaaagggaagctccaggttaagatgcaagagaagaagggaaaaggcagttttctgcaagttcaagcacaaataatttctttaccttctagttctggaaataccaggtgctgtgtatgtaaagcaggaattt

SEQ ID NO: 563873 - DNA, 615 bp, Homo sapiens
ttataaattgagttgggaagcacactgaggctcaagaaaagggaagctccaggttaagatgcaagagaagaagggaaaaggcagttttctgcaagttcaagcacaaataatttctttaccttctagttctggaaataccaggtgctgtgtatgtaaagcaggaattttggttgaatattatataattttctgacccactgttactaatccagtttcccctgtactcagatcttccatactacagacagacctgacagatgctcagcaaatagtagctaatattttctaggaaactatgtgctaaacgagttttcttaaatttctacctccaggtctgtaagttgatttgaagcattaccagtttctggttctgcacaggttgttgagcgcaggacttctctcctccagtggaaagtccacctgctcacaatcaaccatcctttcctgcagccttggagacactactcagtgtagcaygcctcccagtctagaataggcacactcatcatcagtctctctcattttctgtcttatctccattccatctacatacagtttttgttttcaccaatgtttttaaataaacaattgtacaagcacgacgacaacagaaac

SEQ ID NO: 563874 - DNA, 533 bp, Homo sapiens
actacagacagacctgacagatgctcagcaaatagtagctaatattttctaggaaactatgtgctaaacgagttttcttaaatttctacctccaggtctgtaagttgatttgaagcattaccagtttctggttctgcacaggttgttgagcgcaggacttctctcctccagtggaaagtccacctgctcacaatcaaccatcctttcctgcagccttggagacactactcagtgtagcatgcctcccagtctagaataggcacactcatcatcagtctctctcattttctgtcttatctccattccatctacatacagtttttgttttcrccaatgtttttaaataaacaattgtacaagcacgacgacaacagaaaccttccttcccccagtgttgtagtgagcaaggaatatatttaacttcaaataaaagacaagaacaaatgctggataaagctgacagaaagaaatgcaactgtaggtgctctggcaatatagaaatgatacaactaagaaaaatggaagaaaaggaa

SEQ ID NO: 563875 - DNA, 467 bp, Homo sapiens
cagtctagaataggcacactcatcatcagtctctctcattttctgtcttatctccattccatctacatacagtttttgttttcaccaatgtttttaamtaaacaattgtacaagcacgacgacaacagaaaccttccttcccccagtgttgtagtgagcaaggaatatatttaacttcaaataaaagacaagaacaaatgctggataaagctgacagaaagaaatgcaactgtaggtgctctggcaatatagaaatgatacaactaagaaaaatggaagaaaaggaaagagaaagtattcctcagaatgattttactgactgctcatctgtaatgcctgggagtcaaaggatattgtttatagaaatgtaagcatacttaatggcaccaggggaaacaaagttaatatgattaaatcaaattgtgggatgaaaaatcacatagggaggacaagaaagagaatacagc

SEQ ID NO: 563876 - DNA, 386 bp, Homo sapiens
ccagtgttgtagtgagcaaggaatatatttaacttcaaataaaagacaaraacaaatgctggataaagctgacagaaagaaatgcaactgtaggtgctctggcaatatagaaatgatacaactaagaaaaatggaagaaaaggaaagagaaagtattcctcagaatgattttactgactgctcatctgtaatgcctgggagtcaaaggatattgtttatagaaatgtaagcatacttaatggcaccaggggaaacaaagttaatatgattaaatcaaattgtgggatgaaaaatcacatagggaggacaagaaagagaatacagctaataccattgttcttagtttagagacattagctactgtctaaagaaagagatgattttat

SEQ ID NO: 563877 - DNA, 467 bp, Homo sapiens
cagtctagaataggcacactcatcatcagtctctctcattttctgtcttatctccattccatctacatacagtttttgttttcaccaatgtttttaaataaacaattgtacaagcacgacgacaacagaaaccttccttcccccagtgttgtagtgagcaaggaatatatttaacttcaaataaaagacaagaacaaatgctggataaagctgacagaaagaaatgcaactgtaggtgctctggcaatatagaaatgatacaactaagaaaaatggaagaaaaggaaagagaaagtattyctcagaatgattttactgactgctcatctgtaatgcctgggagtcaaaggatattgtttatagaaatgtaagcatacttaatggcaccaggggaaacaaagttaatatgattaaatcaaattgtgggatgaaaaatcacatagggaggacaagaaagagaatacagc

SEQ ID NO: 563878 - DNA, 629 bp, Homo sapiens
ttaatggcaccaggggaaacaaagttaatatgattaaatcaaattgtgggatgaaaaatcacatagggaggacaagaaagagaatacagctaataccattgttcttagtttagagacattagctactgtctaaagaaagagatgattttatgaaattacataaggtagccatcagaataaaagtttaactcttccaaatatcacaacatcaaaacaaaagcaataaaacaagacagcaaaagacagatatgtrcatataaatcatagcataatatactgtaatcaaaatataaccaaacacaatttatcattaaaagtaagtgggcttgactcttattagaggaaaaaatattgtcagattaaatcaaaaagcaaatctcaattctatgctggatataagataaagtgttacagaaagtttagaaataaaagtataggcaatgaataaaaggatcttctcttcatgcgttaggagtataaaacagtaagtaaacacatcatatgttttctgtttttacacttaaatggctggagatgttacaccactagtatgaatttacttcagatatataaaggatacacttttatgtggttagaaacagcaatgataatagttaaggtgaaaataa

SEQ ID NO: 563879 - DNA, 629 bp, Homo sapiens
ttaatggcaccaggggaaacaaagttaatatgattaaatcaaattgtgggatgaaaaatcacatagggaggacaagaaagagaatacagctaataccattgttcttagtttagagacattagctactgtctaaagaaagagatgattttatgaaattacataaggtagccatcagaataaaagtttaactcttccaaatatcacaacatcaaaacaaaagcaataaaacaagacagcaaaagacagatatgtgcatataaatcatagcataatatactgtaatcaaaatataaccaaacacaatttatcattaaaagtaagtgggcttgactcttattagaggaaaaaatattgtcagattaaatcaaaaagcaaatctcaattctatgctggatataagataaagtgttacagaaagtttagaaataaaagtawaggcaatgaataaaaggatcttctcttcatgcgttaggagtataaaacagtaagtaaacacatcatatgttttctgtttttacacttaaatggctggagatgttacaccactagtatgaatttacttcagatatataaaggatacacttttatgtggttagaaacagcaatgataatagttaaggtgaaaataa

SEQ ID NO: 563880 - DNA, 678 bp, Homo sapiens
tcctcagaatgattttactgactgctcatctgtaatgcctgggagtcaaaggatattgtttatagaaatgtaagcatacttaatggcaccaggggaaacaaagttaatatgattaaatcaaattgtgggatgaaaaatcacatagggaggacaagaaagagaatacagctaataccattgttcttagtttagagacattagctactgtctaaagaaagagatgattttatgaaattacataaggtagccatcagaataaaagtttaactcttccaaatatcacaacatcaaaacaaaagcaataaaacaagacagcaaaagacagatatgtgcatataaatcatagcataatatactgtaatcaaaatataaccaaacacaatttatcattaaaagtaagtgggcttgactcttattagaggaaaaaatattgtcagattaaatcaaaaagcaaatctcaattctatgctggatataagataaagtgttacagaaagtttagaaataaaagtataggcaatgaataaaaggatcttctcttcatgcrttaggagtataaaacagtaagtaaacacatcatatgttttctgtttttacacttaaatggctggagatgttacaccactagtatgaatttacttcagatatataaaggatacacttttatgtggttagaaa

SEQ ID NO: 563881 - DNA, 598 bp, Homo sapiens
aatgcttgaaagtttatagttttttagaaattttawttactgtgtgtctctttatcaaaataaaattaatgctgaaaagctatattaaatgaattattttgagatggtctcttcccccttcttccagtgagaggatatccacagatatgtcaggagcttgctttacctagaaatgtgttgagggccacaggtttgggttcacctaggaatgtttagggacacctccccaagttgttgttgaagagtggggtaaatgtaagatagaattaggctcacggaggccagatgagagcatcatatcaccccagaaacatagcatatacctaggagatctgttctcagtatcaaagtcttaagcactgtaagattgcctatagaccaagacaacaactatatatatatatagttaataaaatcagttaatatataaacatatatttattaacttatttttatttttatcttcagacagcatcttgctctgtcacctaggctggagtgcagtagtgcaattaaggctcactgcagccttgacctctggggctgaagctatcctcctgcctcagtctcctaaagtgctaggatgagaggtgtgagt

SEQ ID NO: 563882 - DNA, 616 bp, Homo sapiens
ttactgtgtgtctctttatcaaaataaaattaatgctgaaaagctatattaaatgaattattttgagatggtctcttcccccttcttccagtgagaggatatccacagatatgtcaggagcttgctttrcctagaaatgtgttgagggccacaggtttgggttcacctaggaatgtttagggacacctccccaagttgttgttgaagagtggggtaaatgtaagatagaattaggctcacggaggccagatgagagcatcatatcaccccagaaacatagcatatacctaggagatctgttctcagtatcaaagtcttaagcactgtaagattgcctatagaccaagacaacaactatatatatatatagttaataaaatcagttaatatataaacatatatttattaacttatttttatttttatcttcagacagcatcttgctctgtcacctaggctggagtgcagtagtgcaattaaggctcactgcagccttgacctctggggctgaagctatcctcctgcctcagtctcctaaagtgctaggatgagaggtgtgagtcaccttgccaggcccagggcaataactatgcaatgtttatataatttggagcaa

SEQ ID NO: 563883 - DNA, 598 bp, Homo sapiens
aatgcttgaaagtttatagttttttagaaattttatttactgtgtgtctctttatcaaaataaaattaatgctgaaaagctatattaaatgaattattttgagatggtctcttcccccttcttccagtgagaggatatccacagatatgtcaggagcttgctttacctagaaatgtgttgagggccacaggtttgggttcacctaggaatgtttagggacacctccccaagttgttgttgaagagtggggtaaatgtaagatagaattaggctcayggaggccagatgagagcatcatatcaccccagaaacatagcatatacctaggagatctgttctcagtatcaaagtcttaagcactgtaagattgcctatagaccaagacaacaactatatatatatatagttaataaaatcagttaatatataaacatatatttattaacttatttttatttttatcttcagacagcatcttgctctgtcacctaggctggagtgcagtagtgcaattaaggctcactgcagccttgacctctggggctgaagctatcctcctgcctcagtctcctaaagtgctaggatgagaggtgtgagt

SEQ ID NO: 563884 - DNA, 559 bp, Homo sapiens
aggttcctcaaaaaagtaaaaatagaactaccatgtggtccagcaatttctttactggatgtatatccaaaataaaggaaattaatgtatcaaagacatatctacatgccgatgtgtactgcagcactattcacaatagacaaaatatggaatcaacgtaagtgctcataaacaaatgaatagattttaaaagtcatatatatacataatgcaatactactcagaaacaaagaagaatgaaattctgtcattcacagcaacataggtggcactggccatttggtttaacgtaatgaacataggccattatgttaagtggaatgagccaagcacagaaaggcaaataccacatgttgtcactcatatgtgggcagtaaaaaagtggatctcatgragatagaaagtaaattggtggttgctagaggccagcaaggggagtgggaagaggagattaagagaagaaaatataaatgtatttatcaccactaaactgtcctctaaaaatgtacagatggtaaattatatatatatatattttaactcaataaaaagttaaaaa

SEQ ID NO: 563885 - DNA, 559 bp, Homo sapiens
aggttcctcaaaaaagtaaaaatagaactaccatgtggtccagcaatttctttactggatgtatatccaaaataaaggaaattaatgtatcaaagacatatctacatgccgatgtgtactgcagcactattcacaatagacaaaatatggaatcaacgtaagtgctcataaacaaatgaatagattttaaaagtcatatatatacataatgcaatactactcagaaacaaagaagaatgaaattctgtcattcacagcaacataggtggcactggccatttggtttaacgtaatgaacataggccattatgttaagtggaatgagccaagcacagaaaggcaaataccacatgttgtcactcatatgtgggcagtaaaaaagtggatctcatggagatagaaagtaaattggtggttgctagaggccagcaaggggagtgggaagaggagattaagagaagaaaatataaatgtatttatcaccactaaactgtcctctaaaaatgtacagatggtaaattatatatatatatwttttaactcaataaaaagttaaaaa

SEQ ID NO: 563886 - DNA, 675 bp, Homo sapiens
ctacccatagctggccctgtgaacctacacacctgctccactgtgtatccttctcaaagagacactcttcctgctgagtctctgccctctgctcctagatccaaatggcatctcctaccctatccctgtatggtttaaccyagggaaactctttcccagaggagtcaggtaaggagacagtggctgagcttcttacagacttaaaggagacatcctggaatttaggagtcagtccttcctttctgtaatccctggcagcttctgctgctgctcaaagtttagctttgtctctcatccagctcagacttttgctggtcctgatggcctctgcttagctgtattagtacgctcttgcattcctataaagaaatacatgagaaatacctttagttggctcacagttccataggctatacaggaagcatggtggtttctgcttccggggaggcctcaggaaacttttactcaaggtgcagggcaaaaaaaaaaaaaaaacaacaacaacaaaaaaaactaccagcactgcactgtgaggccctgatccctgagctaacttcatattattacctctacagcaagtgtccgtgagaacatagatatatttcttatgtgagtacacaatttacagaagaggaactaccctcccaaaccaaaacaaaatgtcataattttaat

SEQ ID NO: 563887 - DNA, 675 bp, Homo sapiens
ctacccatagctggccctgtgaacctacacacctgctccactgtgtatccttctcaaagagacactcttcctgctgagtctctgccctctgctcctagatccaaatggcatctcctaccctatccctgtatggtttaacccagggaaactctttcccagaggagtcaggtaaggagacagtggctgagcttcttacagacttaaaggagacatcctggaatttaggagtcagtccttcctttctgtaatccctggcagctyctgctgctgctcaaagtttagctttgtctctcatccagctcagacttttgctggtcctgatggcctctgcttagctgtattagtacgctcttgcattcctataaagaaatacatgagaaatacctttagttggctcacagttccataggctatacaggaagcatggtggtttctgcttccggggaggcctcaggaaacttttactcaaggtgcagggcaaaaaaaaaaaaaaaacaacaacaacaaaaaaaactaccagcactgcactgtgaggccctgatccctgagctaacttcatattattacctctacagcaagtgtccgtgagaacatagatatatttcttatgtgagtacacaatttacagaagaggaactaccctcccaaaccaaaacaaaatgtcataattttaat

SEQ ID NO: 563888 - DNA, 515 bp, Homo sapiens
aacctctgaagaccatacaatttagggaacactaacacctcaaaaamctctgtaaacttccttccttccttttcttccttccttccttccttccttccttcctccttccctccctctctctctctctttttctttctttgttcatttctgagacagagtcttgctctgtcattcaggctagagtgtagtggctggattatggctcactgccgccttgacctcctaggctcaagcaatcctctcacctcagcctccctagtagctgggactattggcatgctcagctaatttttttctccttttctttttgtagagacagggtctcatcatgttgcccaggctggtcttggactccttggatcaagcaatcctgttgcctcagcctcccaaagtgctggattacaagcatgagccactgtgcccagccttaagtttttttcatacaggaggaaagaatttggaaagtaggtgtgtgtgtgtgtgtgtgtgtgtgtgtgtgtgtgtgtgtgtgtgtt

SEQ ID NO: 563889 - DNA, 614 bp, Homo sapiens
ctgggactataagcatgtgtcaccgtgcctggctaattttttgctgttgtggttgttgttagagatgaggtcttcctttattgaacaagctggtctccaactcctggcttcaagtgatcttcccacttctgcctcccaaagtgctgggactacaggtgtgagccaccatgcccagccaagttctgcttcttaacctgaggtagatactttgatgtttcattttsctttattgtacagatatactttatattctcatatgtgacacaagtcaaaatttaaaaaaacaatttaatgtttattccctttagatgaatgatgggcaaatttacataatgaattcattactgaaacaatgtatagatttcagactaggaaagtaactatttataaaagaaaagcttaaaacctgaaacagaaacaaaatcctgaaactgtaaaattgagtcaaactaaaatttaaaaaacaaagcaatgatataaagtatcatttgtccaaatgtgttctacaaaacgcttttttcttaaatatgtctgaggaaaaacaggttctaggagtaaaatatgtttgaaaaatgctgagttaaacaactgaacctatgaaggaaggaatagaa

SEQ ID NO: 563890 - DNA, 581 bp, Homo sapiens
acctgaggtagatactttgatgtttcattttcctttattgtacagatatactttatattctcatatgtgacacaagtcaaaatttaaaaaaacaatttaatgtttattccctttagatgaatgatgggcaaatttacataatgaattcattactgaaacaatgtatasatttcagactaggaaagtaactatttataaaagaaaagcttaaaacctgaaacagaaacaaaatcctgaaactgtaaaattgagtcaaactaaaatttaaaaaacaaagcaatgatataaagtatcatttgtccaaatgtgttctacaaaacgcttttttcttaaatatgtctgaggaaaaacaggttctaggagtaaaatatgtttgaaaaatgctgagttaaacaactgaacctatgaaggaaggaatagaacttctcaagctcttgactctggaatcttttttacatggcaattaacaccatgcttcttcttggatttgtatttcagataaacacaatctgggaaacattttataatacagagggccacaccagattgaatattgcccccaggaatgaaatgaaaacagg

SEQ ID NO: 563891 - DNA, 581 bp, Homo sapiens
acctgaggtagatactttgatgtttcattttcctttattgtacagatatactttatattctcatatgtgacacaagtcaaaatttaaaaaaacaatttaatgtttattccctttagatgaatgatgggcaaatttacataatgaattcattactgaaacaatgtatagatttcagactaggaaagtaactatttataaaagaaaagcttaaaacctgaaacagaaacaaaatcctgaaactgtaaaattgagtcaaactaaaatttaaaaaacaaagcaatgatataaagtatcatttgtccaaatgtgttctacaaaacgcttttttcttaaatatgtctgaggaaaaacaggttctaggagtaaaatatgtttgaaaaatgctgrgttaaacaactgaacctatgaaggaaggaatagaacttctcaagctcttgactctggaatcttttttacatggcaattaacaccatgcttcttcttggatttgtatttcagataaacacaatctgggaaacattttataatacagagggccacaccagattgaatattgcccccaggaatgaaatgaaaacagg

SEQ ID NO: 563892 - DNA, 483 bp, Homo sapiens
cgctggctccataggaaaattctgcctctcatagatacctgaggcattggattccctaaacaaaattgtagatccacttgtactgcaggcctctgtagtccaaaacgtttctctttctctgagtcccactcacagctgacatccttcttgacatttgcattttatttagaatacacatccaaatatgttttatgttgcctctaacattcaaaagagcctctaacagtcttcctttccctatcccttccttccatttgaargatgtttgctccacatcactttctactgcattcttagactccctgaaggtaggaaacccacatttttgtcattggctcgatgtgtctttcctgaagtctatggtagctgctatttttctctagagcatatcaaccggatgctgtccatgtattccataagttatgtccatttggctagtgacatggccagggttcctgagtacaaaattgtgacacagacaaa

SEQ ID NO: 563893 - DNA, 550 bp, Homo sapiens
gctgtccatgtattccataagttatgtccatttggctagtgacatggccagggttcctgagtacaaaattgtgacacagacaaaaatagttatacttctacagctacatagtgaagacactstgcctggaaaaagtaagaaatttcaggtatttaccatttatttaagatacagaaaaataatttgcctaaatgtatagcaggaaaaggagataagtgtattcactaaagcaaggagactacatctggattttaaatgtgtgccctcagataggattccagtacacagtggctggattctgagtgtttgtccctcacacaggattacagaacactgctacgaggttctgaatggaaaaggaaatatcttcacataaagacaagaaagaagcattctgagaaacttctttgtgatgtgtgcattcacctcacagagttgaacttttcttttgatttagcacttttgaaatactctttttgtagtgtctgcaagtggatatttggagcgctttacattctatggtggaaaagtaaatatcttcacatcaaaa

SEQ ID NO: 563894 - DNA, 550 bp, Homo sapiens
gctgtccatgtattccataagttatgtccatttggctagtgacatggccagggttcctgagtacaaaattgtgacacagacaaaaatagttatacttctacagctacatagtgaagacactctgcctggaaaaagtaagaaatttcaggtatttaccatttatttaagatacagaaaaataatttgcctaaatgtatagcaggaaaaggagataagtgtattcactaaagcaaggagactacatctggattttaaatgtgtgccctcagataggattccagtacacagtggctggattctgagtgtttgtccctcacacaggattacagaacactgctacgaggttctgaatggaaaargaaatatcttcacataaagacaagaaagaagcattctgagaaacttctttgtgatgtgtgcattcacctcacagagttgaacttttcttttgatttagcacttttgaaatactctttttgtagtgtctgcaagtggatatttggagcgctttacattctatggtggaaaagtaaatatcttcacatcaaaa

SEQ ID NO: 563895 - DNA, 581 bp, Homo sapiens
acctgaggtagatactttgatgtttcattttcctttattgtacagatatactttatattctcatatgtgacacaagtcaaaatttaaaaaaacaatttaatgtttattccctttagatgaatgatgggcaaatttacataatgaattcattactgaaacaatgtatagatttcagactaggaaagtaactatttataaaagaaaagcttaaaacctgaaacagaaacaaaatcctgaaactgtaaaattgagtcaaactaaaatttaaaaaacaaagcaatgatataaagtatcatttgtccaaatgtgttctacaaaacgcttttttcttaaatatgtctgaggaaaaacaggttctaggagtaaaatatgtttgaaaaatgctgagttaaacaactgaacctatgaaggaaggaatagaacttctcaagctcttgactctggaatcttttttacayggcaattaacaccatgcttcttcttggatttgtatttcagataaacacaatctgggaaacattttataatacagagggccacaccagattgaatattgcccccaggaatgaaatgaaaacagg

SEQ ID NO: 563896 - DNA, 550 bp, Homo sapiens
gctgtccatgtattccataagttatgtccatttggctagtgacatggccagggttcctgagtacaaaattgtgacacagacaaaaatagttatacttctacagctacatagtgaagacactctgcctggaaaaagtaagaaatttcaggtatttaccatttatttaagatacagaaaaataatttgcctaaatgtatagcaggaaaaggagataagtgtattcactaaagcaaggagactacatctggattttaaatgtgtgccctcagataggattccagtacacagtggctggattctgagtgtttgtccctcacacaggattacagaacactgctacgaggttctgaatggaaaaggaaatatcttcacataaagacaagaaagaagcattctgagaaacttctttgtgatgtgtgcattcacctcacagagttgaacttttcttttgatttagcacttttgaaatactctttttgtagtgtctgcaagtggatatttggagygctttacattctatggtggaaaagtaaatatcttcacatcaaaa

SEQ ID NO: 563897 - DNA, 406 bp, Homo sapiens
caaacatctgtcttttcagggtatcacagggcgtcaaactggaaaatgtggcactgcctggagtttctacctggtgaagggtggcagacttttctcttcagaggactcttgacagggtagcatccattatcttgccaatttactacaacctaggcccaatcctcagtcttataggttcagaaatttatttttatcagcatcaacagggtagctacattgcttagaagcaaacaaaattaaccatgcttcaatagaaatcaggatatagatgtattaatacagaatgacaaatataactgtgacagaaataggaatgcctgtttatggtcatatacggccaatactttcattacagccaaactcatayatgcagccaaataagaggcccctggatacacagggaatc

SEQ ID NO: 563898 - DNA, 558 bp, Homo sapiens
cctgattctaattaagaagtttaacttggtattctatttctgatggaaggatggctgaaagaagggagactcaaacaacagatgaaggcaaaatactctgtactgaattttcaatgtaatcttaaattctatgtttaattgagatgacccaaattcttttttttttttttttttgatacgcagtctcrctctgttgcccaggctaaagtgcagtggcatgatctcggctcactgcaacctccacctcccgggttcacaccattctcctgcctcagcctcccaagtagcagggactacaggcacccgccaccacacctggctaactttttgtatttttagtggagacagagatgacccaaattcttaactgcctcataaatactgttaatatattgaaagttttgccctaggcttttattaaagtcaactatatagaaaaagtttctcctatcttgagatgtattattaaagacatcatccccaataatattccatattctctgtttaggaaccccaattgttttcaaattcaagaattcagagaaatctacttgttac

SEQ ID NO: 563899 - DNA, 561 bp, Homo sapiens
gaaaacaagcgggaggaaagtcgtatctttagtcaagtcttgtttactaaygtactattaatgattatcttttctttttctttatacctttttgcatttttcaatttcctaaaatagccttacatgccttttatcaccaggagaaaaattacttctaaagtaatttcagtcaacatgcatactaagaactcttcagatttatctgttagaagctgtgcatgaatgccagtccttgcatctgtcttggaactcacagagagctcttttcccatggctttaagcaatactcaaaaagactagcatacctgaatttcctagtcctatgtttttttcatccaacagccagtcttgtatttctagctgttttctaaacatttcaaccaaaccattttacagataactcatacagtcatcctttgatatgcatggggaattggttccaggatcccccttgtataccaaaatccatggatgctcaagttactggtataaaatagtgtagtatttgcatataacctacacacatcctcctatatactttaaataatctctagattactt

SEQ ID NO: 563900 - DNA, 483 bp, Homo sapiens
ttcttcctatctagtaacatgttacaaagaaagcaagrctcagactgaattcagccacacattcagacatttactggctagtagacctcagtgatgagcctgtatgtttgggaatgtcacagtactctctccctcatgctctaacaagcactttgcatgaaagatttactccaaggctgacacagtgatcttccaacatcgggatgcttcaaagttccagcgatgtctgtgagcagagtttcccctgggtggtgtgggaacacgggactagcatcccagatcaaggaattaggttgccaggcctctgtgattctcaagtctcattcatgcagtgggaggagagactataaaaccttttgggccaaattcactttttcaattttttactttttaaaaattggtaaaatatatataatataaaatttaccattttaaccattttacagagtatgtttaatggcatcaagtgcattcgtattgtgt

SEQ ID NO: 563901 - DNA, 603 bp, Homo sapiens
cactgcagcctcagcctcccaggttgaagcaattctcctgcctcagcctcccaagtagctgggattacaagcatgcgccaccactcccggctaattttgtatttttagtggagacagagtttctccatgttggtcaggctggtctcaaactaacgacctcaggtgatgtgcctgccttggccttccaaagtgctgggattacaggcatgaggcaccgtgcccagccgcttggtactttttgaatggcacagtaaccttgttttctgtgcttagacgaaactatgaagtggccttacttggtcgattttttttgtggtctcagagtagtcttgtcygaggttggtattctgtgagaatgtttacgtgtaacagcagaatgaatgccaggctggcttctaaaggtcaagggctgcttgttttttcattcttcacagctaccctctgacctcctctctagcaaaactgtagtgactactaagctttaataacatatttcccagtttttgttacaaaatatttttatcatacagaaaaagtaaagataatgtattaagtaccatatatccatcaagcagcttaagaaataaatgattatagataaaa

SEQ ID NO: 563902 - DNA, 584 bp, Homo sapiens
cgcagtctcccgcgtagctgggactacaggctcatgccaccacacccggctaatttttgtakttttagtagggacgaagtttcaccgtattaggcaggctggtctcaaacctctgacctcgtgatccacccacctcggcctcccaaagtgctgggattccagccgtgagacacggcgccagggtagcgtgatgatgagttaatttttcaatttcttgtctcttaataaaatgaaccttgaaaatttaatagaaaaacagttcccttgctctcatccccacttaataccaatttaccaaaaaaaaaaaaaaaaaaaagaagaattgcattttgactttttactggaaattttttgctgtggatacttttagtagtatattttgataacatttttcaacaattgaacataatcaataaacagattcactaataaatgttgataattatctgctggaatcttgagaatacaaaatatagtgaagtaatggattgattctctatggtcatggaataaaaatagaatcccataatctctcccaagcggatataatggttactgctattctaaatgatttctatttttac

SEQ ID NO: 563903 - DNA, 545 bp, Homo sapiens
agcatgggatattttgccatttgtttgtgttttttcaatttctttcacccaagttttgtagtttgccttgtatagatctttccccttttgtttaatgtattccaaggctttggggtttttttgtttgtttgtttttgtagctattttaaatgggattgmctgcttgatttctttgttgactagatcattagtggtgtacagaaatgctacaaatttttgtacattgcttttgtattctacaactttactgaattcatttatcaaatctaagagatattttggtggaatcttcaggctttcctaaatatgaggtcatatcatcagcaaaaatggacaatttgacctctccttttccaatttggatgcattttatttctttctgattgctctggctaagacttccagggctatactgaataaaagtagtgaaagtgagcatccttgacttgttccagttctgacaggaaaggatttcaacttttccccatttagtatgctgttagttgtgtgtttgtcatatatggcctttgttatattgaggtgtg

SEQ ID NO: 563904 - DNA, 545 bp, Homo sapiens
agcatgggatattttgccatttgtttgtgttttttcaatttctttcacccaagttttgtagtttgccttgtatagatctttccccttttgtttaatgtattccaaggctttggggtttttttgtttgtttgtttttgtagctattttaaatgggattgcctgcttgatttctttgttgactagatcattaktggtgtacagaaatgctacaaatttttgtacattgcttttgtattctacaactttactgaattcatttatcaaatctaagagatattttggtggaatcttcaggctttcctaaatatgaggtcatatcatcagcaaaaatggacaatttgacctctccttttccaatttggatgcattttatttctttctgattgctctggctaagacttccagggctatactgaataaaagtagtgaaagtgagcatccttgacttgttccagttctgacaggaaaggatttcaacttttccccatttagtatgctgttagttgtgtgtttgtcatatatggcctttgttatattgaggtgtg

SEQ ID NO: 563905 - DNA, 545 bp, Homo sapiens
agcatgggatattttgccatttgtttgtgttttttcaatttctttcacccaagttttgtagtttgccttgtatagatctttccccttttgtttaatgtattccaaggctttggggtttttttgtttgtttgtttttgtagctattttaaatgggattgcctgcttgatttctttgttgactagatcattagtggtgtayagaaatgctacaaatttttgtacattgcttttgtattctacaactttactgaattcatttatcaaatctaagagatattttggtggaatcttcaggctttcctaaatatgaggtcatatcatcagcaaaaatggacaatttgacctctccttttccaatttggatgcattttatttctttctgattgctctggctaagacttccagggctatactgaataaaagtagtgaaagtgagcatccttgacttgttccagttctgacaggaaaggatttcaacttttccccatttagtatgctgttagttgtgtgtttgtcatatatggcctttgttatattgaggtgtg

SEQ ID NO: 563906 - DNA, 333 bp, Homo sapiens
atgcaacaaacttcactgttgtcttatttaaggcaattgycacattcaccccaactttcagcaactaccctcctgatcaatcagcagccaataacatggagtcaagttgtggcactaacaaaaagattaggatttactgaaggatcagacgatcattatcatttttttagcaataaagtatttctaaattaagatatgtaccggttgtagacacaacactattgaatactcagtgtacagtatagtgtaaacttaagttttatgcactgggaaactaaaaaatttgtgtgacttaattattttgataattgctttattgctgtggtctggtac

SEQ ID NO: 563907 - DNA, 333 bp, Homo sapiens
atgcaacaaacttcactgttgtcttatttaaggcaattgccacatkcaccccaactttcagcaactaccctcctgatcaatcagcagccaataacatggagtcaagttgtggcactaacaaaaagattaggatttactgaaggatcagacgatcattatcatttttttagcaataaagtatttctaaattaagatatgtaccggttgtagacacaacactattgaatactcagtgtacagtatagtgtaaacttaagttttatgcactgggaaactaaaaaatttgtgtgacttaattattttgataattgctttattgctgtggtctggtac

SEQ ID NO: 563908 - DNA, 593 bp, Homo sapiens
attaatagcatttttagtgatatggctttttctacattaaaaaactgttataactgttctgtccttcaggtgcagacattggatgatgygggtatggagagaggcatctgctacagcatataaaaaattaccctttcctctgacaattagcaccttgtccctggtcaagtccaccctacctggcccttcaacccttggagaagtcagcttgtatgggatcatcagttatgttttagtaggtagctagtcaggcaggagcagggcagaagagcccccctgccaacaccaggaatgttaggagagcatcaggggatggtcaggtcattgtgaactgtctctctataataataattggtcataaccaattaaggccgtctcccagtagaaaatacctgaagccagtgatcagcagcttcccgaaaagatctcaggacttgggccagtgggctcaagcatgtgcactaagaggcaaaatgaagaagtttaacaggcatatgatcttcctctaggaacacttgactggtaagagaaaaatgcctcaagcgagcacgtgtacaactccaggaaacacactgtgcatgtggccccttccc

SEQ ID NO: 563909 - DNA, 593 bp, Homo sapiens
attaatagcatttttagtgatatggctttttctacattaaaaaactgttataactgttctgtccttcaggtgcagacattggatgatgtgggtatggagagaggcatctgctacagcatataaaaaattaccctttcctctgacaattagcaccttgtccctggtcaagtccaccctacctggcccttcaacccttggagaagtcagcttgtatgggatcatcagttatgttttagtaggtagctagtcaggcaggagcagggcagaagagcccccctgccaacaccaggaatgttaggagagcatcaggggatggtcaggtcattgtgaactgtctctctataataataattggtcataaccaattaaggcygtctcccagtagaaaatacctgaagccagtgatcagcagcttcccgaaaagatctcaggacttgggccagtgggctcaagcatgtgcactaagaggcaaaatgaagaagtttaacaggcatatgatcttcctctaggaacacttgactggtaagagaaaaatgcctcaagcgagcacgtgtacaactccaggaaacacactgtgcatgtggccccttccc

SEQ ID NO: 563910 - DNA, 583 bp, Homo sapiens
atagcagcaattctcattaaaacaagacagaaaggtgaattataaggagcttaggaaaggactttttttttaaataaaggcagatttatataaaaatattcacatgactagccacatttaaatattttgttcaygcctctattatattccacactacttttcatcatggaaattttgtagaaggttgtcagctctactgcatttttagctgtttgagaaaagagaccatggtgcactgcttttatcacccagaatgcccttcatataggggcagccaatacgtgtttgcgcaacaattgatttaatgcatcatcatgttctccaatctctcctgttttcaaaaccttgatatttaaagctttctcccatttgactcttatttcatgcagcatccatatgaagatcctgataagagctctaattaggccttgttgggttctgcttaaatacagaaacagcttccgggaaagaatgcttccttatttaataagtgagggaggtctgctaaaattatgtcattagctaacaaaccagttggtatcattcttgttttcacaatgcaggtcagtgtttgcaggtttta

SEQ ID NO: 563911 - DNA, 583 bp, Homo sapiens
atagcagcaattctcattaaaacaagacagaaaggtgaattataaggagcttaggaaaggactttttttttaaataaaggcagatttatataaaaatattcacatgactagccacatttaaatattttgttcacgcctctattatattccacactacttttcatcatggaaattttgtagaaggttgtcagctctactgcatttttagctgtttgagaaaagagaccatggtgcactgcttttatcacccagaatgcccttcatataggggcagccaatacrtgtttgcgcaacaattgatttaatgcatcatcatgttctccaatctctcctgttttcaaaaccttgatatttaaagctttctcccatttgactcttatttcatgcagcatccatatgaagatcctgataagagctctaattaggccttgttgggttctgcttaaatacagaaacagcttccgggaaagaatgcttccttatttaataagtgagggaggtctgctaaaattatgtcattagctaacaaaccagttggtatcattcttgttttcacaatgcaggtcagtgtttgcaggtttta

SEQ ID NO: 563912 - DNA, 561 bp, Homo sapiens
tcatcatggcatgaacctaaaatggtttataaatttaatgcaaaccccagcaaaactgcagtaggatagcaggggtttttggtgtttttttttttttttttagaatcagacaaattgattctaaaatgtatgtggaaacgcaaaaacaaatctaaaacagccatataatttttgacaaagaaaaacaagtttagaggacttgtgctccttggatttaagaatgattataaacttacaataattcagacagtaaaatattggcataaggataggaaaatagatcaatggaacagaataaagagtcaagagtagagcacacatgtatgggcaattaactttcaaccagtgtgaaaaagaacctcttttttaaactatagttggtgttgtttaacctcatgaactttaaaaaaagaataaaactatagttggaaaagctagatatccccaggraaaaagagataacaccagaccccatctccctccatagccagaaaataacacgtggcaggttgcaggcctgagcaaaaaactgagggcagcagaacttctgcaggaatatat

SEQ ID NO: 563913 - DNA, 422 bp, Homo sapiens
gaattccctgaccccttgtgcttcccaggtgaggcgatgcctcaccctgctttggctcatgctcagtgcgstgcacccactgtgctgcacccactgtccgacactccccagtgagatgaacctggtacctcagttggaaatgcataaatcacctgtcttctgcattgctcacgctgggagctgcagactggagctgttcctattcggccatcttggctccacctagttttttgtatttttagtagagacggggtttcaccgtgttagccaggatgatctcgatctcctgatctcgtgatctgcctacctcagcctcccagagtgctgggattacaggcgtgagccactgcgcccggcttagaaacattttttaatggtaacccctactgcatgtctgagaatgttcattttccttttgatga

SEQ ID NO: 563914 - DNA, 422 bp, Homo sapiens
gaattccctgaccccttgtgcttcccaggtgaggcgatgcctcaccctgctttggctcatgctcagtgcggtgcacccactgtsctgcacccactgtccgacactccccagtgagatgaacctggtacctcagttggaaatgcataaatcacctgtcttctgcattgctcacgctgggagctgcagactggagctgttcctattcggccatcttggctccacctagttttttgtatttttagtagagacggggtttcaccgtgttagccaggatgatctcgatctcctgatctcgtgatctgcctacctcagcctcccagagtgctgggattacaggcgtgagccactgcgcccggcttagaaacattttttaatggtaacccctactgcatgtctgagaatgttcattttccttttgatga

SEQ ID NO: 563915 - DNA, 546 bp, Homo sapiens
ttttaaatggttgaaaaagaattttgcaaatgtatgatatgtgaaaattatatgaaatttaactttcagtgtccataaataaagttaattggaacatagccactcacattcatttgtgcattattacctgtggctactttcacactacgtaggcaattgaatagttactacaaacatcttgtgtgttgcaaarcctaaaacagttactattggactcttctcagaaaagtgtattgaactgtaacctaaaatatctggttcctgtgacgtctgtgacctcatctattgctcccttcctctcactctgctgcagctgccttggctttgttgctcctgttttggggcctttgcactaactcttctccctagattgcccttttcctagatctccacattgctaattctctttacttctttcagatgtcacctgctgaatggggtgacctacactgagtatgtcatactgtaatacacaccctacactttatagtctcattccctcgtaacttgctcttctttttctcctttattcatagcacaaccttc

SEQ ID NO: 563916 - DNA, 584 bp, Homo sapiens
atacctaaaactgggtaattcattaacaaacaaaatgtacattttacagttccagaggctgtccaargtcaaggggggacatctggtgagggccttcatgctggtggaagactctccatgtctttgggatccatcccttggtgaagaagctaagcatgttagctcagatttctcttcctcttttttttttccttaaatttacctcaagtaggctttgatctcatcctcttcttataaagccaccagtactgctcctatgtaagcatattaattcattaacccataattccattaattcatgaatggataatctatttatgagggcagaggcctcatgacctaatcaccgcccaaaggtaccacctctcgatattggcacattggggaatgaatttccacatgagttttggagggagcaaatccataagactaatattgttgataaatttttcgtatgcatatttcccaatatatgcatatattttcttagattacaggtctgtttaaatcttttgctcatttttattggattatttgctgtcattattatcaaatttcgggtgttcttcatatatattgatagc

SEQ ID NO: 563917 - DNA, 584 bp, Homo sapiens
atacctaaaactgggtaattcattaacaaacaaaatgtacattttacagttccagaggctgtccaaggtcaaggggggacatctggtgagggccttcatgctggtggaagactctccatgtctttgggatccatcccttggtgaagaagctaagcatgttagctcagatttctcttcctcttttttttttccttaaatttaccwcaagtaggctttgatctcatcctcttcttataaagccaccagtactgctcctatgtaagcatattaattcattaacccataattccattaattcatgaatggataatctatttatgagggcagaggcctcatgacctaatcaccgcccaaaggtaccacctctcgatattggcacattggggaatgaatttccacatgagttttggagggagcaaatccataagactaatattgttgataaatttttcgtatgcatatttcccaatatatgcatatattttcttagattacaggtctgtttaaatcttttgctcatttttattggattatttgctgtcattattatcaaatttcgggtgttcttcatatatattgatagc

SEQ ID NO: 563918 - DNA, 584 bp, Homo sapiens
atacctaaaactgggtaattcattaacaaacaaaatgtacattttacagttccagaggctgtccaaggtcaaggggggacatctggtgagggccttcatgctggtggaagactctccatgtctttgggatccatcccttggtgaagaagctaagcatgttagctcagatttctcttcctcttttttttttccttaaatttacctcaagtaggctttgatctcatcctcttcttataaagccaccagtactgctcctatgtaagcatattaattcattaacccataattccattaattcatgaatggataatctatttatgagggcagaggcctcatgacctaatcaccgccyaaaggtaccacctctcgatattggcacattggggaatgaatttccacatgagttttggagggagcaaatccataagactaatattgttgataaatttttcgtatgcatatttcccaatatatgcatatattttcttagattacaggtctgtttaaatcttttgctcatttttattggattatttgctgtcattattatcaaatttcgggtgttcttcatatatattgatagc

SEQ ID NO: 563919 - DNA, 593 bp, Homo sapiens
ctttatattccctattgagatctgctcttctatgatgatgagattgtaccaattttcagtttggaatttttctttttcaagtatctagcacatatgtgacatataatgtagcctatgattgctggtattttcatctgtagctattcttaactaactaatagataacacaggatcactttcttccaagttttctggtcattccagcttcaccaaacatttctatattcttgattggaattaggttcataattgaccagtcttcactgccttctttaattctattgaagtgaaactatctaccaggtmggtaaatttttgctagaaatcaaaccaatgtaagactaaagtttttttcatggcaattgtccacctttgagatactctcatgtgcttaatcaggaatagaacatgattgttcttcatgtaaggggagctcaaacataagatattataaggcacttttcttctctcctgtctttttcgcaaatgttctttaacgtgcctttgctcttatgtttatggcgctttaactagaagaaaaaggggagacagaaaggatctaacaagttttgagcatccacagtgtgccagac

SEQ ID NO: 563920 - DNA, 593 bp, Homo sapiens
ctttatattccctattgagatctgctcttctatgatgatgagattgtaccaattttcagtttggaatttttctttttcaagtatctagcacatatgtgacatataatgtagcctatgattgctggtattttcatctgtagctattcttaactaactaatagataacacaggatcactttcttccaagttttctggtcattccagcttcaccaaacatttctatattcttgattggaattaggttcataattgaccagtcttcactgccttctttaattctattgaagtgaaactatctaccaggtcggtaaatttttgctagaaatcaaaccaatgtaagactaaagtttttttcatggcaattgtccacctttgagatactctcatgtgcttaatcaggaatagaacatgattgttcttcatgtaaggggagctcaaacataagatattataaggcacttttcttctctcctgtctttttcgcaaatgttctttaacgtgcctttkctcttatgtttatggcgctttaactagaagaaaaaggggagacagaaaggatctaacaagttttgagcatccacagtgtgccagac

SEQ ID NO: 563921 - DNA, 632 bp, Homo sapiens
atgtggtgtttgattttctgttcttgtgatagtttgctgagaatgatggtttccagcttcatccatgtccctgcaaaggacatgaactcatccttttttatggctgcatagtattccatggtggggggataggggaaggatagcattaggagaaatacctaatgtaggtgatgggttgatgggtgcagcaaaccactatggtacrtgtatacattgtaacaaaactgcacgttgtgcacatgtacctcaaaacttaaagtataattaaaaaaaagaaaagaaaaatgtgtatgttttcatttgtatatgaaagacttgctgtttcaatgttaccagtgaagtgatgcctatttcctaggcttactttctttcctattgatatttgtggcttggtttagggataaacataaatatagggtggaataattgatgaaggtcttcattaggatgtgagtaaatcttgtagaatggctaggtaaagtttgagcagtcagaaagagaagaataagtcatgcaggaggcaagcagaacttggacaataaaagaagtccacatgctcgtggagggggtaccagattgtgggaggattggaaagccccagtgaagaattttattctgtaggcaatgagaca

SEQ ID NO: 563922 - DNA, 632 bp, Homo sapiens
atgtggtgtttgattttctgttcttgtgatagtttgctgagaatgatggtttccagcttcatccatgtccctgcaaaggacatgaactcatccttttttatggctgcatagtattccatggtggggggataggggaaggatagcattaggagaaatacctaatgtaggtgatgggttgatgggtgcagcaaaccactatggtacatgtatacattgtaacaaaactgcacgttgtgcacatgtacctcaraacttaaagtataattaaaaaaaagaaaagaaaaatgtgtatgttttcatttgtatatgaaagacttgctgtttcaatgttaccagtgaagtgatgcctatttcctaggcttactttctttcctattgatatttgtggcttggtttagggataaacataaatatagggtggaataattgatgaaggtcttcattaggatgtgagtaaatcttgtagaatggctaggtaaagtttgagcagtcagaaagagaagaataagtcatgcaggaggcaagcagaacttggacaataaaagaagtccacatgctcgtggagggggtaccagattgtgggaggattggaaagccccagtgaagaattttattctgtaggcaatgagaca

SEQ ID NO: 563923 - DNA, 632 bp, Homo sapiens
atgtggtgtttgattttctgttcttgtgatagtttgctgagaatgatggtttccagcttcatccatgtccctgcaaaggacatgaactcatccttttttatggctgcatagtattccatggtggggggataggggaaggatagcattaggagaaatacctaatgtaggtgatgggttgatgggtgcagcaaaccactatggtacatgtatacattgtaacaaaactgcacgttgtgcacatgtacctcaaaacttaaagtataatwaaaaaaaagaaaagaaaaatgtgtatgttttcatttgtatatgaaagacttgctgtttcaatgttaccagtgaagtgatgcctatttcctaggcttactttctttcctattgatatttgtggcttggtttagggataaacataaatatagggtggaataattgatgaaggtcttcattaggatgtgagtaaatcttgtagaatggctaggtaaagtttgagcagtcagaaagagaagaataagtcatgcaggaggcaagcagaacttggacaataaaagaagtccacatgctcgtggagggggtaccagattgtgggaggattggaaagccccagtgaagaattttattctgtaggcaatgagaca

SEQ ID NO: 563924 - DNA, 584 bp, Homo sapiens
agtggcctttttgtgtaaatcaagtaatactactcctctgcttagacrccccagtgcctttccactgaagtcagaataatatccaaatttcttattatggccatccagttcgtctgttaccaaaccccagttgttctctcaacccaaattcttttattctttctctgatttattctgctataattccactgttttttttcttctttttttatcatgcatataaagttgtgtctgcttgaaggactttttagttgctgttctgttaccaggaacagtttttcctctgacattcacattcttggcttctacctaagatttaagattcaattcagatatctcctacttactcagaggggtctttttaaaccttcctgtctaaaatagtacatagcacttcctaatagtatatattttttagtttgggagacctgtatggacaagaaatcattttttttttttaagacagagcctcactctgttgcccaggctggagtgcagtggcatgatctcagctcactacaacctctgcctcctgaattaaagtgattctcatgcctcggcctttcccaagtagcttggattac

SEQ ID NO: 563925 - DNA, 540 bp, Homo sapiens
aagtaaaattacaaaatgttacttaacaaaagaatggaatcagcttgtaccttcacagttaaacattttagtaacagckcatgtgctgataaatttctactctgatctcagaaaattacagaagctctaacactgatgtatctatttttacttttactgtaaattattaaattagttttactattgcagtgaattattaagttattttatcacatagccctggagttcaggattgtttcttggttttagtttagtaactcagtgtgactattgatttccttcattccaatattgtctttgctacctttaggatcttagagctatccagggtattgtgtactttcaagtggaaatgtcttggtcttcccttcagtaaccttcataaacaaataacagcaaacagtcaagcagcaaaagtcagtttcacattagtttctggcttgttttttagttttgattttggaacattgagtctagggaatgctctgtgcaggaagatgtagaaagtgagcattttgaaaatcattagtttcaaggatc

SEQ ID NO: 563926 - DNA, 540 bp, Homo sapiens
aagtaaaattacaaaatgttacttaacaaaagaatggaatcagcttgtaccttcacagttaaacattttagtaacagctcatgtgctgataaatttctactctgatctcagaaaattacagaagctctaacactgatgtatctatttttacttttactgtaaattattaaattagttttactattgcagtgaattattaagttattttatcacatagccctggagttcaggattgtttcttggttttagtttagtaactcagtgtgactattgatttccttcattccaatattgtctttgctacctttaggatcttagarctatccagggtattgtgtactttcaagtggaaatgtcttggtcttcccttcagtaaccttcataaacaaataacagcaaacagtcaagcagcaaaagtcagtttcacattagtttctggcttgttttttagttttgattttggaacattgagtctagggaatgctctgtgcaggaagatgtagaaagtgagcattttgaaaatcattagtttcaaggatc

SEQ ID NO: 563927 - DNA, 542 bp, Homo sapiens
agaaatcaataccaaaagaatgtttagaaactatacaaacacatrgaacctaatgaacatattcttcaatgacaattgggtcaatgaaaaaattaagatggaaatcaaaaacattattgaaacaaatgaaatcaaaatacaacataccaaaagctgttggattcagcaaaagcacttctaagagagaagcttatggaaacaaatacctatatcaatgaagtagaaagattacaaattaacagtcttaacaatgaatttcagaaaactagaaaagtaagaatcagccaaatccaaaagtaccagaagaaagaaataataaagatcaaagaaaaactaaatgaaatagagaccaaaaaaattacagggaatcaatgaatcaaaaagttaattatttgaaaaggtacacaaaaactataaaccactagctagactaaccaagaaaagaagagagatcacttaaataaatttagaaatgataaaggatacattacaactaataccatagaaatgcaaaagaaatcaccagagactaaaataacaac

SEQ ID NO: 563928 - DNA, 542 bp, Homo sapiens
agaaatcaataccaaaagaatgtttagaaactatacaaacacatagaacctaatgaacatattcttcaatgacaattgggtcaatgaaaaaattaagatggaaatcaaaaacattattgaaacaaatgaaatcaaaatacaacataccaaaagctgttggatwcagcaaaagcacttctaagagagaagcttatggaaacaaatacctatatcaatgaagtagaaagattacaaattaacagtcttaacaatgaatttcagaaaactagaaaagtaagaatcagccaaatccaaaagtaccagaagaaagaaataataaagatcaaagaaaaactaaatgaaatagagaccaaaaaaattacagggaatcaatgaatcaaaaagttaattatttgaaaaggtacacaaaaactataaaccactagctagactaaccaagaaaagaagagagatcacttaaataaatttagaaatgataaaggatacattacaactaataccatagaaatgcaaaagaaatcaccagagactaaaataacaac

SEQ ID NO: 563929 - DNA, 542 bp, Homo sapiens
agaaatcaataccaaaagaatgtttagaaactatacaaacacatagaacctaatgaacatattcttcaatgacaattgggtcaatgaaaaaattaagatggaaatcaaaaacattattgaaacaaatgaaatcaaaatacaacataccaaaagctgttggattcagcaaaagcacttctaagagagaagcttatggaaacaaatacctatatcaatgaagtagaaagattacaaattaacagtcttaacaatgaatttcagaaaactagaaaagtaagaatcagccaaatccaaaagtaccagmagaaagaaataataaagatcaaagaaaaactaaatgaaatagagaccaaaaaaattacagggaatcaatgaatcaaaaagttaattatttgaaaaggtacacaaaaactataaaccactagctagactaaccaagaaaagaagagagatcacttaaataaatttagaaatgataaaggatacattacaactaataccatagaaatgcaaaagaaatcaccagagactaaaataacaac

SEQ ID NO: 563930 - DNA, 542 bp, Homo sapiens
agaaatcaataccaaaagaatgtttagaaactatacaaacacatagaacctaatgaacatattcttcaatgacaattgggtcaatgaaaaaattaagatggaaatcaaaaacattattgaaacaaatgaaatcaaaatacaacataccaaaagctgttggattcagcaaaagcacttctaagagagaagcttatggaaacaaatacctatatcaatgaagtagaaagattacaaattaacagtcttaacaatgaatttcagaaaactagaaaagtaagaatcagccaaatccaaaagtaccagaagaaagaaataataaagatcaaagaaaaactaaatgaaatagagaccaaaaaaattacagggaatcaatgaatcaaaaagttaattatttgaaaaggtacacaraaactataaaccactagctagactaaccaagaaaagaagagagatcacttaaataaatttagaaatgataaaggatacattacaactaataccatagaaatgcaaaagaaatcaccagagactaaaataacaac

SEQ ID NO: 563931 - DNA, 528 bp, Homo sapiens
ccaactcttatttaacatagtactggaagtcccagccagagygatcaggctagataaagaaataaaagacattaaaattgaaaacagaaagtcaaatagtgcctcattgctgataagatcttttacataaaaatacctaaagactccaccaaaaaactcttagatttgacaaatgaattcagtaaagtttcaggatacaaaatcagtgcacaaaagtcagtagaatttttataaaccaagagtgatctagctaaggaccaaatcaagaagccaatcacatttataacagccacaaaaatacttgggaataagtttaaccaaggacgtgaaagatctctacaagaaaaaactataaaacactgatgaagaaaattatagaagacacaaatgaaaatagcatcccattctcatggattagaaaaattaatattattaaaaagatcatactgcccaaagtaatctatgagttcaacacaatgcttattgaaatattaatgttatttttcacagaataagaaaaaattccta

SEQ ID NO: 563932 - DNA, 556 bp, Homo sapiens
ataaaaatgcattttataaatttctgtcctttttaaattttttttgtcaaattatcagtgtgcagtgtccttatgatacttatgattgattgtaaatatctttaatgaaatctacaatgtgtcttgtttttctaattgccrttatatcaaaagctgaccaagatattttcagaaaataaataaaccaatattctttttgaacatagattaaaaaataataaactttggggaaaaagtaaatcaggcatgttataagtcaaataatacattgtgacccagtagaattcatcctgggaatttaaagttgacttatattaaacaatcagttcataccaattactccaataacagaataaaggaaaaatggcattttacctattccatgaattgggggaaaaagcaccataaggtgtgtcagcagagtagaaataagaggaaataggagaaatcagtgaatctgattgagtatttataaaagtcctacagttagcataatacttaatggtgaaatactgaacataaaacttcacataattccaatgttatctgctcatac

SEQ ID NO: 563933 - DNA, 505 bp, Homo sapiens
tttggaagtaatggaaggtcaagactgatgagagagggaaaggcattccaggtagataaaactgatatttgaagtctccatgcaaagaaagaatgagatatgttggtgaggagcacaataacaaaagtgataaaaatatggaatactagctcaggccaacaatactcagataatggagcgcatttcatctaacactaattttcctcctctagcacaaagaagatatgggatcaaattaatatctgagaagcattataaaagaactgagataattttagctggaaaggtataagggagatgtggatcttcctttccacaatgaaaagaaatgagctagaattgccattaggaaattaagattaggcattggggcaatcagctgtgcgcttttacctgaaagaggccaaagagtcaggaaatcttgaaacaaggtctgaaggagacacccttcagcctggsatgagttaagttcagtcctgcctggaggcagagggagggatgaaat

SEQ ID NO: 563934 - DNA, 609 bp, Homo sapiens
tcttttgcatcacaacaacctctagagttgyacctataaagaatgccagtagatgctgttaatgaaactaacttgaaaagctgtgtgtgtgtgcgtatgcgtgtgattagagatatagtatcttcccacttagaatataaaaataatcaactttaaaagacagcagtggaaggacaaataatgctgtatcttaagagatgttgtgaagggaaaaattttccagtttcctgttgtggaaatgagtgtctcccctccatgtcaaaaaaaaaataataataaccatgactatgattgttaacaattatttatttatttatttatttatttatttgagatagagttacactcttgtcacccaagctggagcgcaatagcatgatctcggctcactgaaacttcagcctcccaagttcaagtgattctcctgcctcagccacccaagtagctgagattacacatccggctaatttttgtatttttagtagagacagagtttcaccatattggccaatagttatataactaggtaagcttttccttttaaccaatgagtaagaaggtatccccactcccaccccaaactctattgagaattattgaagtttcaca

SEQ ID NO: 563935 - DNA, 587 bp, Homo sapiens
gaatttcaatctagctttgcatctaacagcatgaatctggaagttagccaacttctgtatgcctcggcttcctcatctgtaagtgtgggtgaatactcaggtgagaataaaaaaagataaatgcttctaaatcattccacactgtgctaggtccagggcccatgcttttatagtcactctatcactatagtgtctctttacgacaaatcaaagtctttcttaagatatagataactgggtccaaatgtatcatgaacttcacaytaaagttaagcttcccctttaaaagaaagttagaagaatccgaagtaaagggatgtatccaagatcagccatgaggccacacttcaagagagccaaaattaaatcaaggtaacttggaaataactcaagaaggcaggaccaaattgtgattatatgaagaaaacttatgttttgatcattaaaaggcagtgtatattttctgaagaaacaggctaatagaaggagaatggtttacatggcaattgtgatcaataattccaggagaaaatgtggccatctttttctgacattttttaggggaggctggcccataaaaatgagaa

SEQ ID NO: 563936 - DNA, 587 bp, Homo sapiens
gaatttcaatctagctttgcatctaacagcatgaatctggaagttagccaacttctgtatgcctcggcttcctcatctgtaagtgtgggtgaatactcaggtgagaataaaaaaagataaatgcttctaaatcattccacactgtgctaggtccagggcccatgcttttatagtcactctatcactatagtgtctctttacgacaaatcaaagtctttcttaagatatagataactgggtccaaatgtatcatgaacttcacattaaagttargcttcccctttaaaagaaagttagaagaatccgaagtaaagggatgtatccaagatcagccatgaggccacacttcaagagagccaaaattaaatcaaggtaacttggaaataactcaagaaggcaggaccaaattgtgattatatgaagaaaacttatgttttgatcattaaaaggcagtgtatattttctgaagaaacaggctaatagaaggagaatggtttacatggcaattgtgatcaataattccaggagaaaatgtggccatctttttctgacattttttaggggaggctggcccataaaaatgagaa

SEQ ID NO: 563937 - DNA, 386 bp, Homo sapiens
ataaacagctctcaaattagcaatgtaattgtggatatacagtatagatatactacatgtatacacacatacacacacacacatacacacttttatttttttactgcagtgaatatatatatatatatatatatatctatatatatccttctccctgcagttttccccaccttcaaaatgtttacttccaattattcctttaccatcttaccatctacacactaaccctaagtgtactaacttccttatccttatatcattcagttgtttcttggactatgtggaagttgctttatcacyattaatatactaacagttgaagtttctatttatgaagcagttatttactatgggtcaaaagcaagtcagtcactatagatcaaatt

SEQ ID NO: 563938 - DNA, 624 bp, Homo sapiens
aatctctaaatctctaataaatatttattcttacactgagacaaagaaactacccgtagagcaaatgtcctcaagtaggatagctggaatctgcctttaaagttagccaccaagcatagctatagactaaccatgttaattcactgatcctatcagttagttctctcacttgaaactaagggtggtaaattgaacttcaccacactattgaaaagatawcaaaggaatgtggcacctgccaggtgactcagcatgagtcactcaagacacctacttgtccactaaaggtaacgaggaagccttaatcaaaaatatgcaataatactgtagagctattcaagaagagttgatacttgagaaaatatcaaaattcagcaagtggtttagtttcatctcaaaacttcacctcagcaaaaatagctctgagctaattatctgcaacaggaactgtcagtctttttttctggcagcaaggctacagatatttgattcagatcaattaagaatctgtggttcataaaacttccaaactcttgagttttcttcttcttagtcaacctccttagagctaaaacgaaagaatgtacagcataagtaaaaacattctgtaatggactgctgaag

SEQ ID NO: 563939 - DNA, 624 bp, Homo sapiens
aatctctaaatctctaataaatatttattcttacactgagacaaagaaactacccgtagagcaaatgtcctcaagtaggatagctggaatctgcctttaaagttagccaccaagcatagctatagactaaccatgttaattcactgatcctatcagttagttctctcacttgaaactaagggtggtaaattgaacttcaccacactattgaaaagataacaaaggaatgtggcacctgccaggtgactcagcatgagtcactcaagacacctacttgtccactaaaggtaacgaggaagccttaatcaaaaatatgcaataatactgtagagctattcaagaagagttgatacttgagaaaatatcaaaattcagcaagtggtttagtttcatctcaaaacttcacctcagcaaaaatagctctgagctaattatctgcaacaggaactgtcagtctttttttctggcagcaaggctacakatatttgattcagatcaattaagaatctgtggttcataaaacttccaaactcttgagttttcttcttcttagtcaacctccttagagctaaaacgaaagaatgtacagcataagtaaaaacattctgtaatggactgctgaag

SEQ ID NO: 563940 - DNA, 524 bp, Homo sapiens
ttccagtggtttccttgcctggtccaagcagttgtctaataagcatctgaaacttgtccaacactgaactctcccttccctccaaattgaattctttactatttcaacaaatatacgactattttctcagttgcccaggacaacacaggaatcatctttcacttctctgtcttgtttactacccaccactccaatcaattcaaatcatttctaaatccagttctctacctgcaatgtaatccagagtccaaataattctttccatctctactgctggtgcctcagatcactgctacarcctccaatttggacccccatttttcttccactaccattcattcttcacacttagctaaagtaaaatgtaaatcagatcttctcatctcctccattgtggtcccccgatgacttcccatggcacatgcagtgagattagccctgttgactgtgtgtggctgggaggccctttggaacctgccttcatccctgaccacatctcattgactctccatctccatcactaa

SEQ ID NO: 563941 - DNA, 524 bp, Homo sapiens
ttccagtggtttccttgcctggtccaagcagttgtctaataagcatctgaaacttgtccaacactgaactctcccttccctccaaattgaattctttactatttcaacaaatatacgactattttctcagttgcccaggacaacacaggaatcatctttcacttctctgtcttgtttactacccaccactccaatcaattcaaatcatttctaaatccagttctctacctgcaatgtaatccagagtccaaataattctttccatctctactgctggtgcctcagatcactgctacaacctccwatttggacccccatttttcttccactaccattcattcttcacacttagctaaagtaaaatgtaaatcagatcttctcatctcctccattgtggtcccccgatgacttcccatggcacatgcagtgagattagccctgttgactgtgtgtggctgggaggccctttggaacctgccttcatccctgaccacatctcattgactctccatctccatcactaa

SEQ ID NO: 563942 - DNA, 570 bp, Homo sapiens
ggctcacccctgtaatcccagcactttgggaggtcgaggcaggtggatcacaaggtcaggagttcgagaccagcctgaccaacattgtgaaactctgtctctactaaaaatacaaaaaaaaaaaaaaaaaaaaaatagctggacgtggtggcatgcacctgtaatcccagctactcaggaggctgaggcaggagaattgcttcaacctgggaggcggaggttgcagtgagcccagatcacatcactgctctccagcctgggcaacagagcgagactccgtctcaaaaaaaaaaaaaaaaaaaaacttcttaaagcagtatatggcaacactgatttcctatttcatttttgtatattcttggatttcatgtctatcattattcaaggttgaaatgctattcttttccttaagtgtgtaraattattaacatctctctataggcaagggtactactcaccagattaaaacaaatgcaccagagattcaagtgaattctaattctggtttcaacacgggctttctctatgtcttctgttgtcacagtacttattctctcaatttataattta

SEQ ID NO: 563943 - DNA, 446 bp, Homo sapiens
taaagccttactactggaaatctggaaaaagtaaattagttcttgatgtcacttctttgtaattctttcataacaacaattagatattaaaggctcatgagttatattcagagcatacttactgtttaatttaccctgtaaacatctttaagaaactacatttcttagttccaccatccccaaactatccacacatccaccatccacatgtgtataatcacaactgccatggtgggacaatgtgaccacagctcacagttgattgactaagtccaggatttctgattcaaactgatcctataaaagtgccttcctagtggttataattatggatccaggatttgggagctgagttatgttaatgacagtattcctgaaagacaatctaacatctactgcttagtttrtaattctcctccttgtatgccccacaatagttcagtgtt

SEQ ID NO: 563944 - DNA, 591 bp, Homo sapiens
acccacttatttttttcataaattcttttagcaaatatttgaattgcggatctttgttttatgttttgtttcctcctcctgtatccaagtgtttggtttttctttgcttcattggtgtctgtatattctttgagtggtttctcctccrtaatcatatctataagtttctctctttagagtatctcaaatcagtgtcatcaggatttgggacctgcttcatgacaatggtttctttatagagtttaaatatcccaggcttatgttgggtttaaattaacgtcttggttatacactggagtgcattaattacttctccctaaagccctgtaggtcaggatcatttggtaacagaggtataggggaaagtgcagcaaagttattttgtaagatccgagtgagccacctggttttaggaggatggatcttaacaggccacatgatgtagtcttacttcacatgagaccacccaatgtggctttatatcacacaagatattagacttccccttattactgtatacattgggagccaacacctggttgagacacagaacccatgaccatagggggagaattgttttcctgagcctag

SEQ ID NO: 563945 - DNA, 653 bp, Homo sapiens
atactacgcccacacggccactaagcaaggtatgagtccagctcgttcaaggactgcagcatcaagcccagcaattgtcttaaagaacctcagtgagccgcaagagtgcgcagacagacaacaaaacaatatcaggaaagtaatgcctgaaggatattataagttcaacaaaaatgtagaaaccacaataaagaaccaaacataatattttggagctgaggaacacaatgactgaactgaaaaattccttagggaacttcaataaagatctctgtcaggcagaagaaagaatcmgcaagttagaaaataagtcatttgaaattttcctgttagaaaaacaaaaaagtaaaaagaataaagagtaaataaagcctgtggagtttatgggacaccatcaagcaaatcaacatacatatatgcaaacccctgaaggagcagaggaaaagtggaaaagagtttattttaaaaaataatgacaggaaaattttcaaagaaataaacatcctgatccatgaagccaaagaacaccaaatagattaaaaataaagaaatcttccccttcctgtgtccatgtgttctcattgttcaattcccacctatgagtgagaacatgcagtgtttgattttttgtccttgcaatagtttgctgagaa

SEQ ID NO: 563946 - DNA, 519 bp, Homo sapiens
ccataacacgaagtggcataaattatgttaagtgctttatgaaaatcatcgtacttaatcatcacaagtcctctaaaaggaggtattatgttttcaattataragttaaggcaaaggcagtttaaagtaattttacacttttacaactaaaaatgtgagattcaatatatgttccaactcaaaatgcatctatgctatgcaacaacattgatacaaacattgaattaaagtgaacttagatttaaatgtggctatatatccatatttacatttttatatttgttttatttcctgtatctgctaattaatctatttacttaccaatatctctctctcattttctttctctctctctctgtttttgtttgtctttgtttaatgcgatctagatttttgctactcaagtgtgaattgcaaactaaaggcatgagtttcacttgagaatgtattaaaaatgcagtatattagattgtatccacaacttactgaatcaaaaccaaattttaacaagataactgg

SEQ ID NO: 563947 - DNA, 518 bp, Homo sapiens
tatcaatttttgcttttgttgcaattgcttttggcatccttgtcatgaaatctttgcctgtgcctatgtcctgaatggtattgcctagattttcttctagggtttttatagttttgggttttacatttaagtctttaatccatcttgagttaatttttgtgtatggtataaggaaggtctctagtttcagttttctgcatatggctagccagctctcccagcaccatttactaaataggaggtcctttcccctttgcttgtttttgtcagatttgttgaagatctgatggttgaagtgtgcaatcttatttctgagttttttttttkttttttttttttgacagaatttcactctgtagccgaggctggagtacagtggcattatctcggctcactgcaacctctgcccactgggttcagatgattctcctgcctcagcctcctgagtagctgggattataggcacctgccaccatgcctggctaatttttgtatttttactagagaccgtattttac

SEQ ID NO: 563948 - DNA, 523 bp, Homo sapiens
ggaggctgaggtcagcctcaaatggatgttgcagtgagctgagatcacgctattgcactccagcctgagcaacagggtgagactccatcaaacacacacacacacacacacacacacacrcacgcacatagtcaaatcaaaattaaattcaagaacaatttgaagaaatagtctacccaaataagaaggaaccagaaaagtaattctggtaatatgacaaaacagagttctataacacccctaaaagatcacactagcttcccagcaactgatgcaaaccaagatgaaatctttaaataccagataaggaattcagaaggttgattattaagctactcaaggagataccagagaaaggtgaaaaccaacataaagaatggaaaaagagttcaggatacgaatgaacaattttccagacagacagctatcataaagaaaaaccaatcaggacttctgaaaatgaaagatacacttaggaaaatacaaaatgcagtggaaagtttcaacaatagactagaacaag

SEQ ID NO: 563949 - DNA, 523 bp, Homo sapiens
ggaggctgaggtcagcctcaaatggatgttgcagtgagctgagatcacgctattgcactccagcctgagcaacagggtgagactccatcaaacacacacacacacacacacacacacacacacgcacatagtcaaatcaaaattaaattcaagaacaatttgaagaaatagtctacccaaataagaaggaaccagaaaagtaattctggtaatatgacaaaacagagttctataacacccctaaaagatcacactagcttcccagcaactgatgcaaaccaagatgaaatctttaaataycagataaggaattcagaaggttgattattaagctactcaaggagataccagagaaaggtgaaaaccaacataaagaatggaaaaagagttcaggatacgaatgaacaattttccagacagacagctatcataaagaaaaaccaatcaggacttctgaaaatgaaagatacacttaggaaaatacaaaatgcagtggaaagtttcaacaatagactagaacaag

SEQ ID NO: 563950 - DNA, 601 bp, Homo sapiens
cactcataggtgggatttgaacaatgagaatacttggacacagggcggggaacatcacacactggggcctgtcatggggtgggggccaggaggagggatagcattaggagaaatacctaatgtaaattatgagttaattggtgcagaaaaccaacatggcacatgtatacctatgtaacaaacctgcatgttgtgcacatgtaccctggaacttaaagtatctacaraaaaaaaaatactttcgcataccaaaaaatggattcaaaacctcaaaaaaaaaaaaaatgaaatgctaaaaggagttcttccagtttaaagtaaaggacgataatttgcaacataaaagtacatgaaagtataaaactcatggctgggcatggtggctcacatctgtaatcccagcattttgggaggccaaggcaggcagatcacctgaggccaggagttcaagaccagcctgaccaacatagagaaactccgtctctactaaaaacaataaaaaattagctgggcatggtggctcatgcctgtaatctcagcttcttgggaagctgaggcaggagaatcacttgcacccaggaggcagaggttgtggtgagct

SEQ ID NO: 563951 - DNA, 622 bp, Homo sapiens
acctaattcaacagcatatgaaatgaatcatcatgaataagtgggatttatccatgggatgcaaggatggttcaatataccataatcactaaatgtaatmcctcacattaatagaatgaagtttaaaataatatgattctttcaacagatgcaggaaaagcatttgataaaattcaacatgtcttcatgataaaagctgtccacaaattaagtaaaaaacaaatatacctcaacataataaaggccacatatgataaactcacagttaacttcatactcaatggtaaaaaggtgtaagcattttctctaagatcagacaagactaggatgcccattcttgccacatctatctaacatagtactggaagtcttatccagagcagttaagccaaagaaaatttaaaaagacatccaaattgggaataaagaagttaaattgtctctggagatgacatgattgtatatatagaaaactctaagaactgtatcaaaaagctattaatgacaataaacaaatttagtaaagtggcaaaagacaaaacatacaaaaatcaatactgtttctatatactaacaacaaaccatctgaaaaagaaatcaagaaaacaattccatttaaaat

SEQ ID NO: 563952 - DNA, 569 bp, Homo sapiens
gtagtttagaaaatgaattcaaattttctgtgcctgttttcttatttataaatataggtattactattcatctcccataagattattgtaagaatttcatgagacaacatatatgaaaagatgtagcatgatgtctttctcacagtaaggactttggttaacaacactaactccagagtgagaatttctggttttaaattccatctacttcagacaccagttgtgtgactttggaaaacacacacaaagaatatactaagactcaagtgctggaagatttaaagctagattttaaaatccagatacattaataaatgagttatttaatctttctagtcttgtttttctcccctgaaaaatggggataataatagtagctaatccacagggttggtgtgagtattcactaagttaatatacaagaatgatagtcaacacttactgttagctactttcactgctttgatagcagaaggaggaggttggggagaagaagtaatgattattaactacttcatttttctccctttatgcatamctttgtactgatttacataacatatacaatg

SEQ ID NO: 563953 - DNA, 553 bp, Homo sapiens
gccataaacccctctctcttgagctgttggagtcctaacccaattttctttggaattcccttctcttgatcaccgttggcagtttctcctttggcaatcatacatgaagcaagactggaaattccctatagactgttagaaatgcaaaatgcttrttacccagtgctgcaaagaaatagcacttgaacataaatttaattctctcagcaagtcaatttttactttctgcagaaagggtgccccttgcagatggaacaatggcgagagcacacctggacaggggaggggaagtagttcttattcctgatgcaggaccctactgctgtgtcgttcctctattggctagggttggactgctcagtctaagctaattctgattggctattttaaacagagcaggggtatgagccagagtggcagggtgaatagtttggtgggaaggacagttaggaatagataactaaaggggacttaggtcaaagcaggtgaccaggcatgactgaggtcaaagcaggtgaccaggggaacagatgtgaactactgattaaaactg

SEQ ID NO: 563954 - DNA, 553 bp, Homo sapiens
gccataaacccctctctcttgagctgttggagtcctaacccaattttctttggaattcccttctcttgatcaccgttggcagtttctcctttggcaatcatacatgaagcaagactggaaattccctatagactgttagaaatgcaaaatgcttattacccagtgctgcaaagaaatagcacttgaacataaatttaattctctcagcaagtcaatttttactttctgcagaaagggtgccccttgcagatggaacaatggcgagagcacacctggacaggggaggggaagtagttcttattcctgatgcaggaccctactgctgtgtcgttcctctattggctagggttggactgctcagtctaagctaattctgattggctattttaaacagagcaggggtatgagccagagtggcagggtgaatagtttggtgggaaggacagttaggaatagataactaaaggggacttaggtcaragcaggtgaccaggcatgactgaggtcaaagcaggtgaccaggggaacagatgtgaactactgattaaaactg

SEQ ID NO: 563955 - DNA, 439 bp, Homo sapiens
caagtctgttgactccagcaggagctctcaatcactgcgcaggagaccagcaagttcagatttgctgggttctcagtggcaagtatgtcaccctttccaaatcaccatctcctccctctgtacctccacctgccatgcacaccttgactgttggtcccctcttccatgtcgtaacacacacatggacattttcaatgttcacttcccttccctccctctgtgagaaagctctgcttcctctgagtagtgtcaaaggtaactttcagactgtaaagtctgtgaggttccttcartctgcgggtcaaactctgataatgttcaaagtcaaatccaggaatgacatgtaggggaaaagcagtggttcccaaccaaccaggagccatgttgccccccaggggacattcagcaatctctggaatcatttttggttgttacaact

SEQ ID NO: 563956 - DNA, 439 bp, Homo sapiens
caagtctgttgactccagcaggagctctcaatcactgcgcaggagaccagcaagttcagatttgctgggttctcagtggcaagtatgtcaccctttccaaatcaccatctcctccctctgtacctccacctgccatgcacaccttgactgttggtcccctcttccatgtcgtaacacacacatggacattttcaatgttcacttcccttccctccctctgtgagaaagctctgcttcctctgagtagtgtcaaaggtaactttcagactgtaaagtctgtgaggttccttcagtctgcgggtcaaactctgataatgttcaaagtcaaatccaggaatgacatgtaggggaaaagcagtggttcccaaccaacyaggagccatgttgccccccaggggacattcagcaatctctggaatcatttttggttgttacaact

SEQ ID NO: 563957 - DNA, 529 bp, Homo sapiens
aatcaaggtatttttggggaaaatatcattagtttatggccagtatttaaatgagggtttcaaaatatagataatcttagttacactaattttatttagagttctatgattatataatgccaatatctataaaaatagatttgttagccaaaagcaaaacaaaataaaacaaaaatacaataaggagaaggttacaaagagcaaactagattattttatatgaatattaatttaaggttggtgagtggctttaaatgtaattttattaaaaagattttaaatgtactttgagatttgataattaaggctaatttgacttggaactgtatttaatgayatttatagagaattagaaattgatatatgtttttctctgacagtaaagtgagaattagaaattaattcattgggattttttatggtattatgagaggataaataagtgttaaagcttaaaagcctaaattttagaatcatacacaaaaacaagcaatggggaaaggattccctatttaacaaatggtgttgg

SEQ ID NO: 563958 - DNA, 632 bp, Homo sapiens
atcatttctatatatataaattaaacacgtaaaaatctatacatataaagtatataaatatatatatatataaatatattgtgtgtgtatatatagcttgacatcctgagtgaagtatacttaaggttgccaatcattattcctcgtggcaaaatttgaaggactttgataacttttttatgactttacttttaaaaaaaaawaatatatatatttataaatccagaaataacaataaaattaagtaaaagtttatatttatgaacagcttagttgatcaaaaattatagttgttggattatttaatgtgttttatatatatagtatatatatataaatcattgtaaatgtttgatttttttctcacactttacactggtctttctatgtgtattttaaaatatctaattttattgttctcaaagaaagttaacttagtttttgtagaaatagtaactattttgctcttatgttttatcagtttaagtacttacaggacattgttatagcaagtaaaagtgcgataaatactttgataacacattacgtgacattttaaatctctttgaaatttttcagtaaagaaatctgattacttttaagccaaatattttatgtgtgtgtgtgttaaa

SEQ ID NO: 563959 - DNA, 632 bp, Homo sapiens
atcatttctatatatataaattaaacacgtaaaaatctatacatataaagtatataaatatatatatatataaatatattgtgtgtgtatatatagcttgacatcctgagtgaagtatacttaaggttgccaatcattattcctcgtggcaaaatttgaaggactttgataacttttttatgactttacttttaaaaaaaaaaaatatatatatttataaatccagaaataacaataaaattaagtaaaagtttatatttatgaacagcttagttgatcaaaaattatagttgttggattatttaatgtgttttatatatatartatatatatataaatcattgtaaatgtttgatttttttctcacactttacactggtctttctatgtgtattttaaaatatctaattttattgttctcaaagaaagttaacttagtttttgtagaaatagtaactattttgctcttatgttttatcagtttaagtacttacaggacattgttatagcaagtaaaagtgcgataaatactttgataacacattacgtgacattttaaatctctttgaaatttttcagtaaagaaatctgattacttttaagccaaatattttatgtgtgtgtgtgttaaa

SEQ ID NO: 563960 - DNA, 536 bp, Homo sapiens
atggaatagaagaatcaatatcattaaaattactatactgcccaaagcaatctagagatttaatgacattcttatcaaaataccaatataattttttaaagaattagaaaaaaattctaaacttcatatggaacaaaaagaaaaaaagccctgaataaccaaagcaatctcagtcaaaaagaacaaatctggaggcatcacattacctgacttcaaattatactacaaggctatagtaaccaaaacagcatggaaattgtataaaagtagaaacatagattaatggaacagaatagagaatctagatataaagccaaatacttacaaccagctgatcttcaacagagcatagaaaatataaattgaggaaggcatatcctattcaacaaatgctactaggaaaacaggatagccacatatagaatggaactggatccctgtctcttactatatacaaagatcaastcaagatgggtgaaagagttaaatctaagacctgacaccataaaaattctagaagaaaacctagaaaaaac

SEQ ID NO: 563961 - DNA, 262 bp, Homo sapiens
agcgttttgaataaatctgttactaaagtaatgaaaagaaacttgtgatttgaaaaccacaggaagagatgatttgtgcttcctctttcttttcaagtgttctttctcatttatacctgtgcatgactttaaaatacttagtaatttagatctcwgtaaaaagaaataccacctatttagtataggtagattattgactaatttacatgtttactcatgccatttgaaattatttctaaaccagaatttttatcatccagag

SEQ ID NO: 563962 - DNA, 544 bp, Homo sapiens
tatttgtaattttaaataattcatgggattatcctaattggatccagctttgagagccacagaactaaatgtcttagaagggactcatgcataagattagtagctraaactatgtgacttttaaattgttctccagcatataacattcagaacacaaactttctgggggcacttttgtggtggtgcttatttctgcttttcataactataaataaataacaatagtaacagcataacattttaatagcttttgttttatgaagacatgacttgcacaaagtacatatttccttcttcagcctttttgggtagaaatattacacagtcacctgtacagacatgctattatttataaacctactaagagatcacaggtattacaacaggtgaaatatgttggtagaatttaggaaatttcatgtctgcacaatatggcaaacacatatcttttgattgcttcatgacaagtattggcaaaaagaaatctggactcatataaaaagtttaaggagaagaatatgggaaagccataccacaattcagg

SEQ ID NO: 563963 - DNA, 607 bp, Homo sapiens
ggatcataagtgccatggtggtgagttgaaatttacgttgcaactttcacaggtagacttgattatgaagaaagggttgacatgattatctgattgggaggagacacatcacgtaaggatgctcaaaacattaatagcatcttccatttagattttggtctgaaaggagcaaatattggaaccaataatttctagagggacatgaaaagaattaaactgagtaacatgtccaagaataygagaatactataaaatttatattgctattttaataacatattcttaattatttttaagcttctctgttggtgtatagaaatgtgaatattgatcttttatcattttgtaaacagaaaacctcaacggaactatagattttcttggaaattataggaattttacaaatgatataatcatttgtaatgaaaaatgaatagcaacagttttgtttctttccaacccttataacgttcatataattttctgaaattgttacttggctaagtccaccaatacatgttcaataggaaccatgtcagattttgatttttgttgatgatttaaaaatattatcatattcttcactagtgttataattgttgtaaag

SEQ ID NO: 563964 - DNA, 607 bp, Homo sapiens
ggatcataagtgccatggtggtgagttgaaatttacgttgcaactttcacaggtagacttgattatgaagaaagggttgacatgattatctgattgggaggagacacatcacgtaaggatgctcaaaacattaatagcatcttccatttagattttggtctgaaaggagcaaatattggaaccaataatttctagagggacatgaaaagaattaaactgagtaacatgtccaagaatatgagaatactataaaatttatattgctattttaataacatattcttaattatttttaagcttctctgttggtgtatagaaatgtgaatattgatcttttatcattttgtaaacagaaaacctcaacggaactatagattttcttggaaattataggaattttacaaatgatataatcatttgtaatgaaaaatgaatagcaacagttttgtttctttccaacccttataacgttcatataattttctgaaattgttacttggctaagtccaccaatacatgttcaataggaacyatgtcagattttgatttttgttgatgatttaaaaatattatcatattcttcactagtgttataattgttgtaaag

SEQ ID NO: 563965 - DNA, 645 bp, Homo sapiens
  misc_feature 604, 605, 606, 607, 608, 609, 610, 611, 612, 613, 614, 615,616, 617, 618, 619, 620, 621, 622, 623, 624, 625, 626, 627,628, 629, 630, 631, 632, 633, 634, 635, 636, 637, 638, 639,640, 641, 642, 643, 644, 645: n = A,T,C or G
taactttaggagttattcaggtccttgccaagtttggcagataactcgcatgtacacggaaacaggagctactagtttgtgctcggagtttaggggtgctctcaccacatcccacgtgtggaatagcccagctgctttgatgctggtcagcagggatgggcatggtgtcagtgtacamgtactggcctcaggggaaggaggagcctgggtggtgtcagcaatatgcagcaggcctctaggtcgctacttgcaccttctcagggagaggcatgggagaggggctgccatctgccttcacacttgtgactgccacagggaaaagagggcatgtgggcttcttgtggcaaggtaaagactggtgtggcatcttgtagggccctgttaatcagcaaagagcagagaagacaacggagagccaggccacagagggaagagggggcaggctgatgttgagcttcccgtgattgtggctgcttttgtgcagagagattcctggtcattacagagtgtgacgggcatgtttatctaattgcagggaccccagagctaagcacagctgagcggaaggagttggagaacaagttgaaggagcgggaggaattcnnnnnnnnnnnnnnnnnnnnnnnnnnnnnnnnnnnnnnnnnn

SEQ ID NO: 563966 - DNA, 632 bp, Homo sapiens
cctttttcctctcctgttgcaaactcatgttgtggttttgggtgggtggtggagagtgtgtcaccagcaggtggcgctgtcggcagtggctgggcctctctctccaaggtgaccatgtctagtttatgagaagggaagtggagggtgaataggtcacggccgccttttttttctttgacttttctgctgcctggctatcctcctcatcttctgctttgcgatatcaacaccactatcttctytatctgcagtgccctgtttgccaccaggggctctagcttcttcattcatctccaccctcttccttgcctccaccttcttcctcctcctcttcctccccaccttcttcctcttctttgtcctccttatcgtcagcctcatctccccattttcttcattggggttcccactagcaggggcatctcttcccctttctccacctgcacaacttgtttcttctcctttaagtggttggtggtcatctcagagttggtgtccacagatggatgtctgtgacacagcgggctccccggtgatcccatgtgttggataagaagaaagcaagagtttgaggactctgccaataaaatggggacaatgcaaagatggcttttcagagcggccagtgggca

SEQ ID NO: 563967 - DNA, 555 bp, Homo sapiens
tttgtgtcacttgtgatttctttctgcagtgttttgtagttctccttgtagaaatttttcacctcttggctagatgtattcctaggtatctttttgtgtgtatgaggctattgtaaatgtgattgtattcttgttttagcactcagcttgaacattgttggtgtatagaaatgctactcatttttctaaacttattttgtatcctaaaactttgctgaagtcatttatcagttccaggagccttttgatggagtctttagggtttcctggatatagaatcatatggtccatgaggagagagagtttgacttcttttcctatttgattgccttctatttctttctcttgcctgattgctgtggctagcacttccagtactatgttgagtaagagtggtaagagtgagtatccttgttttgtttcagttatcaaggggaatgcttccggtttttgcctgtttagcatggtgatagttgtagctttgtcttagatagctcttattattttgaggaatgttcctttaatgcctagttwctttagggttttatcatggag

SEQ ID NO: 563968 - DNA, 477 bp, Homo sapiens
aatagtatacatatacacacatatacataatattaattatagatataataatgtgttatatatacctatttatakataaataccattaaaatacaattgtatatatacacacataaatatatattaaataatttaatatattttaatttatgtaaatatgtatgtaaatacacacttaagatatttacatatgattatataaatatatgtaaatatatatttatatttgtgtgtatatatacaattatgttttaatgtatattttatacaattatgttttaatgtatattttatacattaaaggatattatatatatacctcctttcagtttgcctggctaagattaaataaaatgatatagcaacaatatatggcaaatatatggcagagtcttaacaatagtggcagagtcttaatgttagaaacttaaagtgggacagaaagtgtgccaataaactttgccacatagatgtaga

SEQ ID NO: 563969 - DNA, 573 bp, Homo sapiens
tctttttatttgaagtatgtattatttagtaaaaagttaaaacaattcagcaaaaatgtaaaactgcatgttcaagatgcctatggacatttgctttgtgagtgttattatgagaaaaaaggcattcattttgatgactccatyggttcagcatgatatgaaatgagagtgtttatcaattcatagtatttttaaatagaaatcttattgagattgaaatcggcagatgaaagcaagaaataaaaaggttttctcattagaccatgaaatgaaataaattcaacgtaaacatataaaacattcaaactgtaaagaataattatttgataaattgttttcaagtttgttcatgagcatattatattatttcagtttactgagcagttctttttttatgtcagagcatatgaatatttacttttatacaccctagatgcaaacttgccttgcctaaataaaattttgaggaaaaaaacctctgatcgagtagttacttattatttagtaatgaaagcatacatttattgaaatcagatgttttaaattttaatttaatgttattagttgatctgt

SEQ ID NO: 563970 - DNA, 567 bp, Homo sapiens
ctaatatccagaatctacaaggagctcaaataaatcagcaagaaaaagtcaaataatcccatcaaaaagtggacaaagaacatgaatagacaactctcaaaagaagatataaaaatggccaacaaacctatgaaaaaatgctcaacatcactaatgatcaggggatgtgaatcaaaaccacaatgtgataaccactttactcctggaagtatggccttaattaaaaaattaaaaactaatagatgttagcatgatgtggtgtaaaggcaacacttttacactgttggtagaaatataaactagtacaaccactatggaaaacagtatggagatacattacagaactaaaagtagaactaccatttgatatagcattcccactatggtatctacccagagggcaataagtcattttatgaaaaagacacttgcacacacatgtttatagcagcacaatttgcagttgcataaatatgtaacccmccagcctaaatgcccatcaaccaaagagtggataaagataatgtgagagagagagatatatatgcatacatatatatcacatat

SEQ ID NO: 563971 - DNA, 579 bp, Homo sapiens
tatttaattacttctagtaactccttattgcatttagaataaagttcaaattccatgatctggccactgtttccatcagcctcattctcatttgtcatgcctgagttacactgaccttctttctttttctggaacatgttaagctcattgtcacctcagggccttcatatttctttctgtctggaatggtacatgctactcccccagatctttctgtgatctttctcatcattcacatctcagctccttagagacttatctgatcatcataactagagtagcctcgccttgtatctgatcttctatttcattttgctgttttatatatttttatagtactgttgcaggtggatgcccagggaaccagagagtgagtagtggttttgcatggaagaagttattagaggtastcttgatcaacacctgaagaagggaaggaaaataagaatgctgggaaaagggagaaattaggctataactgcagtctcaacaaagacctcagccagccccacagggagttctgaagctagaatggctttttagaatataccaagtttcaaaacgaggagacaagtcttt

SEQ ID NO: 563972 - DNA, 570 bp, Homo sapiens
cacatgtgtgttttcttccattatcataattatttcttccctctgggtctatctcctgctctgtgsctttacctctggtcacaggatgattttctatcttggctggaggcctttccttattaatcatttcacatgtgcccttctctatggtgcttcttgcattcttagccatgttctagtttgttttgttctgttttattgtttttgacagtcctctataatcttacatttgttttgtgctgaactctacattcctgagactttgatccactgtttttgtatctgccttaagtttaatgtctattaggccttccctcatggagtctgagactttacttttgtgctgtgacatgtcagaacgtttccttctgcatggaataggtctaggatatcaagttatgctaactttggatctgcagattttaaagtccgtgagaaagcagggtgactctttaagccctcccactatgggcagtgctattttgagaaaaattaaaaagagctttggagtttgtgtgtgtgtgtgtgtgtgtgttttgttttgtttttgttttttgttattttacaccc

SEQ ID NO: 563973 - DNA, 545 bp, Homo sapiens
ctctctccccttcgctggccgaggtgaagtctgggaccatgcagttytgacgtccactcacttgggagatcaccagttcacccacctcactcggcaagctgggcactagtttggcgacaggcatcttccacccacctgggaggcagggttcaacactctgcttgtgaccttttttccttcctctgccacctgcttaggcagccagaaggggttgtccagccagcacctgggctttggtgctcctcaagcaggtggaggaagtttcaggcacctggctcctcaggtgtctgccatccagctgctcttcaggcctgcccagcagagctctcttgatccagctagaactggccagaactgactcactcaggaatgtgtagactttggcatcaggggctgctttaatttgcacaatttccaaatacctcttttttcttctttttctgatgagtcatctccctagacttgcattttaaagagatagatagttatcaggttccagagaagacatggtacaacatttttatctcaaagacagagagctgaga

SEQ ID NO: 563974 - DNA, 545 bp, Homo sapiens
ctctctccccttcgctggccgaggtgaagtctgggaccatgcagttttgacgtccactcwcttgggagatcaccagttcacccacctcactcggcaagctgggcactagtttggcgacaggcatcttccacccacctgggaggcagggttcaacactctgcttgtgaccttttttccttcctctgccacctgcttaggcagccagaaggggttgtccagccagcacctgggctttggtgctcctcaagcaggtggaggaagtttcaggcacctggctcctcaggtgtctgccatccagctgctcttcaggcctgcccagcagagctctcttgatccagctagaactggccagaactgactcactcaggaatgtgtagactttggcatcaggggctgctttaatttgcacaatttccaaatacctcttttttcttctttttctgatgagtcatctccctagacttgcattttaaagagatagatagttatcaggttccagagaagacatggtacaacatttttatctcaaagacagagagctgaga

SEQ ID NO: 563975 - DNA, 545 bp, Homo sapiens
ctctctccccttcgctggccgaggtgaagtctgggaccatgcagttttgacgtccactcacttgggagatcaccagttcacccacctcacycggcaagctgggcactagtttggcgacaggcatcttccacccacctgggaggcagggttcaacactctgcttgtgaccttttttccttcctctgccacctgcttaggcagccagaaggggttgtccagccagcacctgggctttggtgctcctcaagcaggtggaggaagtttcaggcacctggctcctcaggtgtctgccatccagctgctcttcaggcctgcccagcagagctctcttgatccagctagaactggccagaactgactcactcaggaatgtgtagactttggcatcaggggctgctttaatttgcacaatttccaaatacctcttttttcttctttttctgatgagtcatctccctagacttgcattttaaagagatagatagttatcaggttccagagaagacatggtacaacatttttatctcaaagacagagagctgaga

SEQ ID NO: 563976 - DNA, 545 bp, Homo sapiens
ctctctccccttcgctggccgaggtgaagtctgggaccatgcagttttgacgtccactcacttgggagatcaccagttcacccacctcactcggcaagctgggcactagtttggcgacaggcatcttccacccacctgggaggcagggttcaacactctgcttgtgaccttttttccttcctctgccacctgcttaggcagccagaaggggttgtccagccagcacctgggctttggtgctcctcaagmaggtggaggaagtttcaggcacctggctcctcaggtgtctgccatccagctgctcttcaggcctgcccagcagagctctcttgatccagctagaactggccagaactgactcactcaggaatgtgtagactttggcatcaggggctgctttaatttgcacaatttccaaatacctcttttttcttctttttctgatgagtcatctccctagacttgcattttaaagagatagatagttatcaggttccagagaagacatggtacaacatttttatctcaaagacagagagctgaga

SEQ ID NO: 563977 - DNA, 471 bp, Homo sapiens
taatccaggctcctatagtcagcgagtgaaacagagattttagttgaaataatgagacctggtattactagtcagctctccatgctggagaaccataagaaattataccaaaggcaggaaaggggatagaatatggggatcatcacgccaagaataaggtgcagcccatttagcccttgggtcttaaagagacccacagctctggataatggcagatctakgcgtgacaaagttatcatctttgtgcatcttcagagaattgtttttccttttactcctaggaacaatgtcttaagtttgttagtaaattctattgaatttattaaagatgcttctgataaattctttttatattcatttcaaaaaagaagcaatttcacactgacagagacattgttattatagcactaaatacttttacactcaacaaattcctttgagactaactgaaatttctgacagccctacact

SEQ ID NO: 563978 - DNA, 393 bp, Homo sapiens
aaataatgagacctggtattactagtcagctctccatgctggagaaccataagaaattataccaaaggcaggaaaggggatagaatatggggatcatcacgccaagaataaggtgcagcccatttagcccttgggtcttaaagagacccacagctctggataatggcagatctaggcgtgacamagttatcatctttgtgcatcttcagagaattgtttttccttttactcctaggaacaatgtcttaagtttgttagtaaattctattgaatttattaaagatgcttctgataaattctttttatattcatttcaaaaaagaagcaatttcacactgacagagacattgttattatagcactaaatacttttacactcaacaaattcctttg

SEQ ID NO: 563979 - DNA, 510 bp, Homo sapiens
atgcataaaaggggcactagatactcttctcatgtatgtgtgtgtgtctgtctatacatgtatgtacacttcatggtgcatcagctggcggaaccctcaggacaccccttcacatcctcagtgccccatttcacacatgaggaaactgttcatgacagcacatggctgatttgcataaaagtcacttggtcagcagttgttgaagctgaacttggaatctaggtctgtctgaccttaaatatgttccttccacagagccacgttcattccatagaggagcccaccacmtataaaaccagaaaagagacaaagccagaagtgcagggtggatttcttaacacaagctcactgcgacctctagtcctcatcacgctgacactaagcttaaacccagacccttctacagttttgtctacaaagcacaatttgcccaaagcctttacaaacaccaacagcctttctttcagatatggcagcagggtcacatcttacacggccctgaccacattt

SEQ ID NO: 563980 - DNA, 510 bp, Homo sapiens
atgcataaaaggggcactagatactcttctcatgtatgtgtgtgtgtctgtctatacatgtatgtacacttcatggtgcatcagctggcggaaccctcaggacaccccttcacatcctcagtgccccatttcacacatgaggaaactgttcatgacagcacatggctgatttgcataaaagtcacttggtcagcagttgttgaagctgaacttggaatctaggtctgtctgaccttaaatatgttccttccacagagccacgttcattccatagaggagcccaccacatataaaaccagraaagagacaaagccagaagtgcagggtggatttcttaacacaagctcactgcgacctctagtcctcatcacgctgacactaagcttaaacccagacccttctacagttttgtctacaaagcacaatttgcccaaagcctttacaaacaccaacagcctttctttcagatatggcagcagggtcacatcttacacggccctgaccacattt

SEQ ID NO: 563981 - DNA, 566 bp, Homo sapiens
atgcatccaacaaaaaaagattagaatgaaatacataaaatagccaacagtggttatttctgtgtgctgggattactattggttaattctttcatttaaacttttctgtattctatcttatttaagatccaaaaaggaatttgtctttaataatctttaaaaagccaccaaatagctgttaagattctttcttaaaataaaaaattacactttaggagtccatatatgaaataagagtatgagctttgattttcaggttttgcaaatctgttatctccagacagtcagactctattgcctgtaattcagatgactgaccccaggcctccggttaagcaattctactgtactgcacatatacttgttttatttatatccatcaaccagctttcatttctcgttgctctgtaagaagagaaagcaagggagaagctgaatttatagttaatattagaactactcatcctgcttatggctcatttcattaactgattgtttrtataccacctattgtaacctcacttaaatctttggaaaaattattcacaattgaaggccttaaatga

SEQ ID NO: 563982 - DNA, 533 bp, Homo sapiens
taaatgacgagttaatgggtgcagcacaccaacatggcacacgtatacatatgtaacaaacctgaacgttgttcacatgtaccctagaacttaaagaacaataataataataaaaaaagaatgggtcttgtacatctaatttgccccacaaatgttaaaacagcaaacccgcatccccttcctcttctcatgtgctgtgagggatgwcctccaggctctcagataccaagattatacaagacctaacccagagaattactcaagacactttctacacaagaagaattgtggtgctagctctcctcatagaaaaatgttttctgtctcttgttgaaattgacagcaaacagaaaaacacagaactatttgggagaacagaggacagtgatacactagggaagtaaaacacaccccttccccttgcattggtttcctgttgctgctataacaaattaccacaaccttactgctccacataacacaagtgtattatcttacatttccggaggtcagaagtctcaatgaagtaaaat

SEQ ID NO: 563983 - DNA, 533 bp, Homo sapiens
taaatgacgagttaatgggtgcagcacaccaacatggcacacgtatacatatgtaacaaacctgaacgttgttcacatgtaccctagaacttaaagaacaataataataataaaaaaagaatgggtcttgtacatctaatttgccccacaaatgttaaaacagcaaacccgcatccccttcctcttctcatgtgctgtgagggatgacctccaggctctcagataccaagattatacaagacctaacccagagaattactcaagacactttctacacaagaagaattgtggtgctagctctcctcatagaaaaatgttttctgtctcttgttgaaattgacagcaaacagaaaaacacagaactatttgggagaacagaggacagtgatacactagrgaagtaaaacacaccccttccccttgcattggtttcctgttgctgctataacaaattaccacaaccttactgctccacataacacaagtgtattatcttacatttccggaggtcagaagtctcaatgaagtaaaat

SEQ ID NO: 563984 - DNA, 533 bp, Homo sapiens
taaatgacgagttaatgggtgcagcacaccaacatggcacacgtatacatatgtaacaaacctgaacgttgttcacatgtaccctagaacttaaagaacaataataataataaaaaaagaatgggtcttgtacatctaatttgccccacaaatgttaaaacagcaaacccgcatccccttcctcttctcatgtgctgtgagggatgacctccaggctctcagataccaagattatacaagacctaacccagagaattactcaagacactttctacacaagaagaattgtggtgctagctctcctcatagaaaaatgttttctgtctcttgttgaaattgacagcaaacagaaaaacacagaactatttgggagaacagaggacagtgatacactagggaagtaaaacacacccsttccccttgcattggtttcctgttgctgctataacaaattaccacaaccttactgctccacataacacaagtgtattatcttacatttccggaggtcagaagtctcaatgaagtaaaat

SEQ ID NO: 563985 - DNA, 533 bp, Homo sapiens
taaatgacgagttaatgggtgcagcacaccaacatggcacacgtatacatatgtaacaaacctgaacgttgttcacatgtaccctagaacttaaagaacaataataataataaaaaaagaatgggtcttgtacatctaatttgccccacaaatgttaaaacagcaaacccgcatccccttcctcttctcatgtgctgtgagggatgacctccaggctctcagataccaagattatacaagacctaacccagagaattactcaagacactttctacacaagaagaattgtggtgctagctctcctcatagaaaaatgttttctgtctcttgttgaaattgacagcaaacagaaaaacacagaactatttgggagaacagaggacagtgatacactagggaagtaaaacacaccccttccccttgcattggtttcctgttgctgctrtaacaaattaccacaaccttactgctccacataacacaagtgtattatcttacatttccggaggtcagaagtctcaatgaagtaaaat

SEQ ID NO: 563986 - DNA, 512 bp, Homo sapiens
aatttccaacacatgaactttgggggacaaattcaaaccatagcactgtgcagagattggagtggtgtgctttaaaaatggaggaaagggccacaatccagggaatataggtaaccactaaawgcagaaaaaggcaagaaaacgggttttcccttcagaacctcctgaaggaatcagtccgttacaacttgactttaaccaagtgaaactgatttgaggcttctgacctatagaacaataagatattaagtctgtgttgatgtaagccaatcagttcatggtaatttgttacagcagccatagaaaactaattgactcaccaatgggagaaatcagctgctggttgaaggctaccaaacacctacttcctttcctaatgtcactttaattttatcttggaggaattcttttccctatcccattaagttatgggaaatggggccaggcatggtggcttagcaatcccagcacattgggaggctgtggcgggtgaatcacttgaggtctagagt

SEQ ID NO: 563987 - DNA, 512 bp, Homo sapiens
aatttccaacacatgaactttgggggacaaattcaaaccatagcactgtgcagagattggagtggtgtgctttaaaaatggaggaaagggccacaatccagggaatataggtaaccactaaaagcagaaaaaggcaagaaaacgggttttcccttcagaacctcctgaagkaatcagtccgttacaacttgactttaaccaagtgaaactgatttgaggcttctgacctatagaacaataagatattaagtctgtgttgatgtaagccaatcagttcatggtaatttgttacagcagccatagaaaactaattgactcaccaatgggagaaatcagctgctggttgaaggctaccaaacacctacttcctttcctaatgtcactttaattttatcttggaggaattcttttccctatcccattaagttatgggaaatggggccaggcatggtggcttagcaatcccagcacattgggaggctgtggcgggtgaatcacttgaggtctagagt

SEQ ID NO: 563988 - DNA, 569 bp, Homo sapiens
tgactgtcttccactcttgtgattaaattagaccctcctggataatacaagattatctccctaaagtcagttaactggtgaccttaattctatctgtaaccttaactctattttgccaggcaacataacataatcataggttccatggattaggacatagacatctttgagtaatgggaagtttcattgttctgcctaccatgagaggacttctacatattaggtggatttgtatgcctacaggcaagaccaagtaggaatgtttattcctgttcaaaaagattcattaagagagtgagacaggatctcgccttgtctcccaggctgagtgtagtggcacaattatggctcactgcagcctcaaactcctgggctcaagcaatcctcccatctcagcctcctgagtagctgggacttcaggcacgtgccaccacacctggctaagttttttgtttttttgtttttgagacagggtcttgttatgytgcccaggctggtttcaaactcttagactcaaacaatcctcctacctcagcctcccaaagtgccgggattaaaggggtgagcca

SEQ ID NO: 563989 - DNA, 576 bp, Homo sapiens
ttactatgtgctaacaccatgctacaatatgattgaactrctatggtgaacaagaagataaaacatgaaagaaagggagtgtgtaatattttaaaaggatatctttccacttgaacagagacacttaaaatggagaaaaatcatttgaaatatgtaagcttgaaatgcatgtatttcaggcatggactggcactggaattggagtctgatgacctgagttcaagttcaagctctattttctagctatgcaatcttaggaaaatgacttgttttttgagtctgttacctctttgtgaaatgggtcttataaactgtttcacaggttattgtgcaagttaaatgagataatgcatatggaagttctgtatacgttgcaaaattaaatgaaatgttactttttgaaggttattttattctttatacagttaatagctcttacaaattcttctttgtggacataaaaggggacttcctgtggccattagtaattcatagcacagtctggtagccaaaaaactcctcagtcttttgtttttgaaacggagtctagctcttattgcccaggctggactgcaa

SEQ ID NO: 563990 - DNA, 577 bp, Homo sapiens
caggtctttaagtcaagtaattggagaaaggcttggaaactctaccaagtagatctgcaaataggcatcagaagacattacaggattcataacaaactaagctgatatttttgaagcgaagccaacagtaattcacaattcaaagggaaaaatgacaacgcttgaaaacctgactgactctaagagaacactggtgactgaagatgcacttggtaggactgtccttttggaaagctgggggaatcctgcctctgagcaagcattttcaggagtggctgtgccgtttggccaaggactgcacagatgccagatggctttggagaccctagagtagaagttcctagtgaactctgggaatgtgctaatgcaagcttatgaatatgratttcagtaatccttaaccttctcaggaggttactagcatgaacctctttgtcatgtggaaaaaaaaaagtccttgtagttgttcatcatttgccctgaagaaccaagaaaggactcatgctacttcttggcccaacagggagtcaacacagctcaacagtaggacactgagaatcagagtccctcactaata

SEQ ID NO: 563991 - DNA, 663 bp, Homo sapiens
cttcaccctgtcttatgtagtgactattttctcctgaaatcaagcattagcgtatttcctcttttcgttctgatcacagtgagtttttccygtgagtgacacaagaatcagagacattttggagagcattgcattccgaatatttctacaacttcccacctccctcaccctgaatattgtaccagccttgcccagtgtcttagggaatgactgtattgccaggaaagggagtgaagatgaaagacaaagtcatagaatccttgggttttatcccaaattgctatagattgtgccttggcattgctttttcatgcctcatcttagcttccaataagagattttgtatttgtttctcatccagctggtcattgttggtgaaagctaaggagcaagtaggagttctcaagatgaaatggatggtaagttaactttatgatgaatggcattgccctgaaatctcagtagaaccaaattatttctaaacctaagatggtatcttcacctcaaaaacttctccacagaatgacattttggcaaaacagtagggtttggacagcctttgggccaaatttgactggtatagacgtgatttgtataggtgtttgacttttgtaggtaatattactgagagtgatcataatatcttctcctgtagaaagtagc

SEQ ID NO: 563992 - DNA, 580 bp, Homo sapiens
gttgcctccattggaaagagttatttttgacctaccctgaccccgtcttgaacaacaataaaatggggattgggagaaacgtgacacaaatcaataggttatcctaacagacgtgatctttgaggctgttttttcttggacactcrcagcagtaacaaagataaatagcgactctgttacattgccatctgagcagtaggtggctcagcaggtcactgcgtggcctctagtctgggtggccagtaggtttgagcaggatgagaagcagaggagggccaggaatctggccacgaggatagaaaaggagaaggctcaaggacaggtggtgcctccgtttctgttgatggttgttgataacacatggggttccttcgtgctactcagctggctctgctcactcacccactttctcatttatcctcatccccttagtctacatgcattcaataagcatatagtgagcacctgctgtatacagggcactggcatggtaagagaacctgggcattggtagtggctctagtgtttcctttgccagcttttgagcaaaatgtgagaagtgattgagaattgagaattg

SEQ ID NO: 563993 - DNA, 415 bp, Homo sapiens
ttgtaaactcactaaaaatcattggaatacacttacaatggctacattttatgatgtgtaaattatacctcaataaagctatttaaaaaatctccattataccacttcctagctttgggaaattacttaactattgagtctgtttcttcatctataaaatggggaggatgatacctacttcacargctcactgtgagaattaggggcctgattcacagtgagcactcaagaaatgtaaatggtagcagttggcagtcattactactgctcctgtctttttgtttgtttttgtttttgtggtagtagaagtgtcttgatttagaaagagaggagagggctgggtacggtggctcacgcctgtaatcccagcactttggggggccgaggcgggtggatcacctgagatcaggagttt

SEQ ID NO: 563994 - DNA, 459 bp, Homo sapiens
atgggaatgttctagaactagatggtggcaagggttgcacagctttgtaaactcactaaaaatcattggaatacacttacaatggctacattttatgatgtgtaaattatacctcaataaagctatttaaaaaatctccattataccacttcctagctttgggaaattacttaactattgagtctgtttcttcatctataaaatggggaggatgatacctacttcacaggctcactgtgagaattaggggcctgattcacagtgagcactcaagaaatgtaaatggtagcagttggcagtcattactactrctcctgtctttttgtttgtttttgtttttgtggtagtagaagtgtcttgatttagaaagagaggagagggctgggtacggtggctcacgcctgtaatcccagcactttggggggccgaggcgggtggatcacctgagatcaggagttt

SEQ ID NO: 563995 - DNA, 208 bp, Homo sapiens
ttagtcttttctgagaaccgattttcagcttgttgttttcctcttatatacatttattttctatttaaataatttctactctaatatccattatttccttttcttccctttcaatatattgaatatatcaatatatattcaatataattgaatataatattcaatataattgaatatwatattcaatataattgaatataatattcaa

SEQ ID NO: 563996 - DNA, 541 bp, Homo sapiens
ctctcatctcactgatggcaatcagaatatttgcttatgaaagggacacggttaataacacgattgctcccctccgcctccttccttcctctccttccccctccctttccctcgccctccacacaattctctcaattaacgataggcagaaattaatttttcccctcgatcgaaacaattgcagggaagcggattgccagtgtggcttcagatagggacggctcccagcagagtggagagaaaggagcgagatgcaggagataagcaggctctatctgcaggcacaggacagagtaatacaaatgttatccttagaaatgtacttaaagaggatatgtttataattcggaggggattttcgggggctctcctgccctccctccctctccagggcactccactcaactcacttctgcatacagaacccagagtttgttgggaattttgatcctgttgyctcgaaatgagtggcatgggcctgcggtgagaagggagatcaggttatgcagggggtcttggccatggtctgggcccagggctt

SEQ ID NO: 563997 - DNA, 608 bp, Homo sapiens
aagcttctcacctgggtaactgcatgatggtggcgatattttccaaagagtgaacagtggagaaggggcaggtttgatagaaactatggaagaggctggacaaggtggctcacacctgtaatcccagcactctaggaggctggggcaggaggatcacttgatggtaggagtttgagaccagcctgggcaacatagtggagaccctatctctctactaaaaatttaaaaattagctgggcatggtggcatgtgtctgtagtcccagctayttagggtgctgaggtgggaatattacttgagcacaggaggtcaaggctgcagtgaggtaatgatcatgccactgcagtgttctgtccgtaggtgtaccatcatttagttaactaatccctgttgtagaatttctgactttttctactttcctcaatcctccctcagaaatgctgcagagaagaatttaacctgtatctaacatttttgagcccatttccaattttttttttttttgagacatggtctcactctgtctttcatttcacagagaccctgtctgggaaaaaaaaaaaaaaaaaaaaggaaaggagagagggaagaaaggaaggaaggaagaa

SEQ ID NO: 563998 - DNA, 544 bp, Homo sapiens
tgaagccttccttgaatcaatcagtagtttagctttttaaggtaccattcatgagtctatttccctctgtcaggaaggctatatrtaatagaaacacagttgtttctaaaaactgtttaaaacgcgtacctcaaatgcaaaactaataattttattttaaaaaacaatttgctgcttattatgccatacagtttatacataaatattgttgtttagaactcaggtctcagcagaggctggtgtgtgtgtgtgagagagaatatgctagcgccaggtatacggagtttataaatgttccattaagttgcctgtcctcattaagaatcatggctttagatgctttttggctataattctgttttctgctacttgtggtttgattatattgaatttatttttttatggctgacattcaaattgtctgaacacatggtgggctttgaaaataacagtaccgagtcccattagtcttacatcagatgtgatcaagccagaaaaatttgtctctaatgggtacatgtttaaaaatgtaagtgtagttttg

SEQ ID NO: 563999 - DNA, 544 bp, Homo sapiens
tgaagccttccttgaatcaatcagtagtttagctttttaaggtaccattcatgagtctatttccctctgtcaggaaggctatatataatagaaacacagttgtttctaaaaactgtttaaaacgcgtacctcaaatgcaaaactaataattttattttaaaaaacaatttgctgcttattatgccatayagtttatacataaatattgttgtttagaactcaggtctcagcagaggctggtgtgtgtgtgtgagagagaatatgctagcgccaggtatacggagtttataaatgttccattaagttgcctgtcctcattaagaatcatggctttagatgctttttggctataattctgttttctgctacttgtggtttgattatattgaatttatttttttatggctgacattcaaattgtctgaacacatggtgggctttgaaaataacagtaccgagtcccattagtcttacatcagatgtgatcaagccagaaaaatttgtctctaatgggtacatgtttaaaaatgtaagtgtagttttg

SEQ ID NO: 564000 - DNA, 544 bp, Homo sapiens
tgaagccttccttgaatcaatcagtagtttagctttttaaggtaccattcatgagtctatttccctctgtcaggaaggctatatataatagaaacacagttgtttctaaaaactgtttaaaacgcgtacctcaaatgcaaaactaataattttattttaaaaaacaatttgctgcttattatgccatacagtttrtacataaatattgttgtttagaactcaggtctcagcagaggctggtgtgtgtgtgtgagagagaatatgctagcgccaggtatacggagtttataaatgttccattaagttgcctgtcctcattaagaatcatggctttagatgctttttggctataattctgttttctgctacttgtggtttgattatattgaatttatttttttatggctgacattcaaattgtctgaacacatggtgggctttgaaaataacagtaccgagtcccattagtcttacatcagatgtgatcaagccagaaaaatttgtctctaatgggtacatgtttaaaaatgtaagtgtagttttg

SEQ ID NO: 564001 - DNA, 633 bp, Homo sapiens
tgtactgtctccagaatgcacttctctgcccatgtcaactggaatctttgttcttgaagactatactttctaggactcaataccctataactgcttcctaccctcaaacacaaatacacacagaaaacactaagcttccctatccaagtgtattctgggagttagagccaccaaatagaaactgaaagatactcaggccgggcgtggtggctcacgcctgtaatcccggcactttgggaggccgaggcaggtggatcacaaggttaggagatcgagaccatcctggctaacatggtgaaaccccgactctactaaaaatacaaaaaaattagccttggcgtggtggtggacgcctgtagtcccagctactcaggaggctgaggcrggagaatggtgtgaacccgggaggcggagcttgcagtgagccgagatcacaccactgcacttgagtgcactcgagcctgggcgacagagcgagactctgtctcaaaaaaaaagaaaaaagaaactgaatgatgctcaatgggaagagaaggatagaaccacaccctgcctcaacctgtagctgcctgattttctgactgaaactggccttgcatttctgaactgcaaggtgactgtagagaaaggatg

SEQ ID NO: 564002 - DNA, 633 bp, Homo sapiens
tgtactgtctccagaatgcacttctctgcccatgtcaactggaatctttgttcttgaagactatactttctaggactcaataccctataactgcttcctaccctcaaacacaaatacacacagaaaacactaagcttccctatccaagtgtattctgggagttagagccaccaaatagaaactgaaagatactcaggccgggcgtggtggctcacgcctgtaatcccggcactttgggaggccgaggcaggtggatcacaaggttaggagatcgagaccatcctggctaacatggtgaaaccccgactctactaaaaatacaaaaaaattagccttggcgtggtggtggacgcctgtagtcccagctactcaggaggctgaggcgggagaatggtgtgaacccgggaggcggagcttgcagtgagccgagatcacaccactgcacttgagtgcactcgagcctgggcgacagagcgagactctgtctcaaaaaaaaagaaaaaagaaactgaatgatrctcaatgggaagagaaggatagaaccacaccctgcctcaacctgtagctgcctgattttctgactgaaactggccttgcatttctgaactgcaaggtgactgtagagaaaggatg

SEQ ID NO: 564003 - DNA, 633 bp, Homo sapiens
tattttatgtcagtatgctgaaaatgagtgttacttaaattcaagatacagcattaaggaggagagcttctttccaaagtgagtttataattagttttcttagggttcagcatatatgatatattatttgctgataagggatagtagtcaaggcacagctacagtttcagctgtgcctgaaagttttaagtagctaaaagcaaaggaacacttcttccctagctcaattaatctgtttgcatcttcaggagaatgaacagtcctgaaattcaaaggtatcttctgcatagagaaacataggattgactttagtaaatgagatgagtatctgcaccatctgtgttgtagtggcccttcagtgaacgcatgggctttaggyatacactaccctggctctgatgcttacttgctgtgtgatcttgggtaacttgcatactttctctaagcccctttccatttgtaacatgaggttgatgtattcaccttgtggagtttgggggtagaagcagcataataattaatataaagtgcttagtatattacctggcctgcagtagaactcagtgagtgatatttttggtatcattaataatagccttctgtattaataattttctgaataaactcagttca

SEQ ID NO: 564004 - DNA, 633 bp, Homo sapiens
tattttatgtcagtatgctgaaaatgagtgttacttaaattcaagatacagcattaaggaggagagcttctttccaaagtgagtttataattagttttcttagggttcagcatatatgatatattatttgctgataagggatagtagtcaaggcacagctacagtttcagctgtgcctgaaagttttaagtagctaaaagcaaaggaacacttcttccctagctcaattaatctgtttgcatcttcaggagaatgaacagtcctgaaattcaaaggtatcttctgcatagagaaacataggattgactttagtaaatgagatgagtatctgcaccatctgtgttgtagtggcccttcagtgaacgcatgggctttaggcatacactaccctggctctgatgcttacttgctgtgygatcttgggtaacttgcatactttctctaagcccctttccatttgtaacatgaggttgatgtattcaccttgtggagtttgggggtagaagcagcataataattaatataaagtgcttagtatattacctggcctgcagtagaactcagtgagtgatatttttggtatcattaataatagccttctgtattaataattttctgaataaactcagttca

SEQ ID NO: 564005 - DNA, 633 bp, Homo sapiens
tattttatgtcagtatgctgaaaatgagtgttacttaaattcaagatacagcattaaggaggagagcttctttccaaagtgagtttataattagttttcttagggttcagcatatatgatatattatttgctgataagggatagtagtcaaggcacagctacagtttcagctgtgcctgaaagttttaagtagctaaaagcaaaggaacacttcttccctagctcaattaatctgtttgcatcttcaggagaatgaacagtcctgaaattcaaaggtatcttctgcatagagaaacataggattgactttagtaaatgagatgagtatctgcaccatctgtgttgtagtggcccttcagtgaacgcatgggctttaggcatacactaccctggctctgatgcttacttgctgtgtgatcttgggtaacttgcatactttctctaagcccctttccatttgtaacatgaggttgatgtattcaccttgtggagtttgggggtagaagcagcataataattaatataaagtgcttagtatattacctggcctgcagtagaactcagtgartgatatttttggtatcattaataatagccttctgtattaataattttctgaataaactcagttca

SEQ ID NO: 564006 - DNA, 618 bp, Homo sapiens
acgcagtcacttcagttattttttgccaacattggttctattaaacatgcatgtatttctcaaagtatttttttttccctaaaagtacattcctgccccaaggacatagtgatctgcccggtttcctaagtaacactgcagttttaacaactcacctgatctttcagttacctgcagtaaaaaagaaaatagaaatgttgtgtttatgcttggatagaaagaatcctctttccattaattgttaatttcagcattcaccttcacacttgtaataasaatttaatgactttttctgagataagaattttttttaaattcttatttaaaaataaaaattttttgcttttagtgctcattcttccaactctgccctggcaaataccaccacagtggggaaactatgacactcttaggggaagtactgatcccacacttacactatgaaagaagcgtataccccaggtttcgctggcctgagtgaagattgtccctgaggccctgatcagatgaaacagaacaggcatagcctgtcttttctctaattgcatatatactggggaacagtatttttatctaaatttatattcatttaatcattctattattctttaggttgaa

SEQ ID NO: 564007 - DNA, 642 bp, Homo sapiens
taaccatttgccactccagttgagaatgaagttttaacttggtggagactttaacttatacttagccttttatacaatgtgcctaattgaaagatcacttcccttaacgtattacatggtttgcaacccaagaacaaccatatactacacttgaaaaagagttctgaaatatctcgttactctttcaacctttctacttgtagggagggtctctgtgttggtgagaaagggaagttcagactctytatccttgttgttactgcatttgtgcttttgtccctcttttagtttccattttgagagtaaacagtgatgctttcaaagtaaaataacacacattaaataaataacacattaaaaagaaaaggagtcaagtggttgttaagtacccctaaatgaaaatggggttggggaagtggtcaacctccttatttttccttcccttctttaattttttatgtctgcaattgatgatctggaatttggggatgaacaaaaaactggaactgtcttgtcaataggaagccgaagctgtagcagttgccttacccacatggtaaggttccccaaaataatacaggcagccctgccaaccccacatgtaatattcttcacttctgagcagggctgtgctaatattct

SEQ ID NO: 564008 - DNA, 642 bp, Homo sapiens
taaccatttgccactccagttgagaatgaagttttaacttggtggagactttaacttatacttagccttttatacaatgtgcctaattgaaagatcacttcccttaacgtattacatggtttgcaacccaagaacaaccatatactacacttgaaaaagagttctgaaatatctcgttactctttcaacctttctacttgtagggagggtctctgtgttggtgagaaagggaagttcagactctctatccttgttgttactgcatttgtgcttttgtccctcttttagtttccattttgagagtaaacagtgatgctttcaaagtaaaataacacacattaaataaataacacattaaaaagaaaaggagtcaagtggttgttaagtacccctaaatgaaaatggggttggggaagtggtcaacctccttatttttccttcccttctttaattttttatgtctgcaattgatgatctggaatttggggatgaacaaaaaactggaactgtcttgtcaataggaagccgaarctgtagcagttgccttacccacatggtaaggttccccaaaataatacaggcagccctgccaaccccacatgtaatattcttcacttctgagcagggctgtgctaatattct

SEQ ID NO: 564009 - DNA, 371 bp, Homo sapiens
tggccacagcatctttgtctagccccagtgcaggtgattacatgcagttatcatttattgagcatgtaccgtgtgccaggcactaaattatgtgttttgtataccttttcatgtaatgtttgtgatagtgtaggtcattttattcccactttacatgggaaaaytgagactacaagaaataattagcctagttcttgctgactctgaagtctgtgctttttcactgttacatggctatctagagtttgaaaccctatattccactatcagcaatctccagtcatctgagcttttgttttagcagacaggaaattaggtccatgttaatgaaagtccaggtgaagtggcagttcagtcaggcagtcacacag

SEQ ID NO: 564010 - DNA, 461 bp, Homo sapiens
ctatcaagggctatgtttaggtggatggaaataaccttttgaaaatggataaagcctgggtgtggtgactcacgcccrtaatcccaacactttgggaggccagggcgggaggattgctttattgcaggagttgaagaccagcctatgcaacacagtgagaccttgtctctacaaaaaattttaaaaattagctggctgtggtggtgcatgcctgtggtcccagctacttgggaggcagaggcaggaggatcactcaagcccaggaggttgagggtgcagtgagccatgatctggccactgcactccagcctgggtgacagagcaagaccctgtatcaaaaaatagataataaaataaaaattgataaaaatagatcaatgaattgttagtctacgaatgatagtcatttttcacaattggcagtaaaaataggatttgtgtaaggtatgagtttaccatat

SEQ ID NO: 564011 - DNA, 586 bp, Homo sapiens
cttgagaagaatatattttctatttttgttgggtaagtgttctacagatgtctgttggtttatgtgtattgttcaagtcttctatttctttgtgtatcttctttctagttttagtcattgttgaaagtgaagtgttgatgtttccagctactattgttgaattgtttattttcccttcaattctgtcagcttttgcttcatgtatttgcaggctctgatggtaggggtatatgtatttgtaattgttatctcttgttgatggagtgacccttttatcattatataatattctttgactctagtagcaatttttgttttaaagtctattttgtctggtattagtatagtcactccagttttctttcagttaatatttgcaaggtctctcatcttttattcttttactttcaaactacagacagtccccgacgtatgatgacatgattataatttttcarctttaccatgatgcaaaagcaatatgcattccatagaaagcatacatcaaattttgaattttgcttttactaactgcaggctaatgtaagtgttctgagcacatttaaggtaggttgtgttttcaact

SEQ ID NO: 564012 - DNA, 485 bp, Homo sapiens
caaaacagtatggttctgttataaaggcagacatatagcccaatggaacagaatacaaagcccaaaagtaaatctacacatatatggtcaacgtatctttgataaggatgacaagaatacataataaggaagaattatctgttcaacaaatagtgttgagaaaactagaaatccacatgcaaaaaaaaaaaaagagattcgattcttagcttacactatacatcaatattgactcaaaatgaatgagaaacttagacataagacttgacactgtaaaaatcatagggttttcagttgggaagctacataatctaatttacatttcagaatgatccctttggttaccctatgaacaagagattataaagggatcaagagaaagaaagagagagagagaggaaggaaggaaggaaggaaggarggagggagggagggagggagggagggaaggagggaaggaatgaggaaaggagggaaagaaagga

SEQ ID NO: 564013 - DNA, 485 bp, Homo sapiens
caaaacagtatggttctgttataaaggcagacatatagcccaatggaacagaatacaaagcccaaaagtaaatctacacatatatggtcaacgtatctttgataaggatgacaagaatacataataaggaagaattatctgttcaacaaatagtgttgagaaaactagaaatccacatgcaaaaaaaaaaaaagagattcgattcttagcttacactatacatcaatattgactcaaaatgaatgagaaacttagacataagacttgacactgtaaaaatcatagggttttcagttgggaagctacataatctaatttacatttcagaatgatccctttggttaccctatgaacaagagattataaagggatcaagagaaagaaagagagagagagaggaaggaaggaaggaaggaaggagggagggagggagggagggagggagggarggagggaaggaatgaggaaaggagggaaagaaagga

SEQ ID NO: 564014 - DNA, 644 bp, Homo sapiens
acaattgcacatatcttaagtgggcctgagaactggctcattcacataccatctcagggcttaaaaatagtcctgttccatctactgacactcctgctagaacctgaatatactgtccaggggccttggaataaactcactctgcctaacacagccagcactgcacgcccatatttgccacctgggtttatgggcccacctcacgcagcccacggttgtctcttctgacactcatgcaaaccatttaggagtgcaaaagttagtacactgccactaccaccactgtcaacaccacacrtggaacatgtggctcaaaggcctgctcatctgtcccaccactgccaccagagggaactaaggacactgtctggaggcctaaggactggcttgccaggatccaccactgccagtgcctgtggaagtaggaggtaattgaataatgggggtgggtctttcttgtgctgttcttgtgttcccacccaaatctcatcttgaactgtagttcccataatccccacatgttgtgggtgagaccgaatcggaggtaattgaattatgggggctggtctttctcccatgctgttcttgtgatagtgagtaagtctcatgagatctgatggttttataaaagggagattcctgca

SEQ ID NO: 564015 - DNA, 573 bp, Homo sapiens
atgtgtgtgtgtgcatgcatatatacaaatgcataycctccaatctttcaaccatatatctgctttaggcaactgataaaaatacatttgccctatttacttttataattgagatacctttgtcatgttttatctaaaatgtattgcacagtttgttattattctcattctctattgcatgaacttcccacacttgatagtccagttacattagacaactttctgtttccttttcacataccttgccctttacggtgcccatatatcttcttacactgttcatgtaacaaagagtgatttaatccctacataccactgtgcaaatctcactcaacattttgatcaattctgccgatgccctctattcaagcatcaccagggatatatctgtagttgaagaagtttggtttattattcattgcagcaagggagaatgtacatcatagaaaatggtgagatagctcagagagtgttcaaagaactgataacaagatttagctttgtgttagctaatctgagagagggttcaaagaataagagttttccaatttttgtaccttacattcatttttt

SEQ ID NO: 564016 - DNA, 644 bp, Homo sapiens
tctgagaaattaaatgatcactaaagaattatttaaaatatatctgaactaatcttttaattaattggaaccttaataatcatgactgataatagtgatcagtgattgaacctttattatttaccagctaatatagtaggcccataaataggttatatcatttgtagtcacaataaccatatacattatatattttatctagtgctactacccatattttatagcagtcaaggttcagataatcataacatgcccaacrtcttactaacagtgagttatccaaacaggaacaatctcaagtttatattcaaagcccatgttcttttgcttaatatttccctgtctctcctaaatatattttcagcaatatgattgtgaatttcctgtcatgttttctacctgaccatgagcctttagcatctgcacttatcttcctttttgaacatctaacattgtgttctgttggtcattgttaaaaatctattatttcttcttttgttctgggagcttagaaaccttaagtattgtatttgaaatatttgtttctaaaattcttattgaagctttattttctgacaaatacaactgggcttttcttctttttttatttttagttttttaaaattctttgacctagcttgagc

SEQ ID NO: 564017 - DNA, 609 bp, Homo sapiens
tgagtgagttctcacgagatctggctgtctaaaagtgtgtagcacttcccccttcacattctctctctcctgctccaccatagtaagatgtgcttgctccctcttcgccttccgccatgattctagccatgattccgcctcccagccatgtttcctgtacaggctgcagaaatgtgagtcaactaaacctcttctttataaattacccagtctcgagtagttctttatagttatgtgagaacggattaatgcgtgaagctttccagaaaataaaccaatcctaactctccctcaaggtactgaaaggatacttccttctacaagatgacctttaaaaatgttactagagtcttatttcctttcctctaatggctatgtatgccatgaatattaagaatgtacctgaaaacttaatacaattttatgggaacttcattcttgagtcaaaattatgaaatatttctttggattctgcaatcattatatgttccgttgaagctagtgtttcagatgcctatgactgttcttgcctcamaaatttctacagtagactcgtctaatttcagggcaaacatttacttgaatctgttctcatttggctggtaatga

SEQ ID NO: 564018 - DNA, 595 bp, Homo sapiens
ttagggatgagaggaagaactgaattcaaatgggcagcacaagagaaatttaggggcaatgaaactgttctgcattctgattgtgaaggtggttacacaaatctatgtaaattcatagacacgtacatcaaaaaaaggtcaattttattaaatatagacttcaaagtctgaaaaaaatcagtatctcctccaaatgatgcatatctgtgtcgtcacatacctacttcttgaaaatgtaaaagcctactggatcatgcagttagacacccatccacataaatgctaggatatctccctcaaagatggttaacaagaagcctaaataagcgtactgaacaacgctcttaaaaatcaaatttgtaatcaatgccttgcaacaaagttttctcagagctcagttttgtacctattttattatcttaatctagaatttaaaaataataatattacacaattaaaaggaaacatccttcwgtcacattggtattcatgcacgtaaaaccttcttgcagatatgggagaaactgttcgtctgttaaattaaaattatttaccttttccctcttaatctctccagttcagtgttccctgaata

SEQ ID NO: 564019 - DNA, 434 bp, Homo sapiens
atgccatcatatatgggattattccttgatgcagctgtacttttgtttattcagctgatattttactggtggacattcactttgtttcctgtttttttttgtcactgtgaacattgtaataagcatcttgtacatatccttayatacaggtacgtttatgagataagtagtgggatttctggttcaaagtatatgtacatatgatatatgcatatttaatgatataggttgagtattcctaatctaaaaaaaatcaaaattcagtatttgaaacacttctggtccaaagcatttccaatgaggaatactcaacccatatttaataattactgccagattgcttttcttagccaacttaagagtctttccaaggtcccttctggttcatgtaaggccataaaatatatagtcttcttatagttgttagttatagg

SEQ ID NO: 564020 - DNA, 662 bp, Homo sapiens
tatttccttattaacctagttccctttaagaaaatcttgggatctaatttcattaagaaacaaacacctattagctacctcaaactaaactayattaactacatcaaacagctttagatggaacactgtatctatatatttgtccatggctaaaatcttattataaatagcctcactctgccttaagtttggatatgaccacttgtatctccctgttacatttcccttagcacaacatggaatgcttataaaaaatgaacccctttcaataatgttccaaaaatttcttttctaagaccagagtacccatgtttcagcaactttgccaaacctgtctccaaaattcagtgcttatacggatactccaattagcagtgtaaactatttcagttggtctaatgcaagacacacctataacagcttccacaacttgggatcagtttttttctatatccctgatacagtaaagttgttgaagcatcatatcagcaacatttactacttctaatctaccaatatactaaataaggtctgtggctttaaaccctggacattggatagtgggggaaaacactggagtgggaagacttgggcccacttccacaactcactaccttgaatttccacttctaagtctctgtttcttcatctgttaaattaaa

SEQ ID NO: 564021 - DNA, 662 bp, Homo sapiens
tatttccttattaacctagttccctttaagaaaatcttgggatctaatttcattaagaaacaaacacctattagctacctcaaactaaactacattaactacatcaaacagctttagatggaacactgtatctatatatttgtccatggctaaaatcttattataaatagcctcactctgccttaagtttggatatgaccacttgtatctccctgttacatttcccttagcacaacatggaatgcttataaaaaatgaacccctttcaataatgttccaaaaatttcttttctaagaccagagtacccatgtttcagcaactttgccaaacctgtctccaaaattcagtgcttatacrgatactccaattagcagtgtaaactatttcagttggtctaatgcaagacacacctataacagcttccacaacttgggatcagtttttttctatatccctgatacagtaaagttgttgaagcatcatatcagcaacatttactacttctaatctaccaatatactaaataaggtctgtggctttaaaccctggacattggatagtgggggaaaacactggagtgggaagacttgggcccacttccacaactcactaccttgaatttccacttctaagtctctgtttcttcatctgttaaattaaa

SEQ ID NO: 564022 - DNA, 497 bp, Homo sapiens
tttgatctgtatttttccacacatttaggaaatgttcctataaagataaaaatttattccacttctttcttaaaagaacaggacaaaactctctatattatttgcttttctgacttaaaaatatatcagagaaactgttctaggtcaggatacataaatcaaactcatgtaataatagcttcataatattgtacagtatggctgtaccataaatttttttgaccagtcccctactaagggacagtcaaataattttcaagtttgttttctccctctttcccttccttcttggacccgctgaactgtttccttcttggacccgctgaactgtttccttctmtacaggtgcttattttttggtcagatagagtcccaacacatgagattgtttggaaaaaggaaatgtaaatgttaatttttaatggctgttttgtctttttaattacttacttttgttgaacactgtcacgtatgtatttaagttggtattcatggca

SEQ ID NO: 564023 - DNA, 615 bp, Homo sapiens
tgtggtagctcatttacacaacttttgggtagacaggttgctactacacataatgctgcaacgggcatctctgtgctgcatctttcagtgttcatttgagtttacttgtaggatatattcacaggagtggaattactgggacacgtttcttaatcgtgaaagatattccatcaaactcctcatttataggtggtataagaggtccagtgaagagactgatccagagttgctcagcaagtcggtggtaagagcaggactaaaacttcctttcccagcacttaactrgggctccttccgctgttgtgcagaccctatctgatatggtttggctgtgtctccacccaaatcttatcttggattgtggttcccataatccccacgtgccataggagggaccccacgggaggtaatttaatcacgggggaggttaccctcatgctgttcttgagacagtaagttctcacgagatatgagggttttataaggggcttttcccttttacttgatactttttttgatgccgccgtgtgaagaaggacatgtttgcttccctttctgccatgattgtaagtttcctgaggcctctccagccatgttggactctgagtcaattaa

SEQ ID NO: 564024 - DNA, 469 bp, Homo sapiens
gtgttccctaatcgctgcatccacgccaacatctactgttttttgattttttgattatggccattcttgcaggagtaagtgctattgcattgtggttttgatttccctgatctttagtgatgttgagcrttttttcatatgtttgttggtcatttgcatatcttcttctgagaattgttcattcatgtccttagctcactttttgatgggattgttttttcttgctgatggcgtttgagtttgttgtagattcgggatattagtcttttgtcagatgtatagattgtgaagatttttctctcactttgtgggttgtctgtttactctgctgactgttccttttgccatcgcaaaagctctttagttcaattaagttccagctatttatcatggtttttattgcatttacttttgggttcttggtcatgaaatccttgcctaagccaatgtttagaagggtttttccagt

SEQ ID NO: 564025 - DNA, 530 bp, Homo sapiens
tgcatgttttcatctgaagttcatgctagttatctttcaaaattttcaattwtataaaaaccttgagtttgttgatatttgaaggtctgacttcccttggttttcactcaagggtatttacatgatgattggtcagctttacagttagatggcaatgtaatatgaataactcaccatataatttccagtttcttaaacacttatctatggcaatggttctcaactgggagcatttttcccccaagggacattagataacatctggagacatttttgattgttatgacttggggaggggtatgtttgctactggtatctagtgaatcaaggcctgggagagtgttaaacactacaatgcatgggacacacactcaacaagaaaattctgtggcccaaagtgctgaaattgagaaactgatctataacattccagtttgctaacatagcattttatcctagttcatctacattctttataatactctgaatcaatgaaaaaacatgtaaaatccaatttttagcatatagta

SEQ ID NO: 564026 - DNA, 618 bp, Homo sapiens
agaattccttgcaatgtgagcttccccaaccaggctgctcaattcatggaagcttgcttgttcaaagccaacaaggaagaaagagatcccagctaascagtgctgaaattttatgtaatatatataatcatagaaccacatacataaaaatcacatagattttttccatattctattggctagaagcaagttacagaccacacccacacttgagggaaggggatcacttgtgagactgaacaccaggaggtggggatcttaggagccactctcaagtctgtctgcacaaaagagatccaaaaataccagactcccactcatattcagcttgcatttaaaaaatatgacagtgcccacatatataattttgcttggaaaatgctaactggtgtatatttaatttaacccgacaacacctaagtgcagccggtgccctaacacatggacacaggaaggggaacatcacacaccggggcctgttgtggggtggggggagcggggagggatggtattaggagatatacctaatgttaaatgaagagttaatgggtgcagcacaccaacacggcacatgtatacatatgtaacaaacctgcacattgtgcacatgtaccctaa

SEQ ID NO: 564027 - DNA, 618 bp, Homo sapiens
agaattccttgcaatgtgagcttccccaaccaggctgctcaattcatggaagcttgcttgttcaaagccaacaaggaagaaagagatcccagctaaccagtgctgaaattttatgtaatatatataatcatagaaccacatacataaaaatcacatagattttttccatattctattggctagaagcaagttacagaccacacccacacttgagggaaggggatcacttgtgagactgaacaccaggaggtggggatcttrggagccactctcaagtctgtctgcacaaaagagatccaaaaataccagactcccactcatattcagcttgcatttaaaaaatatgacagtgcccacatatataattttgcttggaaaatgctaactggtgtatatttaatttaacccgacaacacctaagtgcagccggtgccctaacacatggacacaggaaggggaacatcacacaccggggcctgttgtggggtggggggagcggggagggatggtattaggagatatacctaatgttaaatgaagagttaatgggtgcagcacaccaacacggcacatgtatacatatgtaacaaacctgcacattgtgcacatgtaccctaa

SEQ ID NO: 564028 - DNA, 470 bp, Homo sapiens
acatgtgccatgttggtgtgctgcaccctttaactcgtcatttagcattaggtatatctcctaatgctatccctcccccctccccccaccccacaacatgccccggtgttgtgatgttccccttcctgtgtcatgtgttctcattgtttaattcccacctatgagtgagaacataatggggttattttttcttgtaaatttgtttaagttacttgtagatgctggatattagaccttcatcaaatgcatagtttgcaaatattttctcccattctggagattatgtgtttagtccattgatagtttcttttgctatgcagaagctcttaagatgaattacatcctgtcagtttktgcttttgttatgattgcttttggcacctttgttatgaaatctttgctcattcctatgtccagaatggtattgcccagattgtcttctagagtttttatagttgtgggtttaacac

SEQ ID NO: 564029 - DNA, 593 bp, Homo sapiens
tcgacatatatatatatatatatatatatatatatatacacacaccgatatatatatatatatgatggaatactactcagccataaaaaggaatgaattaacagcatttggagcgatctggatgagattgaagactattatcctaagtgaagtaactcaggaatggaaagccaatcatatgttctcactgatatgtgggagctaagctatgaggacgcaaaggcataagaatgatacaatggactttggggacttggggggaagagtgtgaggggggcgaggaataaaagattacaaatatggtgcatcgcatactgcttaggtgatgggttcaccaatatctcacaaatcaccactaaagaacttactcatgtaaccaaataccacctgtaccccaataactcatgaaaaaaaamttttgaaaattaattcaatttaaaaagatgtcaaaaaattaactttcatcatcataaatttgcttagaaactacttacatactaaaaatatcaattttcaaaactaatgagatgaagaagctgcagaggtaatgatataaatgtagactctctgaaataaagaaggtctgaatttta

SEQ ID NO: 564030 - DNA, 624 bp, Homo sapiens
caatttggcagtttctttaaaactaaacatgcacataccatatgctatggtttgaatgtatccaccaaattccatgtattggaaacgtaatccccaagtttatatgatgattagaagtgggacttggggagatgattaggatgagataagctcatcaggatggggctctcatgatgggactggtggctttataagaacaggatgagaaacctgggctaccatacacayatgctcttgccctcttgctatgtgatgctttccaccatgttgtgacacagcaagcaggccctcaccagatgccagtgatatgatcttggacttctcagcctccagaactagaggaaacaaatttcttttctttataaattacccagtcttaggtattctgttatagcaacagaaaacaaactaacacaccatacagctcagcaattgcacttttggacatttatctcagagaaatgaaaactcatgttcacacaagaacctgtacatgaatattcatagcagctttactcataacatccaaaacctgtaaacaacccagacatccttcagtggatgaatggttaaaccaactgtggtacatccataccatggaatactactcagcaataaaaagaa

SEQ ID NO: 564031 - DNA, 614 bp, Homo sapiens
caaatttcttttctttataaattacccagtcttaggtattctgttatagcaacagaaaacaaactaacacaccatacagctcagcaattgcacttttggacatttatctcagagaaatgaaaactcatgttcacacaagaacctgtacatgaatattcatagcagctttactcataacatccaaaacctgtaaacaacccagacatccttcagtggatgaatggttaaacsaactgtggtacatccataccatggaatactactcagcaataaaaagaacaaactattgatacatgcaacaagatagataatgcatggatctaacaggaatcatgctgagtgaaaaatgccaatatcgaaagggtacataaagtgtgacaccatttattgtaacattcttaacataacaaaattatagaaatggagaacagattaacagttgccagattagtgtttagggagtggggacttgactattaaaggatagcatgagggagccttgtgtggatgaaacagttttgtatcttgattatggtcatggttatactaatctacacatgtgataatattgcataggactatgtacacacacacacacacatgcacaattaagg

SEQ ID NO: 564032 - DNA, 593 bp, Homo sapiens
gttccttatagattctagatattagtccgttttcagaggcatagtttgtgaatattttctcccattttgtaggttgtctgttcactctgttgttagttttcttttgccctgcagaagctctttaattcggtccaattgtcaatttttgtttttgttgcaattgcttttgaggatatggccataaactctttgtcaaggctgatgtctaaaagggtgtttcctagcttttcttctaggatttttacaattagaggtcttacatttaagtctttaatccatcttgggttaatttgtgtatatggtgaaaggcagaggtccagttttaatcttttgcacatggctagccaatttttccagcaccgtttattgaataggaggacctttcccccttgcttacttttgttractttgtcaagaatcagacgactgtagatgtgtggctttatttcagggttctgtattctgttcccttggtttatgtgtctatttttgtaacagtaccatgctgttttggttactatagccttatagcatagttcaaagttgggtaatatgatgtatccaactttgttcttttttcttaggattgtttt

SEQ ID NO: 564033 - DNA, 611 bp, Homo sapiens
gccctcatgttcctctctaaattctgaaaaatagcatggttcccctgatttattccaatgtcagaatcttccagaaaatgtgttactaggtagattccacactgctaatatatatttttccttttgacatcttaccttaaaaattttataagtatttttcctaaaattttattttgaaaattaaaaagaaaaactttcttttttctttgctacccacttatccatcagttttaaaatttatctgagcacattctcttcttctaaaattttattaaaagcctccctcgcaaaaccaaaataccttttttccaaaaatgtgtttttctcattttcataaaataaatgtcatagcataggtttttttttttcttaaaagcttcttcttcttttttttttttattgagatggagtcacaatctgttgcccaggtggtgatctcggctcactgcaacctctgcctmtcgggttcaagtgattctcctacctcagcctccagagtagctgggataacaggtgcctgccaccacatctggctaatttttgtatttttagtagagatcgtgtttcaccatgttggccaggctggtcttgaactcctgacctcaagtgat

SEQ ID NO: 564034 - DNA, 568 bp, Homo sapiens
gaggcagagaaggagaaggacagggaaaaaagaaaaraaaaactcacatctaaggacacaatgtcttcaaagcattttttccccctggacttccgcccaggaatactcaggcagaactggctttatgcatatttgacctgtacaatcacaagttaccctgtgttcagaagatccctgtgcttagctgaatattctgctgtcattgtcttgaaatttctaataattttagaacaagcaccctgcatatttattttgcattgtagcctgtcctgtcctcaggtaacaaaattaattcaaacatcgttttttctcctcttccattgtaagtgtatacttgttaagtaaatgtctcaaaattttaaaaatgaattaaagccgcaaatacttctaagcatatttacacatagggaatgtgttaagtatgacagaataaaaagaagaaaactaaggttggagggggaaaaaggaaaataagcctatgtatggtaggaacagaaaaagcccgaaattcatcaaataaaggaaaaagaatttgagccaaagacttccaggttttggaggaacactc

SEQ ID NO: 564035 - DNA, 488 bp, Homo sapiens
tattaaagtgagaacacttgaaatctactctcagtgattttcaagcactctatacaatacattgctattaactatggtcrccacgttgtataacagatctcttgagcttgttatcatcctcatttaatgttaatacacgagaagataagtccaggatctgtcttttattacctttattggtttccctatatagtgctatctactgttacactagatttttcctatgcaatccaagaatagagattttctaaaacaattaatttagtgacttgaatgcaactggttggtaattctgtttttattgtcaaaagtgtaaataaataattttaaataacatgagttcattctctttaatattggcctatgaattatttgtttatgattcataggccaatattaaagaaaatgactcatattatttataaagtttataatttgagataaacaggaaaataaaacaatactaattttaataataataaaaaact

SEQ ID NO: 564036 - DNA, 488 bp, Homo sapiens
tattaaagtgagaacacttgaaatctactctcagtgattttcaagcactctatacaatacattgctattaactatggtcgccacgttgtataacagatctcttgagcttgttatcatcctcatttaatgttaatacacgagaagataagtccaggatctgtcttttattacctttattggtttycctatatagtgctatctactgttacactagatttttcctatgcaatccaagaatagagattttctaaaacaattaatttagtgacttgaatgcaactggttggtaattctgtttttattgtcaaaagtgtaaataaataattttaaataacatgagttcattctctttaatattggcctatgaattatttgtttatgattcataggccaatattaaagaaaatgactcatattatttataaagtttataatttgagataaacaggaaaataaaacaatactaattttaataataataaaaaact

SEQ ID NO: 564037 - DNA, 488 bp, Homo sapiens
tattaaagtgagaacacttgaaatctactctcagtgattttcaagcactctatacaatacattgctattaactatggtcgccacgttgtataacagatctcttgagcttgttatcatcctcatttaatgttaatacacgagaagataagtccaggatctgtcttttattacctttattggtttccytatatagtgctatctactgttacactagatttttcctatgcaatccaagaatagagattttctaaaacaattaatttagtgacttgaatgcaactggttggtaattctgtttttattgtcaaaagtgtaaataaataattttaaataacatgagttcattctctttaatattggcctatgaattatttgtttatgattcataggccaatattaaagaaaatgactcatattatttataaagtttataatttgagataaacaggaaaataaaacaatactaattttaataataataaaaaact

SEQ ID NO: 564038 - DNA, 488 bp, Homo sapiens
tattaaagtgagaacacttgaaatctactctcagtgattttcaagcactctatacaatacattgctattaactatggtcgccacgttgtataacagatctcttgagcttgttatcatcctcatttaatgttaatacacgagaagataagtccaggatctgtcttttattacctttattggtttccctatatagtgctatctactgttacactagatttttcctatgcaatccaagaatagagattttctaaaacaattaatttagtgacttgaatgcaactggttggtaattctgtttttattgtcaaaagtgtaaataaataattttaaataacatgagttcattctctttaatattggcctatgaattatttgtttatgattcataggccaatattaaagaaaatgactcrtattatttataaagtttataatttgagataaacaggaaaataaaacaatactaattttaataataataaaaaact

SEQ ID NO: 564039 - DNA, 565 bp, Homo sapiens
acttggaaaaaactttctgctttacaggtctcatgtgatagggttaggcccacccaaataatcttatttgaagattaactgtgtcatatgacatagcataagcatagtaataaaatccattgtcctgacagtcctggagattatgcaggatatggacactcaggggagagaaatctaggagtctgttgtagaatacttcctactactctgtaggttacatttcagtcataattgaaaattcaggtttgattttgatttagttcagtattgataagctaaagtgatatggtttggctctatgtccaccctccaccccccgccaatctcatctcgaattgtaatatccacatgttggaggaggggcctagtgggaggtgattagatcmtgagggcagatgtccccctcatcgttctgatagtgagtgagttctcataagatctgatggtattaaattgtggcacttcacccctggctatctctctctctctctcctgccgccatgtaagatgtgcctcgccttctgccaaggttgtaagttttctgaggcctccccagctgtgcaga

SEQ ID NO: 564040 - DNA, 532 bp, Homo sapiens
acctagaaaattgaatgaggctggatgaaaggtgttcttgtattaaatgaaatattttattgctctttacaaaaaaggatgagatcccatgcagtttaggtacatatcaggaagtcagtaggaaaactgtccctttccaggcrtgctagggatcaaatttaatgcctgggtacagtgaaagacattggtttttcctcacctattactgcatcccagttttgatgtgtgtttagatctcatctaatgtgaaaaatgagaggacaagaaaggctcctattgaagaaaaacaccaagaagcattattaggatgacaaatactcttttaaacttcaccttaactgttaattttaaagataattttctcttgtttaaaaaaaaaaatcatgccaggtgcagtggcttgtgtctataatcccagcactttgggaggccgaggatcacttgagcccagttgagaccagcctgggcaacatggtgaaaccccatctctactaaaaatacaaaaattggccaggcatggtggtgcatgcct

SEQ ID NO: 564041 - DNA, 401 bp, Homo sapiens
gtgggggtaagcgtggaaccttgcaaccacctgggaggtgatggtggcttggaccaaggtagtaatgaacacttgggaggagttgaacaatgttcgtatatgaaaaatagtttgaagtcaattacgaccagcatcataaatatttatgggatatttttgttaatttcagtagcattataattatttctctttttacctcactttttactatagatgtgggcagcgtaatatactgttcttatgatttcaagtatgcattgtrattgccactctttctatctttcaacagcatcattaagatagaatctagaaatttaaagagaaataatgtatatgttcatacatatataggtatgtacaggtacaaggaaggtcttaaatatattcaatgctatttagga

SEQ ID NO: 564042 - DNA, 607 bp, Homo sapiens
ttttctggtaggtcagtcgaacaaataaaactttcctatagatcaagaagttgccattggtcttcctgcccatagtaaagccttgaatagagccaaggtgctttatttggaaaggaatgaaggaagtgtctctcctctgccagggaaggaagcccacagtgattgaggcagtttgaatctatgctttctattttaaaaagttcttcttgtataggcatttctctttgcctttgacactttctgttgtgggataatcctgccagagtgttacttggaagaatatatctatatatctatatctatctatctatctatctatctatctatctatctatctaaaatagatatatctgtgggttttttgttttgttttttttataaaaagcctccagtgggatatatctatatctatatctatrtgtgtgtgtgtgtgtgtgtgtgtgtgtgtgtgtgtgtgtgtgttttaatgcagggaaggctgctctataaacatgacaaatgtatggcatcattcattccattaaaagaaaaaagacaagtgtgctgtggaaatcttgatattctttggttgagtcctgaggatcaaggctgaggaatgtgacaccag

SEQ ID NO: 564043 - DNA, 276 bp, Homo sapiens
aacaaccacagcaatattgggcttggggtgtcccctaaaacagatacagcttacatcacaacacccragtcctttagaatatgtggaaagccttcccaagaaggacaggtacaaacaaacccagacagtgcagatcacagtaaatacctaactcttcaatgctcagacacagatgaacatctacaagtaccaagatgatctaggaaaacatgacatcactaaatgaactattaataaataagccaccaggaaccaatcctatagaaacagagatat

SEQ ID NO: 564044 - DNA, 608 bp, Homo sapiens
cccaaccatagtcaaatactgtgtatgccacaagccaactcatctgtcttcactcccagctccccagacactcctgtctaacgcaggtagtgcaaaagaaatccccacacctaaaactagtcttgttgccaaaggtggcaagccgggtgtagataagcttgtgtatcaatgaggtcattgaaatacaccctttctctgctcccaggagtgttggcattgttcacaccactgaatttctgcttcagatttttcttcaggttctccagtttcttctaaaaaattgagcccagctctaaatctcattctactgctctgtgacctcagaaccttattgagctcttgttagcttgatcctctattcccttgtgtgctgggagacttactctcaacaaacttctctcacagatgcgtctgacacactatatatatagcttgctatttctacttctgttatagttagttcctcttaggcagggatctatcttgtttgtctctgtgtccccagaaactagcacatagtaggtatatgycatgttttttaaaataaacttttaatttttgaataattatagatttatgaaaagagttgcaaaaatagcacagagagt

SEQ ID NO: 564045 - DNA, 484 bp, Homo sapiens
taaacaagaactaataccagtcctactcaaagtattctgaaaaaatataggaggaagaaatacttccaaacccattctgtgaggccagtattaccctcataccaaaccataaaaatatacattaaaaaaaggaaactataggccagtatctctgatgaatattgatgaaaaaatcttcaacaaaatactagaaaaccaaattcarcaacacattgaaagagcaagcagaatttatctcagggattcaagaatgattcaacatatgcaaatccatcaatttgatacatcatgtcaacagaatgaaggacaaaaatcatatgattatttcaactgatgctgaaaaagcatttgatagaattcaacctcccttgatgattaaaaacccttaaaaaactgaatatagaattaacatacctcaacataataaaagctatatatatcagactcatagctagtatcatgcagaaagaggagaaactgaaag

SEQ ID NO: 564046 - DNA, 542 bp, Homo sapiens
atagcattgaatctataatgcccgaagcattgaatcttggggcagcatgaccattttcatgatattgattcttcctatccatgagtatggaatgtttttccatttgtgtcctctcttatttccttgagcagtggtttgtagttgtggaagaagagatttcaaaggagaatgaggagactttttcagttgatggaaatgtgtcttattttgattgtggtgatggtttcatggatrtatgaatatgttgaacttattaaatagtactctttaaatatatgaagtttattgtaagtcagttataccacaattttgaaaatacaacaaacagttgtagtacagtgcactctaaatccataatgtatcagtcagggcaatttatactagttgctataacaagaagcccaatatctcattgatttaataaaacaatagttactttgtttcttatgtcataatgccatgtgggttaggctgcccctggcagcttgaagcagggagcgatgatactgggaccctggttcttccatcttgtgaccctgctg

SEQ ID NO: 564047 - DNA, 541 bp, Homo sapiens
tgtgttgatgtgttttttttgttttgatttgtttttggtactctctctttatgagtaaggctattctaggaaaggagatatatttcatatatatcttaaattcagtttcatacagaagttcaaatatttgaaaatcagtgacctagggcagaaaaataattctcaattttctacgaccattgtcaaccaaatttttcattgcaaagagtagatataagtttttctgatatatatatttctgatatatatatttttaaaaatatcagaaaaatgtatatctttatacaatttgtatgtatattttataacagttataaaatatatagttttacawtgttttatataaaactattgtataaaaggaatataaaatattgtatatttataaaaatatataaatatatatagtttcattacaaataaaatgcacaatatgaattttcaaatatctatgacaatctctaaagtaagcaattatctggcttttccagaaaatttattcttctgtaagttttccagaggctagtgtactatagatact

SEQ ID NO: 564048 - DNA, 629 bp, Homo sapiens
caatttttacataagtgaaaatctcacataatgccagacacacagtatgaggtagtggaagattaggtaaactaaattattcatgtcaaccattttaagaaaattacttaaactaatgcttagttttcaacttattataactgaaagaacaaaattgtactttattctgataaattatttacacacaactcacaaagtgtaatatcaaaatattaagtagattgaataagataatgaaatagtagctcatgtatattttttgatgtgaaggaaatgaacatttatccatcaatttatgtcatttattgtaatacgtcaaaaacgtagcttgtgataattcagttgaactacaaaaaagctcagtgataaaaatttccatttatttaaagctatttattatagctgtaaaagtgaaagtatagatmgttgtcctaataaaatggaaatgcaaatgtataaaaaatagaaattaattgctagactctttagtctatgttgttcttcacagtatccttatgtacttctatttttttatttaaaaagtcaagtacaatatctttatttagttaaaagtaagtaaaaaaaataaaatttttcatcatttgttgatatgtttaaaatatataaaa

SEQ ID NO: 564049 - DNA, 574 bp, Homo sapiens
acctacccaaactgctccatgtgagcttccagcagaagctcttataatcttgagttgccttgcaggatactccctgaagctgactacagagcagagaggcaaagggagcacattaggcttctgaaaggyagtaacaacaactgcaaggaaattttaatttgtttaaattagtatttaaatttgtcatgataatggttaaagcctcatttttaaaaataatttctaagtcaaattttatagcaaataatcatatccctaacccttggaatggtcatccaaggaaaatgagaatagaacctaaatgaataatacatactagaagaattttcattacagttggactttaaagtaaggtataatattttgtcaccaagaaattgtttttaatgcctgtgctcactattggggaactattactatggttttaaatttataggactttatctcactttgtatagaaattctttaaaaacaaaaatatgaggacgcagattcctgagatgcatattttttttcattacatgatatggtttggctctgtgtccccactcaaatctcatctccaattgtaatc

SEQ ID NO: 564050 - DNA, 630 bp, Homo sapiens
ttttaaagtattttgtattaaatacaaataaaaacrcaaatgatcaaattttgtgtgatgtaatgaaaggagtgcttagaaggaaatttatagtgttgccatatatattagagaaaaaaccccctgaaaataataatctaaacatccacattaggaaaccagaaaaataataacatattacatctataatgattagggaaaaaaacagaaattagagcagaaattagtgaaattggaaacaataaagcaacagagaaaagttaatgaaatcaaaagataactatgaaaggaacaataaaatcgataagcctcttgtcaggaaaaaagaggacacggtttactaatataacaaatcaaagaggagatatcactatgcatctcatggacattcaaaggataataaaggaatagtctaaacgattctatgtccacaaatttggtaacctagataaaatggaccaattctttgaaaaacataatctgcccaaatgcacacaccaaaagtagacaatctgaataggtgtatcactattgatgaaattgaatcaataattaataatctcaaacagaaaataccaggtttagatggattcatgggtatattctaccaaacattaaaggaattaaatt

SEQ ID NO: 564051 - DNA, 197 bp, Homo sapiens
ttgcttgtcattttattttatgaacaacttcttggaacacttgttataattgattatctcaatattttaaagaatgcatcagtgattaattaatcattatataatttccagatattttatatgtttttgagtaactatcattgtatttcattttttcttgcttattgttaagatagrtaatgctctatatacttaat

SEQ ID NO: 564052 - DNA, 420 bp, Homo sapiens
gccatgttggtgtgctgtacccattaactcatcatttacattaggtatatctcctaatgctatccttcccccgaccccacgacaggccctggtgtgtgatgttccccttcctgtgtccaagtgttctcattgytcagttcccacctatgagtgagaacattcatgtgtcttttaaagctgattgcccataaatttacaggagtagaatttctcaaaggctctacatattcatgagtcttttgaagctgattgccaatatgacatcagaaatgttaaacccctttttgcccatcaagcagagtataagaatactcaacaaccactggtcatgtatgttttaaacatttttactgtgactaaagtttttaaataactcttctgaaaatataaggaaaaaataaaacaagaacacagacttcc

SEQ ID NO: 564053 - DNA, 685 bp, Homo sapiens
actagaattaataccaatatctcaattaccattccccaacctagaatcagaatctcagaggacaggacccaggaatctgaactgttgaaagcaccccgaaattattttgaaaaccccaatttaaaaactgattccctgccatcaaaatgagaatgtgggtaggagatagtagatctagacttagggtaagtaaaagctaagcgataatttgtgtcacttgcggaataaaccatttaattgacaatgctctactctgtattcttaccttcttctgacatggcaaaccctgaaacctcatgttcagttggtattaccataaaatgttagtgtatctccactataagttgaactgtcttgccagtccacactggacatgtagcattaggtaaaaaagtcacctttcttgatttaagccactgagatttgtgggactgtttgtaactgcagcaaaaccagtttgtcctgactgatgtagacatacctgccatcttttctcctatagaaaggttactattattcmatctttgccttgaaaacaagcaaaagtgaataagaaaatccagaacaatcaggcattttaagaatagaagaacatctaaagaacaatattttaattaataacactattgactctttccatatgttaggcactttgctaagggttttctatgtgaagatttacaga

SEQ ID NO: 564054 - DNA, 685 bp, Homo sapiens
actagaattaataccaatatctcaattaccattccccaacctagaatcagaatctcagaggacaggacccaggaatctgaactgttgaaagcaccccgaaattattttgaaaaccccaatttaaaaactgattccctgccatcaaaatgagaatgtgggtaggagatagtagatctagacttagggtaagtaaaagctaagcgataatttgtgtcacttgcggaataaaccatttaattgacaatgctctactctgtattcttaccttcttctgacatggcaaaccctgaaacctcatgttcagttggtattaccataaaatgttagtgtatctccactataagttgaactgtcttgccagtccacactggacatgtagcattaggtaaaaaagtcacctttcttgatttaagccactgagatttgtgggactgtttgtaactgcagcaaaaccagtttgtcctgactgatgtagacatacctgccatcttttctcctatagaaaggttactattattccwtctttgccttgaaaacaagcaaaagtgaataagaaaatccagaacaatcaggcattttaagaatagaagaacatctaaagaacaatattttaattaataacactattgactctttccatatgttaggcactttgctaagggttttctatgtgaagatttacaga

SEQ ID NO: 564055 - DNA, 601 bp, Homo sapiens
tgaaacttaaactaaaaagcttctacatagcaaaagaaataattaacagagtaaacagacaacctacagaatgggagaaaatatttacaaactgtgcattcaaccaagaactaatatctagactctacaaggaactcaaacaactcaatacaaaaaaaacaaataaccccatgaaaaagagggcaaaggacatgaacagacatttttcaaaaggaagcaaacaagcagccaacaaacatatgaacaaatgctccacatcactaatcaccagagaaatgcaaattaaaaccacaatgagatactatctcacaccagtcagaatggctattactaaaaagtcaaaaaacaacagatggtgaggatgtgaagaaaagagagcagttatatactgttggtggaaatgtaaattaattcaacctytatagaaaacagtacaatgatttctcaaaaactaaaaatagcactaccattctacccagtaatcccaccactgggtatctacccagaggaaaaaaaaattatataatttctacacttgtatgtttattgcagcaatattcacaatagcaaactcacggaatcagtctacgtgttcatcaat

SEQ ID NO: 564056 - DNA, 594 bp, Homo sapiens
ctagctactcctgctctttttgagtttccatttgcatggaatattttttacatccttttgctttcaatctgtgtgtgtccttaaagctaaatgagcttattttagcgcagcatataggtgggtcttcttcttcaaaaaaaaaaatccattattcattcagccattctatgtcttattgattggagaatttcactaatttacattccttatcattattaatatagtaggacttattattgccattttgttaattattttctgactattttgtagattctttgtttctttgttcttttcttggctgtcttcctttgtgatttgatgattttttgtagtgatgtgttttgacttctttatcttttgtatatctattatcggtttttgctttctgattactatgagacttatatgtgacatctgacagttataacagtctgttttaagctgataacaactgagttttgatagcatataaaaattatgcttttagtctcctcctccattttgtttttgatgtcaaaaatttacatcttttsacactgtgtatctattaaaaattattgtagctatattttaatagttttgtcttttaac

SEQ ID NO: 564057 - DNA, 494 bp, Homo sapiens
ggttttttttcatctttcttaaatgtttgaatagctcacatttattttaatgtttaatactagaaacattttaggtctttatttataagtttagggatgtttttgtgaccagaaatgaccagaacttaactcttgcttatatcaacgaggctatggtaaaattggtttcattatacctaagttctcctaaagtcacagtttccaagaacatattgataacattaagtgaggacttactgtatatattgaattcatatagtcaatatatttcagagaatcttgccctcatatatacctatacacaagcatccacttctaatcagttgccttaaggcaggaatgggatatctatggagctgctttcaatagaaaatatttgcaaaataactttgccttggaagtagtagaaagagaaataatcattttcttttatttaatagatattggggtacctmttatgaaacagatacagtgctgggattaaaaaataataa

SEQ ID NO: 564058 - DNA, 589 bp, Homo sapiens
tgtatccatcaaacaccatcttcctcttccctggcaacctaccctatgtctccatgaatttgcctactgtaggaacctcatataagagaaatcatgcagtatttttctcaaagttctgcccacttattttagcaaccattgacagatcttgcctacaatttttattatgttctaacggtgattttccatttcccactccttctgttcattcgcttttgaaggcactgaaatcttcctttgattcactgaaagaacaaccagtcaagtttactytaattcttgaagagagagaattagcagagagtcgttttaattgctgttttctgggagaaaggagtaggcctattccaggcttgtgcatcagaaccagttacataatctgcagggtgcaatgtttaatgaaaatgtggggcccccttgtttaagaatttcaagatagtgaagcagaatggtaaaccagctgcaaagcccttctgggccttatactactgcacacctgtgaagccaaccctcttgtgcaattttccctagcttcttaggacccctcacctacttgctcagcctgcaggatcctaaggacatgcagctg

SEQ ID NO: 564059 - DNA, 589 bp, Homo sapiens
tgtatccatcaaacaccatcttcctcttccctggcaacctaccctatgtctccatgaatttgcctactgtaggaacctcatataagagaaatcatgcagtatttttctcaaagttctgcccacttattttagcaaccattgacagatcttgcctacaatttttattatgttctaacggtgattttccatttcccactccttctgttcattcgcttttgaaggcactgaaatcttcctttgattcactgaaagaacaaccagtcaagtttactctaattcttgaagagagagaattagcagagagtcgttttaattgctgttttctgggagaaaggagtaggcctattccaggcttgtgcatcagaaccagttacataatctgcagggtgcaatgtttaatgaaaatgtggggcccccttgtttaagaatttcaagatagtgaagcagartggtaaaccagctgcaaagcccttctgggccttatactactgcacacctgtgaagccaaccctcttgtgcaattttccctagcttcttaggacccctcacctacttgctcagcctgcaggatcctaaggacatgcagctg

SEQ ID NO: 564060 - DNA, 589 bp, Homo sapiens
tgtatccatcaaacaccatcttcctcttccctggcaacctaccctatgtctccatgaatttgcctactgtaggaacctcatataagagaaatcatgcagtatttttctcaaagttctgcccacttattttagcaaccattgacagatcttgcctacaatttttattatgttctaacggtgattttccatttcccactccttctgttcattcgcttttgaaggcactgaaatcttcctttgattcactgaaagaacaaccagtcaagtttactctaattcttgaagagagagaattagcagagagtcgttttaattgctgttttctgggagaaaggagtaggcctattccaggcttgtgcatcagaaccagttacataatctgcagggtgcaatgtttaatgaaaatgtggggcccccttgtttaagaatttcaagatagtgaagcagaatggtaaaccagctgcaaagcccttctgggccttatactactgyacacctgtgaagccaaccctcttgtgcaattttccctagcttcttaggacccctcacctacttgctcagcctgcaggatcctaaggacatgcagctg

SEQ ID NO: 564061 - DNA, 520 bp, Homo sapiens
acatggacatgtgccttcatcaagctgtacacttaagatttatgcatttgactgtaatacattaattgaaaccaccagaacaccctataaaaaccaaaaaccagaaaaatgatgcacaggtacctgggtttctgtactaatattgcaccctgaattttgagaaatatttataagcacctactaacttcatgaggaaaatacctttgtccaagtgatcaactgttaaatttatatccctctacctatcaatgatatattaatctgttttttaaaaaaaggcagaaaaagacaaaaaatggaaaagtaaaatgggcaagagatttcttactttttccttygcactttctggtatttcccagtttttctaaaactagcatatactattttaaaattataggtcaataataatacatgaatgtgctttccttgtaagaaattaagacattccagataaggctaaaaagtccctgttgacctctaatcctggattcctccctcatacctagagaaaatgtctgtt

SEQ ID NO: 564062 - DNA, 570 bp, Homo sapiens
ccttagaattacagaggaagcaatttttatgaagtagctaccatccctagggctgaggagggaccctatgttgctgaaagtctgatccttgagactgagcagctgttagtctggtgctggtctctgatctgtggggctgggccccagacctcttgagaaaggggcttaattcagtggctgctacaggaatgaagtgcctctgccagggtgaagcactgtcaggtgacagaacacaaacaaacaagaagtaggaagaagcaaaccctttcctcccctttagccttgcagcctctctctagctcccacttttggcagagcctatcacatggtttgcagagtcctggacccagcatcacaaggtcaagtatagaaaggcaaacttggagcagaaagataatattttaataactgtcatgaaccataaattctttggtatgtgtctcctaaattaagaatatactyctacatatagacaataatagtctcatgcctaagaaacagcgatttcctaatatcaaatacccagtccgtgttgcagtatctctaattatcctccaagtgttttgttat

SEQ ID NO: 564063 - DNA, 658 bp, Homo sapiens
tatctcctaatgctatccctccccgctccccccaccccacaacagtccccagagtgtgatgttccccttcctgtgtccatgtgttctcattgttcaattcccacctatgagtgagaacatgcggtgtttggttttttgtccttgcaatagtttacagagaatgatgatttccaatttcatccatgtccctacaaaggacatgaactcatcattttttatggctgcatagtattccatggtgtatatgtgccacattttcttaatccagtctatcattgttggacatttgggttggatgtgtgtgtgttttctagcaccagaagagttacaccaggcactgaggatctataattctccctctttgctattttatctccttccttakcattgcacctcagtattttgcagcttgcaaatagcatttgctcttcaagactatccttttccttctttggaaatctaaatttcacactgccacaaagcaatgtcattggataaccaaactatcctgtaaaatctggcttcagccattccaccttgagttttgacaatacattatttttttttctagaaaaataagggagcaagcttattttcttattttctgtgggtaagagtaggttatgattttagaatgttgtcctggtccaacgagttt

SEQ ID NO: 564064 - DNA, 566 bp, Homo sapiens
ctcactgcaacctccatctcccgggttcaagtgagtctcctgcctcagcctcctgagtagctgggattacaggcatgcrcgaccatgcgcagctagtttttgtatttttagtagagatggggtttcaccatgttggtcaggctggtcttgaattcccaacctcaggtgatctgcccgcctgggcctcccaaattgttgggattacagccgtgagccaccacgcctggccaattttatgttcttattttcctcacatcaaagactgtgaatccttggtcctaagctggcactggaccgtggaccaaaatttaggaaccattgctctggatatcaggacagtcagccaaagctggcattagccactgacattttgcaggtaatggtgaacgcaaaattcacgttgggtgcatttcctcattctgtcattccaaagcagttaggaagagttgagacagtagaaacggatactcctgcatccaaggttcagctcctccacctgacacgggtgtgactcaagtagcttaacctctctaagctgccattgccgtgtctgcaaaatggagaga

SEQ ID NO: 564065 - DNA, 566 bp, Homo sapiens
ctcactgcaacctccatctcccgggttcaagtgagtctcctgcctcagcctcctgagtagctgggattacaggcatgcgcgaccatgcscagctagtttttgtatttttagtagagatggggtttcaccatgttggtcaggctggtcttgaattcccaacctcaggtgatctgcccgcctgggcctcccaaattgttgggattacagccgtgagccaccacgcctggccaattttatgttcttattttcctcacatcaaagactgtgaatccttggtcctaagctggcactggaccgtggaccaaaatttaggaaccattgctctggatatcaggacagtcagccaaagctggcattagccactgacattttgcaggtaatggtgaacgcaaaattcacgttgggtgcatttcctcattctgtcattccaaagcagttaggaagagttgagacagtagaaacggatactcctgcatccaaggttcagctcctccacctgacacgggtgtgactcaagtagcttaacctctctaagctgccattgccgtgtctgcaaaatggagaga

SEQ ID NO: 564066 - DNA, 530 bp, Homo sapiens
ccaccccatttctagctgatttttcacaagataaaaatagtattaagtgctcactagtgctagaggcaccatatgtagggaaaataaagtttgtgagattactgtttggttcattggtttgtcccctgtgccragcactaggtctggcaagtgttaattgtttgacaaatatttaaccagatgtttgttgctaggtatgtcccactgatatggtttggctctgtccccacccagaatctcatctggaattgcaatctccataatccccataaagcccataattcctacatgtcaagggagagacccagtagaggtaactgaatcatggaggtggtttcccccatgctcttcttgtgatagtgagtgagttctaatgagatctgatggttttataaggggcttttcccccttcagtgggcactttttcttcctgctgccttgtgaagaaggttccttgcttccttcctgaggcctccccagtcatgctgaactgtgagtcaattaaacctctttcctttataaattacccg

SEQ ID NO: 564067 - DNA, 579 bp, Homo sapiens
agcgattacccccttaaataatgcaataatattccacttctattgaacccccttccttcaatctttttgttgtcactgttaatgytgttattcttcaaagggagtgaggaattgtggaaaggaaaggggtgacaatcagagtaagaatgctgtaaaactgtggaggtttgataggagatagagggttaaaaaaacaaaaaataagtggtcgcataattgatatgcttctttagataatttcaaggtagaatttggaacagtgtagaattatggtgcagttatcttgacaatggtaggctaagtttttctactacagacattttaaagtaatgcatactatacaatgtacccaattatatctgtacagtaaaattgaggggtggaaatgtgcagaaaaaatctccaaaacaaaaagaccttcttttcaagatgtcaagtatatatttatcatcaaatcgtaatcatcttactgggtatatatggagtatattttgagatttttaaatgaacattttaaccaattctcaaggattcttattcaattaccttaagtcgtatgcaagattataacattttaac

SEQ ID NO: 564068 - DNA, 579 bp, Homo sapiens
agcgattacccccttaaataatgcaataatattccacttctattgaacccccttccttcaatctttttgttgtcactgttaatgctgttattcttcaaagggagtgaggaattgtggaaaggaaaggggtgacaatcagagtaagaatgctgtaaaactgtggaggtttgataggagatagagggttaaaaaaacaaaaaataagtggtcgcataattgatatgcttctttagataatttcaaggtagaatttggaacagtgtagaattatggtgcagttatcttgacaatggtaggctaagtttttctactacagacattttaaagtaatgcatactatacaatgtacccaattatatckgtacagtaaaattgaggggtggaaatgtgcagaaaaaatctccaaaacaaaaagaccttcttttcaagatgtcaagtatatatttatcatcaaatcgtaatcatcttactgggtatatatggagtatattttgagatttttaaatgaacattttaaccaattctcaaggattcttattcaattaccttaagtcgtatgcaagattataacattttaac

SEQ ID NO: 564069 - DNA, 496 bp, Homo sapiens
ttaatattcaatttattaacacaaattgatataaccttctgggtgtgtgtataacagtgagggctttctttttctaawgaattccccatgcataatttacttaatggcaaattttatacatttaagataagatttctgaaagtggatatataacttttttttttttgtgcaaagtaaaatgcatctgtacaagttttccccttccctctgacaggtgcactatcttcttggagcaaataaactggtaaacatctggtattctatttatttcatgcttttattttgatgattacaatttagaatagtgtaaagcttatttcttaaccaggttgtcaaactgatttttttttttttttttttttgagacagggtcttgctctgtcacccaggttggagtgcagtggcgccatcttggctcactgcagcctctgcctcctggattcaagcgatttctcctgcctcagcctcctgagtagctgggattacaggtgcctgc

SEQ ID NO: 564070 - DNA, 599 bp, Homo sapiens
acatttcctaactttgttgctaagtaactagaaatacaattcattttatattgatttttaaggagtaacagatttaattttaactttaataattgataggcagatttgtgttttacatacacaaccacaatctgccgatgaattgtttctttctctccattctttatattttttctctggttatgctgtccgggttctctagtataatgtagaatagaagctgtgatagstgacaccgttgtcttgtttctgaccttaaagcacacttaaagtttcacaaatgaatatgtttgctttaagttttttgtagatacccttcatcaatcggaataaattcccttttactcttagattgccaaccatgaatggtgttatggactgaataatgtctcccccaaatttatatgttgaagccttaacatccagtaccttagaatgtgaccaaatttggagacagatcctttaaagaggtagttaaaatgaggctgttagagtaggccctaatccaataatcctagggtcctaagaagaggcaatttggacatacagagagacaccaggggtacacaactacagagaaaagacagagcgaggaggcg

SEQ ID NO: 564071 - DNA, 599 bp, Homo sapiens
acatttcctaactttgttgctaagtaactagaaatacaattcattttatattgatttttaaggagtaacagatttaattttaactttaataattgataggcagatttgtgttttacatacacaaccacaatctgccgatgaattgtttctttctctccattctttatattttttctctggttatgctgtccgggttctctagtataatgtagaatagaagctgtgataggtgacaccgttgtcttgtttctgaccttaaagcacacttaaagtttcacaaatgaatatgtttgctttaagttttttgtagatacccttcatcaatcrgaataaattcccttttactcttagattgccaaccatgaatggtgttatggactgaataatgtctcccccaaatttatatgttgaagccttaacatccagtaccttagaatgtgaccaaatttggagacagatcctttaaagaggtagttaaaatgaggctgttagagtaggccctaatccaataatcctagggtcctaagaagaggcaatttggacatacagagagacaccaggggtacacaactacagagaaaagacagagcgaggaggcg

SEQ ID NO: 564072 - DNA, 364 bp, Homo sapiens
gaagcctgagtttgcagtgagctatgatcacaccactgtactccagcctgggtgacagagcaagaccccctgccccttaaaaaaaaaaaaaaaaaaragagagagtttagcagtagactggatgacactgtggctaagtggccaaaataaacccaccttttaatatacaaatttgtgtgtgagtgtatgtgtgtgtgtacacatgtattttttaagttaatgtatgaacagtgttaaaatgattatgaaatatattcaaaaaagaaaatcaagatagcaactaaaagaaaagtaatggtaacatatgatcatgttgtaatgtaacagaataaataaactaccagactttctcaatgtattgatg

SEQ ID NO: 564073 - DNA, 385 bp, Homo sapiens
aaggtgacgggttgtcactgctggctcgggcagcctgcgtttggtctcttatctggccccacccacatcctgctgattggtccactttacagagagctgattggtctgttttacagagagccgattggtccgttttgacagggtgctgattggttcatttacaatccctgagccagacacaaaagtgagtgctgattggtgcatttacaaaccttgagctagatagagtgctgattggtgtattcacaatcccttagctagacataaagattctccaagttcccgctagactcgggagcccagctggcttcacccagcgggtcatgcaccaggcagcagatggagctgcctgccagtccagygccgtgggcccgcatttctcagc

SEQ ID NO: 564074 - DNA, 579 bp, Homo sapiens
tgaagagtgtgttgttaaatatctatatatttgtacatttttaatttttttttctgttctatacttacattccattttggttatagaatgtaatccacaaaatgtcaatyttaacaaattttcaagactcctttttttggcctaacaggtggtctatcaaaaagaatgtttgtataagctattcataagaatgtgtttcctgatattgttgagggctcttgtctattccactgttaaaaataattgtattatactgccttcaattcctctcttcacttactaatattctgtcttgttttatttttattacagaaagtagggtattgaaatttcctactataattatattgctgtttaggtgtttcttcctgtctgtcaatatttgctttatatatttgaaaacttggtgtgaaatacagacacacacacgcacacaaatttgcaataggttcccagtaaatatatctattattgtttaatgtcctttgcctctttgctgttttgacttaaagtactttatataaaatataacagtttttgacttaagatgtagcttttgtaatactattttgacctctt

SEQ ID NO: 564075 - DNA, 503 bp, Homo sapiens
gggttcaagtgattctcctgactcagcctcccgagtagctgggattacaggcacrcgccacccatgcctggctaattttgtattttagtagagacagggtttctccattttggtcattctggtccccaactcccgacttcagttgatctgcccacctcagcctcccaaagtgctgggattacaggcgtgagccaccgcacccggccactgccctcgttttctaatgtgtagagttatacaacaaataactagtttggggtatttagaactactagtaagaaaaataaagaaagataaggagataaaagtaaagtgtgtaaagtgtatatggggctaggcgatgatttattacatatacagtgtgattagcaaaagaatctctgaagcagtaatagcagagcctggacttgaatgagcagagcaaatgagcaagaaaaaataatctgcagaaaaaagttcaatagagaataaacagcccagcctggccaacatggtgactctcc

SEQ ID NO: 564076 - DNA, 503 bp, Homo sapiens
gggttcaagtgattctcctgactcagcctcccgagtagctgggattacaggcacgcgccacccatgcctggctaattttgtattttagtagagacagggtttctccattttggtcattctggtccccaactcccgacttcagttgatctgcccacctcagcctcccaaagtgctgggattacaggcgtgagccaccgcacccggccactgccctcgttttctaatgtgtagagttatacaacaaataactagtttggggtatttagaactactagtaagaaaaataaagaaagataaggagataaaagtaaagtgtgtaaagtgtatatggggctaggygatgatttattacatatacagtgtgattagcaaaagaatctctgaagcagtaatagcagagcctggacttgaatgagcagagcaaatgagcaagaaaaaataatctgcagaaaaaagttcaatagagaataaacagcccagcctggccaacatggtgactctcc

SEQ ID NO: 564077 - DNA, 576 bp, Homo sapiens
  misc_feature 1, 2, 3, 4, 5, 6, 7, 8, 9, 10, 11, 12, 13, 14, 15, 16, 17,18, 19, 20, 21, 22, 23, 24, 25, 26, 27, 28, 29, 30, 31,32, 33, 34, 35, 36, 37, 38: n = A,T,C or G
nnnnnnnnnnnnnnnnnnnnnnnnnnnnnnnnnnnnnnacagtccaatccatctcctgtgggctgtggttctaatgtcagtccagttttctaagtattctcaggctattggatcttgcccaggtcagacccaaacaattatcgggtcagacctatatatgtatagaccaggggagagccccagatgcataaacaactgttatgaaatcactttcttgaccttccttatctttgtcaccaccttgacaccttccacctctcaggaggccacttcctcttcctgatcttcaggttagaaatccaagggtttaggttctcctctctgctacacacctcatggatacatcacctccaggtccaagtagcaggaagatagatagggaagaaaagcaakggggagtctcctaacccttttggctcacaaatcctctgcccagagtgaagggttcctaactctgaggtttagatgcctgctcagccatctctgtcctcaccacaggaatgcccaggagcgccacaatgatcttgtttcaaattctagtttccttcccaaatctgcctgtgttatcaatcatta

SEQ ID NO: 564078 - DNA, 623 bp, Homo sapiens
gcagtggcacaatctcagctcactgcaaccttgtctcccaggttcaagtgatcctcccacctcagcytcccaagtatctgggattacaggcatgcaccaccacacctggctaatttttgtatttttagtagaaaccaggtttcatcatgttggccaggctgatctcgaactcctgacctcaagtaatatgcccgccttggcctcccaatgttctgggatttcaggtgtgagccaccacgctgggccacccttctgagtctaaatgtgctcatctgaactggagataaaaataaaacttacttcatacttttgtgataattaactaaaataacatacataatgcatttggcaatgaagtattaaataaaatttaaatattattattgaacttattattactactagataatgggctagcagggagtcacaaagagcacatgtgaactcatgtgaaaaaaatattaaataggctgctccataattgcattgtaatatctaaaagctacagcaaaaatacatatttatgttttcctgccttctgtacgaataaaatgttttgacacctaaaaacaattgactttttaggtttgggcaagcaattgaacactacgtgactgtccaga

SEQ ID NO: 564079 - DNA, 525 bp, Homo sapiens
tcactttgactttagacatttcaaatatagtatgctgtggtgaattccttttagaatatatttgactggggattggtgggccttctatgtctggatttctgactctcttgcaagacatgggaagttttcattgattattttcttaaatagattttctgagctttttattctctctttcccctagggaatatcaataatttgtaactctgattgttttatgtgattccagatgtcttgaagactttgttcttttttttttttttttttttttttgcctgcttggattagttttaaaaaaactgtctttaagttctgagattatttcttcttcttgctctggtctataattaaagcttttgaatgtcttttgtatttctttcaatgaatttatttccagaatttctgcttttgttttcctaaagttatctatcttcttggtaaatttcttacttatattctgaattgattttctgatttctttgtattggttttcaratttctcttgcatctgattgagctcctttt

SEQ ID NO: 564080 - DNA, 578 bp, Homo sapiens
aatcttacaatgatagacttccagaatgagttacatgagggagatataaacgttataaattagtacatgaaatttggaaaaacagaaattataattatcctcaagtatggccttctaatgtgactagaaatggtgtggtttctaccctgtgcatttatggcaaagccccaggacagactgtcctgtcaccaagccatcatgacggttttcctgctattaacaggcatgctggtgctcctgcgtgaagtgaacagacacctgttctatgacaggagaggaaagatgcttgatatggtttggctgtgtcctcgcccaaatctcawcttgacttgtagctcccacaattcccaattcccatgtgtcatgggaggagcccagtgggagctgattgactcatggaggtcggtctttcccatgctgttcttgtgatagtgaatgagtctcatgagatctgatggtgctaaaaacgggagtttccctgcacaagctctctctctgcctgctgtcatacacgtacgacgtgacttactcctccttgccctccgccatgatcgggaggcctctccagccacgtgaac

SEQ ID NO: 564081 - DNA, 528 bp, Homo sapiens
ctgcaaccatctgattttcaacaaacctgacataagcaagcaatgagaaaaggattccatatttatttwttatttattatttattgtttttgagacagagcctctccctgtgcccaggctggagtacagtggtgcaatcttggctcactgcaacctccgcccccaggttcaagtgattctcctgcctcagcctccgaagtagctgggattaaaggtgcccaccaccatgcctggctaatttttttatttttagtagagatggggtttcaccatgttggccaggctggtcttgaactcttgaccagaagtgatccatccacctctgcctcccaaagtgctgggatttattaaatacggaatcctgcctggcatgagccaccatgcctagccagattccctatttaataaatggcactgggagaactggctatccatgtgtgtgaaattgaaacaggaccccttccttacaccacatacaaaaatcaactcaagatggattaaaaacttaaatttaaaacccaaactaag

SEQ ID NO: 564082 - DNA, 528 bp, Homo sapiens
ctgcaaccatctgattttcaacaaacctgacataagcaagcaatgagaaaaggattccatatttattttttatttattatttattgtttttgagacagagcctctccctgtgcccaggctggagtacagtggtgcaatcttggctcactgcaacctcygcccccaggttcaagtgattctcctgcctcagcctccgaagtagctgggattaaaggtgcccaccaccatgcctggctaatttttttatttttagtagagatggggtttcaccatgttggccaggctggtcttgaactcttgaccagaagtgatccatccacctctgcctcccaaagtgctgggatttattaaatacggaatcctgcctggcatgagccaccatgcctagccagattccctatttaataaatggcactgggagaactggctatccatgtgtgtgaaattgaaacaggaccccttccttacaccacatacaaaaatcaactcaagatggattaaaaacttaaatttaaaacccaaactaag

SEQ ID NO: 564083 - DNA, 602 bp, Homo sapiens
tgaacctggtttatttctttatttatttgggttttgtttaatttacttttgcagtgttttgtagttttcagtagacaggccttgcataactttttttgaattcatgacaaaagtatttttttgttattataaatgaaatgtttaaaaatattttctaattcttagtatatagaaatgcaattgattttttaaaatatattcatcatgtatactgagactttgataaattcatttattagtagctttttggatccttaggattttctagatacacaatcatgcttcttgggagtaattatagttgttctaatctttatgcttttagttctttttattgtcttaatgcactggctaagacctctagtacatatagtacatctagaccatataagagcattgcwttgttcctaattttagaggtgaaagtatttagtctttcaccatcacatgtgatgttagctgtaggttgaagtttttgctttgtggggtttttttgttttgagactgagttctactcttgttgcccaggctggagtgcagtggcacaatcttggctcactgcaacccccaccttctgggttcaagcaattctcctgcctcag

SEQ ID NO: 564084 - DNA, 240 bp, Homo sapiens
tagatcatgtagatggcggtgatggtattttgcccaggcaacastacttcaaacagaactgcagtcagcatgaatccagtccagatatttcacattttgaaaggtcaaagcaagtttcatcagtcaatgaggaagattttgttagacttaaacagcagatttcagatcatatttcacaatcctgtggatctgggcaaatgaaaatgtttcaggaagtttctgcagcagatgcttttggtc

SEQ ID NO: 564085 - DNA, 240 bp, Homo sapiens
tagatcatgtagatggcggtgatggtattttgcccaggcaacagtacttcaaacagaactgcagtcagcatgaatccagtccagatatttcacattttgaaaggtcaaagcaagtttcatcagtcaatgaggaagattttgttagacttaaacarcagatttcagatcatatttcacaatcctgtggatctgggcaaatgaaaatgtttcaggaagtttctgcagcagatgcttttggtc

SEQ ID NO: 564086 - DNA, 240 bp, Homo sapiens
tagatcatgtagatggcggtgatggtattttgcccaggcaacagtacttcaaacagaactgcagtcagcatgaatccagtccagatatttcacattttgaaaggtcaaagcaagtttcatcagtcaatgaggaagattttgttagacttaaacagcagatttcagatcatatttcacaatcctgtggatctgggcaaatgaaaatgtttcagraagtttctgcagcagatgcttttggtc

SEQ ID NO: 564087 - DNA, 565 bp, Homo sapiens
ctatattttaaaagataaccactgccttaaataaatataattgtrtttgtattggttacattatctggtggcactgttttcagtgtaacaaatcatcaaaatgcatcctccacatatttccaggggtccaattaagttgaaagattatccagtagctcttgttttcctcactacttaatagttatcaagaattctcctcagcgttactgctctttttgaatttgtctagcaggtcttcggggttttacaaaaagaagaagaaatccacccccaacacacacacacacacacacacacacacacaaacacacacacacacacacaaaagaacccctcttcgatcaacacatgtctgacataggtggagtctttcttttagtgcctgttaaatgtttagcttttggagatagaatcatcccccattattctattatattcctccatcattcatttagacagtgaaatactatgctaccttttaaaatgagattgaggataatgtttactaaggtggagattcattatatggttaaatgttaaatttttaaagcagcatgttatgaag

SEQ ID NO: 564088 - DNA, 385 bp, Homo sapiens
cagataagcaccaccacacccaggtaattttaaaattttttgtaaagatggtgtttcaccatgttgcccaggctggccctgaactcctgggctcaagcagttcaccagccttggcttcctaaagtgctgggattataggcatgagccaccacacccagccccatacgaaaatttagtctcagaattagcctttgcatgcgtcacctgtaagttaatcagaatgttactttcaaaagttccmtgcaggtgaggaagctaaaaggtattcttgtatttttttaaatgaaacttcataatagaggtgtaaacagagtccattctccccagccttagaatcagacagcttgagtttaaaacccacttatgagcttgagcatactactga

SEQ ID NO: 564089 - DNA, 486 bp, Homo sapiens
ttcgttgttgtctgggcattgaagagttgggtatttattgtagccttgcagtctgggcttgtttgtacctgtccttcttggtgaggctttccagatgcttgaagaaacttgggtgttgtggtctgagttttgggtcactgcaggaatatctgcattagggagcactccaagcccagtaacactgtggctcttgcagaggtaccaccttagtagtcttggataatatccagagtcattctctggattaccaggcagagactcttttttctcttctcttactttctcccaaacaaacagattcagtctcagtctgtctgtctgtctgtctgtctctctctctctctctctctctctgtgtgtgtctctgtttcctggatctgggggaggggtaacacaaatacccctgtggccaccaccactgggactgcatagggtcagacctgaagccarcatagcactgggtcttgcccaaagcctgcagtaacc

SEQ ID NO: 564090 - DNA, 550 bp, Homo sapiens
gtgccacaaattttagttactttgtgagcaccagttcaaccacatggacttacacaaacacacatccacacataaatatggacacatcctcttaatttactaagggtctgagcaacttctaccatsacaagattaatgccaatgatgtctttaggatgtgccaacatacctgtgtgccaagcttagcaacttcacagttggtgatttggtctaccgagttgtctgggaccagagagctccctcacccccaacaggttttctctgtgctctgtgctgccatagacactgactagagcagagattcacaacgaagatcatggctgaaaagaatctgggcaatttaagaagtagattcctggtcctacttctgtgaatatattttttaaaattctggggtagggcatatgcctcccatttcaaagaagagacaaggagtctgatgcacattgcagttgagtgacccaggttgagatgtgcttgtcattatcaaccatcactttagttagctctaagtaacgctggcatggaaagacaggaactggaaatacag

SEQ ID NO: 564091 - DNA, 638 bp, Homo sapiens
aattcaaaagcaatcccacactgccttcatcttccctggatccatgtaccttatcatgtatgagtcttttcctagccctctagagagactgtctaccacctcatttgtgccttgctgttccctggacatccttatcttataatatcagtgacacttgctgattatgggtaartctccttctgagggcaggggttgtttttcacttgtgtttggatctcaagtacctagttaattgtctggcatgtagagttcctcagtaagcatttcttacatgaaggaataaacagacttttgccgcaaataggtcccacatctggaagagtaaacttgttacccggtgcaaattgcctaataatagcaactgtattacgtctcccatagaggactgctattgctaacatttgtagcttgaaaggatgtccaagaatttacttggggatcagagtagggcccctgagatgtagtgtcttaaaaagggaaggctaggtggttttctgttagctatccctggatgttaactttagatgccacctgggaagaggaagttgcctgaaatcttaaaactttaagcagagcacccagtgagggcatttaacgggagtcatggggaagatgcagagagcagggaccaggtggcc

SEQ ID NO: 564092 - DNA, 638 bp, Homo sapiens
aattcaaaagcaatcccacactgccttcatcttccctggatccatgtaccttatcatgtatgagtcttttcctagccctctagagagactgtctaccacctcatttgtgccttgctgttccctggacatccttatcttataatatcagtgacacttgctgattatgggtaaatctccttctgagggcaggggttgtttttcacttgtgtttggatctcaagtacctagttaattgtctggcatgtagagttcctcagtaagcatttcttacatgaaggaataaacagacttttgccscaaataggtcccacatctggaagagtaaacttgttacccggtgcaaattgcctaataatagcaactgtattacgtctcccatagaggactgctattgctaacatttgtagcttgaaaggatgtccaagaatttacttggggatcagagtagggcccctgagatgtagtgtcttaaaaagggaaggctaggtggttttctgttagctatccctggatgttaactttagatgccacctgggaagaggaagttgcctgaaatcttaaaactttaagcagagcacccagtgagggcatttaacgggagtcatggggaagatgcagagagcagggaccaggtggcc

SEQ ID NO: 564093 - DNA, 506 bp, Homo sapiens
cttcacgttttagaggagggaactgcgatcaaaggaagttggacacacagttgacatagcaactcaggttaatgccagaattgggagtttgaatccagtcgttttttatccagcagaaggggcagtgactataaaaccatgttattgtttctaagagttttagtccattatctgccctacaggtacactttctctttggaaatgaccttccttattctgtggtaagctcttcctcttcccttgttttcttcctactcacttcagtcccttcaccatccctccccaggtcctcttctctgctccatctttcctcttttcctttcttctccctctctccacttccctgttacttctgcttctttctttttttcgtctgtgacagagtctcrctttgtcacccaggctggagcgcagtggcacgatcgcggctcactgcaacctctgcctttcaggttcaagcaattctcctacctcagcctccacatagctgggactacaggcatgca

SEQ ID NO: 564094 - DNA, 499 bp, Homo sapiens
ccccctggggcattgcctagtggaactgtgggaaggaagccattgttctgtgggtcccagaatgtagatccactggcagcttgcatcctatacctgggaaagccgtaggcactcaactccaacccatgagagcagtcatggaggcttcaccttgcaaaagctgtagaggcagagctgcccaaggccttggagtctacccttacatcagtgtgacctggatgtgggacatggagtcaaaggagattattttagaactttaagatttaatgactgtcctgttgtgtttcagacttgggtggggcctgaagtcrtttcttttggctgatttcttccttttagaatggaaatgttggccaggcatgatggctcatgcctgtaatcccagcactttgggcggctgagacaggtgaatcacctgaggtcaggagttcaagacaagcctggccaatgtgatgaaaatccccatctctacaaaaatacaaaaattagctgggcatga

SEQ ID NO: 564095 - DNA, 482 bp, Homo sapiens
gactatgctttgggtgcagggtctcaccacaggtctctttatgcaggttctttatgtaaaaataaataactattttgtaggcatagtataagcatatgtgaagatgaggagacacaagaaaacatctcaactgccaaagagtcactctgaggccaaatgtccaatattaagagaaaggagaggcctcaccaagaactggaaccaaaacttttyatttttcaggtccagcagcagctctgggagcccagagaattttatcatcccatcagaaactagagtctataagcttccaactgctttatttctttataaatttgcatttttaaaaaaatgggtttaatcagttcagatacagaacacccatacatgtttcaagtcactatatgtgccttgatttcctgtaaatccaacctatatattgtgggcttttaatcaataatttaaacaaatattaattgagcacatactatggattagtcatt

SEQ ID NO: 564096 - DNA, 566 bp, Homo sapiens
tacatacacagcatccaacagagtgactaacacatagtgaatatttaaaaatgtttgctgaaaaaaatgactagatttggaacaagattctgtgtggtactgtcgctgctatatggttattgcatgggaagctttgaawccatttattaacttgtttgctaaacaaacaattgttgatctcctgctgtgggcctaggtatggagttctagggataagaataaaaccaggagcgatagatagactaaaacaaaagctgaacgtctacaattttgagttagtatgaccctttgaatttgtgaagattattgatattgatatgatatttcttgtaatatgatacagttcttccaatattgcagcaacatgatgattaaatacaaaaaaccccaaccccaaacaatagctttttggactcacaacccaagtatgtgcatttctttcatttccttgtctccttgcttgactcccattaccctattttttttttaagatggagtctcactctgtcacccagagtggagggcagtggtgcaatcttggctcactacaatctccgccttccagc

SEQ ID NO: 564097 - DNA, 590 bp, Homo sapiens
cccccaggaggcatttgacaatgtctggagacattttttgattgtcatgactgcggggggagcatgctctggcatcgggtagctagaggccaggaatgctgctaaacataccttctaggacagggctgctgtcctacaaggtacaggacagcccctgcaaggaagaatcacctggccccaaatgacagtagcgcccaggttgagagaccctgtcctggtgtgataaatggtgcagagacaagtggctaatggtttatagtaattcaactactccctggaaacagtgtaaactaggctgattacctaaggcaaggctaaccaaagctttcaagttccgtatatgtatgtttagcacttatttaaggaagtactcacctaaaggaggtgagacagagtaaaaggaaggatgtgctataattgtttrtatagcacattgaaaagctagtatttacatatacagtactaactttttttttgtttgtttgtttgagacagagtcttgccctgtcacccaggctggagtgcagtggcgcgatctcggctcactgaaacctctgcctcccgggttcaagtgattctcctgcctcagc

SEQ ID NO: 564098 - DNA, 552 bp, Homo sapiens
actcttgatgacttcaaattaattgtayacttttgtttatacacagagtctaggagaagatgttaacatgcagcacagtgatgactgcagatttattctcaagacatttttttcttaagtagatcttcagctgtcatctgattcaattagtctaagaattttaatttatatttcacttcaaaaggttgaactagataagtacacagaaatacaaataaaagtactttttacaagctttaaaactgtggtgtcccctatctgtatttttttcctctagcatctgccttgccaaaagttctcttgatgcctcctcccggggggataggttctgacccagacctgaaccagttctgaccaaatgtgaaatcctccaggaatgtcagccacccttcctacctccaatttttattgattgattgttttgagacagggtcttgctctgtcatccaggctagagtgctgtggcatgaccatagctcactgcagtcttgcactcctgggctcaagcaatcctcctgcctcagcctcccaagcagctaggactacaggcat

SEQ ID NO: 564099 - DNA, 406 bp, Homo sapiens
tttttaaagaacacttgcagtgtttgaagtgacaaaggctactgtgacaaaaaagmagggaaagggaattttttttaaaaaaagcaaacaacaacaacaaaaaccccagagaaaagcaaacaacaaacaaacaaaaaacagaggaagaagtcaaacaccctgggctgtgactacttccaggaaggggctacaagaggcagctggaaattctatttgctttgcaactgtgggttttctggcctgcttccttctaaagtatattactctgcttttggttcatgaagttatccatttctgttttctggaacagctatgtattttctttatctatcatctatctatctgtttaccatctatcttttctaccttttgctatcaagagcttgggtcaagcaggatagaattc

SEQ ID NO: 564100 - DNA, 405 bp, Homo sapiens
ttttaaagaacacttgcagtgtttgaagtgacaaaggctactgtgacaaaaaagcagggaaagggaattttttttaaaaaaagcaaacaacaacaacaaaaaccccasagaaaagcaaacaacaaacaaacaaaaaacagaggaagaagtcaaacaccctgggctgtgactacttccaggaaggggctacaagaggcagctggaaattctatttgctttgcaactgtgggttttctggcctgcttccttctaaagtatattactctgcttttggttcatgaagttatccatttctgttttctggaacagctatgtattttctttatctatcatctatctatctgtttaccatctatcttttctaccttttgctatcaagagcttgggtcaagcaggatagaattc

SEQ ID NO: 564101 - DNA, 405 bp, Homo sapiens
ttttaaagaacacttgcagtgtttgaagtgacaaaggctactgtgacaaaaaagcagggaaagggaattttttttaaaaaaagcaaacaacaacaacaaaaaccccagaraaaagcaaacaacaaacaaacaaaaaacagaggaagaagtcaaacaccctgggctgtgactacttccaggaaggggctacaagaggcagctggaaattctatttgctttgcaactgtgggttttctggcctgcttccttctaaagtatattactctgcttttggttcatgaagttatccatttctgttttctggaacagctatgtattttctttatctatcatctatctatctgtttaccatctatcttttctaccttttgctatcaagagcttgggtcaagcaggatagaattc

SEQ ID NO: 564102 - DNA, 599 bp, Homo sapiens
gtgtttgaagtgacaaaggctactgtgacaaaaaagcagggaaagggaattttttttaaaaaaagcaaacaacaacaacaaaaaccccagagaaaagcaaacaacaaacaaacaaaaaacagaggaagaagtcaaacaccctgggctgtgactacttccaggaaggggctacaagaggcagctggaaattctatttgctttgcaactgtgrgttttctggcctgcttccttctaaagtatattactctgcttttggttcatgaagttatccatttctgttttctggaacagctatgtattttctttatctatcatctatctatctgtttaccatctatcttttctaccttttgctatcaagagcttgggtcaagcaggatagaattccagtgtatgttcactctaccatttaaaacaagagctcttgtaggcattctccatcacatcataaacctgagctttctaaaacagagtgtggcaaactaccatgcatggaccatgtctgacacagtctgcgtttgtaagtaaagttgtaatggggcacagccaatacatgtgttacataatgtctctggctactttcatggtataatggaaga

SEQ ID NO: 564103 - DNA, 544 bp, Homo sapiens
catcagaatcaaatctgtagatctctgccattcataagtatttggagtttaaaattagcataaagattttccttaaaataagaacaaatggcttgagtaggcttttggaacgtaggatgtttccactggttcatgtctgtgttcagtattcccacatgaatctaaacatgactctgctcttagtagctgtgtgaccctgggacagtcactcagtctccctcagctaaattttgttgtgtgagtaatgaggagagagttgtgatttctatttagtgaataataacaaacaaaaggcatttagctttctggaacctggtatgtagtagaacctcatgaaaatactagctctgttgataaaactagactgaaaaaagctttcaaagtcaacaacagtatgaggcagtgaaggacgtagaggagaagctgctgctgcagcctgtagctcctggargcccgttttgtccatgatttagcaggaacgcattacctttccatgaggacactgcccacagaaaccaaggccattctttgaagacaaacatgt

SEQ ID NO: 564104 - DNA, 544 bp, Homo sapiens
catcagaatcaaatctgtagatctctgccattcataagtatttggagtttaaaattagcataaagattttccttaaaataagaacaaatggcttgagtaggcttttggaacgtaggatgtttccactggttcatgtctgtgttcagtattcccacatgaatctaaacatgactctgctcttagtagctgtgtgaccctgggacagtcactcagtctccctcagctaaattttgttgtgtgagtaatgaggagagagttgtgatttctatttagtgaataataacaaacaaaaggcatttagctttctggaacctggtatgtagtagaacctcatgaaaatactagctctgttgataaaactagactgaaaaaagctttcaaagtcaacaacagtatgaggcagtgaaggacgtagaggagaagctgctgctgcagcctgtagctcctggaagcccgttttgtccatgatttagcaggaaygcattacctttccatgaggacactgcccacagaaaccaaggccattctttgaagacaaacatgt

SEQ ID NO: 564105 - DNA, 544 bp, Homo sapiens
catcagaatcaaatctgtagatctctgccattcataagtatttggagtttaaaattagcataaagattttccttaaaataagaacaaatggcttgagtaggcttttggaacgtaggatgtttccactggttcatgtctgtgttcagtattcccacatgaatctaaacatgactctgctcttagtagctgtgtgaccctgggacagtcactcagtctccctcagctaaattttgttgtgtgagtaatgaggagagagttgtgatttctatttagtgaataataacaaacaaaaggcatttagctttctggaacctggtatgtagtagaacctcatgaaaatactagctctgttgataaaactagactgaaaaaagctttcaaagtcaacaacagtatgaggcagtgaaggacgtagaggagaagctgctgctgcagcctgtagctcctggaagcccgttttgtccatgatttagcaggaacgcaytacctttccatgaggacactgcccacagaaaccaaggccattctttgaagacaaacatgt

SEQ ID NO: 564106 - DNA, 597 bp, Homo sapiens
atcattaccatattgggtttattgttttaaaattcaaaagccaatttttaccacattaccaacaaaagaataatcagatgatcatctgaatagatgcaaaaaaatttgataaatttcagcagtcatgataaaacgcaaaacaaaatgcttggcaaaccgggaatagaagaagactttcttactctgatctatacatatccatatttggaaacctaaaacaaatgccattcttgatgttgaattattgaaacctttcaccctatgataaggggcaaaataagatgaccttattatcacttctatcagcattatattagaggtcctggccagtgtaatgtggctacaataagaagttataagtggacacataaagaaggaaaagataaaaacactgtcattatttgcactcaaaygatagcttatatagaatatctattaaacaattaaaataaatgaattaagcaaatttgcagggtgcaaggttaaaatacaagtatcagttaagattttatattctatcaacaagagtaaaattaaaattaaaatattatagtatcaacaatatctagtgcataggaataaatctaataaaaatca

SEQ ID NO: 564107 - DNA, 531 bp, Homo sapiens
caacagatatgaaacaggaggataaaatggctgcctctcggaagagcaggggaaagccagggagaagataccagagaaagggtgtcaacgttggaaaagcttctcttttttaaaatttctatttatttatttatttatttatttatttatttatttatwtattttgagacagagtcttgctcttttgcccaggctagagtgcagtggcgtgatctcggctcactgcaacctccgcctcccagactcaggcaattctcctgcctcagcctcttgagtagctgagattacaggcgtgtgccaccatgctgggctaatttttgtatttttagtagaaatggggtttcgcaatgttggccaggctggtctcgaactcctgacctcaaatgatcctcccaccttggcctcccgaagtgctgggattataggtgtgagccaccacgcccggcctggaaaagcttcttgatttgacctgaaatagtactactattaataatgatatacatttctctttataagtgggtccaatttact

SEQ ID NO: 564108 - DNA, 580 bp, Homo sapiens
taaccatgtcttttatttttagattttttattttttgtattctgatgctttgacatttggggcctcactgattctgcagggactgaccctcccaggattagccagtttctagagatagtaaacaacttactggagcactcttttcaaaggcaaaccaaccaatccagagcacacactcccaaccacctccattatagggctttcacactctgggccactatccacctgccctaatcgctccaggacttattaagtgccaggcaactgagggatcgctcctgtgtcccagagtaagttgaagttgttcaaactagctaatctgaaccctgcgtactctgaccttcccattctttcctgcttccacagagaggaggtgtaacgcattcaggaagtataaatgtgtctattacttgttaaaatgctttatttgaatgtrgactgttgcaaatctactaatccagtttgaagaatcagaaaatccctatgcagcatgtgacaagaaagcaaaccatcaagtagaaaatgaggagcgctttcccactcaggctcttccttcctgacccagtaaaaatgccacttg

SEQ ID NO: 564109 - DNA, 580 bp, Homo sapiens
taaccatgtcttttatttttagattttttattttttgtattctgatgctttgacatttggggcctcactgattctgcagggactgaccctcccaggattagccagtttctagagatagtaaacaacttactggagcactcttttcaaaggcaaaccaaccaatccagagcacacactcccaaccacctccattatagggctttcacactctgggccactatccacctgccctaatcgctccaggacttattaagtgccaggcaactgagggatcgctcctgtgtcccagagtaagttgaagttgttcaaactagctaatctgaaccctgcgtactctgaccttcccattctttcctgcttccacagagaggaggtgtaacgcattcaggaagtataaatgtgtctattacttgttaaaatgctttatttgaatgtggactgttgcaaatctactaatccagtttgaagaatcagaaaatccctatgcagcaygtgacaagaaagcaaaccatcaagtagaaaatgaggagcgctttcccactcaggctcttccttcctgacccagtaaaaatgccacttg

SEQ ID NO: 564110 - DNA, 592 bp, Homo sapiens
atccatgtgcatgtgtgcgtgcatgtgtctgtgtgtgcgcatgtatgtatacacacacacacacacacacatacatatatatatatataaagagagagagagagagtgagtgagttttgctatgttgcccaggctggactccaactctcagawtcaagggatcctcgcactttagcctctcaagaggacactttgcataggaatatgccaatctcaaattagaaggaaaactcctttaaatgaattaagttaatcaggtggttactaaggaaaattttagtgtatgcaatcaccactgaaggaaacattctttacaaacctgttaactctctgagccatcctcttgtataccatgcatcagactgtagagtaattacctgttcacacttctgttgtttctagtaagtgacaaatccattgagaaaaagaccttgtctctttttaaaaaattatttttatttttagagacaggattttgctctgtcacccaggctggagcacagtggcatgatcatggctcactgcagccttgaactcctgggctcaagggatcctcccacctcagcctcccaagtagctagaattacaggca

SEQ ID NO: 564111 - DNA, 598 bp, Homo sapiens
aacatcttcaagcgcaggaatcattaaccccacataactaatgtagattacaacctattcttgtgtcaatgcttttgattttaaaagtatctgtctgaacacagattatattattttgtgtcaaggggaatggggtggggttgaatctcaactgcttattatctctcttttaagatattgcttgctctttctctgaatctttcctattgcatactcttaaacttcataacttctatcaaacctttgaaaaaaattacctttaggtcctttagctcccatttttttccttctggtttgtttgtttgttcattttttttccatttagttgagaatcaagctcttggtcattatttaacaagactgatgttttaatgtgactgcattttcattgcttaatcattaccgttgtagaaaatcctgttagccctctaaatgtggatattcacccaggacagaacataaccactataaagttggtgaaatgcattagcctagtgtacgagcttaggctaatcctctctctgttttgaacttcacctctcctccctactatcgagttgattgtcctcckttttaaatcagaaaatcatttccagga

SEQ ID NO: 564112 - DNA, 493 bp, Homo sapiens
gaattcttaagctggctggggaggagagatgtcagatatggtctttctaagcagcgcagaacagagtaaaatgaggggtcagacagatgtctagggaaagaactttccagaaagagaatagwaaatgcaaaagccctggatggggaaaattgtctgccaggactaacaaaagggaaaggaaaccagcatagctggaatgacacaggcacaggataaagtgttaggaagtaagatctgaaaggagtgaaggggcagtttatgcaaatctttattctgtaagcttggaaaaccactgaaggttatgagcagaaaagttatatggtttttttcttcttcttgttgttgttgttaacatgttgccctaaatataaagtaatctgggaggctaggcatgatggcccacgccagtaatcccagcaggttgggaggccaaggcaggaggattgcttgaggccaggagttggagaccagcctgggcaatatagcgagaccc

SEQ ID NO: 564113 - DNA, 493 bp, Homo sapiens
gaattcttaagctggctggggaggagagatgtcagatatggtctttctaagcagcgcagaacagagtaaaatgaggggtcagacagatgtctagggaaagaactttccagaaagagaatagtaaatgcaaaagccctggatggggaaaattgtctgccaggactaacaaaagggaaaggaaaccagcatagctggaatgacacaggcacaggataaagtgttaggaagtaagatctgaaaggagtgaaggggcagtttatgcaaatctttattctgtaagcttggaaaaccactgaaggttatgagcagaaaagttatatggtttttttcttcktcttgttgttgttgttaacatgttgccctaaatataaagtaatctgggaggctaggcatgatggcccacgccagtaatcccagcaggttgggaggccaaggcaggaggattgcttgaggccaggagttggagaccagcctgggcaatatagcgagaccc

SEQ ID NO: 564114 - DNA, 493 bp, Homo sapiens
gaattcttaagctggctggggaggagagatgtcagatatggtctttctaagcagcgcagaacagagtaaaatgaggggtcagacagatgtctagggaaagaactttccagaaagagaatagtaaatgcaaaagccctggatggggaaaattgtctgccaggactaacaaaagggaaaggaaaccagcatagctggaatgacacaggcacaggataaagtgttaggaagtaagatctgaaaggagtgaaggggcagtttatgcaaatctttattctgtaagcttggaaaaccactgaaggttatgagcagaaaagttatatggtttttttcttcttcttsttgttgttgttaacatgttgccctaaatataaagtaatctgggaggctaggcatgatggcccacgccagtaatcccagcaggttgggaggccaaggcaggaggattgcttgaggccaggagttggagaccagcctgggcaatatagcgagaccc

SEQ ID NO: 564115 - DNA, 542 bp, Homo sapiens
gagaccatcctggccaacatggtgaaacactgtctctactaaaaatacataaattacctgggcgtggttggtgcacatctgtagttccagctactcaggaggctgaggcaggagaatcacttgaacctgggaggcagagcttgcagtgagctgagatcacgccactgcactccagcctggcgacagagcgagactccrtctcaaaaaaaaaaaaatttcctataaaaagtattatttaccatcaccaagtaggaaatatcccagatggtaaggttggtttaacttacacaattcaatcaatgtgatatatcacattaagagaaaaacagggaaaaaaaaactcactccactatacagattcaactcactaggtacattaaaaaacacataagaaaatttaacactaatttatgattaaaacactcaacaaactaagaaaatgaagaaactttctcaacctgattaaaaatatctataaaatctcacagataaccgtgactgaatgttttttttctctaaattcaggaactgaaacggatatc

SEQ ID NO: 564116 - DNA, 542 bp, Homo sapiens
gagaccatcctggccaacatggtgaaacactgtctctactaaaaatacataaattacctgggcgtggttggtgcacatctgtagttccagctactcaggaggctgaggcaggagaatcacttgaacctgggaggcagagcttgcagtgagctgagatcacgccactgcactccagcctggcgacagagcgagactccgtctcaaaaaaaaaaaaatttcctataaaaagtattatttaccatcaccaagtaggaaatatcccagatggtaaggttggtttaacttacacaattcaatcaatgtgatatatcacaktaagagaaaaacagggaaaaaaaaactcactccactatacagattcaactcactaggtacattaaaaaacacataagaaaatttaacactaatttatgattaaaacactcaacaaactaagaaaatgaagaaactttctcaacctgattaaaaatatctataaaatctcacagataaccgtgactgaatgttttttttctctaaattcaggaactgaaacggatatc

SEQ ID NO: 564117 - DNA, 298 bp, Homo sapiens
ttgcctctgcttactaaaaacacaacccactgctgatacactctaaatgtgagccatttctcctgatttttagacatataaaccctctgagggagaagtaatcccatgcaaatcaggctagatacagatttagaaaatatctgggattgaaatgaaggcataggagtggaacaggcatttttgarttccttttatgtattgggtacttatgatgcattagcttatttaatatgtacctaaccaagtatgacggtgcgtgactgctattggtggagagggttgagaaaaattagtggaa

SEQ ID NO: 564118 - DNA, 577 bp, Homo sapiens
aattggaaccttctagtgtggcatatagatgctatcgttcacagatcgttctttttttttcattaaataagccatgtccgggcatcattactttttgtgctagggatataataatgcacaaacatgaattcctggtcttgtggactttatagtccagtgaggggtggcacacaagtgacaaataaacatgccaaatttgtagtatgtgctatgatcagagaaaaataaaggaagttagagggatgggaatggtagaaatgagacccttcttttttggactccctctcgttgataaggtaatatttgagtagagataggaagtaactgagggaataagaaaaaacagcatcaatgaaagtcctgatgctggaacttgcctacgatggtccaggaacagtgaccacacgagcaccagtagtagataaaataaaagggagagttggtaggacatgagctcaaacgtgtgatggatctgaagttgcagagaatgttagcagtggccacctcatgaagagccttaaaaattaaagcacttgctcttaatgatatggaargtcattgaggagttttgaataga

SEQ ID NO: 564119 - DNA, 556 bp, Homo sapiens
atataaacatgcacacaaatacacatatataatacatatgtatagtatgtatattatataaaatatacrtatagtaagtgtattttatatattatattatgtatattatatattatataatgttatatatgatatatttgtgtatcatatataatatatatgttttaagagccaaacagaaattctggagctaaagaatgcaataactgaactctaaaatttgctagaggatttcaaaagtacacatgatcaagaagaaacaattagtgaagtcaaagaaaggccatttaaaattatccagttagagatgcaaaaataaaaaaaaatttaaaaagtaaaagaaacctaagtgattatgagataccaccatattaaaagaaatatgcattatggatgtttcaaaaggaaaggatagacaaagatgtagaaaacatttttaaatgatgactgaaaacttctgaaatctggaaggaaaatggacatccagattcatgaagcatgagagaccctaaatgggatgaagacaaataaatctacactgagaaacattataatc

SEQ ID NO: 564120 - DNA, 636 bp, Homo sapiens
aagtgtgctccaggcttttctatcttataaacaaacaaacaaacaaaaaatctcaccttaatatcctgcttcaattattaatttatattcctctttctccttacatgcaagcttctcaaaaaaaaatagatctcttcttattttcactagtcattgtatacactcctcaacctacagaaattaggccattacccacctccattactccagtgaagtcactccctggacatctcctaattcaacaatcataccagttttgtccttacttcacttctctatggtcacattatcatggactttcttgatatcctatttcttcatattctctctttcttgctaacagctccctttcaagtttatctttctgtttccttcataactgttggtgtttcctgggaatgctacaaacccttctcttattttacgcactctttccaagcaattttttctgtactcatggcttttattgactgcttgtatgtcagtaattcccaggtccagatttctttttagaattttttgtctgtttatgacaatgtctactaaatggcatttaacatgcattaaaagatgtcagttacwtagtcagaaaatatcacctaacaatgaaaacaaataatatatagcctaattcaa

SEQ ID NO: 564121 - DNA, 449 bp, Homo sapiens
tggggttatatatcaggataagcaagcagttcatgagggccctgggcagagtatatgttgtgcaaagtagcagttctcaacgtttttctccatggagtgcccatgacagatgcacttttgaggaacagtcccctattggcaattctcagtgggtccatttttccctcttcgagacagggcaaccaaatgtgctgtccattaaagagattttaggtattcactgaagtctgctttcaatttaaatgtcagtcattcacaaattttaactagtgttggtaacagacacttatgatagccygcactattgactagaacacactggcaagaggtggcacttcagcctcaggttctgtgacttgatttcttgcctatctgtctactgtctcccatctttcctgtactcactatgccttggttaccctgtgggtcttctagtctcacccttctgt

SEQ ID NO: 564122 - DNA, 449 bp, Homo sapiens
tggggttatatatcaggataagcaagcagttcatgagggccctgggcagagtatatgttgtgcaaagtagcagttctcaacgtttttctccatggagtgcccatgacagatgcacttttgaggaacagtcccctattggcaattctcagtgggtccatttttccctcttcgagacagggcaaccaaatgtgctgtccattaaagagattttaggtattcactgaagtctgctttcaatttaaatgtcagtcattcacaaattttaactagtgttggtaacagacacttatgatagcccgcactattgactagaacacactggcaagaggtggcacytcagcctcaggttctgtgacttgatttcttgcctatctgtctactgtctcccatctttcctgtactcactatgccttggttaccctgtgggtcttctagtctcacccttctgt

SEQ ID NO: 564123 - DNA, 646 bp, Homo sapiens
ttttagaactgactgcacagaattttcagaattatatatacagtcagctcttttcttctctgctaggaaggaatgagctattctggtttgattcatccatccatacctagactcactcacagccttaccttacccaatgagttatttgcgaaatagataataagacactggccaactcttgactttcaacaaggctgggcttatgttctagagtagcagcaaatgctgaccttcacagcaggtagcagacaactctactttgtaagggtccagaagggacgcagctaagcatgtttcactacagtgcacaggtagatggagcaagtctgtataacttcattttctgcctctctgctgtgattttcctgggccacacgcctgcagggctgctgaaaataattagatayggggtagggtgagttctctcctttatctcttcaccaaattcagtgaaagtcaaaccatatttgtgaggaagactcacaagcattgtagttttaaaacattatgaattcacactgaatttcagtttatatgtaaaacatatttaatgagatttacacatttatattcgggctaagcggaagtgaactcaaggtgaatatgttctgatttttgtttcaattatattttgtaatttaaagaa

SEQ ID NO: 564124 - DNA, 479 bp, Homo sapiens
ctatctatatctatctatatctatctatctatctatctatctatctatctatctatctatctrtctgttttggagacagagtcttgctctgtagcccaggctggaggcagtggcacgatcttggctcacagaaacctctgcctcccaggtttaagcaattctcctgcctcagcctgagtagctgggattacaggggtgcaccaccacacccagctaatttttgtatttttagtagggatgggatttcaccatgttggccaggctggtctcaaactcctcacctgaagtgatctacccgtctcggcctcccaaagtgctgggattgcaggtgtgagccaccatgctcaggccataccctcttcttataaggacaacagatatattagataagagccagtctaaaggcctcattttaacttagtcacctctttaaaggccttatctccaaatacagtgacattctgaagtactgggaatta

SEQ ID NO: 564125 - DNA, 585 bp, Homo sapiens
tctcacttatgactgggacttgaacaatgagaatatatggacacatgttggggagcaaccatgctggggcctattgtggggttcaggaagggagaggatcaggaagaatagctaatggatgttgggcttaatacctaggtgatgggttgatctgtgtagcaaaccactatggcacatgtttacctatgtaacaaacctgtacatcctacgtatgtatcccggaacttaaaagttgaatacaggaaaaaaaaaaaaaacaacactgaagactagcttagaacatctacgttttttccaaatgttaattcaaaagttaaaagtttgttttttggttaggtactttttctcacattatataacaggcaactagaaggcaccagatggtgataccttcaagamtctgtctggaaatctccttaactagatcatcaggttcattaaatacatttccttctctacccattactgttcccaaaccaatgacacacatgtgagagtttgttacagcagctccctacttgcaggtgcaaaaccatgtttcaattatctatttctatgcaataaaccaaaatttagtgacactaa

SEQ ID NO: 564126 - DNA, 550 bp, Homo sapiens
ggaaagaaaagaaaaaaaatattgccagccaggttcctggacactctgaccgttagttaccacaagtccacttttctaattatttgtttcgttggttgagttaaagcattcagtgcaggcttytcacatttctatacttctttttataacagcagcttccctaggaggctacagctgaaatggcctcagaccatacctgacaatctttgcttctcttcaaaagaaaacttggctgaacaaaatcagtcccagtctatcactctgctctaaggagtctttgcgattaaagcttgatgttttttctttaaaaagaaaagaaaagaaaagaaaaaagctgccagcaataattagattagacacgaataagatttactacaaagttcgtgaaactactttccttaagcaagttggcagagtttgcgttgcgctcagcaccagtgggcagggtggtgtgtcgaaatgacctattttacaggtgtaaaagagttttgcaggcttaatgagacgtgggggtttttcttttttgcctcttccttttgtcattttctaa

SEQ ID NO: 564127 - DNA, 516 bp, Homo sapiens
ctgaggaacggaagtgagggcagcggggagcggtgggcgggtgccgagggcggcgccggggcggggaggctccgctgcagcagagcagccggctgcagccctggcccctggcccctggccctgcgctgccattccgcccttcagtttgctctcactgcgctttcttcactcgcggttcgaagccccgcttccaggctcggcacaggacggtgcgggcgagggcgagcytaagccaccttccctgaatggccgcggcgagcacggcagagctgcgcgaggcgaccagagtgagaccccgcccgccctctccgcggtccctagccaggcgcggcctggggttccctggccccgcccggcttgtcccagttctcttctggcttcacttgctgggtgaacttaatagtccctgactgggcaccgagcagtcatatcccgctttctgcttctatacccccaagtcgcgatgtcaccgcacgttcttgcccagtagcgcggggaccgcctgcagggtggaga

SEQ ID NO: 564128 - DNA, 406 bp, Homo sapiens
tgtttatgctccatgcaaacatagaaggtacatgtagtaaaaagtaattttaatccatctcctttaccataaaatatgaggtacggtattgctgtccattaaggaaatcatcattctacctgatataaacatcttctgctgccaacacattataatgtttaaatacgcattttaaatggaaacttaaattattctagtgaataaaattatcatcaggaaggtttcctaaagcaactatggtagcagcggatttttaaattatcatctaacaggctgctgatatcaaataaattagagtaaatcaaaataagattaaatgtgtaaataatgtattgcttcaatcccaccawaggtaaagtcattacattaaaaaatttttatttaaaattgagaacattcaccaaaa

SEQ ID NO: 564129 - DNA, 383 bp, Homo sapiens
ggcacatcaaacagaggcagaatctaataggtgaggcagagttagatcttakaatgtctctcacattacaccaatacaaacaacctgttgcagaatttagacattaaaaatttcggccttagccaagtgcagtggtgagtgcctgtggtcccagctactctggaggctgaggcaggaggattgcttcagcccgggagtttgagactgtagtgcactatgatatatgtaatgtgcacctgtgaataaccactgtgctccagccctggatgatacagggagcccccatctctaaaaatatttgggggggtgtattttgaagtcagagtgtctgggttcaaaggatagctgtgctacataactggggaatgccacatgagttactt

SEQ ID NO: 564130 - DNA, 501 bp, Homo sapiens
agcattatattggcatttccaatgagtgacttatgtatttttatcccaaaacaccttagcaggtacaatagctgaactcagctattttaaatgaagtaataaaccagtcttctccactctatttattttagatagcaacatccaacccttctcatataaatccccaaacacctcctcaatataggatctttgcatcaaactcagtactgactagatgtataaaggaaaggattataatgagacactttctacaacacatgcaaacagtactcatcggaattcttaaaaacattaatgagtatatcatagtcatgattgtaaagaatatcaacaagaacaataaaagcctaatcatttaatcaggtaagtttctaataatgataggtgagcatggtatacaaaattttagtgtgccttttatagaacakgatgaatcagtgtccccttaaattctcttgaatcacttgaacccaggaggcagaggttgcagtgggcagagat

SEQ ID NO: 564131 - DNA, 559 bp, Homo sapiens
ctgaaaccataaaaattctagaagatcacaccagaaaaacccttctagacattggcttaggcaaagagttcatgaccaagaacccaaaagcaaacacaacaaaaacaaagataaatagatgggacttaattaaactaaaaagcttctgcacagtgaaagaaataatcagcagagtaaacagacaacacgcagagtgggagaaagtcttcacaatccatacatttgacaaaggactaatatccagaatctataaggaactcaaacaaatcagcaagaaaaaaaccaacagtcccatygaaaagtgggttaaggacatgaacagacaattttcaaaagaagatatacgaatggccaacaaacatatgaaaaaatgctcaacatgactaattatcagggaaatgcaaatcaaaaccgcaatgtcatccttactcctgcaagaatggccataatcaaaaatcataaagtgatagatgttggtgtggatgtggtgaaaaggggacatttttacactgttggtcagaacataaactagtacaaccactgtggaaaacagcgtggc

SEQ ID NO: 564132 - DNA, 491 bp, Homo sapiens
ctgatggatggacgtcatccatccgtgaccaatgctaggtcaccctcagctgccatggtgggctcagctgtgatcccaccacctggagcttaacgcctgtcttccttgctgggaagactcagaaccacacagacctgctcctcaccyttcacagccagcactgacctcaaggagcagcaaggcaagccctcagcatccctggttttctgaggtggactctccctgactattcacccttttctgttgccttctagacataccacccatttaatttttagcattctgataggtctctcagtgttttgcttacattttgatattgagcatcttttcacgtatttacaagcagttggaattctttggtgaattgcctgtttctatccttcatccattttctaataagttgtttcttgttttgccaatatgcagagcctctttatatattatgcatgctaatcctaagtctactatgtatggtgaatattttatct

SEQ ID NO: 564133 - DNA, 614 bp, Homo sapiens
gttattattaataaaagcagcataagaagactccaaaagattgagggaagaaggcaatggaccagggacctcaggacccagggaatgactatgatgagttccctgggctctccttttgtatcacatgtctcagacgtggagcttgaagaagcaggcaaactggaaacaccaatggctacagacaacaacaacaacaaaaacaacaaaagccttctctctttaatcaaaggaccaggaaaggggaagcctagaaggacagaaaacgtttagtccatgactgctgctccagccaaactctacagaaaaaccttggcaccttccacccatgctgaatgggtgagcctagacttccaccctcatcaggctgcagagcaaggtgctccagctcccgtgaggcagaggtgtcagagacggctgtgcaggaagctggggctttcatctatgctaagcagttatgaggcaccccctcccacctgcagtgtcagcagaggccacgtggagaacagtggtgaaacactcctgcccctcccagccagggctagtaggcagctggaattcccaccactgcccagcagtaacaaggagtcttytcccttctcagtgtcaatggaggc

SEQ ID NO: 564134 - DNA, 582 bp, Homo sapiens
tcgcaccagcctgctgttggtaagtctggctaggacgcagatccaagggggcatgggtcgtgtgcaaacccctcccaccagctccctcaccacctgacccctgccctgctggagggtgccccttgaatctccaggaggtccgaggaactcgacacctcccagagatctgtactgccttggaacaggctgcaaaaagtgcagtatgaaatgggaaatatgtatcagctgcacgttttcatggccccctttggaggaaagggagtccaggttattaagtcaggaggcttttaaatttcaggggttcaaggatttatcacacacagttgcgtgtgtgtgtgtgtgtgtgtgtgtgtgtgtgtgtgtgtgtgtttaaggatgttaatgtttatgatgcatttctgtggaatgcaggcccattgggaattgtaaatttttcttattggtaaccatttctgcattggtttagcacggaactgctrctgcaagtaaatgaaccagatttttctggaatgattcgaaaatctagctgtttgtaaaaagctctctaaattattcattcacttttattttgcacagttgtgt

SEQ ID NO: 564135 - DNA, 582 bp, Homo sapiens
tcgcaccagcctgctgttggtaagtctggctaggacgcagatccaagggggcatgggtcgtgtgcaaacccctcccaccagctccctcaccacctgacccctgccctgctggagggtgccccttgaatctccaggaggtccgaggaactcgacacctcccagagatctgtactgccttggaacaggctgcaaaaagtgcagtatgaaatgggaaatatgtatcagctgcacgttttcatggccccctttggaggaaagggagtccaggttattaagtcaggaggcttttaaatttcaggggttcaaggatttatcacacacagttgcgtgtgtgtgtgtgtgtgtgtgtgtgtgtgtgtgtgtgtgtgtttaaggatgttaatgtttatgatgcatttctgtggaatgcaggcccattgggaattgtaaatttttcttattggtaaccatttctgcattggtttagcacggaactgctgctgcaagtaawtgaaccagatttttctggaatgattcgaaaatctagctgtttgtaaaaagctctctaaattattcattcacttttattttgcacagttgtgt

SEQ ID NO: 564136 - DNA, 465 bp, Homo sapiens
ttttttttttgtatttttagtagagatggggtttcaccgtgttaggcaggatggtctcaatctcctgacctcatgatccgcctgcctcggccttccaaaatgctgggattataggcgtgagccaccgcacccagccttcctttgggtatttttttgttattgttttggtttggtttgggttgtgctaagtgtttcaattcagccagttaaacattgttagatattagactgcaaaatactccagtcagagcagctcacctgcacagaaaaatgagggttcagcttttagaacctaagttctttcccagagttagaggaactgcctgtgaccttgcccactccagccacctgcctgaaataatgacaagaccagcctgaycccagcttcatgagcaattgtccaaagcccctttgtgccgtagtaattgagcaccagcaggagctacaacgacctggctgtttctt

SEQ ID NO: 564137 - DNA, 183 bp, Homo sapiens
gggtcattataatgatcagccatagcatctaccacccacccacccagtgagcactgcttagatgccaaatgatttccaaaccatactaatcctccatgaaaatctagctcttatgagcactctcaytttacagaggaaaagaaaattaggcttggaataaaacactgggcacagtgtttggtg

SEQ ID NO: 564138 - DNA, 584 bp, Homo sapiens
gaattctgttagaacctcttttctgaaagaattatttttcagactaatttgattattattatgaaatttctacagatttggctttctctttaraaatacttttcattattctcaaacatattcccattgtcttttctaggtgatctttaagtactgtatttattagacaaatagttttaaatacctactatatatcaggcattaggtaccaggcatttcaaataacagcattcataaggtagagaaattgctggccgtcttggagtatttcacttagtaggaaagaaaggtatcgagtaattgaatagacaatgatagtcattgtgacaaacgctatgaagggtaattgtaagatcctggaatggtcatattcactgcatgaccaaacaataattaggagacgatcaaataaggtaaaaagtgggatgctcaggtatatcaggaagaggacagtgtggctagagaatactaatcaagggataggatgcccagagctgtggacaggtaccagctcataatgatgttttggagacctggttaccctgagcactaggagtgtttcgaaaattttaatcaaatataga

SEQ ID NO: 564139 - DNA, 584 bp, Homo sapiens
gaattctgttagaacctcttttctgaaagaattatttttcagactaatttgattattattatgaaatttctacagatttggctttctctttagaaatacttttcattattctcaaacatattcccattgtcttttctaggkgatctttaagtactgtatttattagacaaatagttttaaatacctactatatatcaggcattaggtaccaggcatttcaaataacagcattcataaggtagagaaattgctggccgtcttggagtatttcacttagtaggaaagaaaggtatcgagtaattgaatagacaatgatagtcattgtgacaaacgctatgaagggtaattgtaagatcctggaatggtcatattcactgcatgaccaaacaataattaggagacgatcaaataaggtaaaaagtgggatgctcaggtatatcaggaagaggacagtgtggctagagaatactaatcaagggataggatgcccagagctgtggacaggtaccagctcataatgatgttttggagacctggttaccctgagcactaggagtgtttcgaaaattttaatcaaatataga

SEQ ID NO: 564140 - DNA, 649 bp, Homo sapiens
aacaattttaccaacactgcacatgatggggaagtgattgtttttcaaagaaagtatgggatgttgctggaaaaacaaacgggacactggacaggagaaagcaatagatctccaccaggagcaaccacctgaataccgactttgaaaagctgagagtattaatattagcactgacaatagaaaaatatgaccttgcctttctttcccacaaatcccctccacagagatcgtctacctctgaatacattgtaagaaaacccagaaataaggatgatatgtaatggcaatgagcatgtgcctagctagctgcatttaaatattggttcagtatttgctgactttgaaggatttgcctgcctttttcctgattgggtactgctgccactgctattttgtcacctttctgaatttcggtatgatcttcattattcatctgcccacagaccttctcaccagctcaggtgtctcaacaatgccagacccacatcaaaggttacttagctttagtgtccagtgaatcagccaacttagtaaatgtggaaataagcagattacctgaggtcaggaattsgagacttgcctggccaacatggtgaaaccccatctgtactaaaaatacaaaaatcaaccaggcgtggtggcaggcgcc

SEQ ID NO: 564141 - DNA, 581 bp, Homo sapiens
ctggcttcataaaattatttagggaggattccctctttctctatcttgtggaatagtgtcaatagaattggtaccaattctttgaatgtctggtagaattcagctgtgaatccatctggtccaggactttttgttgttgttgttggtaatatttttattactacttcaatctctctgcttgttattggtctgttcagggcttctaattctttctgatttaagctaagagggttgtatctttccaggaatttatccatctcctctaggttttctagtttatatgtgaaaaagtgttcatagtagccttgaatgatctgtatttctgtggtatcagttgtaatatctctcatttcatttctaactgagcttatttagatcttctctcttctttccttggttaatcttgctaatggtctwtcaattttatttatatttttcaaagaacaagttttttgtttcatttgtctttgttttttgtttgtttgtttgtttcaatttcatttagttctgctctgatcttggttattccctttcttctgctgggtttgggtttggtttgtttgtttctctagttccttgag

SEQ ID NO: 564142 - DNA, 551 bp, Homo sapiens
tctgaactagcttccctagaaatyctccttccaacaaatgctcatttggaaatctggaaggtttttatggttagtataaaaaagcagattctgccaaattttcattgttgttcctcttactatttgtgtgctaagcatgataagtgcagaggcagacagagaagatggatgaaattagaaggttggagactgttttgttaaacaaataagatgtgtcatagaacgtagtcatcagattaactttgatgaatcatagtgaaggtgtatgagtgagcatgaaaataatgaatctttgctgtcaccttctctgactcatagattatcttttgactatgactgttaaatacatacacaaacacaaaaagttttgtcacactgatatattctttgcctcattcctctacctggagtaattattgaaatttcattcttttaattcttcctggcaaaacctgaaatggaactgtgactcttggaaacagataaaaagtgctgttcacataagagatttcatgacaaagaagaataaggttaaaccccgtgggtgacgg

SEQ ID NO: 564143 - DNA, 530 bp, Homo sapiens
ttccttcttttcctgctttctttttccctcctttcttccttccctccctcacctctctccctccccctccttccttccttcttttcctttttttctttcttccttccctcctttcttccttccctccctccttccttccctcccaacttcttcctccctccctttttctttctttccttccttgcttcattcctttattcctgttaataacaggtttataaataaatatacctatacttatttataaacctgttattaatatctatctactttttggatggattattgtaccaaaattttttyttatacgtgttcactttttactaaattttctaagataatattggtgtcctggagatgaacactggcagtattactaaaaaaataagtattgaacattctagatgggtataacctctagctatttctaagggaggggttcactttcattggctgtcattttagtctggagttagagaaaaaatgcacacagccatcaattttgcatgatacacaggggattgtttaaa

SEQ ID NO: 564144 - DNA, 664 bp, Homo sapiens
caaagtcacttccacatttttgggtacctttacagcagcactccactccaagtaccagtttactgtattagttcattctcatgctgctataagaacatacccgagattgggtaatttataaagaaaaaggtttaatggactcacagaatcataaggctggggaggcctcacaatcacggtgaaaggcaaaggaggagcaaaggcatgtcttacatggtggcaggcaaaagaacacgtgcaggggaaatgctctttataaaaccatcagatctcaagagaactcactgactatcacragaacagcatggaggtaaccttccccattattcaattaactaccaccaggtctttctcctgacatgtgaggattatgggatctacaattcaaggtaagacttcagtggggacacagccaaaccaaataagccaaggatattggaaatatcagacaaatgattgaaaacaagtatgattaatatactaagttccctaataaataaagagtatgaaaaaaatagatgtacaatgtaagaagagaggtggaaatactagaatacaatgaaaagaaatactagaaataaaaaacaaaaacaaaaccaaaaaatactgtaacagaaattaaaaatatatatatttgatgagcttattagcaactggacagagg

SEQ ID NO: 564145 - DNA, 664 bp, Homo sapiens
caaagtcacttccacatttttgggtacctttacagcagcactccactccaagtaccagtttactgtattagttcattctcatgctgctataagaacatacccgagattgggtaatttataaagaaaaaggtttaatggactcacagaatcataaggctggggaggcctcacaatcacggtgaaaggcaaaggaggagcaaaggcatgtcttacatggtggcaggcaaaagaacacgtgcaggggaaatgctctttataaaaccatcagatctcaagagaactcactgactatcacaagaacagcatggaggtaaccttccccattattcaattaactaccaccaggtctttctcctgacatgtgaggattatgggatctacaattcaaggtaagacttcagtggggacacagccaaaccaaataagccaaggatattggaaatatcagacaaatgattgaaaacaagtatgattaatatactaagttccctaataaataaagagtatgaaaaaaatagatgtacaatgtaagaagagaggtggaaatactagaatacaatgaaaagaaatactagaaataaaaaacaaaaacaaaamcaaaaaatactgtaacagaaattaaaaatatatatatttgatgagcttattagcaactggacagagg

SEQ ID NO: 564146 - DNA, 526 bp, Homo sapiens
cccacctatgttttacatacatcagtacattccaattaaaactatgtgtgaaatgtagttgagtatcctaattcttataattagttttcttaagttttattattactttacataagttgtttctatactttacatggatgagcatatttaaagattacaagaatcaaactaaatggcaaattatatactcaacgttcaacaagaaagtctttaaatcaaagaaggaatatattttcaaactcttcatggcaaaaaatgaaaaaaatcactgaattatattattcatataggaggaagtatacaagcaagaagtccaataaaattattcttaactattataatttacatatataaattcaaacaatctaatatttttcatgaaattatcagtagttttactgactcacatcctgttgggataacaggacagaaaatacataataatatatgggaaatataratcagtgcaaacttattagtagataatttggtaaaatctttcaaaattttgaaaatatgtatgcta

SEQ ID NO: 564147 - DNA, 691 bp, Homo sapiens
cctgacactaaatggattgtaagkattctgctatacttttatgataaaaaactgaagttacacttatttgaattaatgtattctaacacttgaaaaataatacaatgtaaatagtgtagctttattcaaagttaaagtaacatcccactaaaaattttcttcaggtgttttcatgttatcctggctttaagagatcctaatacttgtttcacgtatttattgactgctttatgtgtgtcaggcaccacaacatatgctaatgttttatgtgaatttttgtatttgatctcctcaacaactttctaaggttggtgctgtaattatctccgtttaatagacacgaaagatgagtcttagaaaagttaagtaatttgatcaaggtattaaaattaaaaaatagcagaaaagagatttttacttagtctgactaatgaatcctacctcttaaacgttctattatgcaaatataaacaccaaacatattactgtgtattaattcatatcttttaaactaaaagtggtaggattcttggtgatatgttttctgttcttccttttatatttattttttccaaattctataaagcatatattttataaaaaatgaatataattaaatattgcaatagatatacaaagtgagttttttcagaatgctattaattacacaagcctttttgtttattaattt

SEQ ID NO: 564148 - DNA, 662 bp, Homo sapiens
gaaaaagactaatatatttcatttattctggaattcttgattttataattatcctcttgggaatttttattccatccatttacaaaacagttaattcaattgaagttttcataacgtttaacatgaattttgagtaccatttaaaagatgtaggcttcaaactttttatcagaaaagctaagagaaactttggataytttgatgagggaatattaaattattttgccttgcataggaatatgaaatataatcaagagctaggaaaatgagtctctagtacattataaattactggaagaagtggttgtttttgtttcctattgctgttgtaacaaataccacaaacttgctgacttaaaacaacataaatattttctctcacaaatctaaaggctagaaatctgaaatctgccaggactatacttcctctagggtttctaggggagaatccattctatgcctctcacagcttctggtagttgtctggggatacctgggcttgtggctgtctatatctgcccccattaccaccttgccttctattccatgtttctgtgtgaaatctccctcttcttctatcttataaagacacttgtgatagcatttagggctaacataataatccaggatcctatggagtgaaatctgttctcccaaaagta

SEQ ID NO: 564149 - DNA, 588 bp, Homo sapiens
ctacactgaacacttaatatgtgtacacttcactgtatgtaagttctaactgaattaaaatagtattaaaatatatttataacaaacattctatttagtagtaaactatgaaatagaaaacaaaagatatgcactatcactacctctatgtaacattgtacaacactgtgaaaagtccttgctattgcaatatgacaagaaaaagaaaatgcataatgtttgtaagaaatagtttattattcacacataatgtcattaggtatctataaaactcataacaaactatgaaaaatagaattaaaaagataatttattaatagattaaaaagtcaatatataaataaatgtttttatgcaacaacagatacaattacatactaattttttaaagaatgattattcttactttagcarcaagaactgtcaaacacagtaaaactaaaagttgtgtaagatatagacacagaaaagccatgaaacattactgagggaaattaaagatggtctttgtaagtaaatggagctttatgaattgcaatattcaaaattgtaaagatgccaattatctccaaatcaatcaacaaatta

SEQ ID NO: 564150 - DNA, 514 bp, Homo sapiens
ctcaatttatacaaaaatcaaatcaaaatgaattaaagacttaaatgtaagacctcaaactatgacactactacaagaaaacctggggaaaatctccaggttactgggcaaaaatttatcaagtagtaccttacaagcacaggcaaccaaagtaaaaatggacaagtggtatcacatcaagttaaaaaggtctgcacagcaaaggaaacaatcaacaaagtgaagagacaacccacaaattgggagaaaatatttgcaagcaactcatctgacaagggattaaaaaccagaatacataaacagctcaaactctatcagaaaaaattgaataatccaattcaaactgggcagaatatttgartagacatttctcaaaagaagacttacaaatgacaaacaggaatatgaaaaagtgcttaacatcattgatcatcaaagaaatgcaaatcagaactacagtgaaatatcatctcaccccagttaaaatggcttttatacaaaagtcaggcaataa

SEQ ID NO: 564151 - DNA, 530 bp, Homo sapiens
ttgtcacccatgcagcactttgttgcactagaggaccattcttcccacgattcccaggtaatcttattgtagtgatatttgcgaacaaaagcatcttaaaaagaaaaaaacaggttttttgttggttttgtttttcttatgcccattggaccgtcctggattaggaaatgacctttacagctggctcatacagccaatgcatttaaacacaaagaatcctatttccaagcactagaagatcaggacatctggcctgagagacaatggagaatttcatggtctaatattgtttgagagtcagagaatcataakctaactatacaggtgttgataacaaaggcagaatcccattattctaaatgtcattacaacaaagattgtatccagcaaggcacttccatgtcccatttgatcgtccatggcaacagtaatttttattagttagtatactccagtatactaacctccattctgacaaaatttcaaaatttatctcatatccatgattttggagcctaggctactaataa

SEQ ID NO: 564152 - DNA, 641 bp, Homo sapiens
aatcaaggcaaccaaagccaatcacataaaacacaaggaagaataccactagaaacaagaacaacaaagcaaaaactcagattgaaaactcacttggcagtggcacaatgtgtattataggactagagggaatcacatgcttgtttatgcatttgaattctaaaaaatcttttatttgcttacatatgaagttcagactctcattcttggtctcatcttatgtatcactgggaaaagctctactcatcttcatgcccctcacatatgatacccacttttaagttccacatattttaagaaatgttcataggtatcttggaaaccaaataaaatggaacaaaaatgtattttagaagatttttaacaagtatctcatatctatgatgtctgctgatatacacacagaacaagcacatgaaaaatactgttcacaagcccatgtgaaayagtcatttccagcactgatttggacccagatggcctgcatctgaatcttggctctcttactcactagctttggtgggttatttcacatctctgtgcatgagcttcctcatctacaaaatgaggactatgatagttttttttttttaatctcaggttggctgtgcggatagatgaaattaatttaagtataggac

SEQ ID NO: 564153 - DNA, 641 bp, Homo sapiens
aatcaaggcaaccaaagccaatcacataaaacacaaggaagaataccactagaaacaagaacaacaaagcaaaaactcagattgaaaactcacttggcagtggcacaatgtgtattataggactagagggaatcacatgcttgtttatgcatttgaattctaaaaaatcttttatttgcttacatatgaagttcagactctcattcttggtctcatcttatgtatcactgggaaaagctctactcatcttcatgcccctcacatatgatacccacttttaagttccacatattttaagaaatgttcataggtatcttggaaaccaaataaaatggaacaaaaatgtattttagaagatttttaacaagtatctcatatctatgatgtctgctgatatacacacagaacaagcacatgaaaaatactgttcacaagcccatgtgaaatagtcatttccagcactgatttggacccagatggcctgcatctgaatcttggctctcttactcactagctttggtgggttatttcacatctctgtrcatgagcttcctcatctacaaaatgaggactatgatagttttttttttttaatctcaggttggctgtgcggatagatgaaattaatttaagtataggac

SEQ ID NO: 564154 - DNA, 612 bp, Homo sapiens
gtgggtcccttggagatctaacccttagtgtgaacttcccctaagggagggggactgcagcccaccaaagcccccctgggccacaggaaacatggatgcggtgccaactgctggcaccaaagcccaggaacagacacgaagagggggtcatctcttatttcctgtgcccctccccagtgcactgttgcagacatggcagtgtttattcccactggggactgytgagcatgcgctggaaggagggactttttgtacttatccagtggctctacacccactgcaagcaagggcacactggaggagggtattttctgtggtttttagcagctctgcccccactgagggcaagcatatgctgagagtctacctgatggtggttacattaagggccatctattgcactgcatcctgaattacacaaccaaaaaaaaaaaaaatgcattgcttcaacaagcagtacctgaaaaagccactgcacaaacttatctgcaaccaaggaacctgtacagagccttgacactctgaaagcacccagaaacaaagccaatcaatcatacacaacatacaccacagtcataaactcaagggaaaaaaaagaatttaaaactcaaa

SEQ ID NO: 564155 - DNA, 612 bp, Homo sapiens
gtgggtcccttggagatctaacccttagtgtgaacttcccctaagggagggggactgcagcccaccaaagcccccctgggccacaggaaacatggatgcggtgccaactgctggcaccaaagcccaggaacagacacgaagagggggtcatctcttatttcctgtgcccctccccagtgcactgttgcagacatggcagtgtttattcccactggggactgttgagcatgcgctggaaggagggactttttgtacttatccagtggctctacacccactgcaagcaagggcacactggaggagggtattttctgtggtttttagcagctctgcccccactgagggcaagcatatgctgagagtctacctgatggtggttacattaagggccatctattgcactgcatcctgaattacacaaccaaaaaaaaaaaaaatgcattgcttcaacaagcagtacctgaaaaagccactgcacaaacttatctgcaaccaaggawcctgtacagagccttgacactctgaaagcacccagaaacaaagccaatcaatcatacacaacatacaccacagtcataaactcaagggaaaaaaaagaatttaaaactcaaa

SEQ ID NO: 564156 - DNA, 616 bp, Homo sapiens
tggtctcgctgacttcaagaatgaatccatggacccttgcagtgagtgttacagctcttaaagatggtgtgtccggagtttgttccttcaggtgttcagacgtgtctggcatttcttccttctggtgggttcttggtctcactgacttcagaagtaaagctgcagacattcgcagtgagtattacagctcttaaaggtggtgcatctggggttgtttgttcctcctggtggattcgtggtctggctgatttcaggagtgaaactgcagacctttgcagtgagtgttacagctcttaaaggtggcacagacccagagagtgagcagcagcaagatttattgtgaagagcaaaagaacaaagattccataatgtgggaagaaacccaagcaggttgccgctgctggctygggtggcctgcttttatttccttatttgccccgcctacatcccgctgattggtccattttacagagtgctgattggtctgtttttatagagtgcagattggtacatttacaaacctttagctagatgtagagtgctgagtggtacatttttacagagtgctgattggtgcgtttacaaacctttagctagacacagagtgctgattggt

SEQ ID NO: 564157 - DNA, 466 bp, Homo sapiens
atctagatggaactcccagacatttgacctggaacaagctctcagcagcatgggccccaggatccagggtaaatgagattcatgcaaagtctgcagcagcaacagcagcagtactttgcagaactccatttccaccaccctgaagggatctgctgtgcctgggacctctttctgcctgtctttctggtacagctgtgcttttcctctctcaccatccagccatcaagggggcctgcagtcataagatcataaamatcacagcagcagcaacaacagcagccatctttcatggagcatctccaagtgtgtgccacaccctttgcaaacactgccaaacaacttgcagatgagaggattcaagctaaatgacagagactgggtcaggaagctgaggtctgaacatctctggcagccctctttcctctaagcccctgcatcccctgtccattctctgtcctaggagctg

SEQ ID NO: 564158 - DNA, 466 bp, Homo sapiens
atctagatggaactcccagacatttgacctggaacaagctctcagcagcatgggccccaggatccagggtaaatgagattcatgcaaagtctgcagcagcaacagcagcagtactttgcagaactccatttccaccaccctgaagggatctgctgtgcctgggacctctttctgcctgtctttctggtacagctgtgcttttcctctctcaccatccagccatcaagggggcctgcagtcataagatcataaaaatcacagcagcagcaacaacagcagccatctttcatggagcatctccaagtgtgtgccacaccctttgcaaacactgccaaacaacttgcagatgagaggattcaagctaaatgacagagactgggtcaggaagctgaggtctgaayatctctggcagccctctttcctctaagcccctgcatcccctgtccattctctgtcctaggagctg

SEQ ID NO: 564159 - DNA, 550 bp, Homo sapiens
aatgctccctcccggcccccattcccctcagagacctgggccagaatcgtccggctgccccyagaaggcgcggggtcccttcaaggtcctcaggggagagacctcgcagccattccccggcgcggcggggttggggagccctgggaccgagcagagctccctggcacctctttacggtccgcgtcctggaaccacgagcgctcctaggccactatctaaggtcaggatcaggttttagtcccttaatctttagccaaaccgtggtacgataccagacatcgccaggaccatccctgaggcctaatgtgcagtgcccggtgcccatgccaagctggtgcaatggcacttctgcgccaagctggtgcaatggcacttctgctcggctctggaggtccatctttcctcctaaccttcccctgacccttccggcggtggcaggaggagtgagtgctctcggaaatcaaattcactgtggccgggctggacccttactctctgccgctgcccaagaaatgagacgatgtccccgtccctcagatgagcttttttt

SEQ ID NO: 564160 - DNA, 552 bp, Homo sapiens
cccggcccccattcccctcagagacctgggccagaatcgtccggctgcccccagaaggcgcggggtcccttcaaggtcctcaggggagagacctcgcagccattccccggcgcggcggggttggsgagccctgggaccgagcagagctccctggcacctctttacggtccgcgtcctggaaccacgagcgctcctaggccactatctaaggtcaggatcaggttttagtcccttaatctttagccaaaccgtggtacgataccagacatcgccaggaccatccctgaggcctaatgtgcagtgcccggtgcccatgccaagctggtgcaatggcacttctgcgccaagctggtgcaatggcacttctgctcggctctggaggtccatctttcctcctaaccttcccctgacccttccggcggtggcaggaggagtgagtgctctcggaaatcaaattcactgtggccgggctggacccttactctctgccgctgcccaagaaatgagacgatgtccccgtccctcagatgagctttttttttttttcgcggc

SEQ ID NO: 564161 - DNA, 554 bp, Homo sapiens
cccggcccccattcccctcagagacctgggccagaatcgtccggctgcccccagaaggcgcggggtcccttcaaggtcctcaggggagagacctcgcagccattccccggcgcggcggggttggggagccctgggaccgagcagagctccctggcacytctttacggtccgcgtcctggaaccacgagcgctcctaggccactatctaaggtcaggatcaggttttagtcccttaatctttagccaaaccgtggtacgataccagacatcgccaggaccatccctgaggcctaatgtgcagtgcccggtgcccatgccaagctggtgcaatggcacttctgcgccaagctggtgcaatggcacttctgctcggctctggaggtccatctttcctcctaaccttcccctgacccttccggcggtggcaggaggagtgagtgctctcggaaatcaaattcactgtggccgggctggacccttactctctgccgctgcccaagaaatgagacgatgtccccgtccctcagatgagctttttttttttttcgcggcta

SEQ ID NO: 564162 - DNA, 517 bp, Homo sapiens
gagtgatatgttgctggggctggagtatggtgtgcattggaagaaactggcagaaatgaaaacatggagaatggggccagtttgtgaagggcgttgcagcctatgtaagatttgctattagagtttgagaataccagcaraagtttgtaagcagatctgacagctcagatttatcttttagaaagaaaaccctggctgccttgtttgggatggaaggatttgagaaaattggaggagggtcacagatttatccccactatgcttagatatacaaataaaatatttttctaaatttctccttaagacctcctccccactgaataagtagagaaaaatgaacctgcatttagtggagagtaatcaactcagttagatgttgaaatagtaaactctaataatataaaaggccccttttagtaattcacgtgtcctcctgtgcctcactaaaatagtgccatagtaaaagagggctcacatgttcttgagattgtgcgagcgtgtgtgtgtgtgtgtgtgt

SEQ ID NO: 564163 - DNA, 460 bp, Homo sapiens
ggaggcagaggttgcaataagccgagattgcaccactgcactccagcctgggcaacgagacatcatctcaaaaaaaaaaaaaaaagaaaagaaaaaaaaagaaaagaaaagattacgagagtactgtaagaaattatacactaacaaactgaataacctggaataagtcttatgaattgaaaaatacaaaacatcacagacagaaattaaagaagacacaaataaatcaaactacattccatgttcatggacatcccatgtccatgttcatattgttcgtattgttaaaatactaccaaaaacaatctacagatgcaatgttatctgtatcaaaattccattgtattttttttataaaaatagaaacaaacttctaaacttgatgtaaaacacaattgaccctaaatagtaaamgtaatctttagaaagaacaaagatgaaggcatcacacttcaaaaca

SEQ ID NO: 564164 - DNA, 338 bp, Homo sapiens
acatatagaaccataggtgaatgtgaatctgggaaatgtagtttcaaaacctccaacccgtgttaaaaaataaaaagagagagagagaaagaatagaaaaatagagagataaatactcattactgtaaaaaaagcatatccctagcaattgaaataaattgaaatcactaatgtgaaatataagtcaagcctcaaactataaatttaataaatgatatttatttcagttatgtttgcaatataaaatgtttcaggtgttaagtggttaaygtgctgcaaatttttaaaatatcagtatagacagtgtgtgtgcgtgtatatatatatatatatacgca

SEQ ID NO: 564165 - DNA, 338 bp, Homo sapiens
acatatagaaccataggtgaatgtgaatctgggaaatgtagtttcaaaacctccaacccgtgttaaaaaataaaaagagagagagagaaagaatagaaaaatagagagataaatactcattactgtaaaaaaagcatatccctagcaattgaaataaattgaaatcactaatgtgaaatataagtcaagcctcaaactataaatttaataaatgatatttatttcagttatgtttgcaatataaaatgtttcaggtgttaagtggttaacgtgctgcaaatttttaaaatatcagtatagasagtgtgtgtgcgtgtatatatatatatatatacgca

SEQ ID NO: 564166 - DNA, 554 bp, Homo sapiens
caccaccatgccaagctaatttttgtatttttagtagagacagggttttgttatattggccaggctggtctcgaactcctgacctcaggtgatccacctgcctcggcctcccaaagtgctgggattgcaggtgcgagccaccgcacctggccagatctgatggttgtaaaaagaggaattcccctgcacaggttctctctttttgccttccgccgtccactcaagatgtgattaagtgaggccatgattgtgaagctgccatgattgtgatgcctccctagccataaggaactgtaagtcccattaaacttctttcttttgtaaatttcccagtctcaggtatgtatttatcagcagcatgaaaacgaactaatacaaccttcaatgttataaatttctttctaggaactgtttcaccgtgcctsacaaatgttggtcagttgcaccttcattttcatttaattccagatatttaaaaacaatttgtcttgagacattttccttggcccaagtattatttagaaatgtgacttcattttctcctccagctacca

SEQ ID NO: 564167 - DNA, 302 bp, Homo sapiens
ttgatacacttttgttttatatttgtactattgcctgtgaacctaaaaaatttgagacaagtctcagttaatttagaaagtttaatatgccaaggttgaggatgtgcaccactgacacagccttaggaggtcctgatgacatgttccctaggtggttagagcacagtgtggctttakacattttaaggagacacgaggcatcaatcaatatatgtaaaatgaacactggttcggtctggaaaggtgggacgactcgaagcggggagggggattccaggtcataggtaggtgagagatagaca

SEQ ID NO: 564168 - DNA, 581 bp, Homo sapiens
tgaaagtatgtagtttaattttaatttatttggcaattttgaaagttcatcttcccattgacctctagttttattccattgtggtcagaaaagacacttgagatgatttcaacttttaaactttgctgagacttgttttgtggcccaacatgtggtctatcctaggaatattccatgtgttcatgaaaaaaaatgtgtattctgaagctgttgaatgaaatgttctrtaaaatttctgttagattcatttgctgtaaaatgcacctttaatctaatgtttctttgttgatttttggtctagatgatatgcccaatcctgagagttgaatgttgaagttaccaactattattgtattagactctatgtctccctttagttctaataatatttatatatgtgggtgctctggtgttgtgtgcatatacatttaaaattgttatatcctcttgctgaattgatgtctttatcatatataataatccactttgtctcattttacagtttttgacttaaagtctgtttcatctcatataagcagagctactcatcctcactgtttttgttcatatggaataacttt

SEQ ID NO: 564169 - DNA, 509 bp, Homo sapiens
caaaggaaaagtgggtagctattcaagagtagcaacattagccttgctgaacagaaataagcagaagatgcaatagaagattgtgtagcatgaaactccatttattaaatctactgatttacaactgagtctatgcttatttgcagaatatgactcttactatcaggctcaaaatccagcttacttgaatcttcattcattctcaggaaccaayctctctttcctcctaggatcataatttccagccaactgctaaacatagcatcaatttgcttgatgtgatcatattttgtagcacaatgtatttagtcactacttttctaaaaatatcattttatcacataaacattttaacctagagaaatattttacacagtacagtgtttctcccatgatataaagtcaattaatggtaaaatatgattaaattagtagaaatttgctttgcaactcacttcgcaactcacttcgcaatagttgctatttaaaagaaatacctgagactgaaa

SEQ ID NO: 564170 - DNA, 509 bp, Homo sapiens
caaaggaaaagtgggtagctattcaagagtagcaacattagccttgctgaacagaaataagcagaagatgcaatagaagattgtgtagcatgaaactccatttattaaatctactgatttacaactgagtctatgcttatttgcagaatatgactcttactatcaggctcaaaatccagcttacttgaatcttcattcattctcaggaaccaacctctctttcctcctaggatcataatttccagccaactgctaaacatagcatcaatttgcttgatgtgatcatattttgtagcacaatgtatttagtcactacttttctaaaaatatcattttatcacataaacattttaacctagagaaatattttacayagtacagtgtttctcccatgatataaagtcaattaatggtaaaatatgattaaattagtagaaatttgctttgcaactcacttcgcaactcacttcgcaatagttgctatttaaaagaaatacctgagactgaaa

SEQ ID NO: 564171 - DNA, 509 bp, Homo sapiens
caaaggaaaagtgggtagctattcaagagtagcaacattagccttgctgaacagaaataagcagaagatgcaatagaagattgtgtagcatgaaactccatttattaaatctactgatttacaactgagtctatgcttatttgcagaatatgactcttactatcaggctcaaaatccagcttacttgaatcttcattcattctcaggaaccaacctctctttcctcctaggatcataatttccagccaactgctaaacatagcatcaatttgcttgatgtgatcatattttgtagcacaatgtatttagtcactacttttctaaaaatatcattttatcacataaacattttaacctagagaaatattttacacagtacagtgtttctcccrtgatataaagtcaattaatggtaaaatatgattaaattagtagaaatttgctttgcaactcacttcgcaactcacttcgcaatagttgctatttaaaagaaatacctgagactgaaa

SEQ ID NO: 564172 - DNA, 494 bp, Homo sapiens
taattatttcacaatatatatgtatatcaaaacatcccattatataccttatatatatattcaatgtttgttaatcatatattaataaagctggaaatataaaatctctatttcaattcgaatttgcttcaaacatcagcattttttaaaacactagaaagaaagagaatatcataaagcttattgtataccmtcgaaattcaagtcaggatgaaggctgtgggctactaatgaactgttcttgtatcattttcattttcaagtgaagtagtatatggttgctgaaaaattgaaatgaatcatatagaattacatgtaaagataagtaaaaagttactttcatattcctatacttaagcctacacttgtatccttccagataattttatgaatacacaaatgtaatgtgattaatgtcaaaactttatcttacgtatcattttacaacttcactcttgcctacttgtatcactggattgcatgcacattgtaca

SEQ ID NO: 564173 - DNA, 580 bp, Homo sapiens
aattatattctcttttgtttttccttttaggctgactccatttttgagatttgaatgctggccccttttcagccccactcttcccccttgtcctcttgccctgcatatgaacaaacagacaagaatgcctgyttgcccctttcctccctcccttgaactagggaggaagttcaaaccatgcaaacttcggccctctgaaccttcactctgtacctcccccattaaaaattagaaccagacacttgtcactctcttcaatcaagccacttcagatcagcttagctgactacctgcctgtccttagaaatcctcaatacatgagtaagaaattctttcacatcttattggtgcatgtatgatgtcatcagtctcaacatgcagtttaatttaggatgaggtagagaatgctgtcacactctgtggacagccacaaaatacacacattcagcaaaaacaatagtttagagaagaattgacttaaaactttacctttaaaaagacaagatgagttttaagttaatatgtctaaataaaagaaaatcactgaagaataattaggaccttattattcatgtttaga

SEQ ID NO: 564174 - DNA, 539 bp, Homo sapiens
caattactatatgagataatggatatgctaattacattgattatggtgatcatttcacaatgtatatgtataccaaaatatcatgttgtacaccttaaatacaatttttgtaaattataccttggtaatgtatgggtaaacccatttaaacaaatttgacattatatttaaataaatcattactatggtcttactgtagcttttcaaaattcctcccaaattcatattttgaaatctaattactgtgatggtattagaaggtgggccttcggaaggtgattaggttatgaggacagacctctcgtggttcttagacttcacagtctccagaactgtgagaaataaatttctgttgtttataaggtaytcacttcatggtattttgttataacagcctgaatggactaaaacatacattttatcttgcatttaattacgtgttttcctaaaattaataaaagttttttataaaaagtttgtaatgactgtctagatcaatttgcatatacatatcaaatgtatttaattattaacttatt

SEQ ID NO: 564175 - DNA, 546 bp, Homo sapiens
taaaacccagcttactttcatgatcaaaatcctcaacagactaggcagcaaaggaacagacctaaaaatattaaggggcaaccaggacaaatgcacagcaaatatcatattgatcaggcaaacgctagaagcattctccctgagaactggcacaagacaaggacacccattttcactgctcctattcaacatagtcctagccagagcaatcaggtaagagaaaaataaaaggcttgggaggccaaggcaggcggatcacgaggtcaggagatcaagaccatcctggctaacacagtgaaacacggtctctaccaaaactaccaaaacttagctaagcatggtggtgggcgcctgtagtcccagctacttgggaggctgaggcaggagaatggcttgaacccgggaggcagagcttgcagtgagtggagaccacaccactgcacttcagcctgggcracaaagcgagactccatctcaaaaaaaaaaaaagaaaaaaaagaaaaaggcatcctcaacaaactaacaggaacagaaaaccaaacacca

SEQ ID NO: 564176 - DNA, 597 bp, Homo sapiens
ttagcattttaaaggtactaaaagcactattcayccatcaaattgttcatttgtttaaaacacgtgcaacaaaaactgagtgtacctaaaagcacaaaataaatctgctcccttgcactttagttagatgaagcagaatgtgcacaggtaaggtcagtagaaacacatacacacacacacgcacacacacacacacaaacacaatatgtttgatgtactccaagaagtgcaataacacttgaacgtacattaataacgtatctttggaaaacacatgaatataattttaaatccggaaacagtaaaaaagagaattgtcacaagattggtttggattttagtatcattatattagaagtaaacttcataatcattttaagaacagcaaacatctgtcttattttgcatttctttcctttccttgtttccctctctgcttctgggctattagagtttctcaaattgtttgtatcacatagatacccatgtaaatgctgcagggttgactccaagactatattagacacaagtgtgcttgtatttcaattcttgtaattataagtggccccacttcagcctattcggttttctatgaaa

SEQ ID NO: 564177 - DNA, 597 bp, Homo sapiens
ttagcattttaaaggtactaaaagcactattcacccatcaaattgttcatttgtttaaaacacgtgcaacaaaarctgagtgtacctaaaagcacaaaataaatctgctcccttgcactttagttagatgaagcagaatgtgcacaggtaaggtcagtagaaacacatacacacacacacgcacacacacacacacaaacacaatatgtttgatgtactccaagaagtgcaataacacttgaacgtacattaataacgtatctttggaaaacacatgaatataattttaaatccggaaacagtaaaaaagagaattgtcacaagattggtttggattttagtatcattatattagaagtaaacttcataatcattttaagaacagcaaacatctgtcttattttgcatttctttcctttccttgtttccctctctgcttctgggctattagagtttctcaaattgtttgtatcacatagatacccatgtaaatgctgcagggttgactccaagactatattagacacaagtgtgcttgtatttcaattcttgtaattataagtggccccacttcagcctattcggttttctatgaaa

SEQ ID NO: 564178 - DNA, 505 bp, Homo sapiens
atactgttacttaaaatttcttaatattaccccattacctagtaaatkcactaatccagttcctaagtttagcttgcaagaccatgctggactggcccaatataatttttaattgatgtcccactgtatcacacaggacactgtatattccagtgatagcaatgtttatatttttgcctctgttcttgcttttgcttattttttcagattgtttttccttttgaaataatctccctttctgtcctcaaatcattttccttaggaaactatcttagaattcaaacagggtaataagatttaaaataccatccagacattcttctttcctactaaacaataagttcttttagatatgtgataatgttttttttcatctttacattcacaatatactatgggttgttaattttatgtttcaacatgtctaggccataggaataactggttgatctgtgagggataactgatgtatctgtgagggtgtttctggaagagattagcatct

SEQ ID NO: 564179 - DNA, 641 bp, Homo sapiens
taatgataatacaacataaagatgtaatttgtaatatcaacaaaatacatgggtggtggagctggaaaggagtagaatttttgtatgtaattaaaattaagttggtatgaatttaaaatatgttgttataactttaggatgctatgaataatccccatggcaaccacaaaacatatttatagaatatatgtaaaaggaaatcaaaacatatcactaaaaaaaaaaaaaaaactaaacacaaagagaggtagcaatggagaaaatgagggacaaaaaaatctatggcatatacaaaatcaataacaaaatgaaataataagtcctttcctatctgtaatgacttcaaatataaatgggattaaattcctcaatcaaaaggtatattggcagaatgggttttaaaaattgggatttaackatatgctgtccaaaagagactaatttttgatctaaaaacacacatatgttgaatatggaaggacagaaaaacatatttcatgaaaacagtaaacaaaagagagtgggagtggctatactagtagacaaaatagactttaagtcaaaaattgtacaagagacaaaggcaggacataataaaagagccaattaccaagaagatataacaataacactaaatgcac

SEQ ID NO: 564180 - DNA, 641 bp, Homo sapiens
taatgataatacaacataaagatgtaatttgtaatatcaacaaaatacatgggtggtggagctggaaaggagtagaatttttgtatgtaattaaaattaagttggtatgaatttaaaatatgttgttataactttaggatgctatgaataatccccatggcaaccacaaaacatatttatagaatatatgtaaaaggaaatcaaaacatatcactaaaaaaaaaaaaaaaactaaacacaaagagaggtagcaatggagaaaatgagggacaaaaaaatctatggcatatacaaaatcaataacaaaatgaaataataagtcctttcctatctgtaatgacttcaaatataaatgggattaaattcctcaatcaaaaggtatattggcagaatgggttttaaaaattgggatttaacgatatgctgtccaaaagagactaatttttgatctaaaaacacacatatgttgaatatggaaggacagaaaaacatatttcatgaaaacagtaaacaaaagagagtgggagtggctatactagtagacaaaatagactttaagtcaaaaatygtacaagagacaaaggcaggacataataaaagagccaattaccaagaagatataacaataacactaaatgcac

SEQ ID NO: 564181 - DNA, 364 bp, Homo sapiens
gttctaggtgaagaacttacctaaccctctaaatgtctgcaaattgcctccttttggctttttaagagaaccaaaattagacttagcccaaaagcaaatagtaaccccttataatgacaagcatctaaaacatgttcgtccttcaattcattcccaattctctttattatcaattccatgaccccaggtaccttctgcttttatcatgccctatggccacccaaccctcctccttttctrcaacagccactctattctcacctaggtcagtattccatcattatactcactgtgcccaatgaaccttttgtttatctgtaaccataattaccactcattacaacaaaaatttcatcatgattgc

SEQ ID NO: 564182 - DNA, 592 bp, Homo sapiens
ttaggtcacttacccaagttcatccaggtagcaaagtgtcaggtctggatttaaatcaggttgagtccagtacctttttcttttttatatcacgctgcctttccctagaagccaaaatttctaggaaataaatgaactgcaatgacaaagcagcacattttcccatgttctttgctcttgatccctacctactcttttcccggaaatagacaataaagccaccaggatacctgagacagccttggtcatctttgtaccgtagccagcaccatggatttttgcctagttactttcccatcagattttaacagaaagaacactgtatttgccagctcagtacagcatatctctggctctgttttctccccagcaggaatccgagggtctgtctctgtatgtgttatcatcagactggtaaagagttacatgtgtcagcacagaagaaaagagctttgatgtgagttcagcatgtaagaaagccttcaytgctgtcatgctttcaacaggttccccacgacccaccactgcctgccaagatgaatgtaaatgaagcagaagtctcacagggtaaattcagcttcccacgacctgc

SEQ ID NO: 564183 - DNA, 604 bp, Homo sapiens
gggggaacaacacacactggggcctgtcgggggtgtgggggagggaaagcatcaggaagaatagctaatggatgctggcttaatacccaggtgatggtatgatctgtgcagcaaaacaccatggcacacatttacctatgtaaacaaacctgcacgttctgcacatgtacccctgagcttaaaataaaagttaaagaaaaaataaataaataaataaatttaggtctgagacgggggtacaattttattcttttctatgtggacatacagttgcctcagcaccatgatgaatttcttgaaaagtgaggttgacataattggaaagccatctggaaaataacaaaattagatttcattactcctatcttaaaccaagtttcaaaatggatctgagattcaaatgtaagaaaattaacccatacagtgctggaggcaaggatagctgaattcctctaaaatgtagcagtgaggaaaactctattaaattccagaaactattaaagaaaaaacggatcaatctgcttatataaaaacttttaaaactttygcacagaaaaatactaaaagtaaacagtgaaaaactgaaaatatatttttgcagctt

SEQ ID NO: 564184 - DNA, 600 bp, Homo sapiens
tttgcaatatttgatatgaaattctgaagcatatgggaacttctataaaatagacaagtttaattttactaccatccagccttagccctttactttcctcacccctatcgctgcctccatccctaacacccctccaatccagtttctctcatcaggaattcgcaaatcaattctttacaacaaggttttcaacaaaagaaaaatcatgaggtgaatcttcccttaaatgtaacagtactgattaactcaaattataaatacagaaatggccactttcaatatgaactgaagatcttactcttcaattrcaatctgctaagatatatatggggcattatatgagcatgtcctgcagattaagaataattttaaagtgagtgaagtcaaatcttacaacttcattgtgcctctttggtttttactatagaaacagtactttttttaatgatatacatacccatgaaaccttttcttgaatggcacaacccagagcttctgtgcttaaaatgttataatccaaattcctctcttttaagaaaaaaaatcagccatgacaatacttagcaattatcatctgagctatgtaaagtctaaaacaac

SEQ ID NO: 564185 - DNA, 446 bp, Homo sapiens
ttcctttgtcaggttgaggatgttctcttctgtttctagttcattgagtattattattatggaaaggtgtttggttttatcaaatgttttttctgcatctattaaggtgattatgtgagcttttttccccctttattccattggcatggtatattacattgattgattttcagatgttaaaccaaccttgcattcytggaataaatcccaccttgttgtggtgtataatccttttttatatgttgctggattcggtttgctagcatattgtgtagattttcacatctgtattcataaaagacagtctctagttttctttttatgtctttgtctagttttagtatttaggtaatattggctccattgaattcaagttgggaagcattccttcctcctgttctattttttggaaaagttttcaaaggattggtattaatacttcttta

SEQ ID NO: 564186 - DNA, 446 bp, Homo sapiens
ttcctttgtcaggttgaggatgttctcttctgtttctagttcattgagtattattattatggaaaggtgtttggttttatcaaatgttttttctgcatctattaaggtgattatgtgagcttttttccccctttattccattggcatggtatattacattgattgattttcagatgttaaaccaaccttgcattcctggaataaatcccaccttgttgtggtgtataatccttttttatatgttgctggattcggtttgctagcatattgtgtagattttcacatctgtattcataaaagacagtctctagttttctttttatgtctttgtctagttttagtatttaggtaatattggctccattgaattcaagttgggaagcattcyttcctcctgttctattttttggaaaagttttcaaaggattggtattaatacttcttta

SEQ ID NO: 564187 - DNA, 549 bp, Homo sapiens
tctaagaatgcatgcttcaattctggtaatttttaaaaagaacagcacagttagcattactatttataaagaagacataaggatgtgtattcataaatagataaaattaactagtgctattctgatgtragaatgaatagttatctaaatttaacatcttccactttacacaggaagatttgttcagttcttgtggaataaacatctaaggtcctaaacattaagtgattcttaagtaaactggcatttaagacaaatgcatatgtaatcaatgatgttctgatactagcaagaatctgaactatgtgctataacaaagtctaccatccagccacccacctcagcagctctccttatctccctgcagatcaatgctaaggctttcttccgtgcaaaggctgaagatccatttggttgatagaaaacagtcctgccactgaaattgtttcaatcatcactagaccattttatatcctgcctgtccactggcaaaacatgctttcttgtactttatatcttttaaagtaaggcttcttggaaacactttaa

SEQ ID NO: 564188 - DNA, 520 bp, Homo sapiens
gtcctcccacctcagcagcctgagtactggggactacaggtgtgtgccactgagcccagctaattttttaaatttttgtagagaccggattttgccatctttcccagactggtctcaaactgggtgcaagtgatccacctgcctcggcctcccagagtgccgggattayaggtgtgaaccaccatgcctggccaataaggccctttcttcacagcatgggtcgtgagtaaatgcatttgtgattaggtgactagtgtcttcctcagacctcactggactgtaagcatcgtgagatctcctttgctccccatctaatacagggcctgggacacagtagatttttgttaaatacttgttgaatgaatgaaggaggcatcttaaaattcagaaaagcagaaatccacatttgctttctaaatcctgttattgcattgcatctcagttgtgatgtattcattcactcagcagatatttatgcatccttgcagtgtggcagatattggtgtaggctggggaattc

SEQ ID NO: 564189 - DNA, 520 bp, Homo sapiens
gtcctcccacctcagcagcctgagtactggggactacaggtgtgtgccactgagcccagctaattttttaaatttttgtagagaccggattttgccatctttcccagactggtctcaaactgggtgcaagtgatccacctgcctcggcctcccagagtgccgggattataggtgtgaaccaccatgcctggccaatarggccctttcttcacagcatgggtcgtgagtaaatgcatttgtgattaggtgactagtgtcttcctcagacctcactggactgtaagcatcgtgagatctcctttgctccccatctaatacagggcctgggacacagtagatttttgttaaatacttgttgaatgaatgaaggaggcatcttaaaattcagaaaagcagaaatccacatttgctttctaaatcctgttattgcattgcatctcagttgtgatgtattcattcactcagcagatatttatgcatccttgcagtgtggcagatattggtgtaggctggggaattc

SEQ ID NO: 564190 - DNA, 476 bp, Homo sapiens
acatctctaatgaatattgatgcaaaaatcttcaacaaaatactagcaaatgaaattcaacaatacattagaaagatctttcagtatgaccaagtgggatttatccctgagattcaggatagtccaacatatgcaaatcaatcaatgtgatacattatatcaacaaaatgaagatgaaaaccatataatcatttcaattgatgctgaaaagcatttgataaaattcaacatcgcttcatgaaaaaaaccctcaaaaaatggagatagaaggaacatacctcaacataataaaagccatattcaacagacccacacctagtattacactgaatggggaaaaactgaaagyttttcctctaagatcaggaatgaaacaaagattcccactgttaccactattattcagcgtaatactagaagtcatagctagagcaatcagacaaaaaaaaaaaaaaaaaaaaaaaaaagaatggaca

SEQ ID NO: 564191 - DNA, 617 bp, Homo sapiens
gtctactggcaaaaaattccctcagttttcatttgtctaagaaaggctttacttctccttcacttttgaagggtatcatcagggtacagaattgtaggttgatggcttttttctctcaacatcttaaatatttcatttcattctttttgcttgygtggcttctgaggagaagtcagatgtatttattatctttgatactctacaggtaaggtttttttttttttttctttaaatagagatggggtcttgctgtgttgcccaggctggtctcaaactcctggcctcaagcgatcctcttgctttggcttcccaaagtgcagggattacaggtgtgagccaccatgcttggtctttaaggtggtctttttcaagatctttttctttatttttgactttctgccatttgaatacacttagttttgcctatgtgtagtttttttgacatttatccacgcttgtgttctctgagcttcctggacctgtggcttggcatctgacattaatttgtgggaaattctcagtgattatggcttcaaatattgcttgtgttcctttctctctttcttcttttttcggtattcccattacatttatattataccttttgtagttgtccc

SEQ ID NO: 564192 - DNA, 456 bp, Homo sapiens
tcacagtgcttagttcagtgttctacatcttgtaaatatggmttgtagttaataaaataagaaagttaaatattagctcacttaatacttatgtgaaatttctccctattataaaagcagagtgggccgggcactgtggctcacgcctgtaatcccagtactttaggaggccaaggtgggtggatcacctgaggtcaggagtttgaaactagcctggccaacatggtgaaaccccggctctactaaaaatacaaaaaaaaaaaaaattagccaggtgtggtggcacgtgcctgtaatcccgctactcgggaggctgaggcaggagaattgcacaaacccgggcagcagaggttgcaatgagctgagattacaccattgcactccagcctgggtgacagagccagactgtctcagaagaaaaaaaaaaagaaaaagaaaagcagaatgaaaggaagt

SEQ ID NO: 564193 - DNA, 593 bp, Homo sapiens
  misc_feature 571, 572, 573, 574, 575, 576, 577, 578, 579, 580, 581, 582,583, 584, 585, 586, 587, 588, 589, 590, 591, 592, 593: n = A,T,C or G
tgtgtttcttctcccacagacagctggaaatgatccctattgttttgtggagtttcatgagcatcgtcatgcagctgcagcattagctgctatgaatggacggaagataatgggtaaggtaagctgtcgtaattaaagaaggtgacttgcactgaaaaaatttaagttatatatgattttgtttcctttttagaaacattaaacactttttttttttttttgagatgaaattttgcccttgttgcccaatctggagtgcaatggcrcagtcttggctcactgcaacctctgcctcctgggttcaagtgattctcctgcctcagcctccctagtagctgggattacaggaacgcaccaccacacccagctaatttttcgtatttttagtagaaatgaggtttcaccatgttagccagactggtctcaaactcctgacctcaggtgatctgcctgcctcggcttcgcaaagtgttgggattatagatgtgagccaccgcgcctggctgaaacattaaacactttatagcaaaaggtcagttattgacatataatattaaaaaggtaggatcannnnnnnnnnnnnnnnnnnnnnn

SEQ ID NO: 564194 - DNA, 572 bp, Homo sapiens
agtggctgcctacatggagcttaatactccagcataggaggtggacagaaaacaaggtagccaggaattcatcaaatgactgcatgtggccaggcgtggtggctcatgcctttaatcccagcactttgggaagctgaggcaggtggatcacttgaggtcaggagttcaagaccagcctggccaacatggtgaaaccccatctctattaaaaatacaaaattagccgagagtggtgatgggtgcctgtaatccaagctatcgggaggctgaggygggaaaatcacttgaacccaggagacagagactgcagtgagctgagattgcaccactgcactccagcctgggcaagagcacgaaattccatctaaaaaaaaaaaaagactgcatgttgtaataagtagtatgaaggtgggaaaatatttttttaaaataagaaaggctgccttacttacagtagtcaggaaaggcctttatggaggggacccttgggctggtgcctaaagcaggtgaagctgaccacgcagagctaggaagaggagggttccatctgagagggaagtatgtgcaaaggc

SEQ ID NO: 564195 - DNA, 595 bp, Homo sapiens
gaaagcttgggttagggacgtagagtccatggagtgggtggggagaagggaggggcctcattgaggagatgtttccaggtagatgggactgagttgttttgggaagggagagagagtggaattcgaaggcccataagtctgggagactgaatgactggaagcattcctggaggggccatttctgggacaataataactgtaattgctatataggccttcctctgtgtcaggtactgtgctttatggcttttgctgtattaaatactcacaagaatcccctcaggtgataactgccatcgtctccrtcttacacttggggaaactgaggcacagttaccttgacagagattacccagccaataactggtagagccaggattccactccaggcagctgcctgcagagcttctgctgtaacccccgccccatgcacctctccatccacaggcctgcaggagcctgtctttatttctggagtggacatgcatttccaagaggaagcactgagaggagaggaccagggcttcacttggaaactgaccggagtgcagaagcagcacctcggggaggaggccgccagtctgggcctcccggt

SEQ ID NO: 564196 - DNA, 573 bp, Homo sapiens
gcatgacccattgcacctagccttgttcatgtaattctttattctttctcttttcctttctcaagtaggatggtaagcttcacaaaggcagggatttttgtttattttgttcagtgttatatctccagtgcctagaatggtgcatagcaggtgttcaacaaatatttgctgagttgartaaaattcagacagcataaaacataaaatgaaaaaaacatatttaacaaaagatatcacaaagtgaaaaaaataataatagaacaaatatggagaagatatctacagcacatataaaagacaaaggacacgtaaagaaatcttatgaatcagtaagaaaaggacagacaattaaaagaaggtcaaaagacaagaataggcattcaagaagaaaaactataggatcaataagtgtaagaaaagatgctcactggccatgagtggcagctcatgcctgtaatcccagcactttgggaagctgagacaggaggattgcttgagcccaagagcttcagaccagcctgggcaacatagcaagactctgtctctatttaaaaaagttttggattttggagc

SEQ ID NO: 564197 - DNA, 573 bp, Homo sapiens
gcatgacccattgcacctagccttgttcatgtaattctttattctttctcttttcctttctcaagtaggatggtaagcttcacaaaggcagggatttttgtttattttgttcagtgttatatctccagtgcctagaatggtgcatagcaggtgttcaacaaatatttgctgagttgaataaaattcagacagcataaaacataaaatgaaaaaaacatatttaacaaaagatatcacaaagtgaaaaaaataataatagaacaaatatggagaagatatctacagcacatataaaagacaaaggacacgtaaagaaatcttatgaatcagtaagaaaaggacagacaattaaaagaaggtcaaaagacaagaataggcattcaagaagaaaaacyataggatcaataagtgtaagaaaagatgctcactggccatgagtggcagctcatgcctgtaatcccagcactttgggaagctgagacaggaggattgcttgagcccaagagcttcagaccagcctgggcaacatagcaagactctgtctctatttaaaaaagttttggattttggagc

SEQ ID NO: 564198 - DNA, 623 bp, Homo sapiens
tgctaattttcagaacacagaattcagtcagtttctcccagagttgcagttcccagtgcagcctctgctcactcccaggaatgccaggccctttctctgcaacccagctcagcctggactcaccccttctgagcctcagaaacatgcagagtcctctctcagttggacacctcttcccctcttccaggcaggtgacattcactaccagtgtgagaaatagaaatgtggtgccaggtagatgaacttaccagctccttagcctactccgacctcccctttgtcccaaagggcttctgtctgccatttcagggattcatgcccagagtctcagaagattcctatagcctcgcatttgatgatgcagctgtggtaccctttctcaaccatcctttaaagtgagcrtagtaatcccatccctgcttttgaaatctggggcatctccatcacttccaagagtccaacaagcatcatctctctcttgcaacctctaggaatatctgggttctcttgttggtcttaagatcttagaaccacaaagacagacaatccactcgtgcatatttcaatgtcaatagctggaaacgaaaataaataaatacataaataaaataaaataaaataaa

SEQ ID NO: 564199 - DNA, 397 bp, Homo sapiens
tatggcctaagtgaaggtacacaaggtcacagggtgccatggcaaaacagttctcctacaattagaagctgtatttcagacagtgtgaggtctggtatgtttccaattttccctctctactactttcaaagattggagttgaaagcctgcctgtccttagtaaaatgcagtactgcctgtccttagcagaatggagcttttatatttgtctccttagcttttggagactgttaaaggctctgttgagcttctcagcctctgggctgttgctgaagactcaaagggaaaatatgagctatataaaaggctcgcttttctgagtttccctgccttcaggcttttaagcttttaatccctcaagtcctcattgcyttaatggttatctcatggcttgaaa

SEQ ID NO: 564200 - DNA, 555 bp, Homo sapiens
attttatgtgttagtcttttcttgcactgctataaagaaatacctgaagctcagtaatttytaaaaaaaaaagtttaaatagcttatggttctgcaggctgtacaagcatgacaccaacatttgcttggcttctagtgagggcctaaggaagcttacaatcatggtgaaaggcaaaggggaaagctacagtatcacatggtgaggtgagagagggagcaagaaaaagaaagaggaggtaccagactctttgaaaaaaaaaaaaacaaaaaaaaaaaacagatgtcatgtgaactaactgagaactcactcatcaccaagcagatgatgctaagccattcgtgagggttccacccccatgatccaatcacctcccaccaggtcccatttccaaccctgggaataatatcttgacatgagatttttgaggggacaaacatccaaaccatatcacctattgaaccacttgggaaaataaagacgatcaacagtctattattatatagaagtgacttaaaacgtgatggaaccagaacaacatcttatccacaggcaaa

SEQ ID NO: 564201 - DNA, 488 bp, Homo sapiens
tgtccccacccccatccatgccaattcccccacttgattggtgtctgmaacttttgagtaggaagttgagattttcatcccaactggatggtaatgaagcttcatcactacttagagataatctggctttatcctcacctgacagtaacaagctgcccctccctgtctaagctgcggtgatgctagagaatgcctagtcgagtcagaacattcctcactactaactcatattttcagttgaggccccatagagagcagaaatgaggcagtcttacagcccccaggcagagggatattacttgagcctaataggatgctgaaactcccacccttgcccaacagtgatgagcagacatccaaggtatctctgccgaaggtggaggctgagtggggaatttgaaattctccctgtcagtaatcaggcagaacctcccttttccctgccagaggtgtgtcaaaaacaaacaaaaaacctaaaaacagaaata

SEQ ID NO: 564202 - DNA, 488 bp, Homo sapiens
tgtccccacccccatccatgccaattcccccacttgattggtgtctgaaacttttgagtaggaagttgagattttcatcccaactggatggtaatgaagcttcatcactacttagagataatctggctttatcctcacctgacagtaacaagctgcccctccctgtctaagctgcggtgatgctagagaatgcctagtcgagtcagaacattcctcactactaactcatattttcagttgaggccccatagagagcagaaatgaggcagtcttacagcccccaggcagagggatattacttgagcctaataggatgctgaaactcccacccttgcccaacrgtgatgagcagacatccaaggtatctctgccgaaggtggaggctgagtggggaatttgaaattctccctgtcagtaatcaggcagaacctcccttttccctgccagaggtgtgtcaaaaacaaacaaaaaacctaaaaacagaaata

SEQ ID NO: 564203 - DNA, 546 bp, Homo sapiens
tgggaattaacaatgagaacacatggacacaggaaggggaacattacactctggggactgttgtggggtggggggagsggggagggatagcattaggagatatacctaatgctaaatgacaagttaatggaaatgacgagttaatgagtgcagcacaccagcatggcacatgtatacatatgtaactaacctgcacattgtgcacatgtaccctaaaacttaaagtataataataataaaattaaatttaaaaaaaaccatcatcattcttcacagaattagaaaaaataatcctaaaattcatatggaaccaaaaaagagcccacatagccaaaacaagactaagcaaaaggaacaaatctggaggccatcacactacctgatttcaaactatactataaggccatagtcaccaaaacaggtactggtataaaaagagacacatagaccaatggaacagaatagggaacccagcaataaacccaaatacttacagccaactgatcttagacacagcaaacaaaaacataaagtggggaaaggaca

SEQ ID NO: 564204 - DNA, 546 bp, Homo sapiens
tgggaattaacaatgagaacacatggacacaggaaggggaacattacactctggggactgttgtggggtggggggagcggggagggatagcattaggagatatacctaatgctaaatgacaagttaatggaaatgacgagttaatgagtgcagcacaccagcatggcacatgtatacatatgtaactaacctgcacattgtgcacatgtaccctaaaacttaaagtataataataataaaattaaatttaaaaaaaaccatcatcattcttcacagaattagaaaaaataatcctaaaattcatatggaaccaaaaaagagcccacatagccaaaacaagactaagcaaaaggaacaaatctggaggccatcacactacctgatttcaaactatactataaggccatagtcaccaaaacaggtactggtataaaaagagacacatagaccaatggaacagaatagggaacccagmaataaacccaaatacttacagccaactgatcttagacacagcaaacaaaaacataaagtggggaaaggaca

SEQ ID NO: 564205 - DNA, 584 bp, Homo sapiens
gaggaacaactttgtatgctctctgctattgggcttttgaacattttatcatcttgctcttgcctcttggtctaggtaacttgtgatcttttagaatgctttttaccatttctattactgtaacacttgtcagagccaatatatttcctcttggatgatagccacataattggctattgtttctactcttttctttccaaagttcctcctccacatggcagtcagagtggtaattctacaatataaaacattatatcccttttctgcattggatgtgagatccacaggactgtttcctttacatcatttacatctcagctcaaaaatcaacttctccttgatgccttccttgatgaccttaattaaagtagcaggtgaktgtaaagaagagtatctctcacaaaatctggcactttgtgtacatagagacaattttttttctttttaaaaactctgctgaatctttgtatattctgtctaccctcaatggaatctttgtgttttaattcttgattataaatctatatttttcaaatttttaaaaagtattttatatatatatatgtagaaaaaatatatatttt

SEQ ID NO: 564206 - DNA, 489 bp, Homo sapiens
atcacattacccaacttcaaactctacttcaaggttatggcacttgtataaaaataggctcattgmccagtggaacagaatagagagcccagacaaaaagtcaaatatttacagccaactgatcttcaagaaagcaaacaaaaagataaagtagggaaaggacatcctattcaataagtggtgctgggataattggcaagccacatgtatatagaatgaaactggatcctcatttctcatcttatacaaaaatcactcaagatggatcaatgacttaaatctaagacctgaaaccataaaaattatagaagataacatcagaaaaactcttctagacattggcttaggcaaacagtttattcccaataacccaaaaacaaattcaacgaaagaaaggtaaatagatggggcttaattaaactaaaaagcttctgcacagcaaaagaaataatcagctgagtaaacagacaacacacagagtgggataaa

SEQ ID NO: 564207 - DNA, 553 bp, Homo sapiens
gaagagaggtagctcattcctgtaatcctagcattttgagaggccgaggcaggcagatggcttgagctcaggagtttgagaccagcctgggcaacacagcgaaaccccatctctacaaaamcttaaaaaaaaaaaaaattggcctgatgtggtggcacgtgcctgtagtcccagctaattggagggctgaattgggaggactgcttgagcccaagagtttgagactgcagtaagcggagattgtgccactgcactccagcctgggtgacaaggtgagaccctacctcaaaaacaaacaaacaaacaaaaaatgaagaagagactcgagctagcatgtgagcatgtgcagacccctcaccacttaatagcctgggctgcctcgggactccgcagagattccctaccagcgagaaggccctaaccagctgtgtcagctcaactttggacttctcagtctccagagtggtaagaaataaattctaattcttgaataaattatccagtttcagatattctgttataagcaacagaaagcaaactgatattcctacaa

SEQ ID NO: 564208 - DNA, 594 bp, Homo sapiens
tagaagtctgaaatcagggtgttgcccaagccatgctctttctgatggctccaggggagaatccttccttgcctcttttagctccyggtgtttgcccataacccttgacattgctaggcttatagaggcatcactctagtcccatggttgtcttctgcctgtgtgtcttcacatcatcttccctttgtgtgtatctgtctctgtatccaaatttcccctctttaaaaggataccagtcatgctggattaggacccaactccgacgacttcattttaagttgacttgaccctacttccaaataaggtcacattctgaagtagtgggggttatgacttcaataggtcttttggaggtgatataattcaactcataataccagggttgtgcaatgtttcaggatagttaatggacgtagaagctaacctcagggcggtaggggttgggcagaaggggaaggtggaaaggaaggattttccacacccacttctgttaacactgcatttgtagaggccagattcacatgaagggtgaaaagtggaagcttctttaaggccttaaaatttcaccatttttaactaagagtaaagaaagtt

SEQ ID NO: 564209 - DNA, 557 bp, Homo sapiens
agcctcccaaagtgctgggaccacaggtgtgagccaccgcgcctggctgtatctcagaacttaatattaaaattaaaaagatcactctgccagatgtgtagaaagttgaccaacaagaatggaacaagaacggcarcaagaatggaattgggggatctggaaaggagggtgttggagtcacccaggcaagagaggatggaggattggagcagggtggaggtcatgaggttggagggaggggactcagctctcccaggacttgccagcagtttcagtgtgttaggggtgagaggcagaggagtcagatgcctcctaagttgaagcttcaaatagatgtacagtctaagatgcaggcacatatacgtatcaacactttctagaaagacaggcaaggggcagttggcaggtgagggggctgtggatttggggagtagatacttcgttacttttagacttgtctctaccatttgaatttagtaacagaagcattcctttataaaaataaaacacaatttttagttatatagtagtcatatataaatagtatatgacatata

SEQ ID NO: 564210 - DNA, 644 bp, Homo sapiens
gtattttgttgaggatttttgcatctatgttcatcagggatattggtctgcagttttatttttttgttatgtcctttcctgctttaggtattagggtgatactggcttcatagaatgatttagggaggattctctctttctctatcttttggaatagtctcagtaggattggtaccaattcctctttgaatgtctgatagaattcagctgtgaatccatctggtcctggactttttttgttgttggcaattgttttttattgccatttcaatctcgctacttgttattggtctgttcagagtttctatgtcctcctggtttaatctaggagggttgtgtatttccagkaatttatccatctctaggttttctagtttgtatacataaaggtgttcatagtagccttgagtgatcttttgcatttatataatatcagttgtaatatctcccacttcatttctaattgagcttatttggatcttctctctttcttggttaatgttgctaatggtctatcaattttgtttatcttttcaaagaacctgttttttgtttcatttatcttttgtattgttttgtttcaatttcatttagttctgctctgatcttgattatttcttttcttctgctgggtttgggtttgt

SEQ ID NO: 564211 - DNA, 497 bp, Homo sapiens
accctggcctagggaaatacctaggagtataaaagatacactgcttaaaattcggaccacaatatattaatcaagctgaataagatttacttagaagtcaaaggcacataaaaactaactgggmtatagtttaattgttgatttgtatattttatgttaaagtatatcttaaagaaatcaaatattcttaatttacccagtgacattaaaatgaaaaatactgtgctgatacaataccaaaaatttaattcaaaaacaaaaattaagtgataaattggacctcatcaaaatgaaaacttccgctcttcaaaagacactgttaagaaaagaaaaagacagtttcatactggaagaaatatttgcaaaacatgtatcttataaaggacttgtatccagaatatacaaacaactctcaaaattcaatatgataaaaaaatctcaatttaaaaaagtgtgtaaaatatttgaaaaaacatttcaccaaagaagatataaag

SEQ ID NO: 564212 - DNA, 576 bp, Homo sapiens
ttcacctcccgggttcatgccattctcctgcctcagcctcccgagtagctgggactacaggcacccaccaccatgcgcagctaattttttgtatttttagtagagatgggttttcactgtgttagccagcatggtctcaatctcctgacctcgtgatgcacccgcctgggcctcccaaagtgctgggattacaggcgtgacccacaacacccggcctgaaagctaattttcataaagtgacaatgggcctctccagctctggctgatacacaaatattgttttcacttaggaactgagtatttcttgaagcgggttaataagggttttacagaaggctggtgaattatctggaggcaattttacaatttagagaacaagtgattatgtctatttagtgatgaatggggcagaattgacattctcaaaagacagrgcaataggattctagtcagtaagctttgctcagtggacgctttcacctggagttttagagaaactagctaagtacagtgacttttctacatgtcaatatgataaatatttgttaaatgttactgtgtaaacagcacccaatt

SEQ ID NO: 564213 - DNA, 606 bp, Homo sapiens
gttggttttctattgttcaggacacagatatgcaaaatatccatgtttaccttggcctctaaaactccatgtctagttaattagcaagtgtagttcagcagtctagcatggagcactgatgatgcattatgcataaatctgcacctacctccctttgcactcatcctccctgygtacatggaacagtagctcactcctccactatttcctaatcccaggcttttgattctgttactttaaatgaatatgaaaaacaaatgacttgctatctttctgtttttaaaggcacttcaaagtcacaacttccactttatatggaagttaccacataaatctcctctcctgttattcatctgaatatcttcttctttaactttctgcgtgtcctttcctaatctatgccgtgttcaaaagtatcctctactgataatgtactcttgatggatctgcactagtctattccagccctatataaatcttgtttgagcaataaaagtattcataagatccttccctgaatatattacattgaatctaaactttgacacatttccccatttttcatcaatcgtttccctcaaatttaaaaacatttctatttaacaa

SEQ ID NO: 564214 - DNA, 588 bp, Homo sapiens
ggtttgagagatcttcttttttattgatttctatttctatttcagtatttattccacagtgaatcatttctattattcaacagtggtacaagagtatgattagtattatttcaattttctaaaagttattgtgacaggctttatggctgagcatgtgtccactcttagagtatatttcatgtaaagaggagaagaatattatctggttgacacatggagtattctggagatgtctatgaggtccaattggccaagcatcaaatttaagtccagattatctttgttagttttctgcctccatgacataacgctgttcatggggtgttaaagtccctcagtattattgtctgggtatctatgtctttagaacatctagaagtatttgtttcgtgaatctgggtgtagaacgtgcaggtttgttacatacgtatatacgtgccatggtggtttgctgtacctatcaacccatcatctaggttttaagctcctcatgcattaggtatttgttytaatgctctccccctccccttaaatagtccttaaatggggaaatttttttctttttcttttttctgttttttttttttt

SEQ ID NO: 564215 - DNA, 577 bp, Homo sapiens
atctcctgacctcgtgatccacctgccttggcctcccaaagtgctgggattacagttgtgagccaccgcgcccggcctccacctaccaattttcttcactgtattytctgttcctggctcacggagatttatcttactgaacacagctaagtcctttttataaaaaaaaaaaaaaaaaaaaaaaaaaaagctgtgtatttttttcctttaatgtattatgtatcatggccatgagttttgagtaaaggaataatgcaaatcatgaactatcaatagcatcgtaatccaaagtcctagaatcctatatgaaatatatcctttatttcatgtgatggttttttaaaaataaaaggttttaaaatctcttggcacttaagtatgccaaatgtagtatattaccaaaaaatagtttcataaatattccaattcagtacctttttaaaaaaatgatcaggcagattatataaaaggaaaataggctgggtgtggtgcctcatgcctgtaatcccaacactttcagaggctgaaatgggaggatagcttgagcccagcagttcaagacaagtctgggcaacaa

SEQ ID NO: 564216 - DNA, 577 bp, Homo sapiens
atctcctgacctcgtgatccacctgccttggcctcccaaagtgctgggattacagttgtgagccaccgcgcccggcctccacctaccaattttcttcactgtattttctgttcctggctcacggagatttatcttactgaacacagctaagtcctttttataaaaaaaaaaaaaaaaaaaaaaaaaaaagctgtgtatttttttcctttaatgtattatgtatcatggccatgagttttgagtaaaggaataatgcaaatcatgaactatcaatagcatcgtaatccaaagtcctaraatcctatatgaaatatatcctttatttcatgtgatggttttttaaaaataaaaggttttaaaatctcttggcacttaagtatgccaaatgtagtatattaccaaaaaatagtttcataaatattccaattcagtacctttttaaaaaaatgatcaggcagattatataaaaggaaaataggctgggtgtggtgcctcatgcctgtaatcccaacactttcagaggctgaaatgggaggatagcttgagcccagcagttcaagacaagtctgggcaacaa

SEQ ID NO: 564217 - DNA, 512 bp, Homo sapiens
tgttttccctaatggctgtactaatttacattccccaatgacagtgtacaagagttctcttttctccacgtcctctgcaatacttgttattttttgtcttttgatgattgccattctaacagatgtaaggtaatatctcattgtgtttttgatttgcatttctctgataagtagtgatttttagcattttctcatacacctgttggccatctgtaaatgtcttcttttgataatgtctattcagatcttttgaccattttttaattrggttatttgttttcttactattgagttccttatatattttggatactaacatctcctatcagatgtatggtttccaaatattttctcccaatctgtagactgcctcttaattctgttgatttccttggctgtacagaagctttttattttgatgtaatcccatttgtctactttgcttttgttgtctattttggggtacgtattaaaaaaaatccttgcctaaaccaatattatggagctttttt

SEQ ID NO: 564218 - DNA, 514 bp, Homo sapiens
ataggcttagacaatgtgatcctgaaggctactaggaactcaatgctactgtcctgtggagggcaaactttgacgatggctgccaaagtctcaggatcccatgctgcrgggaagaatgggatacaagattttgtaagcatggagaaggaatcaaagatgtgactccaacttctcttgtggctagctcagctagagttgagaagtggaggctgacaagacactgacttcaattaatatcagaagagaatcagcactcagcattggcagaaatttctgaccaggcccagtactcttgttaactgaggcagcttattaaaaacaccaccaggccaggtgcagtggctcatgcctgtaatcccagcactttggaaggccaaggcaggtggatcacctgaggccaggagtttgagaccagccaggccaacatggtgaaacctcgtctctactaaaaatacaaaaaattagccaggtgaggtggcaggtgcctgtaatcccagctactcggaaggctgag

SEQ ID NO: 564219 - DNA, 363 bp, Homo sapiens
caaatagtccatgcttattattatttaaaaaacctagagtccttccaaaatgtaatgcattataaaagccttcacatcatggctaatattgagaaaagattatttatattttcaactcagargcagagcttggtaaaatgctatagttgtaaaattttgtggctatgttattctttttcaagccgaatctcaggcagaatctacgtatatagaaatatgacagaaaataaagagttgctctagttgaagttggaggcttggcccataactgtttggcctttttcttgctgccttggcacatcctggctttatccacacccgagtcaccacctcagaaagtgagagtcacacagtacatagtag

SEQ ID NO: 564220 - DNA, 524 bp, Homo sapiens
acagaagaaacacacctcttacagactcatttttacacccctcaagagcaaatagtccatgcttattattatttaaaaaacctagagtccttccaaaatgtaatgcattataaaagccttcacatcatggctaatattgagaaaagattatttatattttcaactcagaggcagagcttggtaaaatgctatagttgtaaaattttgtggctatgttattctttttcaagccraatctcaggcagaatctacgtatatagaaatatgacagaaaataaagagttgctctagttgaagttggaggcttggcccataactgtttggcctttttcttgctgccttggcacatcctggctttatccacacccgagtcaccacctcagaaagtgagagtcacacagtacatagtagagaacctaccagtagagtagaaagagatctaacttcaaaaaaagaacatcaacattctagcgctagttctgccaggaactagggagatgagtgtccagtgagggagttagatg

SEQ ID NO: 564221 - DNA, 363 bp, Homo sapiens
caaatagtccatgcttattattatttaaaaaacctagagtccttccaaaatgtaatgcattataaaagccttcacatcatggctaatattgagaaaagattatttatattttcaactcagaggcagagcttggtaaaatgctatagttgtaaaattttgtggctatgttattctttttcaagccgaatctcaggcagaatctacgtatatagaaatatgacagaaaataaagagttgctctagttgaagttggaggcttggcccrtaactgtttggcctttttcttgctgccttggcacatcctggctttatccacacccgagtcaccacctcagaaagtgagagtcacacagtacatagtag

SEQ ID NO: 564222 - DNA, 594 bp, Homo sapiens
ctctgtaaaattgagggtctccatatatagattttcaagtgtggaatcaatggcatcattgaggtaaaggcttaagtggaatatcaccactataatccttgctatgaattagattgccagatgaaaaacatggaattcactgcctgtcacaagggacacctccccactccaaacagaagaaacacacctcttacagactcatttttacacccctcaagagcaaatagtccatgcttattattatttaaaaaacctagagtccttccaaaatgtaatgcattataaaagccttcacatcatggctaatattgagaaaagattatttatattttcaactcagaggcagagcttggtaaaatgctatagttgtaaaattttgtggctatgttattctttttcaagccgaatctcaggcagaatctacgtatatagaaatatgacagaaaataaagagttgctctagttgaagttggaggcttggcccataactgtttggcytttttcttgctgccttggcacatcctggctttatccacacccgagtcaccacctcagaaagtgagagtcacacagtacatagtagagaacctacca

SEQ ID NO: 564223 - DNA, 363 bp, Homo sapiens
caaatagtccatgcttattattatttaaaaaacctagagtccttccaaaatgtaatgcattataaaagccttcacatcatggctaatattgagaaaagattatttatattttcaactcagaggcagagcttggtaaaatgctatagttgtaaaattttgtggctatgttattctttttcaagccgaatctcaggcagaatctacgtatatagaaatatgacagaaaataaagagttgctctagttgaagttggaggcttggcccataactgtttggcctttttcttgctgccttggcacatcctggctttatccacacccragtcaccacctcagaaagtgagagtcacacagtacatagtag

SEQ ID NO: 564224 - DNA, 566 bp, Homo sapiens
gagtgcaccatgtgaacttgaaggcagagatcagggtgatgcatctataagccaagggacgtaaagactgccaattaaccaccagaaactagaagagctgcaaggaacacattctccctcagagacaatagatggaaccaacccagctaacaccttgatctcagacttctggcctctagagccatgagacaatacatttccattgtttaagccacccagtttatggcacgctgttatggcagctctaggaaactaatacagtgggcttgaggtgtagcctgagattctgaatttctaacaaactcccaggtgatgctgatgctattggtctttagatcacactttgagtggaatgaggagtgagtatataaaagaggacaccataccttctccccctgcttcctttyagagaacagtgtccttcctacagtatcggttaaaggaacaaaccccatagtctggccagtaacctagaacctgtatagcctgtctcaaaacaatgaaatgattttctggttggcatagagggagaaattatatattgctaaaagggagagtaaagctca

SEQ ID NO: 564225 - DNA, 542 bp, Homo sapiens
ttgaacaaggagcatacagtcctgtttttgaaacactacaataggttgtaataggtcatggttaacctcttgagactggagtcagtcctgcctcagtttaccagcacatactgagtgccactggctgagtacacccaggccaaatgaccaggctccatccacatatcagttctactggtctcactgtagaaaacctagatcaggtgayggttgggtgaagaagaagataaactgtcaaagaaagaaatatgaacagccttctcctcataaaaactcaaagtgcttggcctcctgatagtaggctagttgtcactttgatatatgaaggatgtactccacacacacacacaaacacacacacacacacagagagagagagagagagagagatagagagagagagagagagacaagcaggcagaactaagagttggaaaatgcattataaaaagaaaaacaaaaaatatcaattatttagtccagaaaatgtaaataagaggggtagaggagaattgttattgtttttaaatgaattgccctta

SEQ ID NO: 564226 - DNA, 542 bp, Homo sapiens
ttgaacaaggagcatacagtcctgtttttgaaacactacaataggttgtaataggtcatggttaacctcttgagactggagtcagtcctgcctcagtttaccagcacatactgagtgccactggctgagtacacccaggccaaatgaccaggctccatccacatatcagttctactggtctcactgtagaaaacctagatcaggtgacggttgggtgaagaagaagataaactgtcaaagaaagaaatatgaacagccttctcctcataaaaactcaaagtgcttggcctcctgatagtaggctagttgtcactttgatatatgaaggatgtactccacacacacacacaaacacacacacacacasagagagagagagagagagagagatagagagagagagagagagacaagcaggcagaactaagagttggaaaatgcattataaaaagaaaaacaaaaaatatcaattatttagtccagaaaatgtaaataagaggggtagaggagaattgttattgtttttaaatgaattgccctta

SEQ ID NO: 564227 - DNA, 542 bp, Homo sapiens
ttgaacaaggagcatacagtcctgtttttgaaacactacaataggttgtaataggtcatggttaacctcttgagactggagtcagtcctgcctcagtttaccagcacatactgagtgccactggctgagtacacccaggccaaatgaccaggctccatccacatatcagttctactggtctcactgtagaaaacctagatcaggtgacggttgggtgaagaagaagataaactgtcaaagaaagaaatatgaacagccttctcctcataaaaactcaaagtgcttggcctcctgatagtaggctagttgtcactttgatatatgaaggatgtactccacacacacacacaaacacacacacacacacagagagagagagagagagagagayagagagagagagagagagacaagcaggcagaactaagagttggaaaatgcattataaaaagaaaaacaaaaaatatcaattatttagtccagaaaatgtaaataagaggggtagaggagaattgttattgtttttaaatgaattgccctta

SEQ ID NO: 564228 - DNA, 599 bp, Homo sapiens
taagacactgagacaagactgtrccattcatctgacaccaaagcatttctccaggagtaatgatacgtgatttctatgggcaggtgggggatggaattattttatttggcttttatagatattttctttctttcaaattgtccccacatccctgcacctcaatgcctgtcacctatttcaaactagtggttttgataaaatcttacttctacttagggtcagagagtcttccaggatcatgtccttgaacttcccttttctgagagctgtgaggctggagggggaaagaaagggagtgcagagaacaaatacctctgctcctttcctctggtactgcacccagccatgcccctcccctggtggtgcctctctgatacctattcaggagatgaaataaacaaacgtacagccattccctgcttctcccccaaggcactgattttgtgtcctcagggtagactggttatggcaaagaataaaaagtgggaaaaagtgtttcagtaaagtgagcacacaaatacacgctgattaaatgcttccctcacaaacagccgcagagcccctgctttatctctatcaatattatcaaagcacacctt

SEQ ID NO: 564229 - DNA, 599 bp, Homo sapiens
taagacactgagacaagactgtaccattcatctgacaccaaagcatttctccaggagtaatgataygtgatttctatgggcaggtgggggatggaattattttatttggcttttatagatattttctttctttcaaattgtccccacatccctgcacctcaatgcctgtcacctatttcaaactagtggttttgataaaatcttacttctacttagggtcagagagtcttccaggatcatgtccttgaacttcccttttctgagagctgtgaggctggagggggaaagaaagggagtgcagagaacaaatacctctgctcctttcctctggtactgcacccagccatgcccctcccctggtggtgcctctctgatacctattcaggagatgaaataaacaaacgtacagccattccctgcttctcccccaaggcactgattttgtgtcctcagggtagactggttatggcaaagaataaaaagtgggaaaaagtgtttcagtaaagtgagcacacaaatacacgctgattaaatgcttccctcacaaacagccgcagagcccctgctttatctctatcaatattatcaaagcacacctt

SEQ ID NO: 564230 - DNA, 627 bp, Homo sapiens
atattttccaagactgaaaataagaactgttaaccataattctacatccaatgaaaatattctttaaggaggaaaccattacatgctctattgaagaaaatgtaagactttgttatcaatagacctcccccaaaagaagggctaaagacggctctctaaacaaaaggaaaggaaagaaaggaaaggaaaggtaagaaaggaaaggaaagggggaggggttgggggaaggctagaatataaagaaaaaagaaaaatatggtaagmaaaaatacaggaaaatacaaaatacctaccttctctcctgagtattctaaattatatttgatggttgaagcaaaaattataaaattacaacactgtctagtttgattctaaatgtacacatataaaatattgacaataactataaataaagtgaggataaagggacataaaggcagataaatatttctaaacttcactagaattggtaatatgaaaatatcaatatatataatttatgtgtaaagaatgtattgcctaggtcaactattaaaaaggctatgccaagagatatattatagataagtaaaacagaattccataaaagaaaaaatgatcaagtaatacataggaagacaggaaaag

SEQ ID NO: 564231 - DNA, 627 bp, Homo sapiens
atattttccaagactgaaaataagaactgttaaccataattctacatccaatgaaaatattctttaaggaggaaaccattacatgctctattgaagaaaatgtaagactttgttatcaatagacctcccccaaaagaagggctaaagacggctctctaaacaaaaggaaaggaaagaaaggaaaggaaaggtaagaaaggaaaggaaagggggaggggttgggggaaggctagaatataaagaaaaaagaaaaatatggtaagcaaaaatacaggaaaatacaaaatacctaccttctctcctgagtattctaaattatatttgatggttgaagcaaaaattataaaattacaacactgtctagtttgattctaaatgtacacatataaaatattgacaataactataaataaagtgaggataaagggacataaaggcagataaatatttctaaacttcactagaattggtaatatgaaaatatcaatatatataatttatgtgtaaagaatgtattgcctaggtcaactattaaaaaggctatgccaagagatatattayagataagtaaaacagaattccataaaagaaaaaatgatcaagtaatacataggaagacaggaaaag

SEQ ID NO: 564232 - DNA, 584 bp, Homo sapiens
acgtctgtaatcctagctactcaggagactgatgggagaggatcacctaagtccaggagactgaggctgcagtgagctatgatcatgccactgtactctagcctgggtgacagagcaagatcttgcctaaaaaagaaaaaaaaktccaaaacagtctcaaagaggcctgcaaacccctggtagtttacattctcaaggttatctctgtcctacacatttcgatccagatttgagttttcacccttttattatttccataaagggacagtcaaaagaactaaccattacatttattcaaaacaggaatataacactctttcctgagtattttaggggaggagaaaagaggagttatactgcaaaactgcagctatcttttaagtgaacattaagcattccactttttaaattgttcttcagctaccttaaaactagcaggcattcattgactatttcccctacatcacactgaacttacactaacctgctttatccatacttcttcctcatctacccaaatgtaaaaccaaaaccttttctgtgccttctgcagaacagttttggttgccttggctcttagcaca

SEQ ID NO: 564233 - DNA, 533 bp, Homo sapiens
ccactgcactccagcctggatgatagagaaataacttgtcttaaaaaaaaaaaaaaaaaaaawataacaaaataagtcagaaggttgaagcttttctgagttttgtttttttaatttggtaaattccagtttggtcagcagtgctaatgacacatcaggtgaaagagatttccatccactgaacagaggagtggagcacacaaggcagcaataaagaagatgatctgcagcctgaagttgatttagggcacagaggagtccagtggttcaaccttctcttctcatccggagatgctctttccagtgccaagcctaggagagtttggttttattttgaagaggaagacagttttccttatggaacctaaggaaaactacactctatatggcatacgttcataaactttcaaagcctcagagaaataaaactgaaattcagcaaagagcttgggaaaactatgctcgtccagaatcaaatctcttaaaataaaggcctgcagctgggacaggtggccttggtggtaaggcccata

SEQ ID NO: 564234 - DNA, 533 bp, Homo sapiens
ccactgcactccagcctggatgatagagaaataacttgtcttaaaaaaaaaaaaaaaaaaaaaataacaaaataagtcagaaggttgaagcttttctgagttttgtttttttaatttggtaaattccagtttggtcagcagtgctaatgacrcatcaggtgaaagagatttccatccactgaacagaggagtggagcacacaaggcagcaataaagaagatgatctgcagcctgaagttgatttagggcacagaggagtccagtggttcaaccttctcttctcatccggagatgctctttccagtgccaagcctaggagagtttggttttattttgaagaggaagacagttttccttatggaacctaaggaaaactacactctatatggcatacgttcataaactttcaaagcctcagagaaataaaactgaaattcagcaaagagcttgggaaaactatgctcgtccagaatcaaatctcttaaaataaaggcctgcagctgggacaggtggccttggtggtaaggcccata

SEQ ID NO: 564235 - DNA, 579 bp, Homo sapiens
ctatgtcctagcttttacatgcacacctggccatacagatttccacatctgtcatgttagatggttggagggaaaggctgatcattatgaaactagtagtcagtccatagtgttaaccactttcatgtcagtttccctatctattcttcatagcatattcttctgccccaaaaggcatagctggagttcctctctctacagggacagcaagctaaggtgtatagggaataacaaacatatatgcagctaaaatttaacaatctattgtttgcaggtcctatacaaaacaaaaaaaaaccttttgatctaaaatagtaaatcattatgataaagactggctataaagttgatttggggacagacacttctgttcagggctccctaatcacaatgcaaacatctgtttacctgactaacttgcaaggtcagccttgtcaaagaatgcaacctagtcctcatttcagttttctccaaaaatgtttcctgkcttttgtctgagaaaacaacactgatgaatcatagcaacaacccacacttgtgactaagagccgtatttaaaggagaagagctgaaggaaac

SEQ ID NO: 564236 - DNA, 511 bp, Homo sapiens
ttggtaactgcaccactctgttaaaagagtgctatctttctaaattctaaaatctaattgtgtcgttcttttttttttttttttttagctttttaggggctattaatgtaaaaactatgaatgagtcccctacacccaaccctgtaacacacatgaacctgtaacagccrgaacacagtccatattctaaacacatggtaaactatagcccacaggtcaaatccatcccacaacctgtttttgttacttaagttttattggaacacagctatacccacttgtttatgtagtggctgtggctgcttttgtgctataatgatattgctgaggaattgcaacagagactataggtagcccacaaccacagcccacaatatttactgcctgacctttacgggaaaaaaaaaagtttattaaacttgattctataccataagacattctttacaatttgtctaatatatgtgtcgatagcttaatatgtgacagcccccatttcgggctgattgat

SEQ ID NO: 564237 - DNA, 511 bp, Homo sapiens
ttggtaactgcaccactctgttaaaagagtgctatctttctaaattctaaaatctaattgtgtcgttcttttttttttttttttttagctttttaggggctattaatgtaaaaactatgaatgagtcccctacacccaaccctgtaacacacatgaacctgtaacagccagaacacagtccatattctaaacacatggtaaactatagcccacaggtcaaatccatcccacaacctgtttttgttacttaagttttattggaacacagctatacccacttgtttatgtagtggctgtggctgcttttgtgctayaatgatattgctgaggaattgcaacagagactataggtagcccacaaccacagcccacaatatttactgcctgacctttacgggaaaaaaaaaagtttattaaacttgattctataccataagacattctttacaatttgtctaatatatgtgtcgatagcttaatatgtgacagcccccatttcgggctgattgat

SEQ ID NO: 564238 - DNA, 471 bp, Homo sapiens
ctgtgctgcctatatgccacctctacatacaacgactcagttaaccagcccaataaaagccctgtgttcacctttgttaggggaggcattgctttgggacctatccccggtatcctccttacctgtggcaagtaataaaacccccttgttaaatcctccttcattgtcattggactgttacctgccaagcgattgaacccacctgttgtgtgggtaacactagtaagtgagaacatgtgtgactctaatgtcccagaccatcttcttttgcctgcactgtgctgcaggcagattgcacggtaaagcctggggtgaaacacacacatgattctagcacaaacaaacagaactaggggtctcataaatggatttgtctattataattctggtttctagatgcattttaagttcaatctttwttttttttgagacaagatctccctctgttgcccaaggtggagtgcagtggca

SEQ ID NO: 564239 - DNA, 597 bp, Homo sapiens
aactggaatacagtctgtgaggaggaaggcctttcatgtggaggcaagagagattagtcaaagtccagagatcactcgtatggcaggccttttgaaagattttgctctttttyctaatgacaaagccttgaaggatttagagggccatcattcagatctggggtccgttgggagctttaccaagcctaagatctccctccaatggaaagacaactatgttgtcttgctaatgacccagcaaccatcagattccatctgctggtagctgtcaaaggcaatgacagcttgtccatgctccaaataactatattatagaaaatatggtaagcgtgggcatctttgggcagatgtcatccaaaactttcactggattctcaaaagtggtccatgactcagaaaaaattaccctaaactggtactttcccaaatgtaatctagtttagcatttttatctctaacttgtttttcttcttgtttttatgttaaaaagtcactgtttctaatattctgagtgagcattagtgcgagctaatggctttttaaagaaaattggtggtggttgttactaaagttgatggatttattgagcacctaaaa

SEQ ID NO: 564240 - DNA, 615 bp, Homo sapiens
taaataagtaaataatgacatcaggagcaacaaatacctgctgaacactcactatgggccaggcagatgggtcaatgctttacctgcattttctaattttatcttcttgacataggggctatcatcatctttatgttagagaggaagagaaaagaggttggataatctgttcagaataacgcagctactaaggagcagaggcagcatttattttattttattttacattyatttatttatttatttatttatttatttatttatccatccatccgagatggagtcttgctgtgttgcccaggctggagtgcagtggcacgatctcagctcactgcaacctctgcctcctgggttcaagcaattctcctgcttcagcctcccaagtagctgggactataggtgcacaccaccatacctggctaatttttgtatttttagtagagatggggtttcaccatgttggccaggctggtcttgagctccttgtaatctgctggccccggcctcccaaagtgctgggattacaggtgggagccaccgtgcccaaacagaggcaacatttaactttgattttctaacacaggaaactctgctctttattaaaaggtcttgccc

SEQ ID NO: 564241 - DNA, 554 bp, Homo sapiens
tttccccttgcagtgtatttacaaagtcagcgtgccacatgtcccttgcattgtgctcccagctaccaggctatctgtgccatctgttgagatagcgggcccttgcttcacagtgctgggtgtrtgagaagtcagtacagattggccagcaacctgagcaagagtaaacagacccctgcggggagaggccaacaggtttccaaatcatagtgaccctgatgagtacaagccatagacccaaaccctaactgaagagaacattgttatttgtttatttatttatttatttttgaggtggggtctcaccctgtcacccaggctgcagtgcagtggtacaatcacggctcactgcagcgtcaacttccagggatcaagcaatcctcctgcctcagcttcatcctctcacctcaggcctttagctgggattacaggcatgtaccaccaaagcaaactaatttttttattttttgtttttcgtagcgatggagtctcactatgttgcccaggctgttctagaactcttgggctcaagcgattctcctgcctcctcagct

SEQ ID NO: 564242 - DNA, 654 bp, Homo sapiens
taaggaaaaacttatggactaaattattttaacagtatttaattgtttgattttgaagagacaaatatgttttarcatggaacttgggtgtttcacctgtacacacttttagaatcatgattctagatatgcatatttgcagaaagtgtattaagtctatcagtcataataatatttaaaatgatacattttgcatatgtcatttcagaatcatcataacatccctatgagaagtgcagtaaaaaaaaaaaaaaagaaaaaacaaaaactgaagcacagagaggtcaaataacttgtctagaaccctacagctcatttgtaagagagttgtgcttcaagtcacaacctcggagaccacactcatacaaaaccatggcacttatggagaccaggtttctccatgttggtcaggctggtctcgaactcctgacctcagggaagaccacactcatacaaaaacatggcactattggattcaactccttctgcttcagcccgtgcaaatttccactgcgctaggtatctgatcccagaaatgaaacatctaacaggagagtttccaggatgggtgtggatgctgaggctgggttagtgttcttcttgtgggcactaccctatttactggaatgactaaaagtccagggcactttggta

SEQ ID NO: 564243 - DNA, 654 bp, Homo sapiens
taaggaaaaacttatggactaaattattttaacagtatttaattgtttgattttgaagagacaaatatgttttaacatggaacttgggtgtttcacctgtacacacttttagaatcatgattctagatatgcatatttgcagaaagtgtattaagtctatcagtcataataatatttaaartgatacattttgcatatgtcatttcagaatcatcataacatccctatgagaagtgcagtaaaaaaaaaaaaaaagaaaaaacaaaaactgaagcacagagaggtcaaataacttgtctagaaccctacagctcatttgtaagagagttgtgcttcaagtcacaacctcggagaccacactcatacaaaaccatggcacttatggagaccaggtttctccatgttggtcaggctggtctcgaactcctgacctcagggaagaccacactcatacaaaaacatggcactattggattcaactccttctgcttcagcccgtgcaaatttccactgcgctaggtatctgatcccagaaatgaaacatctaacaggagagtttccaggatgggtgtggatgctgaggctgggttagtgttcttcttgtgggcactaccctatttactggaatgactaaaagtccagggcactttggta

SEQ ID NO: 564244 - DNA, 654 bp, Homo sapiens
taaggaaaaacttatggactaaattattttaacagtatttaattgtttgattttgaagagacaaatatgttttaacatggaacttgggtgtttcacctgtacacacttttagaatcatgattctagatatgcatatttgcagaaagtgtattaagtctatcagtcataataatatttaaaatgmtacattttgcatatgtcatttcagaatcatcataacatccctatgagaagtgcagtaaaaaaaaaaaaaaagaaaaaacaaaaactgaagcacagagaggtcaaataacttgtctagaaccctacagctcatttgtaagagagttgtgcttcaagtcacaacctcggagaccacactcatacaaaaccatggcacttatggagaccaggtttctccatgttggtcaggctggtctcgaactcctgacctcagggaagaccacactcatacaaaaacatggcactattggattcaactccttctgcttcagcccgtgcaaatttccactgcgctaggtatctgatcccagaaatgaaacatctaacaggagagtttccaggatgggtgtggatgctgaggctgggttagtgttcttcttgtgggcactaccctatttactggaatgactaaaagtccagggcactttggta

SEQ ID NO: 564245 - DNA, 587 bp, Homo sapiens
acaggtttatgaaaaaatgttcaacatctttaatcatcagggaaatgcaaataaaaatcataatgagctatcacctcacactttttagaatggctgttaataaaaaatgaaaaataagtgttgatgaggatttggagaaaagggaaccctttaacactgttggtgggaatgaaattagtgcagccattatgcaaagtagtatggagatatgtcaaaaaattaaaaatcaaactaccatatgatccaacaatgccactactagctgtatatccaaartaaatgaaatcagtatgttgaaaagatatatgcacttccatgttcattgcagcgttattcacaatagccaaaatattgaatcaacctcagtgttcatcagtgaatggatggataaagaaaacgtggtgtatatatacacaatagaacctattcagcctttaaaaacaaggaaattctttcatttgcaaaaatatagatgaatctggagaacagtatgttaagtgaaataagccaggcatagaaagaaaatattgcacgatctcacttatatgtgaaatctaaaaaaatagaactcatagaagcagagaata

SEQ ID NO: 564246 - DNA, 571 bp, Homo sapiens
tgaatttttgacaatgcatttgtggctagtaatgtttcaatgttaccctttataaatctggtactttgtaattctctaaatgtggattttcacatctattaccatttgaaatagtggagctagagctatttggaagcctgaattcatatgtcagttccacatctcaattgagcttgttatttagctctctaagcctcagtttgcttctctgtgcagtggggatggttacatctagcttacaggattaccgagaagattgaaggatatgatatacatatagtctaacataatcarttttcaaaaccgagagactgtgttaattgtaaatgaactcaagtgtatccaagtttttccttttccaattccatcaaaactttattactactctaacttgaagatattataaatatctacatatttatccatgagaagaaacaggatatgagtttacatgctttactttaaatctgattagtagcaactactactaatttggtgtttttggagagactgactttcctgtactctcaaaaacatgccatgtagacatgtgttcagtcttgcctcctct

SEQ ID NO: 564247 - DNA, 571 bp, Homo sapiens
tgaatttttgacaatgcatttgtggctagtaatgtttcaatgttaccctttataaatctggtactttgtaattctctaaatgtggattttcacatctattaccatttgaaatagtggagctagagctatttggaagcctgaattcatatgtcagttccacatctcaattgagcttgttatttagctctctaagcctcagtttgcttctctgtgcagtggggatggttacatctagcttacaggattaccgagaagattgaaggatatgatatacatatagtctaacataatcaattttcaaaaccgagagactgtgttaattgtaaatgaactcaagtgtatccaagtttttccttttccaattccatcaaaactttattactactctaacttgaagatattataaatatcyacatatttatccatgagaagaaacaggatatgagtttacatgctttactttaaatctgattagtagcaactactactaatttggtgtttttggagagactgactttcctgtactctcaaaaacatgccatgtagacatgtgttcagtcttgcctcctct

SEQ ID NO: 564248 - DNA, 585 bp, Homo sapiens
gttttatgacttggcacaaatcactayatgtttatcatctccattcttgtaagatgggaataataacatctgccttatattgagactgtaaggatttgaggtaattcatgctgatttcttggtacataagatgtgactgcaataaacaataattattcttagtagagtagggaaagaagcgatacattataatccaagcagacaatctgttcatttaatagtttaaacatgaagtccacaaaccaacctactctacaagtgaatcaatttgctaagatttgggtatccagtggtgaacgatgtgagtctgagccctgccttcacagatcctactatctaagcagccattaagcaagtaagacaacataaataattgactacagattgtgaaaagtgctctgaatagagatctcattgggaaaataacagagtgtaccaaggaaataacatattcacagagacctgaaagatgggtaggtattacctttaagagcttagaggggaaaggaggcaagagatggaaaatagtacgtgcatgcaatatacagaaagaaaaagggcagcgggtttgaagattaaaagcag

SEQ ID NO: 564249 - DNA, 603 bp, Homo sapiens
tttattttatatttcaaaatagctagaagacaaaatttggaatgtttccagcataaagaaatgataaatgtttgaggtaatggatagcctaattaccctgatttgatcattacacrttgtgtgaatgtatgaaaatctcacaggtaccccataaatatgtgcaattatcatatatcaataaaaagttacagtaagctagtttattattgaagaaagaaaaagttttaaaaataaatttagtgtagcctaagtgtacaagtatttgcacagtgtacagtagtatgcaataatgacctgtgccttcacattcactcactactgactcactgttgtacccagagtatcttcctgtcctgcaagctgcattcgtggtaagcgccctatacaggtgtatcatttaaaaaatattttatctgtgtttttactataccttttctatgtttagatacacaaataccatcgtgttacaattgcctacagtatttaatacagtaaaatgctatacaggtttgtagcctaggaacaagaggctataccacatagcctgtgtgtgtagtaggttggcccatctaggtttgtgtaagcgcactctatgatgtttgc

SEQ ID NO: 564250 - DNA, 603 bp, Homo sapiens
tttattttatatttcaaaatagctagaagacaaaatttggaatgtttccagcataaagaaatgataaatgtttgaggtaatggatagcctaattaccctgatttgatcattacacattgtgtgaatgtatgaaaatctcacaggtaccccataaatatgtgcaattatcatatatcaataaaaagttacagtaagctagtttattattgaagaaagaaaaagttttaaaaataaatttagtgtagcctaagtgtacaagtatttgcacagtgtacagtagtatgcaataatgacctgtgccttcacattcactcactactgactcactgttgtacccagagtatcttcctgtcctgcaagctgcattcgtggtaagygccctatacaggtgtatcatttaaaaaatattttatctgtgtttttactataccttttctatgtttagatacacaaataccatcgtgttacaattgcctacagtatttaatacagtaaaatgctatacaggtttgtagcctaggaacaagaggctataccacatagcctgtgtgtgtagtaggttggcccatctaggtttgtgtaagcgcactctatgatgtttgc

SEQ ID NO: 564251 - DNA, 583 bp, Homo sapiens
ttttgtttttattatgctaacatcaagggatcaacatatttttaaaggaaatatcaaaaagcctattaaaagttggagtaattttcatagttttgtgaggagacagataccatgttgtagctaagttatagaaacaattcaagaaacagatgtggcttgaggcaaaattatatgtaacttaaaattggacaaaggaaagaaggggcataatttaatctgatcacaggaataaatggcatgatatcatttgaaaaagaaacatctcaaaaaatgtatgaattcacttcaaatatgaagttacaggaaaaaaagtaggaaaacataaaataacttttctatcaaggaatgtaggagtgattttcattatgtgaaatctgtgtttcttcattgattaaggctggaactctgctgtgaagttacttgaacgagaggtgaacattctgaaaagtgtaaaacatgaacacatcatacatctggaacaagtatttgaaacgccaaaggtaaacctctattaggygctgcattttgaaagttgttattattacaaaatgaatatcattccattctgaaataatccctttgg

SEQ ID NO: 564252 - DNA, 583 bp, Homo sapiens
tggttatttgtgagtcatttgttccggtgatgccacactgtgtgccctctccagcatgctctgtggcagggtttcctcagtattgactgcaaacttttcctgctaaataactatgtctgagaactcaaatgggcctcaggagatttgatggcccaatcctgcttccatctccctccaactcaatgtcataaaggataactgttgcccattttacagatgaggcaacttgcacccataactgaagagatttgccctgattgcagttactgaatggtacagacatcgtaataatcttaggagtgcagtggctcacacctgtaatcctagcactttgggaggccgaggcaggtggatcaygtggtcaggagttcgagaccagcctgaccaacatggtgaaaccccatctctactaaaaatacaaaaattagccaggtgtggtggcacacgcctgtaatcccagctactcgggaggctgaggcaggagaccgcttgaacctgggaggtggaggttgcagtgagctgagatcgtgccactgcactccagcctgggcaacagagtgagactccatctcaaaaaaaaaaa

SEQ ID NO: 564253 - DNA, 480 bp, Homo sapiens
cgctaacagtggacttttcatcagaaatgctacaagccaaaagagattggggcctgtactgaacattcttaaaagaaattccaaccaagaatttcatatctagccacactaagcttcataagtgaatgagaaataagatccttttcagacaagcaratgctaagggaattcactaccattagacctgccttagaggagatccttaaggaagtgccaaatatgaaaaaggaagtccattaccaaccaccacaaaaacagacttaagtaatagaccattgacagtataaagcaaccacgcaatcaaatctgcataataaccagctaacaagacaatgacaggatcaaatccacacataccagtattaaacttgaatgcgcacaggttacatgccccaattaaaaggcacagagtggcaagttggagaaagaagcaagatccaactgtatgctgtctacaggagacctatatcacacgcagtg

SEQ ID NO: 564254 - DNA, 588 bp, Homo sapiens
attacagtaagctgagatggcaccattgcactccagcctaggcgacacagcgagactccatctcaagaaaaaaataaaaataaaaagatagctagaagagagagttttaaatgttatcagaaagaaatgataaatgtgtaaagttttgaatatgctaattactttgatcagtatacaatgtatacatacactgaaacatcacaactgtaccccataattatgtataattattatgtgtcaattttaaataaaatttcaaatgagtttgtattacaactgaatattaaagccgggggaaaactaattctagaggaaatagtttctagtcataagcaaggggaagtcaaagaaaaatcctccaaaatgacactcactttgaaatttaaaatatcccttatattctgtgggcttagtatatcatcctcttcacattcatatcatttgaggaatgcaaggtgttcaccactgaaaggaaatctcatctcmtaaatttaaaagcagatgattcagagaatgatgtgcatgttgccaaatgttttttaaaaaggactacttaaaatgtttctaaaattttgatgttttcctaga

SEQ ID NO: 564255 - DNA, 632 bp, Homo sapiens
ataggtgtatatcctgcagtggatcccaaaggtgtgacagccagagggagttaaccaaccacactcctcctacaggttctctcttcataacatgtctgattagcacgcctccatagctgatgcgctcattcattagcagatttttcactttggctcccaaagtaaatctaattgtgcacaaagacattcctaaaacaaagagatttagaaaagttgaaaataaactgatggaccaagctgtatctgggaaattcaacaaaagatgcagggatcataatcctaatttctgatgtcatttaattcrgcaaaaataaataaaataaatgactcaagatgatactttacaacactaaagagtgttggaaagagtacatagctgaatttacataatacagctacagtagagcacataggaaaatttgttgtcttaaaactcacatcaattttttgaaactttaaaaaagatgttaaaatctaaagattagaaaaaatacagaactattaaaaataaaagcagatattcttgatttagaatcgtaagatctttcttattttataaaacatagagcactaacaaacctcatcaaaaaggaaatagtataaaatataaaataagaaatgaagagtgagaa

SEQ ID NO: 564256 - DNA, 632 bp, Homo sapiens
ataggtgtatatcctgcagtggatcccaaaggtgtgacagccagagggagttaaccaaccacactcctcctacaggttctctcttcataacatgtctgattagcacgcctccatagctgatgcgctcattcattagcagatttttcactttggctcccaaagtaaatctaattgtgcacaaagacattcctaaaacaaagagatttagaaaagttgaaaataaactgatggaccaagctgtatctgggaaattcaacaaaagatgcagggatcataatcctaatttctgatgtcatttaattcggcaaaaataaataaaataaatgactcaagatgatactttacaacactaaagagtgttggaaagagtacatagctgaatttacataatacagctacagtagagcacataggaaaatttgttgtcttaaaactcacatcaattttttgaaactttaaaaaagatgttaaaatctaaagattagaaaaaatacagaactattaaaaataaaagcagatattcttgatttagaatcgtaagatctttcttattttataaaacatagagcactaacaaacctcatcaaaaaggaaatwgtataaaatataaaataagaaatgaagagtgagaa

SEQ ID NO: 564257 - DNA, 606 bp, Homo sapiens
caggggtcaacgatgtcttgaactctactctaggcatgcaccagtggtgacttttatgtgcagaagactctggcacacaggctatatctgatccagaaaggcattgcattttcactgtgttcaggagttttccttttaaaaacaataattctggcaatatagggcctctatttcctctgtggtgaagaatgagtgcttcagtttgccagaattccccacccagcctgcttctctcatttaagtttgccgagctcctatgtcttattcatacctttttttgtccttgacttaagatagttagasatccaagtgccctagcatttttttttcctttcacccatataacctagttggtaaaagattgttacaaagattgatttgaaaataagaatgtgtatgtataatgattaagttacaagatatcaatcattatgttggaaattaaggcaaagactggacaaaaacttacaaaagaatggttaaatacaatatgagatatccatcacatccaatacatcacagccttaaaatgatttttgcaaagaaacatttgttgtcaggaaaagttattcttgaaatactgttgaatgaaaggctaccaagaac

SEQ ID NO: 564258 - DNA, 453 bp, Homo sapiens
tgtgacttcaaagtatactataaacctatactaaccaaaacagcgtagttttgccattaaaaacaaatgcatagacaaatggaataaaatagctgaaaattaaattcatgcaggtctagccaacctatttccaacaaaagtgccattaacacacactggggaagagacagtcttttcaatacatgtcytgagaaaactggatagctacatacacaaaaatatgactagacccctacctctcaccatatttaaaaaatcagctcaaaatggattaaagacttaaatgtaaaacccacggctatgaagctactggaagaaaacttaggataaatgctttatgatactggtctgggcaaggattcttaaaataggaccttaaaaacacaagcaacagaagcaaaaataacaaatgggattacatcaaactaaaaagtttttgcacagcaaaggaaa

SEQ ID NO: 564259 - DNA, 414 bp, Homo sapiens
ttctcaactactaaaggaaacaaggtacatacgcagatgtctaaaatataaggtatgggccgggcgcggcacstcacgcctgtaatcccagcactttgggaggccaaggtgggcatatcacctgaggtcaggagttcgagaccagcctggccaacatggtgaaacgccacctctactaaaaatacaaaaattatctgggagtgcttgtgtgtgcctgtaaacccagctactcaggaggctgaggcaggagaatcacttgaactcaggaagcggagattgtattgagttacagtgagccaagattgtgtcactgcactctaggctgggcaacagagtaagacttcatctaaaaaaataataataaaataaaataaaatataaattaagacttgttaaataatataaaagtgattc

SEQ ID NO: 564260 - DNA, 697 bp, Homo sapiens
aaataaatcagaaacaattttattatttcaataagaaattcaacaaagacagatatcataaaaatgaacaaaacagaaatttgaaaagtgaagaattcaaaagataaaataaaaaaatacagttgaaagcttccacaatcatctawatcaagaagaaaacaattctaaatgtgaagacacgtcttttaaaataacccagtcagacaaaaataaaaaaaaatgaagaaagcctacatgacatgtgggacattataaagcacccaaatactctattttggggagttccagaagaagagataggcaaaagcatagaaaacttatttaatgaaataatagctgatagcctccaagtcttgctagagacagaaacattcagatatgggaagctcaaggaaagcccaaatagattcaactcaaaaaggttttctacaaggcacaccgtcaaaaatcaaagacagaattctaaaaatagtaatagggtcaagttacatataaggtagttcccagcatactaacagtgaatttctcagcagaactttataggccaggagagcacaggatatattcaaagtgctgaaagaataaaagctgccagccaagaataccatacctaccaaagccaaccttcagaaatgaaggagaaataaagtctttctaagacaagcaaaacctgagggaattcataaccaccagaatg

SEQ ID NO: 564261 - DNA, 586 bp, Homo sapiens
tacattcactttggtgatgtattttccttttatttttagttgacatgtaattaytgtatatatttataaatacagagtgctattttgatacatgtaaaaaatgtgtaatgacaaagtcaggataattaatatatccactacctcaaacatttatcattttttatgtgctttaaacattcaacattctcttttctagctatttgaaaataaacactaaatcattattaaccacattcaaccttcagtgcttcagaacactagaacttaatcctcttatctagctgtaatgtatctgttaactaacttctctctatcctttcctcccaagcttttcagactcttataagcacaatgctactctctacttctataagtgcaatttcttttatcccccagatagacgtaagagcatgtgatatttatctttgtgttgactcgcttatctcagttaacataacgtcctccagacttatccatgttgccatgaatgacagaatttcattcttttttatggctgaatagtattccattgtatatgtacaatggaatgttttatgtatatatatacacacacacacacttttta

SEQ ID NO: 564262 - DNA, 586 bp, Homo sapiens
tacattcactttggtgatgtattttccttttatttttagttgacatgtaattactgtatatatttataaatacagagtgctattttgatacatgtaaaaaatgtgtaatgacaaagtcaggataattaatatatccactacctcaaacatttatcattttttatgtgctttaaacattcaacattctcttttctagctatttgaaaataaacactaaatcattattaaccacattcaaccttcagtgcttcagaacactagaacttaatcctcttatctagctgtaatgtatctgttaactaacttctctctatcctttcctcccaagcttttcagactcttataagcacaatgctactctctacttctataagtgcaatttcttttakcccccagatagacgtaagagcatgtgatatttatctttgtgttgactcgcttatctcagttaacataacgtcctccagacttatccatgttgccatgaatgacagaatttcattcttttttatggctgaatagtattccattgtatatgtacaatggaatgttttatgtatatatatacacacacacacacttttta

SEQ ID NO: 564263 - DNA, 586 bp, Homo sapiens
tacattcactttggtgatgtattttccttttatttttagttgacatgtaattactgtatatatttataaatacagagtgctattttgatacatgtaaaaaatgtgtaatgacaaagtcaggataattaatatatccactacctcaaacatttatcattttttatgtgctttaaacattcaacattctcttttctagctatttgaaaataaacactaaatcattattaaccacattcaaccttcagtgcttcagaacactagaacttaatcctcttatctagctgtaatgtatctgttaactaacttctctctatcctttcctcccaagcttttcagactcttataagcacaatgctactctctacttctataagtgcaatttcttttatcycccagatagacgtaagagcatgtgatatttatctttgtgttgactcgcttatctcagttaacataacgtcctccagacttatccatgttgccatgaatgacagaatttcattcttttttatggctgaatagtattccattgtatatgtacaatggaatgttttatgtatatatatacacacacacacacttttta

SEQ ID NO: 564264 - DNA, 588 bp, Homo sapiens
tggtaactggtgattggaaagtttatatatcttcctttgtaacacatacatttggacaggtatacaatatgtcacaaagcttccaactcacacgcaacaaaatgcaatcatcaatactcatccatttatgataaaaacttaaaaaaacttctctaaaaacttgcccagtttcagaacagatcagttactttagaaatagccatccagtctacagccataccatcctgaacatgcccaatctcatctgatctcagaagaaacagccatccacgtgtcacggaaagtgtcatcaatgtactgtattaaaactaattaaactagttttggccaggygcagtgacttatgcctgtaatcccagcactttgggaggccaaggcgtgtggatcacgacgtcagcagatggagaccatcctggctaacatggtaaaaccctgtctctattaaaaatacaaaaaattagccgggtgttgtggcacatgcctataatcccagctactcgggaggctgaagctggagaatcacttgaacctgggaggcagaggttgcagtgagccgagatcgtgccactgccctacagcctgggcgac

SEQ ID NO: 564265 - DNA, 540 bp, Homo sapiens
gttgctccccatttgccttccgccatgactggaagctttctgaggcctccctagaagcaataactactatgcttctgtacagcctgcagtactgtgagccaattagacttcttttcttyatacattacctggtctcttatagcagtacaagaatggactaatacagcaactaacaccattcaacgtataatttgtgtatgtatgcgtttgtttgtatatgaatgtatgtatgtatgagactggtgcaaaagtaattgtggtttttaccattactcttaatggcaaaatatgtatatgaatgtatgtacatatgtacatactgtatataaatgtatgtatgagattggtgcaaaattaattgaggttttttccattacttttaatggtgggggtaaatctggtggatagagtgatatatatatatatatacatatatatatacatatatatatatatacacacacacacacacacacacacatatatataatgagtatttttgttcattgtatccatacattcatctattcatcaattatg

SEQ ID NO: 564266 - DNA, 540 bp, Homo sapiens
gttgctccccatttgccttccgccatgactggaagctttctgaggcctccctagaagcaataactactatgcttctgtacagcctgcagtactgtgagccaattagacttcttttcttcatacattacctggtctcttatagcagtacaagaatggactaatacagcaactaacaccattcaacgtataatttgtgtatgtatgcgtttgtttgtatatgaatgtatgtatgtatgagactggtgcaaaagtaattgtggtttttaccattactcttaatggcaaaatatgtatatgaatgtatgtacatatgtacatactgtatataaatgtatgtatgagattggtgcaaaattaattgaggttttttccattacttttaatggtgggggtaaatctggtggatagagtgatatatatatatatatacatatatatatacatatatatatatatacacacacacacacacacacacacayatatataatgagtatttttgttcattgtatccatacattcatctattcatcaattatg

SEQ ID NO: 564267 - DNA, 577 bp, Homo sapiens
atattatttgcagaaaagtctaaagcagtgccacttacagtgtgatccctgcactggcttgagccacattgtcaaccagctacattattaagcacgttgtacagttcagctgtctttttttctgggtagcaagactttctcaatgaaggaagcaatggttgacttacattctggtgcatactccataccttacgtggacctgcaatgaatatattgacaactggctactttgagttttcactgatctaaggcacaaataaggtgattttctaaagtctcatattaaatattataaacaggattagatttcaagtctttcatttttttttttactctgtggcctaacstagtgtgaagtcttagttcacatccttgaattgatttgatttcttattattcaagaagtgaattattcactcttactctgtacatttcactggctgttaaacctttactttaaaggttttggaaattactacacattaaaaaaaagaagaagaagaaatgaagataaaacctttaaaggttttggaaattactacagatttaaaaaaagaagaagaaatgaagataaaac

SEQ ID NO: 564268 - DNA, 572 bp, Homo sapiens
ttttgccttttttgggaatgtcatgtagktggaataatatcatatgtgggctttcagatgggcttctttcacatagcaatatgcatttcagtttcctccatgtcttttcatggcttgatagctgactttttttagtgctgaataatattcaattgcttggatgcatcacagtagatttattcacctactgatggacatcttggtttcttccaagttctggcaattgtgaatgaaactgctgtaattgtccatgcgcatgtttttgtgtggacgtaaattttccactcttttgggtaaatactaaggagtacaatggccgaatcttatggtaagagtatatttagttttgtaagaaaccaccaaactgtcttccaaagtggctctacaatttttccttcccactagcagtgaacaagagttcctgttgctccacatccttgacagcatttggtgttgacagtgttctggattttagccattctaataggtgcatagcggtatctcgttgttttaacttcatttccccgatgacagatgatatggagcatcttttcatctgctttactgccatc

SEQ ID NO: 564269 - DNA, 545 bp, Homo sapiens
cacgagtttatttttgtgtcactgagttggcttgtattggatcaggacttttacaaaaacagctataagacctgggtcagatagcgaagggaaactgctgacatcggtgaataagcataagacaaggcatgcaggcagatcctggagggagtagtcactcggggaaaatcatctgcatgggtcaatttcccatttttgaaagtttcrtaaggtgggcaggctgaagttgcacagtgtagaaaatccaatagtctttcttgaagaataagggaacagatgtgactccacatcaagaataaagatcatcaatgaagaccaatgctgaaattgtccagacaagaattgtaaagcagaactacattaatggaataaaggagaaatgccacctaaatcttttaatagacaaagtattaggccaaaggtaacatctacttaggatataaactcccagcaaactaggaatagaagaaaacttcaacatgttaaaatagtgcccaagaaaaaaaagtctacagctcatacttaatggtgaaagaattgatttt

SEQ ID NO: 564270 - DNA, 545 bp, Homo sapiens
cacgagtttatttttgtgtcactgagttggcttgtattggatcaggacttttacaaaaacagctataagacctgggtcagatagcgaagggaaactgctgacatcggtgaataagcataagacaaggcatgcaggcagatcctggagggagtagtcactcggggaaaatcatctgcatgggtcaatttcccatttttgaaagtttcgtaaggtgggcaggctgaagttgcacagtgtagaaaatccaatagtctttcttgaagaataagggaacagatgtgactccrcatcaagaataaagatcatcaatgaagaccaatgctgaaattgtccagacaagaattgtaaagcagaactacattaatggaataaaggagaaatgccacctaaatcttttaatagacaaagtattaggccaaaggtaacatctacttaggatataaactcccagcaaactaggaatagaagaaaacttcaacatgttaaaatagtgcccaagaaaaaaaagtctacagctcatacttaatggtgaaagaattgatttt

SEQ ID NO: 564271 - DNA, 545 bp, Homo sapiens
cacgagtttatttttgtgtcactgagttggcttgtattggatcaggacttttacaaaaacagctataagacctgggtcagatagcgaagggaaactgctgacatcggtgaataagcataagacaaggcatgcaggcagatcctggagggagtagtcactcggggaaaatcatctgcatgggtcaatttcccatttttgaaagtttcgtaaggtgggcaggctgaagttgcacagtgtagaaaatccaatagtctttcttgaagaataagggaacagatgtgactccacatcaagaataaagatcatcaatgaagaccaatgctgaaattgtccagacaagaattgtaaagcagaactacattaatggaataaaggagaaatgccacctaaatcttttaatagacaaagtattaggccaaaggtaacatctacttaggatataaactcccagcaaactaggaatagaagaaaacttcaacatgttaaaatagtgcccaagaaaaaaaagtctacagcwcatacttaatggtgaaagaattgatttt

SEQ ID NO: 564272 - DNA, 513 bp, Homo sapiens
tgtcatcagttttaaataacctgttacaaccataaaaagtctttgtaagtctcatggtaaccacaaagcaaaaacctatgcactaaaaataataattaggaatcaaaacatacgactaaagaaaattagccmcaaaggaagatagtaagagagacagaaagcaaaaaaggatccacaaaacaactagaaaacatgtaacaaaatggcaggagtaagttcttacaatcaataattaccttgaatataaatgaactacattatccaatgaaaagtcataaagtagctgaatttaaaaaaaaaaaaaaaaaacaaggcccaacttacacagccaacaagaaacccacttcatctataaggatacatgtacaatgaaagtgaagggatggaaaagatgttctacccaaatggaaaccaaaagagagcagaagtagctatagttatattggataaaatagattgtaaatttaaaacttaatttttatttaagtaaaaatgagacaaaggaggtcatta

SEQ ID NO: 564273 - DNA, 513 bp, Homo sapiens
tgtcatcagttttaaataacctgttacaaccataaaaagtctttgtaagtctcatggtaaccacaaagcaaaaacctatgcactaaaaataataattaggaatcaaaacatacgactaaagaaaattagccacaaaggaagatagtaagagagacagaaagcaaaaaaggatccmcaaaacaactagaaaacatgtaacaaaatggcaggagtaagttcttacaatcaataattaccttgaatataaatgaactacattatccaatgaaaagtcataaagtagctgaatttaaaaaaaaaaaaaaaaaacaaggcccaacttacacagccaacaagaaacccacttcatctataaggatacatgtacaatgaaagtgaagggatggaaaagatgttctacccaaatggaaaccaaaagagagcagaagtagctatagttatattggataaaatagattgtaaatttaaaacttaatttttatttaagtaaaaatgagacaaaggaggtcatta

SEQ ID NO: 564274 - DNA, 524 bp, Homo sapiens
tcctatcacacgaagtgatatgatacaatcaaagaaaattaagggaagacaccaaagacagaaatacataaaagacaatgctaaggtaattataaaaatggcaacagaaagagttctgtggaaagattcactctctggtcaggagataatttagaaataaatgttgaggaaggacttgattttttgaaacaaagtgattttggagggatcaggaaaagaaacgtagactagtatgaataaatgataagacttgggagtgagaaaagtaggaaaaagaagtaggcaacttgagcatcttcatatttgtgtttgtcaaagtcactaacaggaatatctaatagattggtttctgagactaacctgaataaaatagcacccagtgtgtccaccaggctgacgtaggtttctgctttgggggtgactcttaaatctattgtttagccatcccctagaacggtagaggctagatttctcattttataactatgycatgtaggaaggaatcaatatcaattttgaaatgg

SEQ ID NO: 564275 - DNA, 588 bp, Homo sapiens
ctcaggggaattcaaaggctgtattaatgctaaaattccatttttatttttgcatagtaattgcttgttaaaataaaaaaacagattatgatatataatttgaaaaaaataattrttctcaatcactgagctggattgacgaatgcttgcttttatctcttgaattttgggtatctcttaatttattaaaaatatgtgtgttttgatatttacttatcatctcatggtttaatatcacaaaaactgtttttttaaaaataacctttgttcattagcattagattcattaaaccaatctcaactgtgtgcttgaattatttctatgctcctaaaaaagtataataatgcaatgtaactgcctgatgggttctctctgtccactgcacaaataccatggcattgcagtaaaaaagagtttaactgatgcaaggctaatcatgtcaaatgggagatagagttattgctcaaataagtcacctagaggttttgagggtaggagtttttcaaagacagcttggtgggcagggagctagggtaatggcggttctgattgggtcaaagatggaatcatagggaagtcgaagctgg

SEQ ID NO: 564276 - DNA, 557 bp, Homo sapiens
cacaatcaaagtgtcatgttgtcaggttgtggtgagggccctcttttgggtgtagattgctaacttttctgtatgtgttcacatggcagaaagarattgagctagctcttggatcctttcttataagggcaccaatcccaatacagaggcttcactctcatgacataattgtctcccaaagactctacctccaaatattatcaatcacattaggggatagattttaacacatgattttggggggaacacattcagtccataacatttcttgagtcttcttctaggacccataggttattttaaaagtggcttgttcagttccaagtgtttgaagattttttttttctgttatctttaacttactgatttctagatagaccccattgtgctcagagaacactccttatgtgatttcaattattttaaatttgttgagattttatgacttagtatgtcatctgtcttggtgtgtattctgtgggggggatggggggtgcttgaaaacgggtattctgctattatagaatgtcaaaatatcaactgtaataaacaagaaa

SEQ ID NO: 564277 - DNA, 597 bp, Homo sapiens
tgtaggttgctgttctatactggatcagacagaggcaggaatgaaacggcagggaataaatattttgtttctcaagtcttaaaatgactaaaacattagagagagaaaaaaaagtatatgcaaaygaaccttccctatcaagtttggaatctgagtcccttgacaggtttctttgacaaatttttatagaacactgacttggaattttgtatatacctatattgtcaatccctgtagaaatattctcaaactatcaacacctatgcatatgcaaatctcacctttccttcaaactacagcataaaagccattaagcctccctttgttctttgaagctggaaattctaaataacttgtctaaactcagtgggttcttcatctgtgtgtctcccaggagcacatgcctaagaaaatgttggcaagaagaaaagagacattattataccattaaaacagagtatagggaagaaagataaaattacctatatgcttgtcctaaaacattagctgttaatattttggtttattctcttcactatgttttcaatgtttcaaagatatatattattttacacaattaaaattaacttgtaaaaa

SEQ ID NO: 564278 - DNA, 506 bp, Homo sapiens
ctctttgtgtcttatttatttatttatttttttgagacagagtcttgctttgtcgcctaggctggagtgcagtggcacgatctcagctcactgcaacctccacctcccaggttcaagcaattctcctgccccagtgtctcgagtagcaataaatctctctctcttcctttttttttgagatgcagttttgctctttttgcccaggctggagtgcaatggcgtgatctgggctcaccacaagctccacctcccaggttcaagcgattctcaggcctcagcctcccaagcagctgggattacwggcgcatgccaccacactcagctaattttttatatttgtagtagacgcagggtttcaccatgtttgctaggctggtcttgaacttctgactttaggtgatccaccggcctctgcctcccaaagtgctggaatcacagttgtgagccactgtgaccagcaatatctctttttaatagtggagtatcaatgggtactaagagtgtgg

SEQ ID NO: 564279 - DNA, 506 bp, Homo sapiens
ctctttgtgtcttatttatttatttatttttttgagacagagtcttgctttgtcgcctaggctggagtgcagtggcacgatctcagctcactgcaacctccacctcccaggttcaagcaattctcctgccccagtgtctcgagtagcaataaatctctctctcttcctttttttttgagatgcagttttgctctttttgcccaggctggagtgcaatggcgtgatctgggctcaccacaagctccacctcccaggttcaagcgattctcaggcctcagcctcccaagcagctgggattacaggcgcatgccaccacactcagctaattttttatatttgtagtagacrcagggtttcaccatgtttgctaggctggtcttgaacttctgactttaggtgatccaccggcctctgcctcccaaagtgctggaatcacagttgtgagccactgtgaccagcaatatctctttttaatagtggagtatcaatgggtactaagagtgtgg

SEQ ID NO: 564280 - DNA, 369 bp, Homo sapiens
tcaaatgaataaataaacaaagaaaaattggacgataaaatgaatattgcagtggcagccctggaaagagcactgaaatgaagattgaggataatgtttatcaaatatataattataaatgtacctgtctgataccttccacagaatacaarttctgtttgtattcttagttgtatagtatttcatgcagttatcctttatatgcatgtgtatttaataaaaaagtaagtttgcattgcaattcttccacatgcttcctaaaaatttacattttccaaccataatatcactattttgacaacaggttctatcaagccccaatcttttatacttgtatggctccagataactgctgaacataattagaaa

SEQ ID NO: 564281 - DNA, 357 bp, Homo sapiens
tggaattcaaggttacaatgagctatgatcacaccactgcactccagcctgggtgacagagtggagaccttgtctctaaaaaaaaaaaaaaaaactaaaaaagaatatttaaaggtttgtccatgttttacctaaataattttacataccaccagtggccctttgactgctttggtgttcataaagcaccttcatgttcrtggtcattttagatcctttcagtgacccacaaagatgtgcagaattatccccattttacagatgggagaactgaagctcagagaagtggcatcccaaagaatacaaatcacaggtagttaagccaggtcgcaaccctggtcttctattctatatgta

SEQ ID NO: 564282 - DNA, 549 bp, Homo sapiens
ctaaactttaaaaagttatttgtataatatgatattaaaaaatgcaaaattgaaattaagaaatatttagatctctctaacataattttcaaaaatagtaaattgttattttagtaaactcttacatagtcatacataaataatatttattgtgggaagtgggtctgtttttatgtttaccacgagggaaacattaatataaaaatgttgtcgatcgctgtcaagctaccttyctatgtccatgcttttattcagcaaagaaaacgatgcatatctttacaacttgttcaaggccatcatattttagttctctaaactcttcataaaagaacagatttagttaagcatggtgttagcttgttagaatttaggaatgaaattctatggcttcattcagaggagccaagcatgatcattcaaaaaataaaaaaggtcaattttattcttaaaagtaataacaggaataagataaaaatgccattataaatgttttgcatgtgaaaaatatagaaataaaagtatatcataaagtgagtaatgaggcaagtg

SEQ ID NO: 564283 - DNA, 625 bp, Homo sapiens
ataaaatggtcagaacctcatcaaatacatgttttttgaaaaataaattttaacttaatcccgtttgattgaaatcacacctatgcttggtcctctagtggaaaaaagcgcttgccttcagctaagggtattgctaagactgggaaacaatttttttttwattttgtttttgttttctttgttttttgttttgagacagtctcgctctgtcacccaggctggagtgcagtagtgcgatcttgactcattgcaacctctgcctcccgggttcaagggattctcccgcctcagccttcccagtagctgggattacaggcgcttgccaccacgcccggctaatttttgtacttttagtagagatggagtttcaccatgatggcctggctggtctcgaactcctgaccttaggtgatccacccgcctcagcctcccaaatgcctaatgaaatgaggtttttaaactccgcagttatgtaggcagatccccacttaggtcagtattgagaattgcttctttagtattaacaacttacacttggttaaatgtcttattacatttgtgtcttggcagaaatagaagtttattctacatccgtaattttcccagtaaggaaaatttcttttcc

SEQ ID NO: 564284 - DNA, 625 bp, Homo sapiens
ataaaatggtcagaacctcatcaaatacatgttttttgaaaaataaattttaacttaatcccgtttgattgaaatcacacctatgcttggtcctctagtggaaaaaagcgcttgccttcagctaagggtattgctaagactgggaaacaattttttttttattttgtttttgttttctttgttttttgttttgagacagtctcgctctgtcacccaggctggagtgcagtagtgcgatcttgactcattgcaacctctgcctcccgggttcaagggattctcccgcctcagccttcccagtagctgggattacaggcgcttgccaccacgcccggctaatttttgtacttttagtagagatggagtttcaccatgatggcctggctggtctcgaactcctgaccttaggtgatccacccgcctcagcctcccaaatgcctaatgaaatgaggtttttaaactccgcagttatgtaggcagatccccacttaggtcagtattgagaattgcttctttagtattaacaacttacacttggttaaatgtcttattacatttgtgtcttggcagaaatagaagtttattcyacatccgtaattttcccagtaaggaaaatttcttttcc

SEQ ID NO: 564285 - DNA, 317 bp, Homo sapiens
ctcccagcactttgggaggctgaggtaggtgaatcacttaagctcaggagtttgagaccagcctgggtaacaaggcagagccccatctctgcaaaaaaaaaaaaaaaaaaaaaaaaaaaagaaaggaaaaacactcagccaggtgtggtggcacttgcctgtagtccctgctacaagggaggatggcttgagcttgggaggttgaggctgcagtgagctgagttcgtgccactgcattccagcctgtcttaaaaaacaaaaraaaagaaagctccctggggctctcacctctctcattcatccaggctttccccagt

SEQ ID NO: 564286 - DNA, 317 bp, Homo sapiens
ctcccagcactttgggaggctgaggtaggtgaatcacttaagctcaggagtttgagaccagcctgggtaacaaggcagagccccatctctgcaaaaaaaaaaaaaaaaaaaaaaaaaaaagaaaggaaaaacactcagccaggtgtggtggcacttgcctgtagtccctgctacaagggaggatggcttgagcttgggaggttgaggctgcagtgagctgagttcgtgccactgcattccagcctgtcttaaaaaacaaaagaaaaraaagctccctggggctctcacctctctcattcatccaggctttccccagt

SEQ ID NO: 564287 - DNA, 592 bp, Homo sapiens
ctggtcttgaactcctgacctcaggtgatccacccgtctcagcctcccaaagtgctgggattacaagtgtgagccaccgtgcccagcctaatttttaatttaaagagtatattctcttgttagatacatttaaaaagctcttctcttgttacatgcatttgctcaaaaccccagtgttgtgcttatgcattcttgcttggtcagggctcctgcactgtacaactccaggaagcaccatccacgtcatggtctgtgaatagcaaccccaggatttgtccagtgcacagcttgcaggacagtacatggagctcctggtttgaatcctggtctgctacttaccagctgtgtgaactcagggaagttttttattttctataaggctcatattcttcaactatagaaaggtagataatggtatctaccccttaggattgctgtgaggattaaatgaggtagttaagaaaatgataataattgttaggtattattgataaaaataacaaataagcttaccatttctctgatatctcagccacagagagcacaatctgtaaygttgataaaatggaacatttgcataggggaggagagc

SEQ ID NO: 564288 - DNA, 509 bp, Homo sapiens
caagaccaacaacatagcaagaccccatctctacaaaaaataaaaataaaaataaaaaaattagccaggcatggtggttgtgcccacakttccagctactcgggaggctaaggtgggaggatcgcttgaggcctggagttcaaggctgcagagagctgagattgtgccactgaactacagcctaggtaaaagagtgagaccacatcacacgcgaaaataattaaaaaacaaaaactaaaaaactaaaagcaactgatctttgagaagtgataactgcattctcaaagtacctaatctcaacaataccctaacttaaaacctgctgactaggagatgtatttgactgcaaatctggcccacacaagcaataatctgagtttccatcaaggaagctgtaacaccaagtagagcaaaaacaaatccaggcctcaaatggaaaaagcagctctgaattgtgattttcgaagaaacctgcatttcttacacttcagtgtactttccccatattt

SEQ ID NO: 564289 - DNA, 461 bp, Homo sapiens
ttttttttttgtatttttagtagagatggggtttcaccgtgttaggcaggatggtctcaatctcctgacctcatgatccgcctgcctcggccttccaaartgctgggattataggcgtgagccaccgcacccagccttcctttggtatttttttgttattgttttggtttggtttgggttgtgctaagtgtttcaattcagccagttttaactggctgttagatattagactgcaaaatactccagtcagagcagctcacctgcgcagaaaaatgagggttcagcttttagaacctaagttctttcccagagttagaggaactgcctgtgaccttgcccactccagccacctgcctgaaataatgacaagaccagcctgaccccagcttcatgagcaattgtccaaagcccctttgtgccgtagtaattgagcaccagcaggagctacaacgacctggctg

SEQ ID NO: 564290 - DNA, 463 bp, Homo sapiens
ttttttttttttgtatttttagtagagatggggtttcaccgtgttaggcaggatggtctcaatctcctgacctcatgatccgcctgcctcggccttccaaagtgctgggattataggcgtgagccaccgcacccagccttcctttggtatttttttgttattgttttggtttggtttgggttgtgctaagtgtttcaattcagccagttttaactggctgttagatattagactgcaaaatactccagtcagagcagctcacctgcrcagaaaaatgagggttcagcttttagaacctaagttctttcccagagttagaggaactgcctgtgaccttgcccactccagccacctgcctgaaataatgacaagaccagcctgaccccagcttcatgagcaattgtccaaagcccctttgtgccgtagtaattgagcaccagcaggagctacaacgacctggctg

SEQ ID NO: 564291 - DNA, 570 bp, Homo sapiens
caaaacccaaaacttttacattttattcaattttattttcwtagagacagggtctcattctgttgcccaggctggagtgcagtgagtggtgcaattatagctcactgcagccttgatctcctgtgctcaaatatcttcccaccttagcctcctgagtagctgggactataggcatgcaccaccacactttgctcaaaatccaaaacttttgagtgctgacttgatatcacaagtggaaaatttacacctcatatgatgggtcacagttaaaatgcaggtgtacaacacacggtttatttggagtccccaagggaaaaaagacagtcccagttcccttcagttgcaatgtatcttttctgcccatgcctaggttccttcacacaagcacacccacaaagggtaacaaaatgacatgtgtacaggttggatgtgccaatggcagctttcccacaatgcagtacgtggggacaaggcctgacggtgtgtgcattattcatttttttttttttaattctcttcctgtagtgaagagatgttcttgaaaatgtcaaaaaggcctgcagacacctt

SEQ ID NO: 564292 - DNA, 615 bp, Homo sapiens
aaactaatatttcctctttttaatatatttctttttgaaacagacatttcccccagatctaaacatagtaacctatttgtactgtaatgtaaaatctcctatcatttaatatttgaacagttcatagctgtgaagtttagtaattatttttgtgattcactaaatacatctcctagaaataatgaaagggggggaaatgacaatttatacagttatccaaattctgtgttcttgagttttcaggatactacataktctgttgcccctgtgtcaaaatcatctgtggattcagttgacatcccaaactttagtttgctttatgttgctgtgggcctttcacacaaaagtagaactcagagttgattgttagtagatgaacatgataaaaaagatattggtaaagagaaggactattttttgcttgttctattatcaggctaaattgttatataacctgtagtctaggttagaatttgtgtaccagtatctcaaggaaggttatatactcttttgaaatggtagaagatctgggcttaggaagggacctttagtcaaaatcacaaaagggaaagtattgtcttatttgtaagagaattttgggaaattgtaagccag

SEQ ID NO: 564293 - DNA, 298 bp, Homo sapiens
aaccaaacacacacacacacacacacacacacacacacacacacagactcaggtaggtctttcaggaggtatttcagaagaaggcattgttatcataggagatgacagctccacataggagacgacagctcyacgtgtgttactgcctctgaagaccttctagagggacaagatgtggaggtggaagacaatgatgctgatgatcctgaaatgcgtaggcctaggctaatatgcatgtttgcaccttagtttttaattaaaaaaaattaaaaagaaagaaaatttaaaaattcataaa

SEQ ID NO: 564294 - DNA, 633 bp, Homo sapiens
acctaagtattctactcccagccatctacccaaaataaatgaaaacatatgtctacatcaagttgttcatctcaatgttcatagcagcacaattcgtaatagctgaaaataggaatttatcaaaatgcccatgaagtagtgaatgaataaataatttgtgatatatttctacactagaataatgcacacaatttaagggacagaatactgatacatgcaacaagtgggataaaattccaagagattttactaagttagagaaatcagatgcaaaagactacttactamatgaattcattcgtatgaaatttaaagaggctaaactgttgaaacaaaatggatatcactggttgcctgaggcctaagagtgtgagcaacaattcactataagcctcataagagaacttattgtggtcatcctagtgttctaagaccatattattgttatgggggcacaatcacctaaacctagtaaaatgcgtcaaactatacactaacaataggtgaattttatggtgtgtaaattatatcccaataaatctgtaaagaaacaatatgtacctactgctgttgagtgtttaaaactgccagttgtataaatttgcttaatattgtttgtatcaatattcttac

SEQ ID NO: 564295 - DNA, 633 bp, Homo sapiens
acctaagtattctactcccagccatctacccaaaataaatgaaaacatatgtctacatcaagttgttcatctcaatgttcatagcagcacaattcgtaatagctgaaaataggaatttatcaaaatgcccatgaagtagtgaatgaataaataatttgtgatatatttctacactagaataatgcacacaatttaagggacagaatactgatacatgcaacaagtgggataaaattccaagagattttactaagttagagaaatcagatgcaaaagactacttactacatgaattcattcgtatgaaatttaaagaggctaaactgttgaaacaaaatggatatcactggttgcctgaggcctaagagtgkgagcaacaattcactataagcctcataagagaacttattgtggtcatcctagtgttctaagaccatattattgttatgggggcacaatcacctaaacctagtaaaatgcgtcaaactatacactaacaataggtgaattttatggtgtgtaaattatatcccaataaatctgtaaagaaacaatatgtacctactgctgttgagtgtttaaaactgccagttgtataaatttgcttaatattgtttgtatcaatattcttac

SEQ ID NO: 564296 - DNA, 444 bp, Homo sapiens
gatgatgatataatttttcrttttaattctgttaatgtggtggagatttactgacgtttgaatgttataccaattttgcattcttgcagtgaaatcaactggcttatgttgtatcacctttgttatatatagaacttggttcactaataatttatttaggttcatggttcatgttctttgttctacatctttccttatgaatgagagaaattgatctgtctatattttttaattacagtattcttaccaagtattggcatcaagtttattgaccctataaaatcaatctagaaattttcttctttcctttttttttttttgagatggagtctcgctgtgttgcccaggctggagtgcagtggcgtgatctcagctcactgcaagctccgcctcccgggttcacaccattctcctgcctcagcctcctgagtagctgggactaca

SEQ ID NO: 564297 - DNA, 483 bp, Homo sapiens
tctgtgtttttctttcaaaagaagactcaggctattgttcatgtgagggcatattcaaaataaccttctactcagttgtctctgattgtgactggaaactggataagcatccacatcctgccattaatacattagaattataggtaagagcagtgatgtggtggctaccaaatgggcagactctagaccctttccctgtataactcaagaagtagaaagtttcgtgtttcggaaagattgctgatttctgatttaaggtttgaaaaatacyaaccattagatattatattctaggtgggctgaaagaggtgtctacatattagtgcctgtcacatacacagccattttttatttttatttatttatttattgagacgatgtcttgctctgttgcccaggttggagtgcagtggtgcaatctcggttcactgcaacctccacctcctgggttcaagcgattctcctatctcagcctcccaaata

SEQ ID NO: 564298 - DNA, 590 bp, Homo sapiens
aagatgattttttaatgaagatgattttttaaaattattattaaatataaattttaaatttattcttaagtattwagttgatgatgtgaagtttatgtccatagtaactgcaaggtagtctgaattatatgacatctagaattgtgtaaaataaaatattttacattctgtaagatgtttattatactaacatcatcataccatttacattctttgatttttaatcaaaccagtttaaattcagcagtgttctactttaatatattatttttatctgtgtttaagttttgttcatggtgggttaacatttgaaaaaatgctgtggttaacaagaaacttttcagcttttataaatattttacccgtgtgatttttttcaaagattttaacattcaaccaccatgcagtgattatatacataaagatcatgagttccagcctccaaaagcaaatcagacacttagtaaaatgagtacataaacttaaaattaagtgggcaacatgtccagaaaacagatcagatggcaaccatgactaaacaaaaacaaattctccaaatgagtatctcagagaacctaaagtgtaagatg

SEQ ID NO: 564299 - DNA, 607 bp, Homo sapiens
tttatgtccatagtaactgcaaggtagtctgaattatatgacatctagaattgtgtaaaataaaatattttacattctgtaagatgtttattatactaacatcatcataccatttacattctttgatttttaatcaaaccagtttaaattcagcagtgttctactttaatatattatttttatctgtgtttaagttttgttyatggtgggttaacatttgaaaaaatgctgtggttaacaagaaacttttcagcttttataaatattttacccgtgtgatttttttcaaagattttaacattcaaccaccatgcagtgattatatacataaagatcatgagttccagcctccaaaagcaaatcagacacttagtaaaatgagtacataaacttaaaattaagtgggcaacatgtccagaaaacagatcagatggcaaccatgactaaacaaaaacaaattctccaaatgagtatctcagagaacctaaagtgtaagatgcccagagtggaagatggcattctgtgccttcgaaccaatactacaccatttgtaacaattaacaatgtatgagagatgaatggccttgacgtaatcatattaatcttg

SEQ ID NO: 564300 - DNA, 607 bp, Homo sapiens
tttatgtccatagtaactgcaaggtagtctgaattatatgacatctagaattgtgtaaaataaaatattttacattctgtaagatgtttattatactaacatcatcataccatttacattctttgatttttaatcaaaccagtttaaattcagcagtgttctactttaatatattatttttatctgtgtttaagttttgttcatggtgggttaacatttgaaaaaatgctgtggttaacaagaaacttttcagcttttataaatattttacccgtgtgatttttttcaaagattttaacattcaaccaccatgcagtgattatatacataawgatcatgagttccagcctccaaaagcaaatcagacacttagtaaaatgagtacataaacttaaaattaagtgggcaacatgtccagaaaacagatcagatggcaaccatgactaaacaaaaacaaattctccaaatgagtatctcagagaacctaaagtgtaagatgcccagagtggaagatggcattctgtgccttcgaaccaatactacaccatttgtaacaattaacaatgtatgagagatgaatggccttgacgtaatcatattaatcttg

SEQ ID NO: 564301 - DNA, 232 bp, Homo sapiens
ctggaggagtcagcttcccgtgtcacagaagagggtacagagaagtggggaattaataytggggatgaaaggggttatacaaattgagaagaagcaacataataaactagttagaatacccataagaatcaggagttagtattggtttttgacttaaattagaaagaatttttcttcatctttcttcctccttcctttcttattcatttatttatattgtttgtttactgca

SEQ ID NO: 564302 - DNA, 614 bp, Homo sapiens
agaaataaatcaacaaacatacagccaactgattttcaccaagaatttcaaaaatgcaatggggaaaggataatctctttaacacatggtgttggatcacaggacatccatgtgcacaasaataaaattggattcatattttacaaaatacacaaaaatcaactccaaatagatgaaacatttaataatacccgaaactataaaactcctaggataagaaaggaaaaagtttcatgacattggtcttggcaatgattttttttttaatatgacacagaaagcacaagcaacacaagcaaaattagacaaatggtactagataaaaccagaaagcttctgcacagcaaaagaaaattaacagtatgaaaaggcaacctaaatactgggggaaaatatttgcaaaccacatatctgagaaaatgttaatgtttaaaatgtatagggaacttctacaactcagtaacaaaaacacaaataacttgattacaacatgggcacaaaacttgaataaaacatttctctaaagaagaatcatcaaggaaatgcaaaactacaatgagatatcacctcacgcctgttaagatggctattataaaaaaaaagataacaaatgt

SEQ ID NO: 564303 - DNA, 614 bp, Homo sapiens
agaaataaatcaacaaacatacagccaactgattttcaccaagaatttcaaaaatgcaatggggaaaggataatctctttaacacatggtgttggatcacaggacatccatgtgcacaagaataaaattggattcatattttacaaaatacacaaaaatcaactccaaatagatgaaacatttaataatacccgaaactataaaactcctaggataagaaaggaaaaagtttcatgacattggtcttggcaatgattttttttttaatatgacamagaaagcacaagcaacacaagcaaaattagacaaatggtactagataaaaccagaaagcttctgcacagcaaaagaaaattaacagtatgaaaaggcaacctaaatactgggggaaaatatttgcaaaccacatatctgagaaaatgttaatgtttaaaatgtatagggaacttctacaactcagtaacaaaaacacaaataacttgattacaacatgggcacaaaacttgaataaaacatttctctaaagaagaatcatcaaggaaatgcaaaactacaatgagatatcacctcacgcctgttaagatggctattataaaaaaaaagataacaaatgt

SEQ ID NO: 564304 - DNA, 614 bp, Homo sapiens
agaaataaatcaacaaacatacagccaactgattttcaccaagaatttcaaaaatgcaatggggaaaggataatctctttaacacatggtgttggatcacaggacatccatgtgcacaagaataaaattggattcatattttacaaaatacacaaaaatcaactccaaatagatgaaacatttaataatacccgaaactataaaactcctaggataagaaaggaaaaagtttcatgacattggtcttggcaatgattttttttttaatatgacacagaaagcacaagcaacacaagcaaaattagacaaatggtactagataaaaccagaaagcytctgcacagcaaaagaaaattaacagtatgaaaaggcaacctaaatactgggggaaaatatttgcaaaccacatatctgagaaaatgttaatgtttaaaatgtatagggaacttctacaactcagtaacaaaaacacaaataacttgattacaacatgggcacaaaacttgaataaaacatttctctaaagaagaatcatcaaggaaatgcaaaactacaatgagatatcacctcacgcctgttaagatggctattataaaaaaaaagataacaaatgt

SEQ ID NO: 564305 - DNA, 614 bp, Homo sapiens
agaaataaatcaacaaacatacagccaactgattttcaccaagaatttcaaaaatgcaatggggaaaggataatctctttaacacatggtgttggatcacaggacatccatgtgcacaagaataaaattggattcatattttacaaaatacacaaaaatcaactccaaatagatgaaacatttaataatacccgaaactataaaactcctaggataagaaaggaaaaagtttcatgacattggtcttggcaatgattttttttttaatatgacacagaaagcacaagcaacacaagcaaaattagacaaatggtactagataaaaccagaaagcttctgcacagcaaaagaaaattaacagtatgaaaaggcaacctaaatactgggggaaaatatttgcaaaccacatatctgagaaaatgttaatgtttaaaatgtatagggaacttctacaactcagtaacaaaaacacaaataacttgattacaacatgggcacaaaacttgaataaaacatttctctaaagaagaatcatcaaggaawtgcaaaactacaatgagatatcacctcacgcctgttaagatggctattataaaaaaaaagataacaaatgt

SEQ ID NO: 564306 - DNA, 551 bp, Homo sapiens
caccagtaggaaggagctgattagcatccctccttagaggtcagagtcccagctatatggtacctctcatccaagtgtgtgtgttttcaaatcacaaactcttttgttcccccctccacaggtgtggaccctgcactgactacttagtgacaacactgggtttcccttttgtcttttctgttctctagcaaaactcaattaacaatttttcgtattaaattcaatctcttaamataatggctatgtttttggcatgccgactagatcctgattggtatgtagtctatttctattaagataggcagtagtagtttagccttgaaaaaatttagcataatttctgggcttgctttaaaattattttttgcttcttttatttttgctggtacattgtaagctccagatcattaagtgcattttatacacacgaagggaactttatctgaaatacaaaagaaaatgtgttcataaagcttcagtgtaatttctagcaatagtttattgcccttcttcacagtccattacatccaacaaatttggaaacaaaagat

SEQ ID NO: 564307 - DNA, 551 bp, Homo sapiens
caccagtaggaaggagctgattagcatccctccttagaggtcagagtcccagctatatggtacctctcatccaagtgtgtgtgttttcaaatcacaaactcttttgttcccccctccacaggtgtggaccctgcactgactacttagtgacaacactgggtttcccttttgtcttttctgttctctagcaaaactcaattaacaatttttcgtattaaattcaatctcttaaaataatggcyatgtttttggcatgccgactagatcctgattggtatgtagtctatttctattaagataggcagtagtagtttagccttgaaaaaatttagcataatttctgggcttgctttaaaattattttttgcttcttttatttttgctggtacattgtaagctccagatcattaagtgcattttatacacacgaagggaactttatctgaaatacaaaagaaaatgtgttcataaagcttcagtgtaatttctagcaatagtttattgcccttcttcacagtccattacatccaacaaatttggaaacaaaagat

SEQ ID NO: 564308 - DNA, 551 bp, Homo sapiens
caccagtaggaaggagctgattagcatccctccttagaggtcagagtcccagctatatggtacctctcatccaagtgtgtgtgttttcaaatcacaaactcttttgttcccccctccacaggtgtggaccctgcactgactacttagtgacaacactgggtttcccttttgtcttttctgttctctagcaaaactcaattaacaatttttcgtattaaattcaatctcttaaaataatggctatgtttttggcatgccgactagatcctgattggtatgtagtctatttctattaagataggcagtagtagtttagccttgaaaaaatttagcataatttctgggcttgctttaaaattattttttgcttctkttatttttgctggtacattgtaagctccagatcattaagtgcattttatacacacgaagggaactttatctgaaatacaaaagaaaatgtgttcataaagcttcagtgtaatttctagcaatagtttattgcccttcttcacagtccattacatccaacaaatttggaaacaaaagat

SEQ ID NO: 564309 - DNA, 551 bp, Homo sapiens
caccagtaggaaggagctgattagcatccctccttagaggtcagagtcccagctatatggtacctctcatccaagtgtgtgtgttttcaaatcacaaactcttttgttcccccctccacaggtgtggaccctgcactgactacttagtgacaacactgggtttcccttttgtcttttctgttctctagcaaaactcaattaacaatttttcgtattaaattcaatctcttaaaataatggctatgtttttggcatgccgactagatcctgattggtatgtagtctatttctattaagataggcagtagtagtttagccttgaaaaaatttagcataatttctgggcttgctttaaaattattttttgcttcttttatttttgctggtacattgtaagctccagatcattaagtgcattttatasacacgaagggaactttatctgaaatacaaaagaaaatgtgttcataaagcttcagtgtaatttctagcaatagtttattgcccttcttcacagtccattacatccaacaaatttggaaacaaaagat

SEQ ID NO: 564310 - DNA, 596 bp, Homo sapiens
ataaggttctggtttaaaaaggaagaaaaaacatttaacaggtaataactctccatataaacccatttaacsaaaacatgacttaacccagcgtgaagtggcatgctatgcttatccttgctgcttctcttcatcacctccctaggagggtgaataattatcactggaaaaaatgagctgaaaattattgtagggaaaaattagatgtgaagttttgtaaaaaagctcttgaagcctcgaagtggtatgcttcattaaagtgaacaaaggaaaccaaagagcttgttgctttaaatagttctattatttttataaagccatttttccaccagctactttcgcccttttactgttcaaaggaatcctacaaacaagcagagcatttttatgcactcaattcaacaaatattttccaaacaatcttcacttaaataaaagttccaagggctgttagtttttgctttataaaaattaaaacaatgccatgtactatgatcaagtaagtttagggaatgatggattaaagaaagcaacccaaatacttacagccaactgatcttcgacaaagcaaacaaaaacataaagtggggaaagga

SEQ ID NO: 564311 - DNA, 573 bp, Homo sapiens
tcttcgacaaagcaaacaaaaacataaagtggggaaaggacacccttttcaacaaatggtgctgaaataawtggctagccacatgtaggagaatgaaactggatcctcatctctcaccttatacaaaaatcaattcaagatggattaaagacttgaatctaagacctgaaactataaaaattctagaagataacattggaaaaacccttctagacattggcttaggcaaggatttcatgaccaagaacccaaaagcaaatgcagtaaaaacaaagataaatagttgggacttaattaaactaaagagcttttgcacagcaaaaggaacagtcagcagagtagtcagacaacccgtagagtgggagaaaatcttcacaatgtatacatctgacaaaggactaatatccagaatctacaatgaactcaaacaaatcagtaagaaaaaaagaaacattcccttcaaaaagtgggctaaggacatgaatagacaattctcaaaagaaaatatacaaatgaccaacaaacatgaaaaaatgctcagcatcactaatgatcagggaaatggaaatcaaa

SEQ ID NO: 564312 - DNA, 510 bp, Homo sapiens
tgaatttaaaattccaatggaaaattaagtacacataaaaaggccaattttttttaaagaagggcaaaaggagaattattctcaaggtacaagaactattataaagtgatagtaattaaaatagcttggtattggctcaagaaaaatcaatattcaatcttagaacagagtccagcaacaatcctatatccagggattgatagagragacattgcaaatcagcagagaaaggatagtatattaaataaaacagactggggaaatgggctatttatttgaaaaaataaaattagaactatatgtcataccattcacaaaaataaattatagatgaaatcaaagagcattagaagaaaatatgtgtgactttgaaaggtcatttaaaatcagaggtaaaacccaaaagttataaagaaaatgatcaataacttggatcatgccatagttttaaaattctgctttataataaaattatttagcatttggcacattataacagttaaaagacag

SEQ ID NO: 564313 - DNA, 569 bp, Homo sapiens
cgatgcaaagccttgctcttccatggtatcctttgagtgagccaaacttatttagccattcccctatagttaaatagctaggatgtttccaacatctcacctttaaaacaatagtgctatgaatgtcataaatgtttgtatatgtaaatatgtaggataaatccctatcagtagaatttcaaaaggtatacgcaatcagtattttcatacatatttaaaattttccatccatacaaaggttgctaacatatttatttaaaattttaaaaataattttatatgcctcttgtaaccagtaataggatgcaaagtttttgttttaaggtaacattgctcctcttcccccattgtctctgtcatctatagtactccctraggtagttcatgttattgcaagggtgtgtatcatcccaaacatattgcttccacatacatatatcagcatacatatatatatatgtatagcatatatatatatgagcacatattaatatatgcccatgcacatacaagcatgtttttgttaatttttactgaaatggaatcatgctacatacttatgaacaaat

SEQ ID NO: 564314 - DNA, 569 bp, Homo sapiens
cgatgcaaagccttgctcttccatggtatcctttgagtgagccaaacttatttagccattcccctatagttaaatagctaggatgtttccaacatctcacctttaaaacaatagtgctatgaatgtcataaatgtttgtatatgtaaatatgtaggataaatccctatcagtagaatttcaaaaggtatacgcaatcagtattttcatacatatttaaaattttccatccatacaaaggttgctaacatatttatttaaaattttaaaaataattttatatgcctcttgtaaccagtaataggatgcaaagtttttgttttaaggtaacattgctcctcttcccccattgtctctgtcatctatagtactccctaaggtagttcatgttattgcaagggtgtgtatcatcmcaaacatattgcttccacatacatatatcagcatacatatatatatatgtatagcatatatatatatgagcacatattaatatatgcccatgcacatacaagcatgtttttgttaatttttactgaaatggaatcatgctacatacttatgaacaaat

SEQ ID NO: 564315 - DNA, 390 bp, Homo sapiens
tatttttaaaccttacagttaaatagaagggctagaacaaatatatgactgtattagaagtttggaaaaagttaagaaatgtaaataaaatratactgtttccgggaaataatattcctagttgttgctagagacaggtacagacttgggccacttcgtgaccttttatgtaaaaataagaaataactgcttttgttttttaaaaaactttgtagactgtaagtttattcccgttttttgctcggaagtaattttataaaggaatttatttttggcgtttccccacagttattcagaggctgctctgctgagaagatgaacaaatttcttgtccaaaacaatgtatttcaaacgtgccgctcgggcctttcccgtattgctcactggtag

SEQ ID NO: 564316 - DNA, 390 bp, Homo sapiens
tatttttaaaccttacagttaaatagaagggctagaacaaatatatgactgtattagaagtttggaaaaagttaagaaatgtaaataaaatgatactgtttccgggaaataatattcctagttgttgctagagacaggtacagacttgggccacttcgtgaccttttatgtaaaaataagaaataactgcttttgttttttwaaaaactttgtagactgtaagtttattcccgttttttgctcggaagtaattttataaaggaatttatttttggcgtttccccacagttattcagaggctgctctgctgagaagatgaacaaatttcttgtccaaaacaatgtatttcaaacgtgccgctcgggcctttcccgtattgctcactggtag

SEQ ID NO: 564317 - DNA, 568 bp, Homo sapiens
gcctgtaatcccagcactttgggaggccgaggctggcggatcacctgaagtcaggggttcaagaccagtcaggccaacatggcgaaaccccgtctctactaaaaatccaaaaattagccaggtacgatggtgcacgcctgtagtcccagctactcgggaggctgaggcasgagaatcacttgaacccaggaggtaaaggttgcagtgagccgagatcatgccactgcactccatgcactccagtctgggcaacaaagtgagactccgtctcagaaaaaaataaaaaaaaaaacaaaaaacaagaaagataaaagaaaactgttttttaacttaccatcaaggtaaatatcactccctaattcagcatcaacccaaaacatagaagccactgcacctgaaaatatataatattcatcaaataaaaatatttcttcacactgagaaacatgattctatccatgttttaatttgccctgataaaattaacaggtaaacacatatatcttcttatggaaattatagtgatagaagctttcactatttatagcaaaagggagttacagtgata

SEQ ID NO: 564318 - DNA, 568 bp, Homo sapiens
gcctgtaatcccagcactttgggaggccgaggctggcggatcacctgaagtcaggggttcaagaccagtcaggccaacatggcgaaaccccgtctctactaaaaatccaaaaattagccaggtacgatggtgcacgcctgtagtcccagctactcgggaggctgaggcacgagaatcacttgaacccaggaggtaaaggttgcagtgagccgagatcatgccactgcactccatgcactccagtctgggcaacaaagtgagactcygtctcagaaaaaaataaaaaaaaaaacaaaaaacaagaaagataaaagaaaactgttttttaacttaccatcaaggtaaatatcactccctaattcagcatcaacccaaaacatagaagccactgcacctgaaaatatataatattcatcaaataaaaatatttcttcacactgagaaacatgattctatccatgttttaatttgccctgataaaattaacaggtaaacacatatatcttcttatggaaattatagtgatagaagctttcactatttatagcaaaagggagttacagtgata

SEQ ID NO: 564319 - DNA, 539 bp, Homo sapiens
ttatttattagtccattcagattttctgtttcttcttcattcagtcttagtaagttgtatatttgtggaaatgtttttatttcgtctatgttatccaagttgttggcatacaaatgttcattatatgaacaattgtaatcctttgtattttagagttaaaagttgtaatttctcctatttcttttctgatcttatttgttggaatagtcttttttctagttagtctagatacggattggttgcttttgtttattgccttaaaaaaagttcagtattaattctttccatygggtttctcagatctattttatttatttccactttaatctttgctattttcttatttctgctaattcttggctttgtttctcatctagttcattgaggtataatgattgatttaactacattctataagttttggtctgttgtgtttcatttttgtgtgtcttaactttttttttattttttctgtaactcatgtgccatttatgaatattttagattttgccattttatgtatttctcaagatttcttc

SEQ ID NO: 564320 - DNA, 539 bp, Homo sapiens
ttatttattagtccattcagattttctgtttcttcttcattcagtcttagtaagttgtatatttgtggaaatgtttttatttcgtctatgttatccaagttgttggcatacaaatgttcattatatgaacaattgtaatcctttgtattttagagttaaaagttgtaatttctcctatttcttttctgatcttatttgttggaatagtcttttttctagttagtctagatacggattggttgcttttgtttattgccttaaaaaaagttcagtattaattctttccatcgggtttctcakatctattttatttatttccactttaatctttgctattttcttatttctgctaattcttggctttgtttctcatctagttcattgaggtataatgattgatttaactacattctataagttttggtctgttgtgtttcatttttgtgtgtcttaactttttttttattttttctgtaactcatgtgccatttatgaatattttagattttgccattttatgtatttctcaagatttcttc

SEQ ID NO: 564321 - DNA, 375 bp, Homo sapiens
cttggcagcttccacatggctttgagcctgtgggtgcacagaagtcaagaattgaggtttgggaaactccgcctagatatcagaagatgtagaagtttgctgtaggggtgggtccctcatggagaacctctgctagggcagtgtgaaagggaaatgtgagattggagcccccaaacagagtccctactggggcaccatctagtggagcagtgagaagagggccacygttctttagaccccagaatggtagatccatggacggcttgcactgtgcacctagaaaagccacagacactcaatgccagcctgtgaaagcaacctggagagaggctgtaccctgcaaaacctcaggggcagagctgcccaagaccatag

SEQ ID NO: 564322 - DNA, 567 bp, Homo sapiens
ctcaaactggttgatttcttwtcaacaaaatgacaagaaaatttcttctctcctggtaaatcagtagttctaatatgaagatctattgaagaattgtcaactgacagaccatcctgatgcatttgatccaggttatgttatacaaccaaagaatcagttaatttggttctttcctttcattactatgttaacttactaggcatgctgtttaactattttagcccctgtctccttgggaggctttcatttcccatgatgcacccaaataagagttcctctcaaaagtgtagccctaaattacaccacatggaaatatttgacattggcccaccacaattccttgccagtcttctcttaccacacttttgagtacaactattgacctgcattgtcaaaaaaacatgaaatgcaaaacactatacttaaaaaaaatcattgcatgtgaatactgcacttatgcagtacatgctcactttagcaccttctgctcattttgatcataacagaaacaggaatacctttccatattcacatatattcatctttaagagttcacatcatagattt

SEQ ID NO: 564323 - DNA, 604 bp, Homo sapiens
aacaaactgcatataaaaagaacattggaccgggtgcagtggctcacacctgtaatcccagcactttgggaggccaaggcgggcggatcacaaagtcaagagatcaagaccatctggccaacatggtgaaaccccgtctccactaaaaatacaaaaattagctgggcgtggtggtgcaggcctgtaatcccatctactcaggaggctgaggcaggagaatcacttgaacccggaaggttgaggttgcagtgagccaagatcgtgccactgcactctagcctgggcaacacagagcgakactccatctcaaaaagaacattgagcccaggaattcaagaccagcctgggcaacatagggagattctgtttctacaaaaaataagaaattaattgggcatggtggtgcacacctgtgaggtctcagctcctctggaggctgaggtaggaggatcacccaggaggtcagggctgcagtaagccttgatcgcaccactgcactccagcctggctgacagagtgagatgctgtctccaaaaaaaaggaacaaacttctgatgtatgcatcaatatggatgaatctcctatatgtgaaagaagctagatt

SEQ ID NO: 564324 - DNA, 612 bp, Homo sapiens
gcttttattataatagggtattggatttcttgaatttttttgtataaatgaagattatgatgtggctttcaccatttattctggtaatattatgtgttacattgatagagtgtcatatattaaaccatccttgcattcctagaataactcacttggtcatggtataaaatccctttaatatggggctgtatttgttttgctaggattttgttgaagatttgacttatatagtcacaagaatattaatctctggttttttgttytcattttatttgtgatgtatctatttggctttgatatcagggtaattctggccacatagaataaggtaggaagtattctttactcttctattttttggaagagtttgagaagcattggtattaggtcatttttattttttggtagaattcaccagtgcagttatttggctgggttttgttggttctgaagttttgattactggtttaatttcttcttatatgtcttttcagatattctttataatttttagtcaatttttatagtttttttgtttcaagaaatttgttcattacatcaaggttatctaatttgttggcatacaattgttaataatattctttaaaaata

SEQ ID NO: 564325 - DNA, 497 bp, Homo sapiens
atatgcctaagagaaaggaaaacatacatccacataaaaacttgtacacaaatgttcacagcagcattattcataatagccaaatggagtactccaaaakggagagatctgagaatcttttatataggcaaggtctggggaagcttaacaggatttcagtattttctgtacaaggttaatgcatagttgcagcaattcggtagtaggcagtgtttcttttttgggaagggtgtatttaacattccacattaagggtgtaatagtaaaggggtctcttatctcagtcaggttttttttgttttggagacagagtcttgctctgtcgcctgggctggagtccagtgatgccacttcagctcactgcaacctctgcctcctaggttcaagcagttctcctgcctcagactcccgagtagctgggactacagggcatgcaccaccatgcccagctaatttttgtattttttttttttgagacggagtcttgctctgttgcc

SEQ ID NO: 564326 - DNA, 502 bp, Homo sapiens
taacagcatgggctctgaaaatatagctgcctggtcaactctgggcttctcttcttatcagtgatgtgacattaggctacatagttaaaccctctaagcctctgcttcctcctgtgtaaaatgagaatataatatagatatgcctataggattactaggtggtctcagcgagatattacatttagcatggtgctaggtacatgattatatccttattttttattattctatttattaattattattgttaaagaactcagagtacttcacagatcatccaagctttagcaaagaataggtgacataatgactatttagctacaagagaaaatgaagagaaacatattatttgacttattatgggttacattaattaatgaacctaagtctctgggcttttccttaaacagtctgtcattcaaatattcaaactttgttttaaacatattattaaaatgaatattaaattagcttcaygactgagggaggagaatcgcttgaa

SEQ ID NO: 564327 - DNA, 591 bp, Homo sapiens
cttcttagaacctatcagagttgaactatgtttttgctytttaagtttaaaagtttcaatgaaataatccagtttctctaaaagttatagcagagttaatattttttcaaaatggatttaatccagactatgttgtcaaaacttctactgtcaaataattgaatatgtactcttttgcagggctataaaatactccactatgctctaaagtcagaaaataggtgccacaaaactaaaacatctagtgtgtacacacacacacacatcctgttttcattttcatttatctaccaccttagtaaatattacctgttttgtggaccatcaccaaccaaatattcaacaattctatccaaagcacctcgttctcgggggagaataggtcttgctaaaggtggacctggaggatgaagacctattaaataaataaatacatacaaaatttatatacatgaaatacacataaaatttaattccattaccaagaactacctatacttgttagaaattttaaaaggttttaacaaaatagcaaaatactaattcttataaatctctgaagaacattcaaattttcattaaaaatactgt

SEQ ID NO: 564328 - DNA, 384 bp, Homo sapiens
tcccagctactccggaggctgaggcaggagaatggcttgaacctgggaggtggaggttgctgtgagccgagatcgtgccgttgcactccagcctgggaaacaagagcgaaacttcctctcaaaaaaaaaaaaaaaaaaaaaaaaaaaaaaaaaaaaaaaaaagattactagttgctatggccggttctgctcatggaaaatagtgttaggagaaatggagacctaygtgatatagagaaaaggggactatacttaaagatttcaagcaaaatggtaagtttactggctaacatgaaaaagaaccaaatcatgtcctttgcagcaacacgaggcagctggaggccatcatcctaagcaaattaatgcataaaatagaaacaaaat

SEQ ID NO: 564329 - DNA, 444 bp, Homo sapiens
ttgttttttattaagcggtaaacatttttattatttttggtgagtatttcaaattatttttcaaagaatttgtattaatttacactaccagcaacaatgtgtgcctttwtattttacttttttattatttaaaatatcagacatacaaaattagaatagtgaacctctgcatacccatcacccagctttaataattatcagcatttttctgattttatttaatctgtgtcccttcatcctccaatatacaccctttcctcccaggtgtatttaaagtaaactgcaaatgttataactttttatccctaaacactttagtgtgtctccccaatagatacacacacacacacacacacacacacacacacacaggcaaaccattattgctatcactcacaattaaattaacaaccatctatgattcaattctaactggatcttcta

SEQ ID NO: 564330 - DNA, 444 bp, Homo sapiens
ttgttttttattaagcggtaaacatttttattatttttggtgagtatttcaaattatttttcaaagaatttgtattaatttacactaccagcaacaatgtgtgcctttatattttacttttttattatttaaaatatcagacatacaaaattagaatagtgaacctctgcatacccatcacccagctttaataattatcagcatttttctgattttatttaatctgtgtcccttcatcctccaatatacaccytttcctcccaggtgtatttaaagtaaactgcaaatgttataactttttatccctaaacactttagtgtgtctccccaatagatacacacacacacacacacacacacacacacacacaggcaaaccattattgctatcactcacaattaaattaacaaccatctatgattcaattctaactggatcttcta

SEQ ID NO: 564331 - DNA, 460 bp, Homo sapiens
caaatcccaccagtagcctgtttttgtaaatagttttcttggaacacagccacatccattcaattttgtattgtctatagctgcttttgcagttgctacagaaaccacasggccacaagccaaaaatatttattctctggccctttagagaaagtttatcaacccctgctctagctgagtattttacaatcattgcaaagcactagcatccataaaaaatgctcatcttggcatccataaaaatggtattcatggctgggcgtggcagctcacgcctgtaatcccagcactttgggaggccgaggtgggcggatcacgaggtcaggaggtcaagaccatctggctaacacggtgaaatcctgcctctactaaaaatgcaaaaaaaaaaaaaaaaaaaaaaaattagccgggcatggtggtgggtgcctgtagtcccagctactcgggaagctgaggcaga

SEQ ID NO: 564332 - DNA, 554 bp, Homo sapiens
tgcccagcagatggcgcagtcgtcctccttatcttcccaccctggcctaaaatcggaacaaagaccagggaagctgagggaaggtggggtagtgggcaggcctctcctagaaccccgcaaggggagacgcttcctgcaaaagaaaacctcaggccyagacccttcacctaacagaactctcctgctcaggccctgggcaacataggcagagaaggcagaagacagagcaggcagcgcaggcccacccagggcacccattcaaccctgctccccagacccagctgcagaagcccccagggtctcctcggtgcttctgaaatgccaccattagggcccattagatacaactcttccagatcaggttttgctcatggcaaccatgcaagtcccacagtcagtccacagtggaactttctacacctggacaggtggtggagccaggattcaaatttaggtctgcttagagctaagtctcagtttctcatctctaaaagggagagatggaaagtactttttcctggcaatgcagcttggaggggattcattgtacatga

SEQ ID NO: 564333 - DNA, 537 bp, Homo sapiens
tctccacattgccaaggctggtctcgagctcttgggctcaagtgatctgcctgcctcgacctcccaaagtgctggaattataggcatgagccaccatgcttggctgagtagaaacctttctataaatattgtctgcttgggtggcagtgtgtgtgtgtgtgtggtgtttggggggtaatgtgaaatgagtaaagtttgtggaaatgaaagttactgtacagttcattratgcctgttttcctataagggaaatttgaattatttagggtagaaacaggactggtgtgcagcaggctccagggaaagcagccacaccttgtgatatggttatattgttcatttaactggagaagtagggctctattgatctactcaaggagaaaaattattcttgagtacgtggtatttatttagaatgcaaatacaacatggtctacttaagtgggagctttgacaggataattataggatattaatatagattcaaaaaaccatgttctccatagtgtgactcacggttagccaactatataataa

SEQ ID NO: 564334 - DNA, 592 bp, Homo sapiens
tctgcctacatatggattcacatttcatggtataaagtataaatatccatcatttcaccaagtatgcgtcactgccaacatgattgcattgtcaatcctgactgcttgtgtcctaaatgtgaaccttcaagcccttttcttaccatctcaatccaaatcccatatattggtgtttttttattttgctataaaataatcattttctacacagttaaatatacataagagacagaccggagaatggctgtaagtgaacaaaatacacctaaggttctaggcagtctacattctactgggttttttttyttttcttttcttttttttttttttgagacagtgtctagctctctcgccagcctggagtgcagtggtgctatctcagctcactgcaacctctgcctcccaggttcaagcgattctcctgcctcagcctccagagtagctgggattacaggcatgcgccaccacacccagctaatttttgtatttttagtagagacggggcttcaccctgttggccaggatagtctccatctcctgacctcgtgatctgcccatcttgacctcccaaagtgctgggattacaggcatg

SEQ ID NO: 564335 - DNA, 390 bp, Homo sapiens
caacctgagcagccagacacacgggccccaaggcggtgaggagagggactttcaggagccaggacagctctggcccctgacatcccaaacacagatagactagagggtggcggggatatgctccagcttttggggacaccagcgacccccaggctctgtgcactgtgttggaaaggtcagagaaggcttatagcctgaccttgtgaggggcagaccagagggatggtggtgaggacggtcccctcctatccagctccttaaccctgcaggccagcgctgccaggtatttggagtagaatggagtgtgggtctcctgtgtcctggagaaaaagaatcggartgtcctggggcagatgttgggggatggagagctgaggcactggtgcttgg

SEQ ID NO: 564336 - DNA, 521 bp, Homo sapiens
tcaggactagactgtgactgaacctatccctgctaattggcaattctgaagcagttattattccagatattgctgattaaatggggagcccagaatgttcatcattctccagtcaaaactatagtaggccaggcatggtggctcatgcctgtaatcccaggactttgagatccatctgaggcrggtgtatcacctgaggtcaggagttcgagaccagcctggccaaccccatctttactaaaatacaaaaattagttgggcatggtggtgcatgcctgtagtcccagctactccagaggctgaggcaggagtattgctcgaacccgggaggtggaggttgcagttagccaagatcgtgccactgcactccagcctgggtgacagagtgagactccatcacaaacaaacaaacaaaaaaactatagtggcataatatcctgacatgttcttgacaaatctattgacttaatgtttccttcatttaatcatagacttttgggctggacaatcccttagagacc

SEQ ID NO: 564337 - DNA, 521 bp, Homo sapiens
tcaggactagactgtgactgaacctatccctgctaattggcaattctgaagcagttattattccagatattgctgattaaatggggagcccagaatgttcatcattctccagtcaaaactatagtaggccaggcatggtggctcatgcctgtaatcccaggactttgagatccatctgaggcgggtgtatcacctgaggtcaggagttcgagaccagcctggccaaccccatctttactaaaatacaaaaattagttgggcatggtggtgcatgcctgtagtcccagctactccagaggctgaggcaggagtattgctygaacccgggaggtggaggttgcagttagccaagatcgtgccactgcactccagcctgggtgacagagtgagactccatcacaaacaaacaaacaaaaaaactatagtggcataatatcctgacatgttcttgacaaatctattgacttaatgtttccttcatttaatcatagacttttgggctggacaatcccttagagacc

SEQ ID NO: 564338 - DNA, 521 bp, Homo sapiens
tcaggactagactgtgactgaacctatccctgctaattggcaattctgaagcagttattattccagatattgctgattaaatggggagcccagaatgttcatcattctccagtcaaaactatagtaggccaggcatggtggctcatgcctgtaatcccaggactttgagatccatctgaggcgggtgtatcacctgaggtcaggagttcgagaccagcctggccaaccccatctttactaaaatacaaaaattagttgggcatggtggtgcatgcctgtagtcccagctactccagaggctgaggcaggagtattgctcgaacccgggaggtggaggttgcagttagccaagatcgtgccactgcactccagcctgggtgacagagtgagactccatcacaaacaaacaaacaaaaaaactatagtggcataatatcctgacatgttcttgacaaatctattgacttaatgtttccttcatttaatcayagacttttgggctggacaatcccttagagacc

SEQ ID NO: 564339 - DNA, 582 bp, Homo sapiens
aaatgaaaagactgaaaaattagatttcataaaaataaaaatttctgcatggtaaaatataccacyagtaaaaagttggggctccggggaaggagaaacactgccaactcatttcacagatcctacagcttgtgattgatataacagtttctgtcatttgtgtaatcgagttttccatgctattttacttaaattaccaataaataccagtatttctattatggtaatactgttatcttggtagtctgaaattttgaaataaagatcattcatttgaaatgaagatcaatgattcaatttctcagtttaggaagaacacaaaacaccttccattctcccagtctgcccaggtgcaagcccatgtaaacctcaatacgcaaacttgtcttctttttcatcactgaggaatgattgggatggttccagggggatctgtgtttataagctgacaggttacagaacttctatgaacatccttgttgagcaaaactcttttctataaaattgtgaattgaacaacggtacattcacttagaaagcattcttctatgccacgacaatcctcaagagaaggaaggcaat

SEQ ID NO: 564340 - DNA, 478 bp, Homo sapiens
ggtatttttttttgcattccttttcccaggaatccttttgtattcctttgttttttccttcacttatccctctcatggtcaaaggtcaaaatgtcttcagacacaatctatgtctcatttataaataaaataaatttttaaaagtacacataaattactgctggatctcaaggataaaatggaaatgaaagcatttaagacccaagaaacaattacatgtctgaagatagtagcatagtagaatgaaatggatggctgatttacatasatgcttccactgccatgaaaattatccactgttttcagtttcctatttgacaaggtgaaatagagtgaaaaaaaagtctttattcaggtgctcaagttgcaaatttgatcattaattttgtctttatgtaaatagttaatgctaacagatgacagccctacacaaaacctggttttacagatgtctagggacttttaaaagtttgctgta

SEQ ID NO: 564341 - DNA, 581 bp, Homo sapiens
tagaatctctccgcttgtttttgtgcatcatgatgatgtctgcaggttctgggggctactctccagctcaacaacttatacatcttccttagctcttacccctctatacctcagaatgctgcattgaatacaggactttgcaattggcattggccctaatgttatgattttcttcttgttcctctaatcctcatctaccaaaataaaattttctggaagctttacttttggaatgataatattcctaggtcatatttctcaaccaatttccaccatagcacagggaacatctctttagtatgtgatttagtaaaaatgagcttgagaatttagaaaacatcttatttcttaaaggcttagkttcgaaattattgtaattccttagattcccaaagtgttagggtccagattaaagaatggatcctagcccattctaaggtccattttattctaagccatatttttaccccttaagaaacgaatgtcctttgtttaaaacataaaaattctcagaagagcatggttgaaaaggaaaatattgaatcatatgtgagaaaatattttaaatatatatcattttg

SEQ ID NO: 564342 - DNA, 415 bp, Homo sapiens
atacccacagctgccatacagtagcttcccagggtacctacagctggggttaatgttaatgtgtggcccttctactatctatattataatcaatttcagtgctgcttaaacaaacagatccatgatgcacacacactacccctccccaacacacacacaacaacagtaacaacaataatatcaacaaccatctatgaagtcaaaaacttcaggatgagacccaggagtctgcactcagctctctaagttagactgataggaaatagaaagaaacacatgttagggcgagtagttacagttcttatactgttgagtaatattctttatgatagtggtttaattacgttgatttattgattttgctgcagttcagtttgaaagtgtttgggatgaktcataaccacaaaggggctat

SEQ ID NO: 564343 - DNA, 400 bp, Homo sapiens
ctttggttgacctgggtaactgaaaccttggaaagtgaacctgtgataagagggaattattggccaggcgcggtggctcatacttgtaacaccagcactttgggaggccgaggcgggcggatcacgaggtcagtagatggagaccatcctggccaacaattgaaaccctgtttctaataaaatmcaaaaaaaaaaaaaaaaaaatagccaggtgtggtgacacacacctgtagtcccagctactcggcagcctgaggcagggaaattgcttgaacccttgaacccgggaggccagaggttgcagtgagccaagatcctgccactgcactctagcctgggcaacagagcaagactccatctcaaaacaaaacaaaacaaaacaaaaaacagggaattactg

SEQ ID NO: 564344 - DNA, 587 bp, Homo sapiens
ctagtctcaaacgcccgggctcatatgatcctcctgccctggtctctcaaatcactaggattacaggcatgagctacagtgcccaggcccagaattttcatctgtattgcctcctttcttcccctcccctggtaacaaaaggtgtgttcctaaaatactctggtcaatrctagtaaagggattgatctaatgggggagaagccaggagagcgttcttcccaggagttttctgactagatttgggagaagaaagctcttttcttctctgattgtgaagacccaagcgtaggaactaaaggcttatggagcggatggcagccatattcctccaccaggtagaaatgctgagctgaaaagatgagaaactcttccactatagagagaaccagaggcaagagatgaagaagcaaggaccccagcaagcccttaccttgactctcctcttgccttagatgaacatcagccctagagtttaactttgataaacaataaattcaaacttaaaaaaattaactttttaaactttagtttgagttggattgggtttctgtcactgggtttctgtagctacaacagtcttgacttct

SEQ ID NO: 564345 - DNA, 459 bp, Homo sapiens
tcttcacaacaaccttttgatgtaaaaattaattattatctccattttgcctttcagaaaactgagacagatattgggtgatatttattttcttttcttttctcttttcttcttttctttttttttgagatggagtctygctctgtcgcccaggctagactgcaatggcacgaccttggctcactgcagcctctgcctcccgggttcaagcgattctcctgcctcaacctcctgagtagctgagattataagcatgcgccaccacgcccggctaatttttgtatttttagtagagacggggtttcaccatgggtgatgtttctaaggaagcaaaaccatgaagtgtagagccaccatgctcttttcactacactgctgttagaaaactagacatttggatggaagaatatgctgtggtctgaaggtttgtgtccctccaaaattcatgttgaaacttaa

SEQ ID NO: 564346 - DNA, 459 bp, Homo sapiens
tcttcacaacaaccttttgatgtaaaaattaattattatctccattttgcctttcagaaaactgagacagatattgggtgatatttattttcttttcttttctcttttcttcttttctttttttttgagatggagtctcgctctgtcgcccaggctagactgcaatggcacgaccttggctcactgcarcctctgcctcccgggttcaagcgattctcctgcctcaacctcctgagtagctgagattataagcatgcgccaccacgcccggctaatttttgtatttttagtagagacggggtttcaccatgggtgatgtttctaaggaagcaaaaccatgaagtgtagagccaccatgctcttttcactacactgctgttagaaaactagacatttggatggaagaatatgctgtggtctgaaggtttgtgtccctccaaaattcatgttgaaacttaa

SEQ ID NO: 564347 - DNA, 459 bp, Homo sapiens
tcttcacaacaaccttttgatgtaaaaattaattattatctccattttgcctttcagaaaactgagacagatattgggtgatatttattttcttttcttttctcttttcttcttttctttttttttgagatggagtctcgctctgtcgcccaggctagactgcaatggcacgaccttggctcactgcagcctctgcctcccgggttcaagcgattctcctgcctcaacctcctgagtagctgrgattataagcatgcgccaccacgcccggctaatttttgtatttttagtagagacggggtttcaccatgggtgatgtttctaaggaagcaaaaccatgaagtgtagagccaccatgctcttttcactacactgctgttagaaaactagacatttggatggaagaatatgctgtggtctgaaggtttgtgtccctccaaaattcatgttgaaacttaa

SEQ ID NO: 564348 - DNA, 596 bp, Homo sapiens
acaaatagtcattttattcattaaaaaagcctaaccttactactaatcaaagaaatgcaattaaaataacaataagacatttttcacctgccagtctgataaagatttttaaatgctctcataattagcactagcaaggttatgggaaaatagacacatccaatcttgatgttctgaattgtaaattagtatggcctttggggaaggcactttggcagtttcaaccaaaattttaaagtgcatacattttcatcagcaattccatgtctagaaatttatctgacagcaatactaaggcaaatgcatagagatttatgtacctagtagtttattaaagcattgtttataagagtaaaaaacagatacatctaaaagtctatcagcaggttatatgtatataatagaatattgtgtaactggtrtttttaaaaagcagttttatatacacaactcaaataatatataactcaaataatatattgttctgtcaaaaatacaaaacagcaggaggctgaggcatgagaatcacttgaatccaggaggcggaggtagaagtgagctgagatcatgccaccacactccagcctgggggataa

SEQ ID NO: 564349 - DNA, 632 bp, Homo sapiens
aaaaacattctatttcattttctccaaaggattaagaaatattgctttttattcttaaaactgagagagtataaatgtgattggtaacttcttggatatccaggaatctagagagagagcattcgtctcctggtaaaggctgaagataagtggagtcctctggtttcaggagacttgtaaaacccaccagcacgctggccaggtgccaagctctggagccagttgcctgcactgtgactgtgacttgtccaccaagctgtctgtccttgggtcatgacttggccaccctaacccttggtttcctcacctgcataaagaaaatgatgattgatctccctccacaggcttgggrtgagttggaatgtggtcaaagttaaggtttttatggaatgtctggtgtatttttcatctcaattaacattggctgccatgctcctcattgccacttcaaactctcatcaccaccctctcctggcaatttgaaatcaagattgcaagctgatctgaaattatctaaagcagccaaaagactaggaccactaacttggcatgtgggtataaatgagagacaatggccaagtaactaccgatgaaaagaattagaaggcccagtatatgaacacaatgatcac

SEQ ID NO: 564350 - DNA, 442 bp, Homo sapiens
actgaaaatagctaaaaacaagaaaacaaacaaagaacaaaatacctcttgtaaagatcatggagggtttatgttatctggaaagaaagaatgtgcatgccatactttatttttcattttgttttgcttcttagttcaaggttagaaatgtgaaatccagtagattacaagttacagtctacatagcctacatgacaagcacaaaatactgtggaaatcttctatttttttttgttactattttttcctgactttaaaacgtgtctgataaccaaattataaaactgattagaaatcattactgtaacttcatttatagtgtttttgatgtttgcgagatataagagaagaaaacatatttaactcaattatgrttttctttataattgagattatccagattcctcaattttatatgaaaatctgtataattatagaaaat

SEQ ID NO: 564351 - DNA, 526 bp, Homo sapiens
ccacctatctgtcagcatcactaaccatattctcttcctttctttctccaactaaagatgaacaatctctgttccttcctggggctatcctgtctccttatgcattgaacccatcctctcttgcctattcaatattactctggcaattcaatctctctctcttcctttttcacttctcccttaatatttttcctcatttaatggtattatttcctgcaacatgcaactgcagtaatttatctcatgttaaaacacacacataaacacacatatattagtatctataaaagctaagcattagaaagcccaaaggcsaattcttaggcctcatcttgcataactgtcggataactattttcctcttaaacacttcatttatttaacgtatattttgtttgtttgtttgtttgtttgttgttttgagatggagtctcgctctgccacccaggctggagtgcagtggtgcaatcttggctcactgcaacctctgcctcccaggttcaagcaattctccctgcctcagctt

SEQ ID NO: 564352 - DNA, 526 bp, Homo sapiens
ccacctatctgtcagcatcactaaccatattctcttcctttctttctccaactaaagatgaacaatctctgttccttcctggggctatcctgtctccttatgcattgaacccatcctctcttgcctattcaatattactctggcaattcaatctctctctcttcctttttcacttctcccttaatatttttcctcatttaatggtattatttcctgcaacatgcaactgcagtaatttatctcatgttaaaacacacacataaacacacatatattagtatctataaaagctaagcattagaaagcccaaaggccaattcttaggcctcatcttgcataactgtmggataactattttcctcttaaacacttcatttatttaacgtatattttgtttgtttgtttgtttgtttgttgttttgagatggagtctcgctctgccacccaggctggagtgcagtggtgcaatcttggctcactgcaacctctgcctcccaggttcaagcaattctccctgcctcagctt

SEQ ID NO: 564353 - DNA, 456 bp, Homo sapiens
tttgaaactgaaacatacaataatcaaaattttaaaaaatctaggaatggactcaacagcagaatagaggaaacagggcaaaaaaatcagtcaacttgaaaatggaataatagaaattatccaacttgaatgacatagaaaaatagactaaatatatgaatgaacagaccatcagggtactgtgggaatccagcaaaagacctcacattcaggccataaaattccatgccttggtatttcattcctttttggatatctttttatrctctaacaccaagagcatattgaattagattagccaaagtcttgaaactcctgtgaaatatttttaaataccctgtttctaaacctaaaattttggcatagtaaaaaaatgttactttaggttttcactttgccaaaacacacatttttgtattctgatccaagaacttcccctgagcccaacagtctatc

SEQ ID NO: 564354 - DNA, 495 bp, Homo sapiens
ctgggattatgttaaatgaccaaacttaagaataattggtgttcctgaggaagaagagaattctaaaagcttggaaaacatatttgggggaataatcaaagaaaacttccctggctttgctagagacctagacatccaaatacaagaagcacaaagaacaccttgaaaatttatcgcaaaaacatctccacctaggcacattgtcatcaggttatccaaagttaagatgaaggaaataatcttaagagctgtgagagagaagcaccaggtaacctacaaaggaaaatctgtcaggttaacagcagatttctcagcagaaaccctccaggctagaagggattggggccctatcttcagcctcctcaaacaaaacaattatcagycaaactaaccatcatatatgaagttatgaaactaaccatcatatataaaggaaagatacagtcattttcagataaacaaatgctgagagaattcaccattaccaagccacca

SEQ ID NO: 564355 - DNA, 496 bp, Homo sapiens
atttttaattcacatggaaccaaaaaasagtccacatagccaaagcaagactaagcaaaaagagcaaatctggaggcatcgcactacctgatttcacactatactatagggccatagtcaccaaaacagcatggtactggtataaaaataggcacatagaccaatggaacagaatagagaactcggaaataaactcaaatacttgcagccaactgatctttgaaaaagcaaacaaaaacataaagtggggaaagataccctttccaacaaatggtgctgggataattggctagccacatgtaggagagtgaaactggatcctcatctctcaccatatacaaaaatcaactcaagatggattaaagacttaaacctaagacctgaaactaaacaaattctagacgataacattggaaaaacccttctagacattggcacaggcaaggatttcatgaccaaaaacccaaaagcaaatgcaaaagaaacaaagataaat

SEQ ID NO: 564356 - DNA, 496 bp, Homo sapiens
atttttaattcacatggaaccaaaaaagagtccacatagccaaagcaagactaagcaaaaagagcaaatctggaggcatcgcactacctgatttcacactatactatagggccatagtcaccaaaacagcatggtactggtataaaaataggcacatagaccaatggaacagaatagagaactcggaaataaactcaaatacttgcagccarctgatctttgaaaaagcaaacaaaaacataaagtggggaaagataccctttccaacaaatggtgctgggataattggctagccacatgtaggagagtgaaactggatcctcatctctcaccatatacaaaaatcaactcaagatggattaaagacttaaacctaagacctgaaactaaacaaattctagacgataacattggaaaaacccttctagacattggcacaggcaaggatttcatgaccaaaaacccaaaagcaaatgcaaaagaaacaaagataaat

SEQ ID NO: 564357 - DNA, 496 bp, Homo sapiens
atttttaattcacatggaaccaaaaaagagtccacatagccaaagcaagactaagcaaaaagagcaaatctggaggcatcgcactacctgatttcacactatactatagggccatagtcaccaaaacagcatggtactggtataaaaataggcacatagaccaatggaacagaatagagaactcggaaataaactcaaatacttgcagccaactgatctttgaaaaagcaaacaaaaacataaagtggggaaagataccctttccaacaaatggtgctgggataattggytagccacatgtaggagagtgaaactggatcctcatctctcaccatatacaaaaatcaactcaagatggattaaagacttaaacctaagacctgaaactaaacaaattctagacgataacattggaaaaacccttctagacattggcacaggcaaggatttcatgaccaaaaacccaaaagcaaatgcaaaagaaacaaagataaat

SEQ ID NO: 564358 - DNA, 596 bp, Homo sapiens
cttataaaaaacaaaatgacttttaattaaatatttatttacatatttttctttatactgtgaataaaacytttctgtaaattaatgtaatcctagaatttatgccaaaataggaaatacttatagcatagacataaaacagcacaggtgaaagccaggcattttatttgacaattgtgtatcattgaaggttaaaaataaattaaaattaaaaataaaattatttaatttaaaaaataaagctaagaataaaagtattaaaatttaaaaagcagattttaaaacttgaatgaaagaagcataatgttaatttatataaagagtaatttggactatttttaggaagtcaaacaataaatgattttttaaacaaaacccaaaaagcagaaaggacaaagtaaaattagttaatttgactacacaaaaatttgtaagttttgtacgaaaataaagtgaaaaaaaggcatatatcgtgggagaagggtatctgcagtacctttgacaaaaacaagtgtaaaacaagaacagcaacaataaaaacgggtaaaaataacctgctacagttttacctttataatttgagaaaagtttttaaa

SEQ ID NO: 564359 - DNA, 596 bp, Homo sapiens
cttataaaaaacaaaatgacttttaattaaatatttatttacatatttttctttatactgtgaataaaacctttctgtaaattaatgtaatcctagaatttatgccaaaataggaaatacttatagcatagacataaaacagcacaggtgaaagccaggcattttatttgacaattgtgtatcattgaaggttaaaaataaattaaaattaaaaataaaattatttaatttaaaaaataaagctaagaataaaagtattaaaatttaaaaagcagattttaaaacttgaatgaaagaagcataatgttaatttatataaagagtaatttggactatttttaggaagtcaaacaataaatgattttttaaacaaaacccaaaaagcagaaaggacaaagtaaaattagttaatttgactacacaaaaatttgtaagttttgtacgaaaataaagtgaaaaaaaggcatatatcgtgggagaagggtatctgcagtayctttgacaaaaacaagtgtaaaacaagaacagcaacaataaaaacgggtaaaaataacctgctacagttttacctttataatttgagaaaagtttttaaa

SEQ ID NO: 564360 - DNA, 610 bp, Homo sapiens
tttgtatcaaattgctacaaagtaaataagtgtgatttggagaaattaaataacttgtcagtactttatgaggcattaatctcagccactaattactatatgtatcagcttccaactttattaagaatccctcacatctatacacayttcaactaaataaacactgaatgatggtcaaataattcaccgcttattcattctacttggtccacttctatgttccttctgttcatgactggcaccatcatttatctaatttctcagtctgaaaatggggggatcatttccgactctccttaggtgtttcatcccttataagatatggcccagttcttacaattttacttttttggtaattctagaatctttgtgcttatatccttctccactaacatgattttaatcggaattttccttatcattttttagattactactatcaactaacagacacaccagtatccatacctccttgctacaatatccaatgtgtagcctaaattaattttcaaaatgtaaatctgatattgtcactaattcattttttaatggtttatcttttgtgtatatatacacacctacatttatatacacatatgtacatatatat

SEQ ID NO: 564361 - DNA, 546 bp, Homo sapiens
gttgtatataaaagcattattagagatactgtgagtcattagtttcataaaagaactttcatcttaacagaaatatatagtaacagcaaatttgtagattttaataactttgttcaaatatacaataaaactatccagaaacacggatttcccaaatatcatttcctccaatcttcaagacgcttcttcatctaaaaacaccagtttttgatgctattcttaatgcatggactaattaacataaatttcaactaaaagcaggtttctaacataactaaaaatgaaatgttgacagtgggaggcaaaacatttggtaaaattattatctgtaataacwaggtacacataccacatgtctgctaaactagaagctctgggggaagtggtaaaactgaaccttagtggccagaagtagtggctcatgcctgtaatcccagctctttgggaggatgaggcaggtggacacgaggtcaggagttcgaggccagcctgaccaacgtggtgaaactccttctctactaaaaatacaaacaattagtcgggtgt

SEQ ID NO: 564362 - DNA, 584 bp, Homo sapiens
cttgcgatagtgatattttgataaaatattttattattggaattgcatatttgggaaataagaacgtgtacactgagcaataaagagatgtaatatcatgaaaacttagtcctattttctgggaacggtgctgtccacatagggaagtgtttcttcagcatcactcttcatactgcrtgcctttcaggcctttattatctgaagactgaaagactgaatgagaaatgcatctgatctaatgctgagacagtcgaatttgggaatttgaaatgcgatttaccagagagcaacttgggcttagcacatggtaagtaggaactaaaatacacgcattaaggaaggtaaggatgtttacccaaggaatccaaagacagaaaaaactatccaaataagggaaaactttaagcaaattgccatcaaaattttagtgagaaatgtagcttttgtatctatctatctgtctatatggagataaatacttacgtatgagcctctaactatctatcatctatctatgtatctatgtatctatgtatctatgtatctatgtatctatgtatctatgtatctatgtatctatctat

SEQ ID NO: 564363 - DNA, 584 bp, Homo sapiens
agcatagtttgggaacttgtttagagattcattcatttgtttcatttatccaaccacccacccatccatccaatattatttgaatacttactatgtgttaggaacttttctgggtgctggatgcaataatgaatgggttcttctgcatctctcttcaaatgctagaaacttcctgcaaggtaatgagggagttatgagcctccatatggttttataagaattcaaggtccagactcagactaggtttgtaggaagacatgaagattcatcactctagtcaccatcaatgtttactcttaaaaaaagttcccaagaaagattttaatttttttcatagagggcttatgatttttttctgggaatttaaaatttttcattgtttttatgaatagaatcttctttttatttgtaatttacaattagttgctgatagcatacatgaagttgttgaaatgtaattagtttcaaatagtttccctcactgagccctattattctaatacctcttagttattttgcttttcttggttttgttttgttgttagttactaaacatawaatcacatcaactagaaataatggta

SEQ ID NO: 564364 - DNA, 549 bp, Homo sapiens
gtaagaacagaaatagagagcaagcattaaaaaattgttatagcaacttgacaatgtcttctgagtctaagaatacaaaattggtgtttgtattttgtcttttattcattttctaataattcrtttttattgtattttattaaagtatggatctacaaagtattggggggatttctttgtggttcttcaccacagatagcttgattagcactggtttaaaagaacgaggtgaaaatgaattacttgcagtgatacttgatagagctatggtacataattccttatgatttttagcttagaggtttactttaaaaataaattgtaaatatctatttaggccgggcgtggtggctcacacctgtaatcccagcactttgggaggccgaggcgggtagatcacgaggtcgggagatcaagaccatcctggctaacacggtgaaaccctgtctctactaaaaatacaaaaaattagccgggggtggtggtgggcacctgtagtcccagctacttgggaggctggggcaggagaatggcatgagcccgggaggc

SEQ ID NO: 564365 - DNA, 549 bp, Homo sapiens
gtaagaacagaaatagagagcaagcattaaaaaattgttatagcaacttgacaatgtcttctgagtctaagaatacaaaattggtgtttgtattttgtcttttattcattttctaataattcgtttttattgtattttattaaagtatggatctacaaagtattggggggatttctttgtggttcttcaccacagatagcttgattagcactggtttaaaagaacgaggtgaaaatgaattacttgcagtgatacttgatagagctatggtacataattcctkatgatttttagcttagaggtttactttaaaaataaattgtaaatatctatttaggccgggcgtggtggctcacacctgtaatcccagcactttgggaggccgaggcgggtagatcacgaggtcgggagatcaagaccatcctggctaacacggtgaaaccctgtctctactaaaaatacaaaaaattagccgggggtggtggtgggcacctgtagtcccagctacttgggaggctggggcaggagaatggcatgagcccgggaggc

SEQ ID NO: 564366 - DNA, 549 bp, Homo sapiens
gtaagaacagaaatagagagcaagcattaaaaaattgttatagcaacttgacaatgtcttctgagtctaagaatacaaaattggtgtttgtattttgtcttttattcattttctaataattcgtttttattgtattttattaaagtatggatctacaaagtattggggggatttctttgtggttcttcaccacagatagcttgattagcactggtttaaaagaacgaggtgaaaatgaattacttgcagtgatacttgatagagctatggtacataattccttatgatttttagcttagaggtttactttaaaaataaattgtaaatatctatttaggccgggcgtggtggctcacacctgtaatcccagcactttgggaggccgaggcgggtagatcacgaggtcgggagatcaagaccatcctggctaacamggtgaaaccctgtctctactaaaaatacaaaaaattagccgggggtggtggtgggcacctgtagtcccagctacttgggaggctggggcaggagaatggcatgagcccgggaggc

SEQ ID NO: 564367 - DNA, 549 bp, Homo sapiens
gtaagaacagaaatagagagcaagcattaaaaaattgttatagcaacttgacaatgtcttctgagtctaagaatacaaaattggtgtttgtattttgtcttttattcattttctaataattcgtttttattgtattttattaaagtatggatctacaaagtattggggggatttctttgtggttcttcaccacagatagcttgattagcactggtttaaaagaacgaggtgaaaatgaattacttgcagtgatacttgatagagctatggtacataattccttatgatttttagcttagaggtttactttaaaaataaattgtaaatatctatttaggccgggcgtggtggctcacacctgtaatcccagcactttgggaggccgaggcgggtagatcacgaggtcgggagatcaagaccatcctggctaacacggtgaaaccctgtctctactaaaaatacaaaaaattagccgggggtggtggtgggcrcctgtagtcccagctacttgggaggctggggcaggagaatggcatgagcccgggaggc

SEQ ID NO: 564368 - DNA, 537 bp, Homo sapiens
aggctggagtgcagtggcacaatctcggctcactgcaacctgtgcctcctgggttcaagcgattctcctgcttcagcctcccgagtaactgggattacaggtgcacatcaccacgcctggctagtttttgtatttttagtagagatggcgtttcgccatgttggacaggctggtctcgaacttctgacctcaggtgatctgaccacctcggcctcacaatgtattgggattacaggcgtgagccaacacaccaggccttgatgtgcttttaagttattttatttgcctgtctacgttagttagtctgagtaactgagtaggtcatcacttttttttctattgtgcgttcacctctaaacttgactcttttgaacttttaaagaccgtacttaatagagttatgtttattttggtaacaagtttgagttatactccttgtaacattctggcagtcccctcccatttttctagaagtttctsttcctttagactctctcttagccaggggtctttttcattgttaaattttaggggaag

SEQ ID NO: 564369 - DNA, 594 bp, Homo sapiens
gtttataaaaagtagcaatttgggctggtcacagtagctcatgcatgtaattccagcactttgggagactgaggcaggaagatcatttgcagccatgaactggaggccagcctgggcaatgtaatgagaccctgggtatacaaaaaatttctaaaattagccaggtgtgatgccatgcacctgtagttccaactactcaggaggctgaggcgggaggattgcttgaaccccaggagttcaaggctgcagtgagctatgattgcaccactgccctctagcctgggcaatagagcaagactctgtctccaaaaaactgttccttctactaatttagatatatactttattctgaattagtaagattttatcaactgacttaaaagattttagaaagaagagaaaattctcattcttgtttctctctcaattttgaaatagtaactgaragtatatatccttatttggcttattcctcacttaatgttaatcactgtgcctctcaccttttcaccagaacataaagctcaactctggacacacttgacactggacttaaggactgttgtaataataccagattccaagtccatttct

SEQ ID NO: 564370 - DNA, 510 bp, Homo sapiens
tccagctctgtaggacagtggtgatcgaggtcgaaaacgtctacttccaggacaagtcgcttagaccttggggcaatttatattttagagatgcccagacagtagctctgatttaggatttacctgctccagctgytactgactccttgctagtccaggttgagtgtagggaacagaaaccatgccaggtactttaagcaggaagggatttaatacaggcacttaaagatttacaaaatcatctgaagaggctgatggctcaattccagtctgggtctccaggaatgactaccagaataccaaggaacaggaaattaactccaggaacacgttgtcatagctgtgacccagggaatcgggaagatgggattagggagctgccagtgcccgtgggcctaaatcctcagtcgtagagacagctgccttttgacacagaaagctgatggctggccatggggatgctgaatccagccactgctgcgactggagcaggaggctggacactggtct

SEQ ID NO: 564371 - DNA, 397 bp, Homo sapiens
caagtgattctcctgcctcaacctcccaagtagctgggattacaggtgcctgcctgtaatttttttgtatttttagtagagatgggtttcaccatgttggccaggctggtctcaaccctctgggcctcaagtgatctgcgtcggcctcccaaagtgctgggattacaggtgtgagccactgtgcctgggctgttagtaagtgttattcaaagaaagcctcctggggtcacgtcaggtgggaggatggggctgaagagcattgaaggcggttctgtgcctctctgagcctctgmcttttcgagctcctggagacagtgagtttttctccctcactttgagatccattaaatcctgctcttcgtggggcatctcagggtccagtgtagggaggggcctg

SEQ ID NO: 564372 - DNA, 442 bp, Homo sapiens
aaaaaatatttatagggtattatccaatgtttccatcaggttggagaaacagacaggtatacaccattctagtgtagacttaagttcattcaagatttctggaaaacaactagcccccttttaaaggcctttaaaattacacacacctgaaatcagaaatctgattttaacctaacatgtacgtaaatagttttaagtaagaatgttatttacgattgcaaaaaaggaacaatggaacaaccaaaactcccatcaatgatggattgagtaaataaattgttgggttcacaggagtaaatgcatgtggttattttaaaatcacattttataagaacagttaaagatatggaaaaatgttcaaaatatattaagtaaaaaagcgtgttataaracttcccaaataatttcttaaagtatagaaatacatcgtatttgaaagaag

SEQ ID NO: 564373 - DNA, 398 bp, Homo sapiens
caattaaagcagagctcccagaaaaatacagctgccattaaccccatccaaggagtttcttgcaaattcagctgccatgaagacagygtactctttcgcattagcattgataaatgaaaatgaaattctaagctcccaactgactgaacagacccactcttggctgaggggaccccagagtaactttcaaaactgagttctcagctttgctaggatgggatgatggggttaagatacacatcgttataccccctcctttgctaaccatgatgaggctttcttccctaaggatttaacagaaaccagccctttcaaagcctccaccactgatatcaacctctccttcttgcctgatagagaccacccacgatggagaggttctggccagcgtacagagg

SEQ ID NO: 564374 - DNA, 398 bp, Homo sapiens
caattaaagcagagctcccagaaaaatacagctgccattaaccccatccaaggagtttcttgcaaattcagctgccatgaagacagcgtactctttcscattagcattgataaatgaaaatgaaattctaagctcccaactgactgaacagacccactcttggctgaggggaccccagagtaactttcaaaactgagttctcagctttgctaggatgggatgatggggttaagatacacatcgttataccccctcctttgctaaccatgatgaggctttcttccctaaggatttaacagaaaccagccctttcaaagcctccaccactgatatcaacctctccttcttgcctgatagagaccacccacgatggagaggttctggccagcgtacagagg

SEQ ID NO: 564375 - DNA, 398 bp, Homo sapiens
caattaaagcagagctcccagaaaaatacagctgccattaaccccatccaaggagtttcttgcaaattcagctgccatgaagacagcgtactctttcgcattagcattgataaatgaaaatgaaatyctaagctcccaactgactgaacagacccactcttggctgaggggaccccagagtaactttcaaaactgagttctcagctttgctaggatgggatgatggggttaagatacacatcgttataccccctcctttgctaaccatgatgaggctttcttccctaaggatttaacagaaaccagccctttcaaagcctccaccactgatatcaacctctccttcttgcctgatagagaccacccacgatggagaggttctggccagcgtacagagg

SEQ ID NO: 564376 - DNA, 555 bp, Homo sapiens
gtaactttcaaaactgagttctcagctttgctaggatgggatgatggggttaagatacacatcgttataccccctcctttgctaaccatgatgaggctttcttccctaaggatttaacagaaaccagccctttcaaagcctccaccactgatatcaacctctccttcttgcctgatagagaccacccacgatggagaggttctggccagcgtacagaggatgcacagagcgagttttcatgtcctctgcttcaccttttaatgtcagagggctgaaaactccaccctgggatcatgctaacactgccattttttgtacatgggacccatgaagaagcaagagactcaattgtgcgtgcatgcatttctccttccataaatattcatgactcctcctagagcttattaaataaatctatttggccattccactcagcataaattgctatttcctttacctcctccttgaagcrtctgtttctggcttctggctggaggctatgcttcccagcctgtcagaaggacaaccctgcaggctacaaccctttatagataa

SEQ ID NO: 564377 - DNA, 603 bp, Homo sapiens
cagaaaaaatcgaatatccttgtcagttgtggtataacgaattctcatcagatctttcatcacagccatttcatactttttgtcatttagatattatttccccctgatgctttcctgaaagctcctgcaatcaactacaggtcagaatgttcgtctccaagacaggactccctctgagactcacaaaaaagactatgacaggtactctggttataggcttctgatgatattgcttaaatacctttaagaccatacacttgactcagttaaggtctccagaagtccggttgggaamctgatgggttcatgacactgctaactcaagatccacaagactggaattgattacatggcactgaatgaactgatgaaaattgattataattgtatagctttttggagcattgctggttaatattctagtttctggatttaagaaatctctttctcttactctaactgtaacttacaacaatttagtagattatacttttgtaaacagaaattaagcgtttatctttttttcttgcctgatttttccagaattttgaaatccttactgaatactcttatttccacgatgatatagttgttagcaaaagt

SEQ ID NO: 564378 - DNA, 584 bp, Homo sapiens
acagccgggcatggtggcacatgcctataattacagccctttggaaggccaggagttcaacatcagcctgggcaacatggtgaaaccccgtctctaccaaaaatacaaaaattagatgggcatgacggtatgtgcctgtagtcccaggtaatcaggaggctgaggagggaggatcgtttgcacccaggaggtagaggttgcagtgagctgagattgcacctttgcactccagcctgggcgacagagccagaccctgtctcmaaaaaaatttttttaaaggaaaactatagccattgtgagttatcagattctagtcttgtttcttgtttctgggctatttttacctctttgtaaactggatcctgccatctgatgaattttgtcccacaatgatacttggggaacaagaagccaagtattgtctctcctactaatgtatctattgtcagttaatttgaaggtctccaaccctggaacaaagttagaagaggaaggttctgctccccaaaatgcataaccaaattgtgctacattcatgtaatggaatactatttagccatagaaaggaacaagatatcaacaca

SEQ ID NO: 564379 - DNA, 595 bp, Homo sapiens
gaaaacattttcccctcactccacctgagcaatatctgagtggcttaaggtactcaggacacaacaaaggagaaatgtcccatgcacaaggtgcacccatgcctgggtaaagcagcctggcacagagggaagcacacaggctcagggctctgctattcattctttgtgtgaccctgggcaagccatgaatggagcttcagtcaccccatttgtaatgggatttaattgtgcttgccctgcctccttttgagggctgtagagaaaagatgtcaaagtattttgtaatctggctgggcgtggtggctcatgcctgtaatcccagcactttggtaggctgacgcgagaggactgcttgagcccaagagtttgagatcagcctgggcaatattgtgagattccatctctacaaaaataaaataaaatagccagtcatggtgtcacacacctgtagtcccagctacatgggaggctgaggygggaggatcacttgagcttgggagattgaggctgcagtgagctatgattgtaccactgcactccaggctgggcgacagagagagaccctgtctcagggaaaaaaaaaaagtactttgta

SEQ ID NO: 564380 - DNA, 584 bp, Homo sapiens
aatttttagattctttcatctgatttgactctcttagttatgaataagaggatatctagaatatatatgtgacttgttaaaatgaaaatccaccttctctgagtcttcaaatatctttcatatcttacatttttagtaacatcaacttttgaagtcatgtccgtagttgcatgaaaagaaaaatttcaggaacattcaacctcaaaagttctttttcttagtctgaagtcgtagaagcatttgacttttactttctctttttaagtttgtactagtaggtattttatataaatataatatttaattattgcctttgtattctttttctctagtaaacatcctggtttttagctatcaatatgtagttttacatttagggatttctaacggaaagagaaaggaatctgaaatcagaggacaagagtttattctacttgaccaaacacatacaaaatactggaaggagagttttacaacaaatatttaatgtctatgacatgtaaaaaggttttccaaatcaagaaaattcaaacaattcaatacaaatatcatcaatamtaacacatgaacaggtggccaacctt

SEQ ID NO: 564381 - DNA, 632 bp, Homo sapiens
cctatattctacctatgtataagtaagagaatgagtttttgttttggggatatatatttatacgtatctatacagatasgtataatttctgtcttaatttctgtctacctattaaggtgcggtgccagatggaaagtatttttaagcatttagatagcttattctatagcatatgtgtgcatatagcccccccataaagctttgtctcttttctggatatatttaacaagaggctagaacagagtccaaaatgtcagaaatgtttgaacattccatagaaatgaaggaggtgtttccaaatgacctatgtttctatggcaataaatagaacttgtgctgcgttggatgggtcaggagtaaggaatataaacagtgtaagtatgactattccaggcagaaatctaccttgtaagaacagctttgtgcagtgagctcaacaacattgatcagttagcagtccggttcagtacaacattgatcaggtagcaagccggttctgcagtgccagtcggagacacagatggggacaatcaaagaagatgcaggtcaggacaaggatgcagacatgtacctgtcactaccatggacttcagcagcttcttagcaggtttatgattaaagaagaaagacat

SEQ ID NO: 564382 - DNA, 632 bp, Homo sapiens
cctatattctacctatgtataagtaagagaatgagtttttgttttggggatatatatttatacgtatctatacagatacgtataatttctgtcttaatttctgtctacctattaaggtgcrgtgccagatggaaagtatttttaagcatttagatagcttattctatagcatatgtgtgcatatagcccccccataaagctttgtctcttttctggatatatttaacaagaggctagaacagagtccaaaatgtcagaaatgtttgaacattccatagaaatgaaggaggtgtttccaaatgacctatgtttctatggcaataaatagaacttgtgctgcgttggatgggtcaggagtaaggaatataaacagtgtaagtatgactattccaggcagaaatctaccttgtaagaacagctttgtgcagtgagctcaacaacattgatcagttagcagtccggttcagtacaacattgatcaggtagcaagccggttctgcagtgccagtcggagacacagatggggacaatcaaagaagatgcaggtcaggacaaggatgcagacatgtacctgtcactaccatggacttcagcagcttcttagcaggtttatgattaaagaagaaagacat

SEQ ID NO: 564383 - DNA, 531 bp, Homo sapiens
tcaggtagcaagccggttctgcagtgccagtcggagacacagatggggacaatcaaagaagatgcaggtcaggacaaggatgcagacatgtacctgtcactaccatggacttcagcagcttcttagcaggtttatgattaaagaagaaagacatcgttgatatgtaagcatgttacaattaatttgctgtttagttattagcaaactacatccagtttttagtttttaggtttttttttcttttttcttttttgaaacagkttcttgttctgtcatccaggctggagtgcagtcgttatccaagctcactgcagccttaaactcctgggctcagtggatcctcccacctcagcctcccaagaagctgggactacaggtgcacgccaccatggccagctaatttttcctatttttttgtagagatgaggtcttgctgtattgtccaggctgctcttgagctcctggcttcaagccatcctcctgtcttggtttcccaaaatgctgggactataggtgtgactcaccatgcct

SEQ ID NO: 564384 - DNA, 562 bp, Homo sapiens
cccctttcggttttcatccttgttttctctcccttctcccacgacctcggtagtcttctgcaatccagattctcagacttcaggtttttctccctctgcccctttcctctctgtcctrtaactagaagcaccttttggcatagacccatatcccagtttcctctttcccaggtccagcagcatctcaaggacatctacaagagggatacctaatttcaggggtctctgaattatatgtgggaaaccatcgtctaaaaaagtaattttatccttattcatgcaaccagacccacactcatagaacttttctttaaggggagtgtcttgcagatgtataaatgagtgttaacatctttaaaagcgaaactgaacaattccctggcatttgaattccctccttccttcccaaccctctccttttcattttctcatttattattaaaaacacttttaaaggatctccatgcttcatatttatctactataattcctccttctcggtgttgcagggatggggaaagaggattttttaaaaacacaataaaaagcaattgggagaaac

SEQ ID NO: 564385 - DNA, 528 bp, Homo sapiens
gggcctgtccaatacttgttgtgggtcaggatatttttgaagctacggttgttgatttgcatgggaaaattattatgtcttattatttcttgtcccactttaccataagggctcctcagcttcttacttcaatgggtcttccatgacaaacacactttattaactctaagagtggaatttattttaacagataattagcataggtcaatatatgcttaaaatagagtcaaattaaacctactagctrttataaaggacagatgacaaattaaaatccacatagaagcatcgactcttaaataatctgaaagtactacttctaagaggggtgggcatgggtgaagggaatggtggacatgtttcagaatttcaaacagccaactttaaccaatcttttcctcattttgttcaccttcttggcggcttatgctaaagtgaagtgaatagccataaggctggcttcaggagaaaggtggtcgaaaagaactggataattataagcaaaattggtctcgaatgattgaaaat

SEQ ID NO: 564386 - DNA, 523 bp, Homo sapiens
gcctgccttggcctcctaaagtgtcatgaaccaccatgcccagcctacaaagcaatgttctaggaaaaactacagttactctttgattatgtaattgctggagaagaaaagcatggcatttctaaaatgatgaactatattacttatattttaatatctcataaagtttgaaatagacatttcaaacataaacatgtataaaaatttttataaattaaaaatataaaatcaaaaacattataaaattattttattataaaattattatagaatcaaaaacattataaatttaaacaacttttttaaaaatttattttgggatttcccatggagtgatggagaataatgagccttgggagagctatggcagctctcatactccttcctgggccaacttttttaggaaatgggagaaatataccctgttcaatgtttattgtgggtcagratatttttgaagctatagttgttgatttgcttcaaactttaaaaaatttattataaaattatgggatgtaaaaaa

SEQ ID NO: 564387 - DNA, 345 bp, Homo sapiens
ctcctggcctcaagtgatccttccagcttggtctccctgaaatatcttttgtggctggtttgytcaaattagtttcttctaatcaagggacacacattgcatttgattatttagctcaagacttttttaacctggaaaataccctcactctttgtttatgtatttatttaatgaaattgacttgttgaaaaactagtcagtggtcctgtagaatatttccccttctggaattttctggttgctttttatggtgtcatttaacttttcactctgttttttcctggttaactggaagttagttctaaaggcttttaggcctggtataacaaaataccaaaaactgga

SEQ ID NO: 564388 - DNA, 605 bp, Homo sapiens
agctagctctctggggcctcttttataagggcactaattccaatcatgagkgctctgtccttatgatctaatgaacccctaaaggccccaccttttaataccagcacctttggggttaggatgtcaacatattaattttgggaagacatacacgttcagcccattgcaaggtttagttagattcaggttcaacttctttttttaaagactatttcataggcaataatgtgtattcacatcccatcatcagtgatggtgagaggatcgcaaggttagggcgatcactgcctatctcctctgttatattcccccttgggtcaagccagtagtctgtgacgtgaactttgtaccatgtgtatattcagttatgttctgtatcaatatttacttgattgttttagcatttattaatgatccttgcttgagttgattatttcattaggggtttcaaaatggtgaatttctaattctctaattctatctacatgttttagctggcatttttctataagcagaccattttcttcacaactgggttatttggctaccctgaaacatagttccttccgggaaggcagaacatatgtttatttctgtcttttaaa

SEQ ID NO: 564389 - DNA, 605 bp, Homo sapiens
agctagctctctggggcctcttttataagggcactaattccaatcatgagtgctctgtccttatgatctaatgaacccctaaaggccccaccttttaataccagcacctttggggttaggatgtcaacatattaattttgggaagacatacacgttcagcccattgcaaggtttagttagattcaggttcaacttctttttttaaagactatttcataggcaataatgtgtattcacatcccatcatcagtgatggtgagakgatcgcaaggttagggcgatcactgcctatctcctctgttatattcccccttgggtcaagccagtagtctgtgacgtgaactttgtaccatgtgtatattcagttatgttctgtatcaatatttacttgattgttttagcatttattaatgatccttgcttgagttgattatttcattaggggtttcaaaatggtgaatttctaattctctaattctatctacatgttttagctggcatttttctataagcagaccattttcttcacaactgggttatttggctaccctgaaacatagttccttccgggaaggcagaacatatgtttatttctgtcttttaaa

SEQ ID NO: 564390 - DNA, 605 bp, Homo sapiens
agctagctctctggggcctcttttataagggcactaattccaatcatgagtgctctgtccttatgatctaatgaacccctaaaggccccaccttttaataccagcacctttggggttaggatgtcaacatattaattttgggaagacatacacgttcagcccattgcaaggtttagttagattcaggttcaacttctttttttaaagactatttcataggcaataatgtgtattcacatcccatcatcagtgatggtgagaggatcgcaaggttagggcgatcactgcctatctcctctgttatattcccccttgggtcaagccagtagtctgtgacgtgaactttgtaccatgtgtatattcagttatrttctgtatcaatatttacttgattgttttagcatttattaatgatccttgcttgagttgattatttcattaggggtttcaaaatggtgaatttctaattctctaattctatctacatgttttagctggcatttttctataagcagaccattttcttcacaactgggttatttggctaccctgaaacatagttccttccgggaaggcagaacatatgtttatttctgtcttttaaa

SEQ ID NO: 564391 - DNA, 561 bp, Homo sapiens
atagttccttccgggaaggcagaacatatgtttatttctgtcttttaaaaattactggtgtttggagtgaagattaggtgagttaactacctccacaggtgacaaatgaattttgttttgtctcacttttgcttttttgaatatcactgtggctgcttggatttttatatttaatttgaatggattagggaataaatgagaagataggttttatctgtttctgtagtttttatgtggctatgtgaacttacctttaaaaattcccagaaatattttaattcccctttaaagrtataaactatgtcatactataaagcaaaagaaaaaccaatcatgtgaagagtaaatagtatcgtttaaatgaattgtggttaagcttagtttgtaactaattagttttttattttctttctacttttatctgcttcagagcctcttcagtggtttagatcttctatgtgtcaaattattctaatctcttaaaaagtttaagagctaaaatacaacacaatgactacaagaatgcctttgtccttttctgggtgggtacacctaaggcaa

SEQ ID NO: 564392 - DNA, 561 bp, Homo sapiens
atagttccttccgggaaggcagaacatatgtttatttctgtcttttaaaaattactggtgtttggagtgaagattaggtgagttaactacctccacaggtgacaaatgaattttgttttgtctcacttttgcttttttgaatatcactgtggctgcttggatttttatatttaatttgaatggattagggaataaatgagaagataggttttatctgtttctgtagtttttatgtggctatgtgaacttacctttaaaaattcccagaaatattttaattcccctttaaaggtataaactatgtcatactataaagcaaaagaaaaaccaatcatgtgaagagtaaatagtatcgtttaaaygaattgtggttaagcttagtttgtaactaattagttttttattttctttctacttttatctgcttcagagcctcttcagtggtttagatcttctatgtgtcaaattattctaatctcttaaaaagtttaagagctaaaatacaacacaatgactacaagaatgcctttgtccttttctgggtgggtacacctaaggcaa

SEQ ID NO: 564393 - DNA, 561 bp, Homo sapiens
atagttccttccgggaaggcagaacatatgtttatttctgtcttttaaaaattactggtgtttggagtgaagattaggtgagttaactacctccacaggtgacaaatgaattttgttttgtctcacttttgcttttttgaatatcactgtggctgcttggatttttatatttaatttgaatggattagggaataaatgagaagataggttttatctgtttctgtagtttttatgtggctatgtgaacttacctttaaaaattcccagaaatattttaattcccctttaaaggtataaactatgtcatactataaagcaaaagaaaaaccaatcatgtgaagagtaaatagtatcgtttaaatgaattgtggttaagcttagtttgtaactaattagtttttwattttctttctacttttatctgcttcagagcctcttcagtggtttagatcttctatgtgtcaaattattctaatctcttaaaaagtttaagagctaaaatacaacacaatgactacaagaatgcctttgtccttttctgggtgggtacacctaaggcaa

SEQ ID NO: 564394 - DNA, 561 bp, Homo sapiens
tttcaatgtaagctaatcagagatagcacccttgacagccctatataatactatagccagaagtccctaacttttctattgtttcctatttccttcaccctgctataattttctggatcacatatgttgcctttaacattttccatattatttattttcccactgtatgtaaagcccaaggacttttcactgctatatcccaagaacctaaaataaatctggcatgtggtaagcgtacaataaatatttgttgaattaatgaatggagaataatgaatgcatgatgaatggcttctctgggagaaataccttgaaggggggcaagagcagaaagaggaatatcagacgggasactcttcaagtcaagtgttgatagagtcttggactaggctagagccaacagaaatgaaaattagtcatttggtttgagatacatttttggaaggaggatgaacagaatatgcaggtgggctggaatatggaagagaggggctgtggtaaatagcctccaaaatggccccaatggtccttgtcttttggcatttgtgcctttttgtggtc

SEQ ID NO: 564395 - DNA, 561 bp, Homo sapiens
tttcaatgtaagctaatcagagatagcacccttgacagccctatataatactatagccagaagtccctaacttttctattgtttcctatttccttcaccctgctataattttctggatcacatatgttgcctttaacattttccatattatttattttcccactgtatgtaaagcccaaggacttttcactgctatatcccaagaacctaaaataaatctggcatgtggtaagcgtacaataaatatttgttgaattaatgaatggagaataatgaatgcatgatgaatggcttctctgggagaaataccttgaaggggggcaagagcagaaagaggaatatcagacgggagactcttcaagtcragtgttgatagagtcttggactaggctagagccaacagaaatgaaaattagtcatttggtttgagatacatttttggaaggaggatgaacagaatatgcaggtgggctggaatatggaagagaggggctgtggtaaatagcctccaaaatggccccaatggtccttgtcttttggcatttgtgcctttttgtggtc

SEQ ID NO: 564396 - DNA, 588 bp, Homo sapiens
cattggaaatccccttcccccagctgagaatatccacaaagatgcaacaaagatgctgagccaggaagcaactatatctaaagagaccaggcttytgcacttgagcccctaccttggatggagaaattttaccaaagaaatgtccccaccggacacctgtgtggacagctcctgtaccttcaggctgtggggacggggtgtcctatttgtgagctgccatttctgaaagcttgatgacaggggcagagcccccctctgcaggcctcctgcagcggatgtgatttaccatgcacattattaatgagcttcatcctaaagttattctggctgcatgtggagcttagaggacttgggagcacaacttggcaggcaagataggctttaaaatgcagaacttctctagcttgtttaaaaaaaagaccacaatatcaaagagaaaatcagagtggggggcagtagcaaacaagggttgggaagagtaaatgaggaaacaaaaaactaaatatacaaatacacacactatatggatatctatatctatacacacacacacacacacacacacacacacgcacgcacacacagctc

SEQ ID NO: 564397 - DNA, 588 bp, Homo sapiens
cattggaaatccccttcccccagctgagaatatccacaaagatgcaacaaagatgctgagccaggaagcaactatatctaaagagaccaggcttttgcacttgagcccctaccttggatggagaaattttaccaaagaaatgtccccaccggacacctgtgtggacagctcctgtaccttcaggctgtggggacrgggtgtcctatttgtgagctgccatttctgaaagcttgatgacaggggcagagcccccctctgcaggcctcctgcagcggatgtgatttaccatgcacattattaatgagcttcatcctaaagttattctggctgcatgtggagcttagaggacttgggagcacaacttggcaggcaagataggctttaaaatgcagaacttctctagcttgtttaaaaaaaagaccacaatatcaaagagaaaatcagagtggggggcagtagcaaacaagggttgggaagagtaaatgaggaaacaaaaaactaaatatacaaatacacacactatatggatatctatatctatacacacacacacacacacacacacacacacgcacgcacacacagctc

SEQ ID NO: 564398 - DNA, 282 bp, Homo sapiens
agaacatcactaaagaaacattttctgcttctaatagcctcccatcaactttgatgaacttacttggaccccacattacaaaggtatttctgtaactacaaacacaaaaactcttatatgttaagtactcggtgcattcctatttttctctagaatattctttagcaacttcaaacttgcttttcattctatcaaatttcttttttaaaattccatatatataacacyggatagtactaggattttatttcaaaaacttatatattttttaaattttttcaa

SEQ ID NO: 564399 - DNA, 570 bp, Homo sapiens
aatgcaaatcaaaactacaatgggatatagtrtcatctcacccagttaaaatggcttatatccaaaagacaggcagtaacaaatgctggggacaagatggagaaaagcaaaccctcatatgctgtggatgggaatgtgaattagtacaaccactatggagaacagtttggaggtacctcaaaaaaactaaaagtagagtgtgatggttaatactaagtgtcaacttgattgaaggatgcaacgtattgatcctgggtgtgtctgtgaaagtgttgccaaaggaaattaacataggagtcagtgggctgggaaaggcagacccatccttaatctgggtgggcacaatctaatcagctgccagcatggctagaatataaagcaggcagaaaaacgtgaaaaaaataaactggcctagcctcccagcctacatctttctcccacgttggacccttcctgcccttgaacatcagactccaagttcttcagttttagactcagtctggctttccttgcctctcggcttacagacggcctattgtgggaccttgtgattgtgtgagttaatactta

SEQ ID NO: 564400 - DNA, 570 bp, Homo sapiens
aatgcaaatcaaaactacaatgggatatagtgtcatctcacccagttaaaatggcttatatccaaaagacaggcagtaacaaatgctggggacaagatggagaaaagcaaaccctcatatgctgtggatgggaatgtgaattagtacaaccactatggagaacagtttggaggtacctcaaaaaaactaaaagtagagtgtgatggttaatactaagtgtcaacttgattgaaggatgcaacgtattgatcctgggtgtgtctgtsaaagtgttgccaaaggaaattaacataggagtcagtgggctgggaaaggcagacccatccttaatctgggtgggcacaatctaatcagctgccagcatggctagaatataaagcaggcagaaaaacgtgaaaaaaataaactggcctagcctcccagcctacatctttctcccacgttggacccttcctgcccttgaacatcagactccaagttcttcagttttagactcagtctggctttccttgcctctcggcttacagacggcctattgtgggaccttgtgattgtgtgagttaatactta

SEQ ID NO: 564401 - DNA, 570 bp, Homo sapiens
aatgcaaatcaaaactacaatgggatatagtgtcatctcacccagttaaaatggcttatatccaaaagacaggcagtaacaaatgctggggacaagatggagaaaagcaaaccctcatatgctgtggatgggaatgtgaattagtacaaccactatggagaacagtttggaggtacctcaaaaaaactaaaagtagagtgtgatggttaatactaagtgtcaacttgattgaaggatgcaacgtattgatcctgggtgtgtctgtgaaagtgttgccaaaggaaattaacataggagtcagtgggctgggaaaggcagacccatccttaatctgggtgggcacaatctaatcagctgccagcatggctagaatataaagcaggcagaaaaacgtgaaaaaamtaaactggcctagcctcccagcctacatctttctcccacgttggacccttcctgcccttgaacatcagactccaagttcttcagttttagactcagtctggctttccttgcctctcggcttacagacggcctattgtgggaccttgtgattgtgtgagttaatactta

SEQ ID NO: 564402 - DNA, 570 bp, Homo sapiens
aatgcaaatcaaaactacaatgggatatagtgtcatctcacccagttaaaatggcttatatccaaaagacaggcagtaacaaatgctggggacaagatggagaaaagcaaaccctcatatgctgtggatgggaatgtgaattagtacaaccactatggagaacagtttggaggtacctcaaaaaaactaaaagtagagtgtgatggttaatactaagtgtcaacttgattgaaggatgcaacgtattgatcctgggtgtgtctgtgaaagtgttgccaaaggaaattaacataggagtcagtgggctgggaaaggcagacccatccttaatctgggtgggcacaatctaatcagctgccagcatggctagaatataaagcaggcagaaaaacgtgaaaaaaataaactggcctagcctmccagcctacatctttctcccacgttggacccttcctgcccttgaacatcagactccaagttcttcagttttagactcagtctggctttccttgcctctcggcttacagacggcctattgtgggaccttgtgattgtgtgagttaatactta

SEQ ID NO: 564403 - DNA, 492 bp, Homo sapiens
gactcccttgttagcagctaatgtagctggtgactttaagttgaagccattgctcatttaccattctaaaaatcctaggacccttaagaattatgttaaatcttctctgcctgggctctgaaatggaactacaaagctaagatgacatcacacgtgtttacagcaaggcttactgaatattttaagcccactattgacatctgctgctcagaaaaaaatattcctttcaaaatattactgctcattgacaatgcacctggtcattgtcaatgagcagtaataagttctgatggagatatacaagagattaatgttgttttcatggctgttaacataacrtccattctgcagcccatggatcaaggagtaatttagactttcaagtcttactgttaaagaaatgcatttcataagactgtagctgccatagataatgattcctctaatggatctggggaaagtaaattgaaaaccttctggaaaggattcacc

SEQ ID NO: 564404 - DNA, 570 bp, Homo sapiens
cagcctggccaacatggtgaaacgctgtctgtactaaaaatacaaaaattagccaggcatggtggcgggcacctgtaatcctagctactcaggaggctgaggcaggagaatctcttraacccggggggcagaggttgcagtgagccgagattgcgccattgcactccagcctgggcaacaagagtgaaactccatcaaaaaaaaaaaaaaagaaaaaagaaaatttgtgattcatgggagaaggttaaaatatcaacattaataagagtttggaagaagttgattccaaacttcatggatgactttgaggggttcaagacttcagtggagaaagtaactgcagatgtggtgtcaatagcaagataactagaattagaagtggagcctgaagatgtgagtgaattgctgcaatctcatgataaaacttgaatggatgagaagctgattcttacggatgagcaaagaaagtggtttcttgagatggaatctactgtgggtgaagatgctgtgaaaaccattcaaatggcagcaaaggatttagaatattatataaacttagttgataaagca

SEQ ID NO: 564405 - DNA, 623 bp, Homo sapiens
acagcccctttgctgagcctctacaggggatgcagcttttattagcttccagtgttccatctctgcatctgctggaaggtttttataccttgactttgaattttctctggcacactcaaatagtcacaaaaagaaggatctccaatctcaaaattgcaaagagagaaaggcccaggaagattgattgcccagactccccaagaacacatatagatggaccaagactgtcagatttcttcagaagtctttttgttttctttcargaagttaaaaaaaacaggtgtaaatctctcatacaaggttttaaatataatgatgataaataccacagtgttacaatgctttttgactgttcccaattaattaagaaggccatcaaacttactaagtggatgtaagatatagctctgcttatatgtaagatgcatgacaaaatctactctgaccaatgttctgaatggtaactgaaggattatggaataacaggggcccaagtgtgtgttttcaaactaaagatcttttcctcttttcacagtgtgattcagaacagagtagccattggaagtctggctcaaaacaaatctgaccttttagaaactcctgggcagatacatattaataaa

SEQ ID NO: 564406 - DNA, 623 bp, Homo sapiens
acagcccctttgctgagcctctacaggggatgcagcttttattagcttccagtgttccatctctgcatctgctggaaggtttttataccttgactttgaattttctctggcacactcaaatagtcacaaaaagaaggatctccaatctcaaaattgcaaagagagaaaggcccaggaagattgattgcccagactccccaagaacacatatagatggaccaagactgtcagatttcttcagaagtctttttgttttctttcaggaagttaaaaaaaacaggtgtaaatctctcatacaaggttttaaatataatgatgataaataccacagtgttacaatgctttttgactgttcccaattaattaagaaggccatcaaacttactaagtggatgtaagatatagctctgcttatatrtaagatgcatgacaaaatctactctgaccaatgttctgaatggtaactgaaggattatggaataacaggggcccaagtgtgtgttttcaaactaaagatcttttcctcttttcacagtgtgattcagaacagagtagccattggaagtctggctcaaaacaaatctgaccttttagaaactcctgggcagatacatattaataaa

SEQ ID NO: 564407 - DNA, 495 bp, Homo sapiens
tgctgggaaatttcggagctagactggaatgagtctaaggaaacttgccagtccattataccttcagttataaaaggagaaaactcatttggtttaaattcgtttgtttagaatagcattaaaaggcgattcttcctatttaaagaacagagttgtctgccattctctcgtttattcctcctccctcccgtgcccttgtatattttcttagtgactgagcacctgagccagcactgattttttgtgtgttttgttgtttttgttttgggagacggastctcgactctgtcgcccaggctggagtgcagtggcgtgatcgcggctcactgcaacctccgcctcccgggttcgagcaattctcctccctcaccctcccaagtagctgggactgcagacacgggcccggctaattttttgtattttagtagaaacgggtttcaccgtgttgcccaggcaggtttccacctacggagctcaggcagtcccgcccgcctc

SEQ ID NO: 564408 - DNA, 572 bp, Homo sapiens
actataataaacagagttctgttattgataagccacctggtttatgttatttggttatagtagccccagttaagatgcataatgatgttagtgatacattgcttttgtttaatactttggagtttatgaagcattttcctaacatattttcatttatttattcagcaaaaatttttaagcmtgattatgggctagccactctgctacggaccaaatatgtgagtaagacataggctgtacccttccccatgaggatatcatgtggtaatcacaatataaaagcccgtcagggcacagtgatggcccagaggagagagtgctcctcaccatcagggatagaaagagaagacttcttggatgatgtgatctttatttaagctggtgtgtcaaagataagtaggagtttatcaggcaaaagggatagggaaatggcaaagacaattcagggagttaaaaaaaaaaaaacggatgcacaaaggcacagggagttgtctcatgtgctgcctgcaaaaccccaggaagtaggcatttccgactctcgcagttttatagatgaggaaacagagacacaa

SEQ ID NO: 564409 - DNA, 553 bp, Homo sapiens
tgactgaggtaaaacatagagcaaagctctgagacaaaatgacctcaaggttatttgctatacagaattggggtagatactagttcatgaaaagaaacaattccaagccagagaggacaagagtcaaggccatcctttgaatataacttccattcaatttaagaaacctggaaaacatccaagtatgatcttagggctatagtcatgaaatgctaaaagccactgctgggtcagaataaactgaaaagaagcataaatgtcacctgaatagaatataagaatgtatgtcatccagaggttagtatattaatggaattgaagatgtaaagtacaagaagtcattatggtactttattcaattatttttagaaaaatcggttactaaagccaaagcagaaaaagttgtatatgaattgtgttttgatttggttaagccagacttggatacatttattattcaataaggcaaacatttattgaatcctcctgtgtgccaggtacagtgggtataaaaataaayaagacataatatttgttctcaagaaattcacag

SEQ ID NO: 564410 - DNA, 531 bp, Homo sapiens
gaaataaatgaaattgaaatggaaaaaatacaaaaaaatcaatgaaaccaaaagttggttttttttgaaaagatacacaaaatcaatgaacyttttagccagactaagaaaaagagacctaactaaataatatcagataagaaaaaggaaacattacagctgataccacagaaattcaaagggttattagagactactataagcaatatatgccaataaactggaaaacttagaagaaattgataaactccaaaacatatacaacctaccaagattgaaccgtgaagaaatacaaaataccaaacttgaatagatcaataacaaggaatgagattgaagctataataaaaagtctcccagcaaagacaagcctgggctccaatggcttcactgctgaattctaccaaacatttaaagaacgaatgccaatgctactcaaactattccaaaaaacggaggaggaggagggagtacttccaaactcactctacaaggccagtgttaccctgataccaaaaccagacagaaaca

SEQ ID NO: 564411 - DNA, 527 bp, Homo sapiens
ggaacaactaagtcagttgcttcctacagataaagtaagacaaggactcaggaatcaccattttattgggcaattagaggtcattggttttcttgtaagagatgctttgttgaagcagtgggtgcaaaggccctatagaatgggttcaaaaacagaatggggcataattaygaatatctaagtgttttaaagaagcttcctacaccacagttaacctggaaatgatacattcttgaacacacattgcattgctagcttcaaaggagatccgaagaacacacccacactctctcatatacacaaaggagaactgagcagaaagaagcggctgtaggaactgtgacggccactgtgggagttcccaggacacaggctggaatgcccagaacttagtccaaaatgccaatagtagggccatacaaatagagtcagaattagagcaacaggaagaataaaaaaagtagcaatccaggcttgacctaccactgggattagcctgagattgaaatactaaagtttcatgatga

SEQ ID NO: 564412 - DNA, 628 bp, Homo sapiens
catcatcctaagcaaattaacacagaaacagaaaaccaaataccacatgttctcacttrtaacggcaagctaaacactgagtacttatggacataaagatgggaacagtagacattggtggctactataaaagggaagggagagaggggcaagggcttaaaaagtacctatcaggtactatgctatcagtacctgtgtgatagaatcatttatatctcaaaccttagcgtcacacaatacacccatgtaacaaatatgcacatgtgccctctcaatctaagataaaagttgaaagtattttaaaaaagaaaaaaaaatgacattatcagagactctgattaaataggaatagcattaagttttccttttatagaattaaatcaaaataattcaacagaatttttatgacagttctcattatacacacacagagagagagagagaataagagtatttgcttactttatttttgtggttttttaattatgcaaatttttgaaattaggcaaaactatcactttcaaaaatttacaatttatttttaatcatatatatgaataacctaagaaatgtccttctctgttggaggataatcagaatggtgttaaactgcctctacttttttaac

SEQ ID NO: 564413 - DNA, 628 bp, Homo sapiens
catcatcctaagcaaattaacacagaaacagaaaaccaaataccacatgttctcacttgtaacggcaagctaaacactgagtacttatggacataaagatgggaacagtagacattggtggctactakaaaagggaagggagagaggggcaagggcttaaaaagtacctatcaggtactatgctatcagtacctgtgtgatagaatcatttatatctcaaaccttagcgtcacacaatacacccatgtaacaaatatgcacatgtgccctctcaatctaagataaaagttgaaagtattttaaaaaagaaaaaaaaatgacattatcagagactctgattaaataggaatagcattaagttttccttttatagaattaaatcaaaataattcaacagaatttttatgacagttctcattatacacacacagagagagagagagaataagagtatttgcttactttatttttgtggttttttaattatgcaaatttttgaaattaggcaaaactatcactttcaaaaatttacaatttatttttaatcatatatatgaataacctaagaaatgtccttctctgttggaggataatcagaatggtgttaaactgcctctacttttttaac

SEQ ID NO: 564414 - DNA, 615 bp, Homo sapiens
gtttttgcagtgctggcttggtagtggcgaattctctcagcacttgtctggaaaagactgttatctttccttcatttgtgaatcttagtttcactggatacaaaattattggctgataattgtattgtttaaggaggctaaaaaaggaccccagtcccttctagctgtagggtttctgcygagaaatctgctgttaatctggtaggttttcctttacagattacctgatccctttgcctcacagctcttaaagattctttccttcttcttgactttagataacctgatgactatgtgcttaggtgacgatctttttgtgataaatttctcaggtgttctttgagctacttgtatttggatgtctagatctctagcaaggccagggaagttttccttgtttattccctcagacatgttttccaaacttttagatttctcttcttccttaggaacaccacttattcttaggtttggatgttcaacatagccccaaatttcttggaggctttgttcattaaaaattgtttttttctttgtctttgatagattgggtcaattcaaaagccttgtcttcaagctctgaagttttttcttcaacttatttgaatttattgc

SEQ ID NO: 564415 - DNA, 505 bp, Homo sapiens
ctaaatgttaaaaataattacttcaatttctatagttctgtcagcaaaacaaaaacaaaacacaatatcatctaaatattggtgaattctattataatagtgtcttcttgggtcccaccagaattcatgccttctattttgctcttgcagttttgcatctattttaaaatagtatatcccaagtccttttattgaattaagaatgtgaataagagcagttataagtcatacaaaaaagataaatcactagtccgtctttattatcattttcattgtggtaatattaaggattccatacaaacttaccttcccattgtttcacggcaagacacttgattgttttaattattatttgaagatttgtgtgacyttgtgttatattaatgaatttttttatttttgtgagaggtcagtgccttgcctcatattgtaatcttggttgattaaatcagaaattcctgacttaaagaagtaagcttatagatatgcattgactgttatttgg

SEQ ID NO: 564416 - DNA, 505 bp, Homo sapiens
ctaaatgttaaaaataattacttcaatttctatagttctgtcagcaaaacaaaaacaaaacacaatatcatctaaatattggtgaattctattataatagtgtcttcttgggtcccaccagaattcatgccttctattttgctcttgcagttttgcatctattttaaaatagtatatcccaagtccttttattgaattaagaatgtgaataagagcagttataagtcatacaaaaaagataaatcactagtccgtctttattatcattttcattgtggtaatattaaggattccatacaaacttaccttcccattgtttcacggcaagacacttgattgttttaattattatttgaagatttgtgtgaccttgtgttatattaatgaatttttttatttttgtgagaggtcagtgccttgcytcatattgtaatcttggttgattaaatcagaaattcctgacttaaagaagtaagcttatagatatgcattgactgttatttgg

SEQ ID NO: 564417 - DNA, 545 bp, Homo sapiens
actccataatgggacaatggggtggaagcagaggagagcagacagaacctgggaagatttgctgaagtacttaaatggagcagcaggggcttcataagaacatttcaacctcatttctggtgaggtggtatgatggtttggatatggtttgccgccaccacacrtcatcttgaaattttattcccaatatggtgttgttggaaggtgagtcctagtgaaaggcatttgggctatgggggtgggtccctcatgaatgttttggtgctgttcttacggtaatgagtgagttctcactcttatgagagtgcattaactcttgtgggatcagattagttcttgccagatgtagctgttataaagccaggatgtcccttagattttgttctcttcgcacatgttcacttcgcctttgaatttctccaccatgttttgacacaacacaaaagccctcaccagaagccagaggcatgatctttaacttctcagcctgcagagcgatgagccagataaacctcttttctttatatatcactaagtctcaggta

SEQ ID NO: 564418 - DNA, 545 bp, Homo sapiens
actccataatgggacaatggggtggaagcagaggagagcagacagaacctgggaagatttgctgaagtacttaaatggagcagcaggggcttcataagaacatttcaacctcatttctggtgaggtggtatgatggtttggatatggtttgccgccaccacacgtcatcttgaaattttattcccaatatgktgttgttggaaggtgagtcctagtgaaaggcatttgggctatgggggtgggtccctcatgaatgttttggtgctgttcttacggtaatgagtgagttctcactcttatgagagtgcattaactcttgtgggatcagattagttcttgccagatgtagctgttataaagccaggatgtcccttagattttgttctcttcgcacatgttcacttcgcctttgaatttctccaccatgttttgacacaacacaaaagccctcaccagaagccagaggcatgatctttaacttctcagcctgcagagcgatgagccagataaacctcttttctttatatatcactaagtctcaggta

SEQ ID NO: 564419 - DNA, 527 bp, Homo sapiens
gatagtgtgcaatccactcataactctagtatgaagaaaaattgatcaaaaacaataatagctatagcaacctgctaaatgataggtaatataaaatatgtaaattgaggtgactaaaagtcaaaatgtaatgggagtggagttaaagtttagatgttttcttagtgtttctttgcctctgtttctattcttgtatttgtaatctaaagtaagttgtcatctctttaaaataacttattatatmtgtaagatttttttgttaaatctgataataaccacaatgcaaaaacatataatagattcaccaaaaataaaaagcaatgaatgaaaacatactaccatagaaaatcatttaaccacataggaagacagtaagaaaggaagagagaattgatcaaacaaccagaaaacaagcaacaaaatggcagtagtaagtccttacttgtcaacaataacactgaatgtaagtaaactcaattctgcaattaaaagacagagtgggtgaatggatacgaaaagatgatcca

SEQ ID NO: 564420 - DNA, 554 bp, Homo sapiens
tctggggaataccaaggaggagcatgaagctgactaatataatagcctttctgtgtcaatgatcaatatatggcttttcattagtcttacctctacyaaccagacaccctctatgccttcatttttcttcaggagggggaaaacatttatttctttaataagtatatattgcagatatgttctggctccagggacccaaatttgaacaaatgacatactgaaattcggaactgggcattgaagagcaaattcaaaccatttaagaggttttggttaaaattatcacctccccatcagactcatcccagggatgcaaggatggttcaacatatgcaaatcaatcaatgtgatatatcaatagaataaaagaacaaaaaacatatgatgatttcaattgataatgaaaggcattttataaaattcaacattctttcatgataaatctctcaggaaactgggtagagaaggaaaataactcaacacaagaaaaaccatatacgacagaacccagctaatgtcacactgaatagggaaaaactgaaagcctttcctct

SEQ ID NO: 564421 - DNA, 554 bp, Homo sapiens
tctggggaataccaaggaggagcatgaagctgactaatataatagcctttctgtgtcaatgatcaatatatggcttttcattagtcttacctctaccaaccagacaccctctatgccttcatttttcttcaggagggggaaaacatttatttctttaataagtatataytgcagatatgttctggctccagggacccaaatttgaacaaatgacatactgaaattcggaactgggcattgaagagcaaattcaaaccatttaagaggttttggttaaaattatcacctccccatcagactcatcccagggatgcaaggatggttcaacatatgcaaatcaatcaatgtgatatatcaatagaataaaagaacaaaaaacatatgatgatttcaattgataatgaaaggcattttataaaattcaacattctttcatgataaatctctcaggaaactgggtagagaaggaaaataactcaacacaagaaaaaccatatacgacagaacccagctaatgtcacactgaatagggaaaaactgaaagcctttcctct

SEQ ID NO: 564422 - DNA, 459 bp, Homo sapiens
tttcctcatttaggtcaatcaactaagcccacaaggttgggtttttgttttgttttcacctgaataatatcattcttttactatagctayatagtttgatgggtccttatacaagactttacaaatagcacttcattcttttttccctggttatctatttaattctgtctttcagtatatttacagcctctcccaactttgtgtcgtctgtacaaataatgtttaatagaatcataacagctaatcaaacaatttttaaaatgtggggcatgagaatgtttttaaaaaaggtgggcagtaactcctgtgccatggtttgtattataggttttgagtaggtttgaaagtgacgttccaatattggacaaggtctctctagcatttagaatttctaatcacttataattttttatgatctctttcttcaagttttaaaataatatttaataaatgatttct

SEQ ID NO: 564423 - DNA, 547 bp, Homo sapiens
tctttctgtccaacattcctcaccagaactctaggactctaactctgcgagggagctcagctcaccctttcttgtttctccctccaaggagaaacagattggtcagattccaggatgttgattgagccaagtcttcagtagtgagcagggtctaaagatttcctcccttgatgtgggttactagacttcccctgccatccatgagaagggagcagtgagatcccctgtggttttcttcctgatgctgaaggccagcaatctctctcttctctcttgtctatagtttagaagtgtcaagtagaggacctgcaagtggtcaacctctatctttattctgcttcttccttctctatatctaaaggaggagagatgtacctgtgccacagtctctgtgttttctctgtacctattctgtcactgttccattttctctccctgcatgatattgactggaagatggtaaaatcatgagactcaagttaagccccagtaagtaaagtgaagaccacagtaggacttgaacycaggtcatagactttggaccagc

SEQ ID NO: 564424 - DNA, 636 bp, Homo sapiens
tatactgcaataaagagaataatataatgactccatcatacccatcacccagcttcaataattatcacctatggtcagtcttgttttgtctgtgcctctcccattgcaccaactcctcttctcccactctgtgggttattttgaagaaaatcccagacatcatatcatttcacctgtaaatttttaaaagtcataccttattaattttatatgcaactgctggtatagtatattctcatggaaagcactcagtaaacaaattcatttgtttgctgaaccaatacacaattgagtaaaagagaaaaaagcaggcagaagccacacgatgaagggctttgtctgtcgtcttggagtttggcctctattctgtgggccccagggagtcmgtgcagggtcttgagtcagggaatgacatacagtggccattctacctaaagtgttggaagggagagtttgaggtggaagttgcatctgcagagaggtttttaggggctatattacaagtgtagaccatcaaattataactacatatgggggagaaagtagaggtggagggggatacaaaaggcagaagaaaaagcagaaatagaaagaggaagaggaagaaaagtggatagtagagaatgaaggaaaaca

SEQ ID NO: 564425 - DNA, 443 bp, Homo sapiens
ggaattcaagaccagcctgtccaacatagtgaaaccccatctctattaaacatacaaaaactagccgggcgtggtggtgcacacctgtaatcccagctactcgggaggctgaggcaggagaatcacttgaacccaggaggcggaggttgcagtgagccgagatcacgccaccgccctccagcctgggcaaaaaagtgagactccgtcttggaaaacaaacaaacaaaayacacacacacacacacacacacacacacacacacacacacacatatatatacacacatatatgtgtatatatatacccacgtatatatatacacatatatgtgtatatatatacccacgtatatatacacatacacacacacatatacacacatatatgtacacacatatatatacacacgtgtgtgtgtatatatatgtgtgtatgtgtgtgt

SEQ ID NO: 564426 - DNA, 459 bp, Homo sapiens
cctaattaaactaaagatcttttgcatggcaaaaagaacagtcagcagagtaaacagamaacccacagagtgggagaaaaatcttcacaatcgatacatctgacaaaagactaaaatccagaatctacaatgaactcaaaccaatcaataggaaaaaaacaagcccatcaaaaagtgggctaaggatgtgaacagacaattatcaaaagaagatatgtaaatggccaaaaaacatatgaaaaaatgctcaacatcactaatgatcagggaaatgccaatgaaaaccacaatgtgataccaccttactcctgcaagaatggccataataaaatataaaaaaacagtagatgttggcgtgaatgtggtgaacagggaacacttctacactgctggtgggaatgtaaactagtacagccactatggaaaacagtgtggagattccttaaagaactaaaagta

SEQ ID NO: 564427 - DNA, 596 bp, Homo sapiens
gctctctcctctttccccaggatagcccagccttgttaacacagtggaggtagcattccaaaaaagagcagaaatgagcaagatctctgaggtcagacttggatttgacacaccttcattttgccacattgtccccgccagagatcccagcccagatctcagggtggggaaatagactccatctcttgataggaggagcagcaaagtcacatgataaagaatgtgggtrtggggagtggtgaagaattgaggtcatttttagtatcagtctgcctcatatgggtaattttctcacacattaccccagtagcaaaaaagagaattttatttattaaccccccctccaaatattctttatgatcttaaaatccacatgtgtagaagcaattttgatgtgatttagagcacattaggaacttttgtgccttattaatagaactcttaggttctaaaaccctagggttaagattttaaaaattttacactagggctgttttctttttctttctgtaacattttctcttcccatttccagatttccccacctgaagacatgttagttttattttgtcagtttttaaattaacaatagctac

SEQ ID NO: 564428 - DNA, 596 bp, Homo sapiens
gctctctcctctttccccaggatagcccagccttgttaacacagtggaggtagcattccaaaaaagagcagaaatgagcaagatctctgaggtcagacttggatttgacacaccttcattttgccacattgtccccgccagagatcccagcccagatctcagggtggggaaatagactccatctcttgataggaggagcagcaaagtcacatgataaagaatgtgggtatggggagtggtgaagaattgaggtcatttttagtatcagtctgcctcatatgggtaattttctcacacattaccccagtagcaaaaaagagaattttatttattaaccccccctccaaatattcyttatgatcttaaaatccacatgtgtagaagcaattttgatgtgatttagagcacattaggaacttttgtgccttattaatagaactcttaggttctaaaaccctagggttaagattttaaaaattttacactagggctgttttctttttctttctgtaacattttctcttcccatttccagatttccccacctgaagacatgttagttttattttgtcagtttttaaattaacaatagctac

SEQ ID NO: 564429 - DNA, 478 bp, Homo sapiens
cgggttcacgccattctcctacctcagcctcccgagtagctgggactacaggcgcctgccaccacatccagctaatttttttgtatttttagtagagctggagtttcaccrtgttagccagaacagtctcgatctgctgacctcgtgatccacccgcctagggcttccaaagtgctgggattacaggtctgaggcatcactcacagccttttattttattttattttattttattttttgagacagagtcttgctctgtcacccaggctggagagcagtggtgtgacttggctcactgcaacttccacctctcaacttcaagcaattctcctgccttagcctccccagtagctagaattacaggtacccaccacaatgcccagctaatttgtgtatttttagtagagacagggttttgccatgttggccagtttagtcttgacctcctgacctcagaagatccacccaccttgacctc

SEQ ID NO: 564430 - DNA, 515 bp, Homo sapiens
ttgcagtgagccaagaccacgccattgcactccagcctgggcaacagagcaagaatctgtctcaaaaaaaaaaaaaaaagaaagaaagaaaagatataaagmacagtatcttattcagcaatagcaaagtctctccaactatttaaggagcaactctaaatataggaccccaaaacctattcaattttaagtatgaagatagagaaaaaagtcaggaaaagtatattatttcaaaagcatatttggattagaaaaaatgtcattaggtattaatgaataatgctaggtaaaaatggaaaaatctgcagtattattaggcatttaataaaacattaagaaatgtaatttaagaaggtttaagccaggacacccagaaaagtttattttagggtactaaggaagatgctatcatagactacaatgcgttgtggtggtaagatgctgaactttgatttagaacatattggttcaagtctttattctgccacttgctgttttagattactttggccaaa

SEQ ID NO: 564431 - DNA, 528 bp, Homo sapiens
ttcctgggctcaagcaatcttcccacctcagcctcccaagtagctgggactacacgtgcacaccaccacatctggctaattttttwaaaaaattttgtatagatggagtctcgttatgttgcccaggctggtttcaaactcctgggctcaaaccatcgttccacctcagcctaccaaagtgttgggtttataggtgtgagccactacacctggcctgtattgttttcttcttattattattatttcttttttgacacagggtctcactctattactcaggctggagtgcaatggcagatcttggctcacagcagcctcaaccacccaggctcaagcaatcctcccatctcagcctcccaagttactgggactacaggccgtgctgcttggttaattaaaataaattttttgtagagatggggtctcactatattgcccaggctggtctcaaactcctaggctcaagcaatcctccagcctcagcctcccaaagtgctgattacaggtgcaagccactgcacccagcct

SEQ ID NO: 564432 - DNA, 528 bp, Homo sapiens
ttcctgggctcaagcaatcttcccacctcagcctcccaagtagctgggactacacgtgcacaccaccacatctggctaatttttttaaaaaawtttgtatagatggagtctcgttatgttgcccaggctggtttcaaactcctgggctcaaaccatcgttccacctcagcctaccaaagtgttgggtttataggtgtgagccactacacctggcctgtattgttttcttcttattattattatttcttttttgacacagggtctcactctattactcaggctggagtgcaatggcagatcttggctcacagcagcctcaaccacccaggctcaagcaatcctcccatctcagcctcccaagttactgggactacaggccgtgctgcttggttaattaaaataaattttttgtagagatggggtctcactatattgcccaggctggtctcaaactcctaggctcaagcaatcctccagcctcagcctcccaaagtgctgattacaggtgcaagccactgcacccagcct

SEQ ID NO: 564433 - DNA, 528 bp, Homo sapiens
ttcctgggctcaagcaatcttcccacctcagcctcccaagtagctgggactacacgtgcacaccaccacatctggctaatttttttaaaaaattttgtatagatggagtctcgttatgttgcccaggctggtttcaaactcctgggctcaaaccatcgttccacctcagcctaccaaagtgttgggtttataggtgtgagccactacacctggcctgtattgttttcttcttmttattattatttcttttttgacacagggtctcactctattactcaggctggagtgcaatggcagatcttggctcacagcagcctcaaccacccaggctcaagcaatcctcccatctcagcctcccaagttactgggactacaggccgtgctgcttggttaattaaaataaattttttgtagagatggggtctcactatattgcccaggctggtctcaaactcctaggctcaagcaatcctccagcctcagcctcccaaagtgctgattacaggtgcaagccactgcacccagcct

SEQ ID NO: 564434 - DNA, 528 bp, Homo sapiens
ttcctgggctcaagcaatcttcccacctcagcctcccaagtagctgggactacacgtgcacaccaccacatctggctaatttttttaaaaaattttgtatagatggagtctcgttatgttgcccaggctggtttcaaactcctgggctcaaaccatcgttccacctcagcctaccaaagtgttgggtttataggtgtgagccactacacctggcctgtattgttttcttcttattattattatttyttttttgacacagggtctcactctattactcaggctggagtgcaatggcagatcttggctcacagcagcctcaaccacccaggctcaagcaatcctcccatctcagcctcccaagttactgggactacaggccgtgctgcttggttaattaaaataaattttttgtagagatggggtctcactatattgcccaggctggtctcaaactcctaggctcaagcaatcctccagcctcagcctcccaaagtgctgattacaggtgcaagccactgcacccagcct

SEQ ID NO: 564435 - DNA, 509 bp, Homo sapiens
caaagttaaaagacttctaagtttgttagaagtattatcaagatagtatgatctggcttaaggatagacatatagctcagtggaacagaactgctagtctgaaaacaaattyttatatttatagtcaattgattttggggaaaggtgccaaacgagcaataggctggggacagtatttgcaaaacacatatctgatagaggtcttctgtccagaatatacaaacaactcttacaacttaagaataaaaagataacccaatgaaaacatcagcacaaaatttcaatagacatttctgcacagaagatgtacaaatgactaataagcacatgaaaagatgctccacacaattagtcattagagaaatgctaattaaatccacaagatactatttcttttttttttttttttttttttttttttttgagacagtctcactctgtcacccaggctggagtgcaatagcatgatctgggctcactgcaacctctgcctcccggattaaaatgat

SEQ ID NO: 564436 - DNA, 509 bp, Homo sapiens
caaagttaaaagacttctaagtttgttagaagtattatcaagatagtatgatctggcttaaggatagacatatagctcagtggaacagaactgctagtctgaaaacaaattcttatatttatagtcaattgattttggggaaaggtgccaaacgagcaataggctggggacagtatttgcaaaacacatatctgatagaggtcttctgtccagaatatacaaacaactyttacaacttaagaataaaaagataacccaatgaaaacatcagcacaaaatttcaatagacatttctgcacagaagatgtacaaatgactaataagcacatgaaaagatgctccacacaattagtcattagagaaatgctaattaaatccacaagatactatttcttttttttttttttttttttttttttttttgagacagtctcactctgtcacccaggctggagtgcaatagcatgatctgggctcactgcaacctctgcctcccggattaaaatgat

SEQ ID NO: 564437 - DNA, 585 bp, Homo sapiens
tttggctctgtgtccccacccaaatctcatgttgagttgtaattcccaatgtcaggggagggacctggtgggaggtgtttagatcataagatggatttcccccttgctgttctcatgacagtgagtgagttctcatgagatccggttgtttaaaagtgggttgctctctctcccactctgccatgtgaagaaggtgctcagtttccctttgctgtctgccatgactgtaagtctcctgaggcctcccaggcttcccttcaccttctgccatgattgtaagtctcctgaagcttcccagccttcccttcaccttctcccatgattgtaagtctcctgaggcctcccagccgtgcttcctgtacagcctgtggaacagtgagtcaattaaacctcttttcttcataaattacccagtctcaggtagttctttatagcagtgtgagaagggactaatacaggtgctgagcttaatacctgcatgatgaaataatctatacaacatatccccataatacaagtttacctatgtaayaaacctgcacttgtatccctgcatttgaaattaaagtttttaagtcaaaaaaa

SEQ ID NO: 564438 - DNA, 486 bp, Homo sapiens
gctactgtgtaccaggtagggagggaagagcaaacaggaaagacgtgatttttgttcttgtggaatttacgtgatgtcccttagtcataagccatgctgatccttccctatcacccagaaggaaagacaaccacatgccaatagtgcaaaatagagtcaggtcaaattgaaaattatgtaaagtcattgtgtgtacaaaagaacagtccctgaactgaggagacctcacgccaaaactgcaagaggaagctcagaggtgtggcctgatgcgctgctttagaaagcaaaaacgaggatgcatgtggccctcgcctatgcataagcacgtatgtgacgtcagcacgcgacaagaaagcaaagcgtcagtctcatggtcaaatcgagccttttcagagaaatcaggatggygtaagttttggttacacggccacaggcggttgggctagaagtattcatccaaactgtggcctccgtttttacttttct

SEQ ID NO: 564439 - DNA, 453 bp, Homo sapiens
tgcacaagaagtgtatttttatatgcatgtgttcgtgtctgtgcacacacaaagcctggaaaaatgaaaagtccaaggggagcccttggatggccgtccaaaggccgccatgcctcagtgcagttctcctcactgcagccaccgtaagcgcttccagtctgaggtctggacrcagacaacattgattttctgatggatgggcaaagataacacatttgatcaataacaatggagctccatggccgagagggaaaacacaacaattagcctagtgcctttgtctgagaagggctggaaagtgaatgttaagactgtcattggcatggaccacaggcagcaggagagaaagagtctattcttcccaggcaattcagatacccatccgtgctccagcagccacctgagcccctggagcccatctgcaggctgtaaagaggacggccttggggaatg

SEQ ID NO: 564440 - DNA, 595 bp, Homo sapiens
ctctatcttcaaacatttcttttctcggcttctggcaatccaattatatgcatttgaacctgttgatataatctagcaaacaattcaggccttatctaaaatactaaaaaaaggaaaaaatgtttcatttgcttttttcttggataattctattaatagcttcaaattcaattactcttttatctgtcatattcatktggctttacacccatctcatgaatatcttctctcaaaaatttaacttttcagtactggagttttcatgtttattgtatctatttctttactgagactttctgtttctctgtagatctttaattagaaatatgactaatttgagagataaaaaacatcagtgggggcaggttttttgggaggagggcacagttttgtatgtcttacttcaggaaccctattctcactgtaaaggacggagaaaaatttcctactacttcccacaggagaaggggaaaatatccatgaactacgcacagagcccctgctcccctagcaaggcctacccacaagggaaacaatttcaccatagcctgaatggggttcaccagagcctaatcctaactgaactggggaggag

SEQ ID NO: 564441 - DNA, 634 bp, Homo sapiens
agttcccttatctctggtagtctgcattgcaaattctagctgccttggcctctcaaatctacagtctctgtctactcaaatcagcaaaattgctggtctctgtttgatattcccttttctgtgctgcggcctggaaatttcttccaagcagtaagctatgtaattgtatggctggcttagtttctttccggtctttccagtgttattttcttcctgtgctgactattgtttaaggttggaaatggttgtctcatgtatcttatttcgttttctggttattcaaggcagcaggttgctgggtggaagcagcatttctcagcaggttgtttttcacagtggaatagattagcaattctccaaatgctttctgtattgcaacatggtaaataccatgatgacgttgggtgctaggtttctcactgttggcaaagggagagacaaatatgaaatgtagcaaggctgggaagaattccattatactggatgggaatcagagttataagcatgaactcatggttttatagacacagacataaatataagtagaaagacagamaggcaggtatgcacgtttcttattttgtttgcttagagacctgaaatgaatgacaccattagtaatgagcccactggt

SEQ ID NO: 564442 - DNA, 549 bp, Homo sapiens
gaggaaacctgatccttccagaaagtccgttaatggaatgagggcagaaccagatggagtctggttatgtggctgatgcctggtgaacgctcagagcccgggcttcataactgaagcagccggagtggaataagggtgagatagggagagatccaagcacagcgggagtgatgcrttgggagcggggagtcctcattccgtggaactgactggtttgcattgtagactatttaacatccttaacctctggtctctaaatgccagtagagtcctgggcctgtgacaaccagaacacccctactcatctcccataccctcctgggagtgttactgcagcaatggagaacggtcacttgagcaatttggagctatagtgacctgaccggtccacatcttaagcagagtctttcttcccttcagatgctaattgcacacatggtcactctagggttgcttcaatcagttgcttgttacagcccattaggagaggaggtaagattttttaaggactttgtaattagcattatattgaagaacattgaatagatt

SEQ ID NO: 564443 - DNA, 596 bp, Homo sapiens
gctttaagtgagaacattcccgatcctgcagctcaggtggcagaaagctagcgcctcctgggcttggcatgtcacaggacagagatttagagggcagagctgctggaaattcagaaggaatctccagaaataagaaaaccccagaaaagccgagcccccaaatttgagtataatcttagcccaaatctttgaaggattgctaaattattcaagcaatggttaaataccaaatacataaagagctatgacaaattggctttaaaagtaataataaaatataaatattgacaaatgcaatttacaaaagctgcataactgcagctgaaatacttgaaaccagagtacagatttcagcagctgcataatgcaataaaagcaaagtttgtaatttgaggccaggcagattaactacaaggtagaataaaaataaayaaacactcagaacacaacagattccagaatcactacaccataccatctacagtgtttaatttttaaacctaggttagtagacatgcacataagcagaagagttcaatctatacccaggaaaaggaggcagtcaataggcagtattggtgacttagatgttggtt

SEQ ID NO: 564444 - DNA, 381 bp, Homo sapiens
ctgaggcacgagaatcgcttgaacccagaggcagaggctgcagtgagccatgactgtactatgcactccagcctaggcaacagagtaagactctgtctcaaaaaaaaaaacttagtttaataggttagataaaaatacagacatcatgcatgagtatcagtatgtagyaaatatctttggaaaaatatttcttaagtgttacagaaattcatagaggaaagagatcactcagactatggacttcaaacatacctggattttccaagagttgaataatttttttaaaaacaattatttcaacttaaatattctggctatattagcttcaagtaaaaagcacaagattatgtcttagaatcaaactctggctcgtttttttgt

SEQ ID NO: 564445 - DNA, 602 bp, Homo sapiens
gaaacaaaaagttaactcttagaaggatatgagggagctcactaaatcaaagtgaagtaagtccaaagaaggcttttggtaccacaaaataatcaggaagttgtagagcctttaaagcagcagatgtttgattttcttgcagatgaaataacagcaaactctcttcttttatgttattttaccccaccccttattcctctttttttttttttaaagaaacaaaccaaaaaacaacccactaggcttaagaatcataccctggggacacattacctgactgtcctagtttgggtcatgtgcttgctccttgtctcgggaaggagaagtcaccagattatccacttgagaagtcactgggacaattataagaaattgtagtgkgtctacttaaagaatgtaaaataaatgttggccagtaagaaaaggaaaagcaaataagtatacacctatagttaaatcactagaacagcgttctttttgacttttttattcatgtgtatacaatgtacatgacatcatcaatttccttggctcacgtgcttccccactaaggattgtaccatgttcttccaccaaatttggatattgattatttcaaggca

SEQ ID NO: 564446 - DNA, 581 bp, Homo sapiens
agtggtagtcaatgtaattccttcctctaaataatgcaattccaactatgagtcttgaattttggaagagaatcaaggaataattattcctaatcttatgagattgaaaaaatttgttatgtatttaatatcataattagcaggtgattttttaaacaattccttgggaacttttgaacagtcccttataagctctacatattgatgcagcaactgtgttcttaatacaacaacaccataaaggtcaaacgtcttactatagaatattggaaaacaaaaatagttcaagaaaaacacaattactcatagtcccatgatctacagacagtcataatcacttctaacatcttggtatatttaagtctaatatttttttggaggggtgayattaaatattttatatacttgagtatactgcatatataaagtgcttatgttgaaaaatacagaaaacacaaaaaaatgcaaaagaaaaaattaaaatggccctaaatttcattatcaaaatataatcaatgccatgcttgtgtacttttttcagtctattttatgcccttttgagacatttaattttaatattc

SEQ ID NO: 564447 - DNA, 581 bp, Homo sapiens
agtggtagtcaatgtaattccttcctctaaataatgcaattccaactatgagtcttgaattttggaagagaatcaaggaataattattcctaatcttatgagattgaaaaaatttgttatgtatttaatatcataattagcaggtgattttttaaacaattccttgggaacttttgaacagtcccttataagctctacatattgatgcagcaactgtgttcttaatacaacaacaccataaaggtcaaacgtcttactatagaatattggaaaacaaaaatagttcaagaaaaacacaattactcatagtcccatgatctacagacagtcataatcacttctaacatcttggtatatttaagtctaatatttttttggaggggtgatattaaatattttatatacttgagtatactgcatatataaagtgcttatgttgaaaaatacagaaaacacaaaaaaatgcaaaagaaaaaattaaaatggmcctaaatttcattatcaaaatataatcaatgccatgcttgtgtacttttttcagtctattttatgcccttttgagacatttaattttaatattc

SEQ ID NO: 564448 - DNA, 535 bp, Homo sapiens
cattgatggatatggggcctaatgttgtgttattcagcatataattaataaatacataatcaacaatctaccctgcatctcaccttcgtgactgattaccttgatgatgatgattttgatactgcaatgtacatatgaatgtagaaataagtaaagggtgagcaggagattgtactctagayagtagagggacaactgtctatttcctttgtaggtacacaatttaggcgtacagagtgggcagtggttaacatatctacctacattcattacactgtataagatttttctgcttaatcaagcaaatcatggttagatcatcaactattttcttttcacagtttcataactgtttaactagattctaataattagtattccattgatttggattttcagtattttgaatttatatgtatagttttttacttagaacattgaaagaggctttatcagagcctgttaatcagataccgtttaaggtctaagtgtgtttttaaacattgtggtttaaaggcagtgtataaagtctttt

SEQ ID NO: 564449 - DNA, 535 bp, Homo sapiens
cattgatggatatggggcctaatgttgtgttattcagcatataattaataaatacataatcaacaatctaccctgcatctcaccttcgtgactgattaccttgatgatgatgattttgatactgcaatgtacatatgaatgtagaaataagtaaagggtgagcaggagattgtactctagacagtagagggacaactgtctatttcctttgtaggtacacaatttaggcgtacagagtgggcagtggttaacatatctacctacattcattacactgtataagatttttctgcttaatcaagcaaatcatggttagrtcatcaactattttcttttcacagtttcataactgtttaactagattctaataattagtattccattgatttggattttcagtattttgaatttatatgtatagttttttacttagaacattgaaagaggctttatcagagcctgttaatcagataccgtttaaggtctaagtgtgtttttaaacattgtggtttaaaggcagtgtataaagtctttt

SEQ ID NO: 564450 - DNA, 535 bp, Homo sapiens
cattgatggatatggggcctaatgttgtgttattcagcatataattaataaatacataatcaacaatctaccctgcatctcaccttcgtgactgattaccttgatgatgatgattttgatactgcaatgtacatatgaatgtagaaataagtaaagggtgagcaggagattgtactctagacagtagagggacaactgtctatttcctttgtaggtacacaatttaggcgtacagagtgggcagtggttaacatatctacctacattcattacactgtataagatttttctgcttaatcaagcaaatcatggttagatcatcaactattttcttttcacagtttcataactgtttaactagattctaataattagtattccattgatttggattttcagtattttgaatttatatgtatagttttttacttagaacattgaaagakgctttatcagagcctgttaatcagataccgtttaaggtctaagtgtgtttttaaacattgtggtttaaaggcagtgtataaagtctttt

SEQ ID NO: 564451 - DNA, 441 bp, Homo sapiens
ttgtgtttatttttttaaaaaaatgaatgttagaattgtgtgcatggaagtaattaaggtacatcattattatagtttaaaagttgtacatgataagacattttgttttcactgaatgatctattccccatcccaaggcaagcatgaataaaattaggttaaatgtagcatgtggygtcacagtctcttagaatttgtttcatctattttattttattgaatactgtctatatctttggttatcctgtttgaagtaaaaggacaaataaaacatggccagcaaaaaaaaaattaattaattaattaattaaatcaactataaaagcaagaaatgtactattaattgctagatcagttgcggcaataattaattaaaactaaagattaagaggtaatataaaatgttggcgttagcacacacaatggtatctatatgtcatt

SEQ ID NO: 564452 - DNA, 642 bp, Homo sapiens
tgtttccctggttgcagccagcgtctttgcagcaaatgctccagacaggtcgctgttgtcatcaaaaggaatagtatacagtatgaagagatatatatttcaaaagttttaagaagaactcattgttttctggatagaacaattgatcattaatgacaaatgaagcacacaatgtcttgatcctccatttcacctaagtgactccwtaaaagattgatgtgaaaaggtcaagaaattaacaaaatgagtctgtttcaattactataacagccctacaaagcaaagagaatcaagtgtatagtaattcttatctactataactctggccattataaaagtaaacatatgaggcaattttcttgccattatgtgattactcctacccttaatgattattgaaagccagccaccaggaaataacatcagttcacaggatttgaaaaaaaaaatcaaatcttttcccaatacatataaaatatcttaatattataaattataaaccagaaaaacatcattttccttgagaaatgtgtttttaaataatgacaacctaatttattttattgagtatagggttgtctttgtaaaattcttcaataattttcaaacttcattaagggagcattagcagaaagtaaagaa

SEQ ID NO: 564453 - DNA, 560 bp, Homo sapiens
gagtctgtttcaattactataacagccctacaaagcaaagagaatcaagtgtatagtaattcttatctactataactctggccattataaaagtaaacatatgaggcaattttcttgccattatgtgattactcctacccttaatgattattgaaagccagccaccaggaaataacatcagttcacaggatttgaaaaaaaaaatcaaatcttttcccaatacatataaaatatcttaatattataaattataaaccagaaaaacatcattttccttgagaaatgtgtttttaaataatgacaacctaatttattttattgagtatagggttgtctttgtaaaattcttcaataattttcaaacttcattaagggagcattagcagaaagtaaagaagtaatttttttgttctgttttgttttgttttgttttgttctgagacgaagtcttgctctgtcacccaggctggagtgcagtggcgcaatctcagctcactgcaagctcagcctctygggttcatgccattcttctgcctcagcctcatgagtagctgggacta

SEQ ID NO: 564454 - DNA, 411 bp, Homo sapiens
gaggtggagtttgcagtgagccaagatcgtgccactgcactctagcctgggtgacagagcaagactccgtctcaaaaaaacaaaacaaaacaaaacaaaacacaaatatagcaatctctattaaacagtcttgatggcaagcatatgctgtaagtaaataactagtaacaggctttcaaaattgaaagtgacagcttttaaaataatgatttcctctaaactgcttgtctgtaattatttttaagatattacataggggactaattaggtacaagataccaaaagggataagaacaggaacaagattgattaattgaacttacgaaagttcctgggaataaaaaatgaattagattgggaagaaytgactacgagacttgtgttctgaataatgattaaaaagaatgacaa

SEQ ID NO: 564455 - DNA, 628 bp, Homo sapiens
ttaaatgaccccttttctgaaggtgttcttatctctactagggagtgctgcttctacttacatattttcattgttatgttacataaatgtgtgtgtatatattagcatttattatgacacgttttaattttgtgtgtccattatacgtcaaatttgtttcagttcatatttttcactgtggtaccacgtgcagtcagtggtcaaataatatttggcwtaaatgtctatagaagactatcatagtggttgagacatcaataattagaattgaaagatttgagtttagttctaccacttattagatacatgagcttgggcaagtgattctctaaggctttgctcctcatttgtaaaatgaggaaaataggacatgctgaataagttggctgtgaatattcactcgggtgtaaaatgcagtgcctggtacaaagtaaacctaaatcaaggttagctgttgttttactattgcatttactactgagatctttgaatactttgtagctatcttcctgatctcttctatttgttctttttttttttaaatcactttttgtacacttaaacgtacctttcactttctgcatcgtgtcactggctataaattctttggaagcaggaccattttctg

SEQ ID NO: 564456 - DNA, 628 bp, Homo sapiens
ttaaatgaccccttttctgaaggtgttcttatctctactagggagtgctgcttctacttacatattttcattgttatgttacataaatgtgtgtgtatatattagcatttattatgacacgttttaattttgtgtgtccattatacgtcaaatttgtttcagttcatatttttcactgtggtaccacgtgcagtcagtggtcaaataatatttggcttaaatgtctatagaagactatcatagtggttgagacatcaataattagaattgaaagatttgagtttagttctaccacttattagatacatgagcttgggcaagtgattctctaaggctttgctcctcatttgtaaaatgaggaaaataggacatgctgaataagttggctgtgaatattcactcgggtgtraaatgcagtgcctggtacaaagtaaacctaaatcaaggttagctgttgttttactattgcatttactactgagatctttgaatactttgtagctatcttcctgatctcttctatttgttctttttttttttaaatcactttttgtacacttaaacgtacctttcactttctgcatcgtgtcactggctataaattctttggaagcaggaccattttctg

SEQ ID NO: 564457 - DNA, 628 bp, Homo sapiens
ttaaatgaccccttttctgaaggtgttcttatctctactagggagtgctgcttctacttacatattttcattgttatgttacataaatgtgtgtgtatatattagcatttattatgacacgttttaattttgtgtgtccattatacgtcaaatttgtttcagttcatatttttcactgtggtaccacgtgcagtcagtggtcaaataatatttggcttaaatgtctatagaagactatcatagtggttgagacatcaataattagaattgaaagatttgagtttagttctaccacttattagatacatgagcttgggcaagtgattctctaaggctttgctcctcatttgtaaaatgaggaaaataggacatgctgaataagttggctgtgaatattcactcgggtgtaaaatgcagtgcctkgtacaaagtaaacctaaatcaaggttagctgttgttttactattgcatttactactgagatctttgaatactttgtagctatcttcctgatctcttctatttgttctttttttttttaaatcactttttgtacacttaaacgtacctttcactttctgcatcgtgtcactggctataaattctttggaagcaggaccattttctg

SEQ ID NO: 564458 - DNA, 628 bp, Homo sapiens
ttaaatgaccccttttctgaaggtgttcttatctctactagggagtgctgcttctacttacatattttcattgttatgttacataaatgtgtgtgtatatattagcatttattatgacacgttttaattttgtgtgtccattatacgtcaaatttgtttcagttcatatttttcactgtggtaccacgtgcagtcagtggtcaaataatatttggcttaaatgtctatagaagactatcatagtggttgagacatcaataattagaattgaaagatttgagtttagttctaccacttattagatacatgagcttgggcaagtgattctctaaggctttgctcctcatttgtaaaatgaggaaaataggacatgctgaataagttggctgtgaatattcactcgggtgtaaaatgcagtgcctggtacaaagtaaacctaaatcaaggttagctgttgttttactattgcatttactactgagatctttgaatactttgtagctatcttcctgatctcttctatttgttctttttttttttaaatcactttttgtacacttaaacgtacctttcactttctgcatcrtgtcactggctataaattctttggaagcaggaccattttctg

SEQ ID NO: 564459 - DNA, 592 bp, Homo sapiens
tattgtggaagcatccatggtcagagattgcagtgatttttatctgaagagttggccccaaaacaatttactatacaggatgattaacattacaattccattttgagataatttggtaaaatgttaatattatgaattgcccacttgcttttttttttttttttttaacatggagtttgtttctgttgcccaggctagagtgcaatggcacaacctcagctcactgcaacctccgccttctgagttgaagcaattctcctctgttgggagaaaagctgagtgttgggagaaaagctgagtgttggsagagaagctgaggcagggcttgcatgtctgtgagacttgctggctccttgcttctagcactccccttatctcaagcagacatatgtttctcattcacttgatacactgtttcctttcaacccccacatccacatcaccttttttgtttgtttgggcaccaataaatagcatgggctcccagagctcggggcctttgcagcttccacactcgtgatggccccctagtcccactttctctctcaaatgtctttttctcattcctttgactctgctggacttcgtcgcc

SEQ ID NO: 564460 - DNA, 586 bp, Homo sapiens
cacatatatacacacatatgcatacacatacatatgtgtgtgtattctatgtattcatatatgtatatgtgtgtgtgtattcttccagcaaactaggatcatgccatcctatagctttgtaatccatttttttgtcattagccagccattaagaatttttttgttttaaccattttctattttaaacatcatacaacagaaagagtaggataaaaatatcataatgatcaggtaaaattatttaaaragatatatttttttctttgcatcatcatctcctttttctcttttcttattcgttaaatctttgtttttacaaatccctgtgctaagggctgatactcggtagactgcagggaggaaactgctctgccacttaaaaaacactgaccaagaagcaggtcatctacactagttcctcacaaatgtcctttgtatggcaggaaggaagatatgtatgtttttaagtgaatacatacacatctataaattgttgtaaaataacccccagagaacaccaacattaccaaagcttgaaagatagtttctaaataacattcacatttaaaaggcttttgttttgttt

SEQ ID NO: 564461 - DNA, 586 bp, Homo sapiens
cacatatatacacacatatgcatacacatacatatgtgtgtgtattctatgtattcatatatgtatatgtgtgtgtgtattcttccagcaaactaggatcatgccatcctatagctttgtaatccatttttttgtcattagccagccattaagaatttttttgttttaaccattttctattttaaacatcatacaacagaaagagtaggataaaaatatcataatgatcaggtaaaattatttaaagagatatatttttttctttgcatcatcatctcctttttctcttttcttattcgttaaatctttgtttttacaaatccctgtgctaagggctgatactcggtagactgcagggaggaaactgctctgccacttaaaaaacactgaccaagaagcaggtcatctacactagttcctcacaaatgtcctttgtatggcaggaaggaagatatgtatgtttttaagtgaatacatacacatctataaattgttgtaaaataacccccagagaacaccaacattaccaaagcttgaaagatagtttytaaataacattcacatttaaaaggcttttgttttgttt

SEQ ID NO: 564462 - DNA, 609 bp, Homo sapiens
atggtgtgatcttggctcaccaccacctccgcctcccaggttcaagcgattctcctgcctcagcctcccgagtagctgggattacaggtgtgtgtcactgcacccggctaatttttgtatttttagtagagacgggctttcrccatgttggccaggctggtcttgaactcctgacctcaggtgatctgccctcctcggcatcccaaagttctgggattacaggcgtgagccactgtgcctggcctgtttttgtaaaaaaacaaaacaaaacaaaacaaaacaaactggtttgtttttatttgatttggccaaaaaatagcactgctcaatctgtctttaacttacttgcctttggccaacttgctctaaaccaaattgttcttcagccaaatctgcaggggctgacactgacaactactggggcgattaaatgcaggttgagttttgtactgaaaaggagtaagagacagaagactatatttgaggaagatctgggaaatgtaagaaatcatctgaaagttgactcagtgccctgctctgttttacaccctttaacaaagagggtatcataaaaatttcttaattctggtagttagaaagaataaaagt

SEQ ID NO: 564463 - DNA, 609 bp, Homo sapiens
atggtgtgatcttggctcaccaccacctccgcctcccaggttcaagcgattctcctgcctcagcctcccgagtagctgggattacaggtgtgtgtcactgcacccggctaatttttgtatttttagtagagacgggctttcaccatgttggccaggctggtcttgaactcctgacctcaggtgatctgccctcctcggcatcccaaagttctgggattacaggcgtgagccactgtgccyggcctgtttttgtaaaaaaacaaaacaaaacaaaacaaaacaaactggtttgtttttatttgatttggccaaaaaatagcactgctcaatctgtctttaacttacttgcctttggccaacttgctctaaaccaaattgttcttcagccaaatctgcaggggctgacactgacaactactggggcgattaaatgcaggttgagttttgtactgaaaaggagtaagagacagaagactatatttgaggaagatctgggaaatgtaagaaatcatctgaaagttgactcagtgccctgctctgttttacaccctttaacaaagagggtatcataaaaatttcttaattctggtagttagaaagaataaaagt

SEQ ID NO: 564464 - DNA, 564 bp, Homo sapiens
tcagcttcttataattattccttattctactattaagaagacaaattagcattctatactaatgctgaaggtgaattctggaaagagaggcccagtattcagttttaagggcaaagaaaaatggctgtgtgttcaataaaactgtgtttttaataacatgtatgcactgtgcatgctgtttgaaacattttgattttgagattactatcatcttacagggaaaaagaacaactcaggtaacaggtaacaatgactattgagagatctattgagagaatgtctatttagagaatgtctaagttcagagagaggaacgaaccgtgctcagtgctttatgtgcattttctcatttatattcagataaaattcattagctagtgttgtcatcactctgcagacctgttgcttacagaaattaagaaacctgtccactcctggttacacagcccactcatggttaaataaarcctcacatttgtccttattatgcttttggaaaacggttagacttaaatatatcaaaactttatttttataatgtcctttatatattatattcattaa

SEQ ID NO: 564465 - DNA, 609 bp, Homo sapiens
tgataatagccattctaacaggtgtaaaatgatagctcattgtggttttgatttgcatttccctgatgattagtgatgttgagcatttttycatatacctgttggccatttgtatgtcttcttttaagaaatgtctattcaagtattttgcccatttttaaatcagattttttgttgttgttattgagttgtttgagttccttccatattctggttattaatcccttgtcagatgaacagtttgcaaatatttcctcccattctgtaggttgtctcttcacttcattgtttcctttgctatgcagagctttgtagctcgatgtaataccatttatctatttatgcttttgttgcttgtgccttacacaaaatgatttgtatatctttgaagaaatgtctattcaagtcctttgcccatttttttaattgggttgtttgtatttttgttgaattgtaggagttcttttcattttctggatattaactgcttatcagatatatgatttgcaaatatcttcacccattcttaggataccttttcaaccttgatagtgtcttttgacacacagaagtttttaattttaatgtggttcaatttatttatttttt

SEQ ID NO: 564466 - DNA, 586 bp, Homo sapiens
tgataatagccattctaacaggtgtaaaatgatagctcattgtggttttgatttgcatttccctgatgattagtgatgttgagcatttttccatatacctgttggccatttgtatgtcttcttttaagaaatgtctattcaagtattttgcccatttttaaatcggattttttgttgttgttattgagttgtttgagttccttccatattctggttattaatcccttgtcagatgaacagtttgcaaatatttcctcccattctgtaggttgtctcttcacttcattgtttcctttgctatgcagagctttgtagctcgatgtaataccatttatctatttatgcttttgttgcttgtgccttacacaaaatgatttgtatatctttgaagaaatgtytattcaagtcctttgcccatttttttaattgggttgtttgtatttttgttgaattgtaggagttcttttcattttctggatattaactgcttatcagatatatgatttgcaaatatcttcacccattcttaggataccttttcaaccttgatagtgtcttttgacacacagaagtttttaattttaat

SEQ ID NO: 564467 - DNA, 491 bp, Homo sapiens
gaaattacctgcttactgaaattggaagttaatcagtcagaactgtgtaaagtagcttaatataccaagcaatcactgtggtgattttatggtaaccaccttttcttttccaaatgtgatagtgttgttatacagtatttattttaaatataagggcttagaatcttacagtgcaaaattgawtgaaagaagtcagacagaaaatagaacatattttatgattcagtcaatgtaaagttttaaaaataggcataactaatcaacaatgttagattaggaaagtggttttccttaagaaggtctcagattgtgactccaagtgcatgaagtgcattctggaatatgggtaatttttttttttcaagagataagagtttcactatattgtgcaggctggtttcaagctcctgggctcaggtgatcctccagccttagccctcccaaagtgttggtattacaggcatgagtcaccatgcctggcttgttttgtt

SEQ ID NO: 564468 - DNA, 491 bp, Homo sapiens
gaaattacctgcttactgaaattggaagttaatcagtcagaactgtgtaaagtagcttaatataccaagcaatcactgtggtgattttatggtaaccaccttttcttttccaaatgtgatagtgttgttatacagtatttattttaaatataagggcttagaatcttacagtgcaaaattgaatgaaagaagtcagacagaaaatagaacatattttatgattcagtcaatgtaaagtttwaaaaataggcataactaatcaacaatgttagattaggaaagtggttttccttaagaaggtctcagattgtgactccaagtgcatgaagtgcattctggaatatgggtaatttttttttttcaagagataagagtttcactatattgtgcaggctggtttcaagctcctgggctcaggtgatcctccagccttagccctcccaaagtgttggtattacaggcatgagtcaccatgcctggcttgttttgtt

SEQ ID NO: 564469 - DNA, 582 bp, Homo sapiens
atttctatacatcattaggttaatgctcaatcttttaagatgacattaataatgaagatgatagtaataatggtaagttaatgacgctaacaattgctagatgcttaccacttgccggaaccacattaaagatgatgtatgtgtactctgttacccattttagagctaaggaacttgtggcttacaataagttaaagagtgctgaaatattccaragataggccaagataagttgggacaccaaacaaagtcacttttaaagaaaacaattaaaatttgataagtttttaaaagaatcaaagtgattgtaaaggaacagtcaaaattttgctggctgtcctcacttatattaggtttcagattggtttcctttggaactatgtagggtgacattgaggtgagcactgtaacatttacagtgcttaggccttgtaaatttcttaaaacctagaagtcaaataaatatcttgagcagagaactagtatgtggtaaagttttacttcaaacctaaacactaaattacaacattaacttcttcagagaaagaaacactcctatttggcattattctgatgaagaag

SEQ ID NO: 564470 - DNA, 642 bp, Homo sapiens
cttcctgactgtatcaacattctgtcttgcttgggaaagggccactgtggaaataatacacctatgtagcaggtagactgaaatcagatgtgtctaaacatttttttggcaaaacagtgggatgaactttccagaggcacattttcctaagccctgaaaagcctcttggagaaaactcatcctggagaaagcggatgctagacgttataagagttggactcagtaagaaaatgttggtagttggaggaggagggartcttatggaaacaacattgatatcaatattaaatgtcaagtcctaatattcaaatttgtttcctgacccagacagaacccactggacttatattaggtaattgggaagagggggtctgtaaaggaaatattaaaggagatacttaactttgtataactcacaggactagatcggctttccacctcctctaagagtgttacacataagaagcccctgctttgtaacagaacagtataaacttttggcacctcaaaaactctgtgcatcagctgtcttgggaggtgctgaagccccaggaagctggtggatgccaagtgtgaggtggtggtacccagtggagaaaggtttgcaagggcataaaagacattctatgaggactcacagaa

SEQ ID NO: 564471 - DNA, 524 bp, Homo sapiens
gactttcatacattcattcccaatttcagtcctcaacattttagtttttccataaaatcgtaaagttgctaactgaaaattctcctgcctgtagtttttcagggctctctaattcctataggcagaagggactaataaacacaggaagtctgcccagggaaggcagtggcgttttctggtggcagtaatgcctgagatgtgtcttgaacatcaagagttgagagtttgtccatctgacgtctgatcagataaaagggaatactccaggcaaggaaatgtcgagaacaaagctatgtaagaccaagagagcaactaagttcagaaactgcacatagataagtattgttgaartataaaatagaaggggcagtatattcattatctatatttgtataacaaattaccacatatttagtggcttaaaacatcacagtttctgtgactcgggagcctggcacgttttaactgggtcctccactgagggtctcataaggcttaaaatcaagatattggcatcctctctt

SEQ ID NO: 564472 - DNA, 599 bp, Homo sapiens
cgctgcagtgaacagctttgcacgtatatgtttgcatacttgttcaagtagatttctagaatgacatggagtttctggcttgctccagttttaaaaactgtttccaagaagaagcccctggtttgtggcctccttctagtaagtgggtcacagatttgactttccatgtgggagtccttgccttttgtttatcaggactccaatcccccaaagaactgagactcggctttgctcttgttagtttcttaccagagactaaaatcctgtatctgaacctccttccaagtaccctgcttcctaccttgccatctcctagcagacttccctgatgtctgcttccatattgaaatatttctgtacctaaattccaatttccatgctttgcatattggatacctgttaataaatactgaatctcattgataccatctatatcaacttcaatttgttgcctgaatttctggatagcgctttatctgctgaattggattgcttstatctgtagatgaaattcttgaaaacagacagaattgcatattattcttctttgtagccttaggggctctgtcttatgataggggcttgctccttgccatgat

SEQ ID NO: 564473 - DNA, 555 bp, Homo sapiens
agatgaccaagtctagagatctaatgtacaatatgaggactataagtaataaaactgtactgtgaaattgtaytgaaattcctcctaaatgagtagtttttagctgcttttgccaaaccaaaaaaaacatgagtaactatgtgagatgatggatatgttaatttgcttcactatagtaaccattttactatctatatatatctcataacatcatgttatatgttacatataaaaaattaaaaaaaaaactaacacatgggcaaagaagaaattaaaagggaaattacaaagctttttgaactgaatgaaagtgaaaacaatgtatcaaaaattttagcattccactaaagctgtacttggggaaaattttacagcactaattgcctatcctgagaaaactgaagtgtttccaattaatggcttcagcttctgccttaaaagactagaaaaagaagagaaaatgagatccaaagaaagaaaataatattcatcatagcttaaaaatcaatgcaatagaaaacaaaaacacaaagaaaaatgaatgaaaccaaaagc

SEQ ID NO: 564474 - DNA, 538 bp, Homo sapiens
aacagaggaattgactcttgatgattaaagtggcctctaaaggaagtgatatatctaccttgtaccatgagttggggtgaattacaaaaataacaagctgttcaatttgacaaaacttctaggttataaaaaaaaaaagaggaggaagagaggaaataattttaaaagaaataaatgtccactatgtattttagagatctccataaagcaactgtgattcaaatgttttgataaaataatatayaatgatgtccttatttttacactacaactattttctagttattttctacttggtacaagcaaaagatcttaaaaataaactgaactgaatgatatttgaggggagaaaaacagattataatacaagttaagattaaccgctcaatctttctttgcttttcttcctaatttctagatcttaaaataaaaacataaataaagttgtctggaaatgtttttttccttagtgttttataagtgaatttcacttttgaacatgaataaccccttaccttcaaatctcaggaaaaaatat

SEQ ID NO: 564475 - DNA, 651 bp, Homo sapiens
attctttttgggagaagattgtatttgtatagtgttttagttctgatagaaacaagtgtactggaacaattaagacaaaggttaatgaggagaaattttgtctagaagtaaatctgttgtaaacatttacyaacaaatagaattttaaatgcttttagtggtatgcataggatttaaatgtcttcttaaattatgccaattactttttttagtattatttctatcctaattgtgcagttaaggttagcaaaaatgtacacgtgcattttttaatatttgaaagaagacatagcatttttcttttctgttttgttttttttgtttgtttgtttgtttttgtttttttgagatttaaactcgctctgttgcccagactgtagtgcagtggcgtgatcttggctcattgcaacctccgcctcccaggttcaagcaattctcatgtctcatcctcccgagtagctgggactataggagcacaccaccacaaccggctaatttttatatttttagtagagatattggtgaggctggtcttgaactcctgacctcaggggattcacccggctcagcctccaaaagtgctgggattacaggagtgagccaccgcgcccggcccgacatagcatttttctcatgttaaagctaaaggtg

SEQ ID NO: 564476 - DNA, 501 bp, Homo sapiens
tcataatccccacatgctgttggagggacctggtgggaggtaacttaaacatgggggcagttaccctcatgctgttcttgggacaatgagtggcttctcacgaaatctgatggttttataaagggcttttcccccttttgcttggcactcctccttgctgctgccatgtgaagaaggatgtgtttgcttccgcttccaccatgactgtaagtttcctgaagtctccccatccctctggaactgtgagtcaactaaamctctttcctttattaactacccagtcttggacagttctttatagccatgtgagaatggattaatacatagctggaactacaggtgcatgccatcatgctgaactaattatttttaattatttgtagagataaggatttctttatgttgcccaggttggtccagaactcctggcctcaagtgttcctttcagtttggcctcccaaagtattaggattacaggtgtaaaccactgcacctggccta

SEQ ID NO: 564477 - DNA, 501 bp, Homo sapiens
tcataatccccacatgctgttggagggacctggtgggaggtaacttaaacatgggggcagttaccctcatgctgttcttgggacaatgagtggcttctcacgaaatctgatggttttataaagggcttttcccccttttgcttggcactyctccttgctgctgccatgtgaagaaggatgtgtttgcttccgcttccaccatgactgtaagtttcctgaagtctccccatccctctggaactgtgagtcaactaaaactctttcctttattaactacccagtcttggacagttctttatagccatgtgagaatggattaatacatagctggaactacaggtgcatgccatcatgctgaactaattatttttaattatttgtagagataaggatttctttatgttgcccaggttggtccagaactcctggcctcaagtgttcctttcagtttggcctcccaaagtattaggattacaggtgtaaaccactgcacctggccta

SEQ ID NO: 564478 - DNA, 522 bp, Homo sapiens
taaaaaaaaatggggttcccaccaagcaagcagagtaaaggatgaggaatgtagctctcgtgatccctgagaatacattcagcagacttcatttgggcagtggcaaggccccagctgctttaaaggactgagttctagattgtagtaagggggctgtcaagaactgaatagcatgaatcaagcccaggtgaagtgctgagaactggggcaagggggatgaaggaagtgccaaggcaggtggctcaggaccaagctgagtgcccatcggcagaaaaggaatcggkagtcaaggaggctggagagcacagtgggagcagtggccaattgttggccttcgacaccaggggcagggaacttcagcaaaaccaggccaggttaagggactaacctgaagcaagaaatgcagcaatgtttatgcagtggttttctcaaagagggttagggacacttttcttttggaaaactatgcaaggaaggaatcatggcaagaagagtgagggttggcactttgtcaccaaggta

SEQ ID NO: 564479 - DNA, 522 bp, Homo sapiens
taaaaaaaaatggggttcccaccaagcaagcagagtaaaggatgaggaatgtagctctcgtgatccctgagaatacattcagcagacttcatttgggcagtggcaaggccccagctgctttaaaggactgagttctagattgtagtaagggggctgtcaagaactgaatagcatgaatcaagcccaggtgaagtgctgagaactggggcaagggggatgaaggaagtgccaaggcaggtggctcaggaccaagctgagtgcccatcggcagaaaaggaatcgggagtcaaggaggctggagagcacagtgggagcagtggccaattgttggccttcracaccaggggcagggaacttcagcaaaaccaggccaggttaagggactaacctgaagcaagaaatgcagcaatgtttatgcagtggttttctcaaagagggttagggacacttttcttttggaaaactatgcaaggaaggaatcatggcaagaagagtgagggttggcactttgtcaccaaggta

SEQ ID NO: 564480 - DNA, 401 bp, Homo sapiens
tgctacgtcttaattttagcccagtgagacccatttggacctacaaactatacagtaatacactggtgttgttttaaaccactaattttgccgtaatctattacagaagcaataggaagctatggtggtatccgtgtgtgtgtgtgtgtgtgtgtgtgtgtgtgtgtgtgtgtgtgtgtgtgtgtttgtgtatttgcattaaaggacagaggcgcctatttgagcagcattaaataatttagcacattgtttgaaaggcatttttttctcttccttcaacaataccatagacatttataaatcctttaattcatttgtaataactcttcagttgatatccaaatatagaaggggcaactgtasttgtctgtcttttgaaatagacgtatcgttttattcaa

SEQ ID NO: 564481 - DNA, 505 bp, Homo sapiens
ttgttttaactagggagagaaacctgggcatgaatttaaccatgcctgggaatgaagtctggctcttctgtataatagttgactagttctttaatctccttgagtctcagtttctttatctacaaagcagaatgaaaatacctatttcatggatttgttgcaaggtttttaaagaaatattggaagtaaaatgtctaatgtagagaaactcttcaagaaagagtaacgcaccttccattcctcccattaaatatggaaaaccatattyggtttgtgtattaggccattcttgcattgctacaaaggaatgcctgaggctgggtaatttataaagaaaatatattttatcttggttcatggttctacaggctgtacaggaagtgtggtgctggcatctgctcttgatgagggcctcaggaagcttccaatcatggtggaaagtgaagggagagccagtgcgttatatggccagagcaggagcaagagggagggggaggtgccacac

SEQ ID NO: 564482 - DNA, 505 bp, Homo sapiens
ttgttttaactagggagagaaacctgggcatgaatttaaccatgcctgggaatgaagtctggctcttctgtataatagttgactagttctttaatctccttgagtctcagtttctttatctacaaagcagaatgaaaatacctatttcatggatttgttgcaaggtttttaaagaaatattggaagtaaaatgtctaatgtagagaaactcttcaagaaagagtaacgcaccttccattcctcccattaaatatggaaaaccatatttggtttgtgtattaggccattcttgcattgctacaaaggaatgcctgaggctgggtaatttataaagaaaatatattttatcttggttcatggttctacaggctgtacaggaagtgtggtgctggcatctgctcttgatgagggcctcaggaagcttccaatcatggtggaaagtgaagggagagccagtgcgttayatggccagagcaggagcaagagggagggggaggtgccacac

SEQ ID NO: 564483 - DNA, 478 bp, Homo sapiens
gaaatctctcatcaccaaggagatggtgctaagccattcacgaggggtccacccccatgatccaagcacctcccaccaggccccacctccaatactagggattacatttcaacatgagatgcaggggagtcaaacatccaaaccgtatcagtgtgttcatttctttttgatggattcttctcttatcttttagaaacarctcctttatagtctcaagaaaaaaaagaacatagtgttaatatctgttgtgtgtgtgtctgtgtttaggtgcatatatgaaagttcaaaactgcccatgtgacaataactacagcccatgtatcttttcaagtgcttagcaaattgcatttccacaacacaatctttttgcatctttgattgtttttctgttagcttgtttatttattttagtaaatttattcatctttttttatttaaacaaagcattagttttggggcataaatatgcttttatttt

SEQ ID NO: 564484 - DNA, 607 bp, Homo sapiens
atgcttttatttttaattatatgtcaaagaattcagaggtcatttaatggtctattcagacataataattttgtcttcctcagctatgatcctgcaattcagtgtacaataattcctattcrgcttgtattatcagtggaatagtcttaggtcaaatattatatactgtctgattttcttgaactctcagcttttgaaataaattttctataaatttgtggtcttgtgtaaacaaaagtatgcatatttaataggacacagtacttttcatatgttttccaatagttatttcattatgatttcataaaattattttacttgcactaaaaatatgtattttccactacattatttgatgtgtactatattcctatatatctcatataaaaaccattttcttttaaaatttagtgctaggaaattttgtttcaatttcatgctattggtatttttttttccttctggtattagtaataatgttactaatattttctccctcctgccttgagagccaggaatctctgaggcatatatgaaatagtaaagctaccatgtatttaatgccttacatatatttgctcatttaatctggttatttatgtaaaat

SEQ ID NO: 564485 - DNA, 606 bp, Homo sapiens
ttagggacgctgaggcaggagaatggcatgaactcgggaggtggagcttacagtgagccgagatcgtgccactgcactccagcctgggcgacagagggagactccatctcaaaaaacaagaaaaagaaaaaaatgtacatatgaatggtggttggtttaacatttgatttaatgtatcctatttgtattttgtgatgtctttgttatatcagaatgcaggacacattagaaagacacgacaggggagcagatgacgtttagtcactcaggtgagacaacaacagacttaagtatatgggcagctgtggagttgagagaaaaatgacacaagatatatttattaggtgatgatttacctgcttatgaggctgacatgtaggatttggttaccatccagatatgaagttagggttgggaggtaagggaacaggtcatgacaaagttcttgttctttgcaaattgtataacattttaaatgactcatcccatttaaagaagaaaatatacgtcatcagtatttttccragacctctgtcactctaagagttctgaaaagaaatagcacatttgaattgtatatgtttctgaatgaaagtgcaaagaagt

SEQ ID NO: 564486 - DNA, 629 bp, Homo sapiens
tttttctaatatttcttatgcccattttctctttattccttttctgggattccaattacaatttgatttttctcataattttgttccgttctgactctgctcccctcccccgcccacatagacacacagttttttctttgtattttagtgtgaataatatttactgccctatttttgaattcactgattcatctgtgttagcctattgatgaactcactgaagaaattcttcatctttttatctttttagaaagatatttctagcatttctattagattatttcttatttccaccactctactgaatttctccatcgcttcaggcatgtttgtgctttctgctattttgcaatgtattaatcagagttgaatcagagttcctgtctgacagttccaatatctgggttatctctatctggctctgttacttcatttcttgaaaatggttgttttatattttgtaggctttttgygtcctacttgattgaatgccagacatggtgtggaagaacagtaagaagtgaggtaaatagagtttatgcctgtaaatggacattacagacatttactctgttaagtaaagctattcaggaattatttggattttgctgttgcaattattacttcca

SEQ ID NO: 564487 - DNA, 601 bp, Homo sapiens
ttctcactgttctgaaaatcctctgtgccctgtatattcatccctcccctcaactcaacctctggcaaccactgatctttgtagtgtctctatggttttgccttttccagaatgttgtatagctggaatcacacagtatgtaacctttcagattgccttctttcacttagtaatatgyatttaatgctcctcaacatctatggcttgattgcttatttcatttttagcactacataatatttcgcggtctgaatgtacccacagtttatttccataaataaaaaacatcttggttgcttccaagttttggcaattatgactaaagccactataaacatctgtgtgtaggtttttgtgactctaagatttcaactcttctgggtaaatactaattagcatgattactggattttatagtaagactgtttagtcttttaagcaactgccaaactgtcttccaaactgactgtaccattttgtattctcaccaacaataaatgagagttgctgttgccccatattctaaccagcttttggtgctgtcaatagtctggatttcagacattctaataggtgtgtggtggtatttatttttattttt

SEQ ID NO: 564488 - DNA, 601 bp, Homo sapiens
ttctcactgttctgaaaatcctctgtgccctgtatattcatccctcccctcaactcaacctctggcaaccactgatctttgtagtgtctctatggttttgccttttccagaatgttgtatagctggaatcacacagtatgtaacctttcagattgccttctttcacttagtaatatgcatttaatgctcctcaacatctatggcttgattgcttatttcatttttagcactacataatatttcgcggtctgaatgtacccacagtttatttccataaataaaaaacatcttggttgcttccaagttttggcaattatgactaaagccactataaacatctgtgtgtaggtttttgtgactctaagatttcaactcttytgggtaaatactaattagcatgattactggattttatagtaagactgtttagtcttttaagcaactgccaaactgtcttccaaactgactgtaccattttgtattctcaccaacaataaatgagagttgctgttgccccatattctaaccagcttttggtgctgtcaatagtctggatttcagacattctaataggtgtgtggtggtatttatttttattttt

SEQ ID NO: 564489 - DNA, 511 bp, Homo sapiens
tttcctttttttctgacacataacctgtgcttccaatcctttggattggattccaattctttgctatggaatacagtagtcccctccttatccacagtatcattyttcacagtttgttgcccgaggtcaaccgtggtcagaaaatattaagtggaaaattccagaaataaacaattcgtaagttttaaattgtatggcattctgagtatcatgatgaaatcttgtgctgtcctgtgtcactctgccctggagctgaatcattcctttgtccattgtatccaggctgcccatcagtcacttagtaactgtctgggttatcaggaaaaaaaaaaaaacatagtaaatataggctttggtgtcatctgaagttccaggcttctagtggaggtcttggagtatatcccccataaataaagggggactcctatgcacagttttctgttttggaagaacttctctgaacatgttaattttggagttctcaagaacaggacggatataaactcacttt

SEQ ID NO: 564490 - DNA, 593 bp, Homo sapiens
aatatgcctctagacttctcttttagctaaaatattgtggcattgaggccaaggtcataaattgaaacagggcattgctcattgtaactttctttattaagtatctttgcttaatgccatgttttaaaaatgcgaatgtgttgttcaacgtataatttagccatttcataccgtctctgcatagaactattaactacaaatagattctcttaataaagttgttgttaacttagagagcaaaagttagccaattatatggtactaaaattaacaacagtcacatgggtacatgtgggagaattttgatcttccagaattctaacaattamaaacttgcccttgattatcccagttcatttgttattctgagttataaagagaatttggtaatcttgttgcatcctactgtgtattaataatatacacaactgtacacacataactcccagagatgctaagaatcagtatcttgatcataatgcatttagtagtacttgagtacttaaaaggattaattttttatcaaataaccatgaaaatttgaaaaataaatgttatgccaaatatgaacaaggacactactttttggataa

SEQ ID NO: 564491 - DNA, 593 bp, Homo sapiens
aatatgcctctagacttctcttttagctaaaatattgtggcattgaggccaaggtcataaattgaaacagggcattgctcattgtaactttctttattaagtatctttgcttaatgccatgttttaaaaatgcgaatgtgttgttcaacgtataatttagccatttcataccgtctctgcatagaactattaactacaaatagattctcttaataaagttgttgttaacttagagagcaaaagttagccaattatatggtactaaaattaacaacagtcacatgggtacatgtgggagaattttgatcttccagaattctaacaattacaaamttgcccttgattatcccagttcatttgttattctgagttataaagagaatttggtaatcttgttgcatcctactgtgtattaataatatacacaactgtacacacataactcccagagatgctaagaatcagtatcttgatcataatgcatttagtagtacttgagtacttaaaaggattaattttttatcaaataaccatgaaaatttgaaaaataaatgttatgccaaatatgaacaaggacactactttttggataa

SEQ ID NO: 564492 - DNA, 534 bp, Homo sapiens
tcagcagcctggggcttcaggcctagtttctttgcttaccagctgtgtgactttgagcagggcaggcaacctctctgggcctccgtgtcctgatcagtaacataagggaaagcagccctgcccagtctacttacagagctgttaccagcattaaccacaatgtcagatttaaaagttcttcccaggctgggcgcggtgacttacacctataatctcagcactttgggaggctgaggcaggcagattgmctgaggtcaggagttcgagaccaacctgggcaacatggtgaaaccctatctctactgaaatacaaaaattagatgggtgtggcggtgtacacctgtagtcccagttactcaggaggctgaggcaggagaattgcttgaacccgggaggcggaggttgcagtgagccgagatcgcaccactgcactccagcctgggtgacagagcgagactccatctcagaaaaaaaaaaaaaatgcttccttttgtgtgggtggcaagggcctacacaaggaaggccctactgaag

SEQ ID NO: 564493 - DNA, 558 bp, Homo sapiens
catgccagaagagttggttgctgacccagggctcccagactaggatttgggaatcctggctttggggctttggggcttctcctggactaggatttgggaaccctggctttggggcttcttcttggtaagagatgycatttggccactctatgcagatgataaattcctcgtttctttagcatagaaactaaatcttaatcaagtatacagcaagtataaatgcttgggaaatcttagggaaggaaagaaggaaggaagtaagcaaggaaggaaggaagggatggagaaagggaggggggaagagaggaaagtgtatcagtgcattctcacttttctataaagaaatgcctgagactgggtactttataaggaaaagaggtttaattggctcatgactccacaggccgtacagaaagcatgatgctggcatatgctcagcttcttgaggaaaagcctcaggaaacttacaatcacggtagaaggcaaagaaaaagcaggcacctcttacatggtggtagcaggagcaagctagagagagagaacagggatgtgtcccac

SEQ ID NO: 564494 - DNA, 619 bp, Homo sapiens
catctgtctggtgctccttcatgccctttggcataaagggacctrtccacttctgaacatggggaatctccctttccctgggctcctttcggccaacaggagacagtttcctataatgcttattcttgggctgaccttggccaagtccttttcattcccccggacctcagtttccttgttgctgaccagaagctttggagaaggtaattgcttcacttcctttcagtggtgacattttcccgtgagcctttccaatctatgttctttcctcgtttccttttccatctgtcacttgacactgtgcaattgattacatttcctttaactgtcttggaaaacagcttgtattttttttatttttttttacaaaaagagactttaaataaagctccattttgctaacaaatttgagaagaaaagtggaaaggaatgtgacatttattgaacacctactatgaaccatgtttttacagatccaatctcttgttgaattcttgcaagcaccctataatgcagtatttctgagtggcatttttacctgtttcacttttccctccatctctgtattaaagttctttggagaaacagaaccaataggatatatttagatagataagag

SEQ ID NO: 564495 - DNA, 619 bp, Homo sapiens
catctgtctggtgctccttcatgccctttggcataaagggacctatccacttctgaacatggggaatctccctttccctgggctcctttcggccaacaggagacagtttcctrtaatgcttattcttgggctgaccttggccaagtccttttcattcccccggacctcagtttccttgttgctgaccagaagctttggagaaggtaattgcttcacttcctttcagtggtgacattttcccgtgagcctttccaatctatgttctttcctcgtttccttttccatctgtcacttgacactgtgcaattgattacatttcctttaactgtcttggaaaacagcttgtattttttttatttttttttacaaaaagagactttaaataaagctccattttgctaacaaatttgagaagaaaagtggaaaggaatgtgacatttattgaacacctactatgaaccatgtttttacagatccaatctcttgttgaattcttgcaagcaccctataatgcagtatttctgagtggcatttttacctgtttcacttttccctccatctctgtattaaagttctttggagaaacagaaccaataggatatatttagatagataagag

SEQ ID NO: 564496 - DNA, 323 bp, Homo sapiens
aagttaggataaggtcctgaggatatgccctcatccaatatgtctggtgtccttataagaatggacaaggctgggcacggtggctcacgcctgtaatcccagcactttgggaggccgaggcrggtggatctcctgaggtcaggagtttaagaccagcctggccaacactgtgaaaccccatctctactaaaaatacagaagttagctgggcatggtggcacatgcctgtagtcccagctgctcaggaggcttaggcaagataattgattgaacccgggaggcagagtttgcagtgagccgagatcgtgccactgtactccaac

SEQ ID NO: 564497 - DNA, 477 bp, Homo sapiens
gccccctgccaggagatctccacctgtgtggaaagtactggcctggttccagagctgcctcaaagagaactaagcccagcccctgctggaggctcctcaagcccctcagctgacctgctgacctgttctcatgtgtgcaaagataacagaggttagacgcgatggaggaagtggctcccatggaggtggtcctggggragggccattcacccttgatatcatcataccctttattccataaatggaacttgaaactccaaggcagatagtttcctgctaatagaaccttgattctgttcaggtgccatcatatgtccaactatatacccactcatcatcctcttgtgctgtagctaggggtggtcatgtgatcagtctctggctaatgagctggaaatagtcttctggaagtctttggaaagccttttgcttttatgataaatgaagagaagtggcagctcacttcactcgcttcca

SEQ ID NO: 564498 - DNA, 477 bp, Homo sapiens
gccccctgccaggagatctccacctgtgtggaaagtactggcctggttccagagctgcctcaaagagaactaagcccagcccctgctggaggctcctcaagcccctcagctgacctgctgacctgttctcatgtgtgcaaagataacagaggttagacgcgatggaggaagtggctcccatggaggtggtcctggggaagggccattcacccttgatatcatcataccctttattccataaatggaacttgaaactccaaggcagatagtttcctgctaatagaaccttgattctgttcaggtgccatcatatgtccaactatatacccactcaycatcctcttgtgctgtagctaggggtggtcatgtgatcagtctctggctaatgagctggaaatagtcttctggaagtctttggaaagccttttgcttttatgataaatgaagagaagtggcagctcacttcactcgcttcca

SEQ ID NO: 564499 - DNA, 383 bp, Homo sapiens
agcactggcagctgcactgaattcctgcttgtccgcgttgaattctctccatccagagtcactgggatactctttgactcctacatgcttggccatctctgcccaggagatgagsggattcagaggaagacttgactcagtttggtggaaagaaacttatttctatcagtaaacagttggagggagaggaagagtgtgagatggaataaattgcatgcaatacagtgcccagtcatttgaacagtttctgacacttactggctgtgtgattctagacaaaacccctaacatctatatctcttggttttcctctctgaataatagagatattaaaatctagcttgtggaatcaaagcacccaaaaggaatagtgtgtgtgtgtg

SEQ ID NO: 564500 - DNA, 556 bp, Homo sapiens
gtaatgccagcattttgaggggccgatgctggtggatcatttgagcccagtagttcaagaccagcttggccaacatagtgagaccccatctctacaaaaagtacaaaagattggctcagtgtggtggtgtgcgctggtagtcccagctactggggaggctgaggtgagacgattgcttgagcccaggaggtcaggctgcagtgagccatgaytgtgccactgcactctagcctgggcaacaaagcaagacactgtctcaaaaataaataaaatatgccaggcacggtggctcacagctgtaatcccagcactttgggaggctgaggctggcagatcacgaggtcaggagatcgagaccatcctggctaacatggtgaaaccctgtctctgctaaaaaatacaaaaaaaattagctgggcgtggtggtgggcacctgcagtcccagctactgggcaggctgaggcaggagaatggtgtgaacccaggaggtggagcttgcagtgagccaagattgcaccactgcacctccagccttggtggcagagcaagattctgt

SEQ ID NO: 564501 - DNA, 511 bp, Homo sapiens
gtaaacatatatatatatatatgttaacatatgtttgtgtgtatatatatgtttacatatatatgctatatactattatatatatagccattctaatagattccaatggcatctcattggggctttattttattttgaattttgtgaacttatttgccacctgtgtatattctctagggaggagtctgttcaaattacttgcycactttttttttattatggtgtattccttcttctgttgagttttgagagttgtttgtatattctggattcaagtcctttatacaatatgtggtttataagtattttctctcaggctgtagtttgtttttcattttcttaacagtcgttttcaaaaggaaaatctttttaattttgatgaagtctaatttaccaatttttttcttttatgaattatgcttttggtgtcacatccaataactctttttgcctaactcaaggtcaagaaggttttctcttatgttttctcttatattttttaaaaaaatgt

SEQ ID NO: 564502 - DNA, 397 bp, Homo sapiens
gaccaaagagggtctgaaggggaaatggtttctggcttctgacttgggttttgaaatgtcagcattacaacagtgctacatggttactggggaagaagtaacatttactgagcgcctgccgggtcccaggagcttttgcgtggcatctggcttcaggatattgtggtttgtttggccattgtgaactggcttgggccctaaccactttctgtctggcttccatgaggacagtgtggtcttgtaactaagtcaccaaacttctgtgaacttctgggacatcctaacacatttgcatagtacgtgcagactgtgaagttgttgagggcaaagttgtatgtgtgttgctggatctagccmccatgtcctgtatgctgtccataagagatacccggaattc

SEQ ID NO: 564503 - DNA, 445 bp, Homo sapiens
tgtgtggtggtattttgttgtggttttgatttgcatttccttaataatcatgttgagtacttttcgtagacatatttgccatccacataatttctttgctgaagcrccttttgaaatattttcttaaaaaattagattgtttttgtattattgaattttgacaactctttgtatatgctggatacgggtccttgattagttatatgatttgaaaaatttcagtctgtagcttgtcttgttctctctctctttccttcatgtagagattgggtctcacaccattgccccggctgcccttgaactcctgggctcaggatcttcccacctcagcctcctaaagtgctgggattacaggcatgagccaccgtgcccagtctgtggtgtgtcttttcagtctcttaatggtgttttccaaaaagcaggagtttttaacttgatgaactcc

SEQ ID NO: 564504 - DNA, 627 bp, Homo sapiens
gcatggccaaccctctggtaggagatgggaaacagcctgtgtcactcatacaaggtcacaggcaacatcctgagagggacttccagtggccccaggagtagggggttcctgctctcccaggcaggaagtgggagggctctgaagagggaaaaacaagcccatctgggccaaggctgttttccttccaccctccagtgaaatacttgcttccctgcaggcccagatgcaaatgtcttggcgagaaagtcccttttggaaaaaattaaaacccaacagkaacctttcccacagtgaaacagttcttgtcccaggaacacatgcaaatgatggttctcacacaagttacttccccgctcagggccttagtctcctcctctataaaatgggacaaggcacatggggtcattctgagaatgcaaagagatgaagcaaactgtggtgagacacgtggcagacggcgtctcctcccagcatctgcatgaacggttacccagccagatgcccactcagcgctctgtgggcactgcctcatctaagcctcacccctgtgggcagcacaacagttatcccctcccagcagacaagaaaaccaaggcacagagagttgtccatgacttgtcacatgga

SEQ ID NO: 564505 - DNA, 627 bp, Homo sapiens
gcatggccaaccctctggtaggagatgggaaacagcctgtgtcactcatacaaggtcacaggcaacatcctgagagggacttccagtggccccaggagtagggggttcctgctctcccaggcaggaagtgggagggctctgaagagggaaaaacaagcccatctgggccaaggctgttttccttccaccctccagtgaaatacttgcttccctgcaggcccagatgcaaatgtcttggcgagaaagtcccttttggaaaaaattaaaacccaacagtmacctttcccacagtgaaacagttcttgtcccaggaacacatgcaaatgatggttctcacacaagttacttccccgctcagggccttagtctcctcctctataaaatgggacaaggcacatggggtcattctgagaatgcaaagagatgaagcaaactgtggtgagacacgtggcagacggcgtctcctcccagcatctgcatgaacggttacccagccagatgcccactcagcgctctgtgggcactgcctcatctaagcctcacccctgtgggcagcacaacagttatcccctcccagcagacaagaaaaccaaggcacagagagttgtccatgacttgtcacatgga

SEQ ID NO: 564506 - DNA, 522 bp, Homo sapiens
tttgatcatgttataacaggggttcagtcaactggcatcatttctggaggactttagggagccaaggctctgcatactctaattctggggggggtggcatcaggcccctgggctttttcgtccctgacttcgcattaggagcttgctgcactggaagggccaaggttttccaggrctgctgatcacagtattccaatgggtgaatgtcagccaaagcactttatcaggcaggtgacagcagggactttggtcttttacacaggccagcagtgggcaacatggcagggtgcatgcttgctgactgtactggggcgctggcaggcatagcagtactggcctctatgcaggtgtttgcagtggtggtggtgggggcatggtgtggatggggtggggaggtttggagtggggttggagggggtgtgagggaggcagcagagctgctgacatccacgtgtgtgtgtgtgtgccagcaatggccaagtggtggtggggtagtttgcatcatagtcttcaccacggggt

SEQ ID NO: 564507 - DNA, 377 bp, Homo sapiens
cctgcatggcttgggtgtaaacttggatctctctgctgtccattgatgtttgcctgaaattttccaaagagatgaactgtatcccaaggctaaactataaactgtgtttacagttggcttgcaataaatatttttgggatggatggatggatgggtggctgatgatggatgagagatgagtgggtggctaaatgggggtacagatgagaaagtgaaaggttggggcaaaatctcttttctygaatatgtttctcagttgtattagtctgttttcacactgcctataaagacatacccgtaactgggcaatttacaaaagaaagaggtttaataaacttacagttccatgtagctggggaagcctcataatcatggca

SEQ ID NO: 564508 - DNA, 377 bp, Homo sapiens
cctgcatggcttgggtgtaaacttggatctctctgctgtccattgatgtttgcctgaaattttccaaagagatgaactgtatcccaaggctaaactataaactgtgtttacagttggcttgcaataaatatttttgggatggatggatggatgggtggctgatgatggatgagagatgagtgggtggctaaatgggggtacagatgagaaagtgaaaggttggggcaaaatctcttttcttgaatatgtttctcagttgtattagtctgttttcacactgcctataaagacatacccgtaactgggcaatttacaaaagaaagaggtttaataaacttacagttccatgtrgctggggaagcctcataatcatggca

SEQ ID NO: 564509 - DNA, 588 bp, Homo sapiens
aggttgagcactcagtacgcaaagactgctccccacttttgatgccaatcacaagccctaggttgttttacctgtgcttctgaccaactgactataaattggggttcccatgaacccgtccttgggtttgattaattttcttttttctatattttttctttttccataagttattggggtatggatggtgtttggttgcatgagtaagttatttagtggggatttgtgagattttggtgcacccatcatcccagcagtatacactgcaccctatttgtaatcttttattccttgcccactctcccccttccccgcaagccaccaaagtccattgtatcattcttatgcctttgtgtcctcatagcttggctcccacatgtcagtgagaacaaacgatgtttgggtttccattcctgagttacttcacttagaataatagtctccaatctcatctaggttgctgtgaatgccattaattcattcctttttatggcttagtattcygttttatatatatatatatcacagtttctttatccactcattgattgatgggcatttgagttggttccatgattttgcaattgc

SEQ ID NO: 564510 - DNA, 649 bp, Homo sapiens
cttagtattccgttttatatatatatatatcacagtttctttatccactcattgattgatgggcatttgagttggttccatgattttgcaattgcaaattgtgctgctataaacatgcatctgcaagtatctttttcatataatgacttcttttcctctagtagtgggattgctggatcaaatggtagtgctacttttagttctttaaggactccccacactgttttccatagyggttgtactagtttacattcccaccagcagtagagaagtgttccctgatcaccgcatccacaccagcatctactgttttttgattttttgattatgaccattcttgcaggactaaggtggtaacgcattgcaatttgatttgcttttccctgattgttggtgatgctgagcattttttcatatgtttgttgggcatttgtataccttcttttgagaatttattcatgttcttaggccactttttgatgggattgtttgcttttttcttgatgatttgtttgagttcattgtagattctggatattagtcctttgtcagatgtatagattgtgaagattttctcccactctgtgggttgtctgtttactctgctgactgttcctttgctgtgcaaaggctctttagtttaattaag

SEQ ID NO: 564511 - DNA, 628 bp, Homo sapiens
ctcagcctcccaaatagctgggattacaggcacacaccaccacccctggctaattttcatatttttagtagagatggggtctcactatgttggccaggctggtctcgaactcctgacctcaaatgatccacctgcctccaactcccgaagtgctgggattayaggcgtgagccaccacacccagccacatctatattcttaagtgaaattggtctataattttttaggccattttacggactttaggtctataatattttgggaacttactcatcagattttgttattaaggtcatgtttgctttataaagtggctagcaatgtttttcaaccatctggaataattagaataacaaagtttccattttgttaaaatttgataaggactcaacagtcttctatctcctgggcccacactagactagagttctcagctttgcttgttgttagggtaccatgtgactgagttctggctaatggaacagggcagaagcagatcctttccagacctgaggcataggaaccttcaattttccatcctctttgcatcttcttttgcaatgaccttggaaccatctgttaaagatagtagatatccatcaaccaatgagtggataaagaaaatgtg

SEQ ID NO: 564512 - DNA, 628 bp, Homo sapiens
ctcagcctcccaaatagctgggattacaggcacacaccaccacccctggctaattttcatatttttagtagagatggggtctcactatgttggccaggctggtctcgaactcctgacctcaaatgatccacctgcctccaactcccgaagtgctgggattacaggcgtgagccaccacacccagccacatctatattcttaagtgaaattggtctataattttttaggccattttacggactttaggtctataatattttgggaacttactcatcagattttgttattaaggtcatgtttgctttataaagtggctagcaatgtttttcaaccatctggaataattagaataacaaagtttccattttgttaaaatttgataaggactcaacagtcttctatctcctgggcccacactagactagagttctcagctttgcttgttgttagggtaccatgtgactgagttctggctratggaacagggcagaagcagatcctttccagacctgaggcataggaaccttcaattttccatcctctttgcatcttcttttgcaatgaccttggaaccatctgttaaagatagtagatatccatcaaccaatgagtggataaagaaaatgtg

SEQ ID NO: 564513 - DNA, 628 bp, Homo sapiens
gatggagcttgagaccattattctaagtgaaataactcaggaaaggaaaaccaaatgtcatgtgttctcacttataagtgggagctaagctatgaggatgcaaaggcataagaatgataatggactttggggacttgcgggggaagggtgggaggggggtgaggaataaaagactacacattgggtacagtgtacactgtttgtatgatgggtgcaccaaaatctgagaaatcactaaagaattaatccaygtaaccaaaaaccacctgttccccaaaaatgattgaaataaagtaaactaataaaaaaataaagatagtagacacataagatgggagtaacatggaatcttgaaataccattgggagattgtcacctaacaatgagaaacattgttttggtctttatgtgagtagaaggtaaacttccattgtgctaagcccctgagatataaggagggaagttacagaagttaatattaccttattaatagtatagagagctgtaaaatcatccagagttgatacatttctaagtcatggattttctaacagtttaattgagatataattcatatgccatacaattcacctatttaaaatgtactgcgcaattgatggcagtgggt

SEQ ID NO: 564514 - DNA, 576 bp, Homo sapiens
aactgtgtgaaacatatgtgagagtgtcagagagggaaagagcaaaagtgactttaaagcaaaaagaaaatccttgttggttaaacgtttactgattaggagattagggaatgaaaaaataaaaaacaagaaaatcatgtgatatttaaaaatctttgaaagactttcccttyccttggtgattcacatactatcagctatcagaggtcagcatgacgtagggataattgctagtaatttgcttgtggtaattaagaaagtttaaagagatacttccagataaatcaacagcaaagcattaatgacaggttggaaagactggagagatcagagtcacacaggaaacgcacagtttgttattatagttgtccagcccacttaccaaaggaaattataaactatgattttttttaatctaaatctaaaaacacagttagaagatgggttgtgctgcaaagatgacctttctcttgagaaaaggggtaacttgtagttcctcataatagctatagttttaaatgttatatgattaagtatcatttgagaagcttgtttaaaaagcagacgccttagtct

SEQ ID NO: 564515 - DNA, 576 bp, Homo sapiens
aactgtgtgaaacatatgtgagagtgtcagagagggaaagagcaaaagtgactttaaagcaaaaagaaaatccttgttggttaaacgtttactgattaggagattagggaatgaaaaaataaaaaacaagaaaatcatgtgatatttaaaaatctttgaaagactttcccttcccttggtgattcacatactatcagctatcagaggtcagcatgacgtagggataattgctagtaatttgmttgtggtaattaagaaagtttaaagagatacttccagataaatcaacagcaaagcattaatgacaggttggaaagactggagagatcagagtcacacaggaaacgcacagtttgttattatagttgtccagcccacttaccaaaggaaattataaactatgattttttttaatctaaatctaaaaacacagttagaagatgggttgtgctgcaaagatgacctttctcttgagaaaaggggtaacttgtagttcctcataatagctatagttttaaatgttatatgattaagtatcatttgagaagcttgtttaaaaagcagacgccttagtct

SEQ ID NO: 564516 - DNA, 576 bp, Homo sapiens
aactgtgtgaaacatatgtgagagtgtcagagagggaaagagcaaaagtgactttaaagcaaaaagaaaatccttgttggttaaacgtttactgattaggagattagggaatgaaaaaataaaaaacaagaaaatcatgtgatatttaaaaatctttgaaagactttcccttcccttggtgattcacatactatcagctatcagaggtcagcatgacgtagggataattgctagtaatttgcttgtggtaattaagaaagtttaaagagatacttccagataaatcaacagcaaagcattaatgacaggttggaaagacyggagagatcagagtcacacaggaaacgcacagtttgttattatagttgtccagcccacttaccaaaggaaattataaactatgattttttttaatctaaatctaaaaacacagttagaagatgggttgtgctgcaaagatgacctttctcttgagaaaaggggtaacttgtagttcctcataatagctatagttttaaatgttatatgattaagtatcatttgagaagcttgtttaaaaagcagacgccttagtct

SEQ ID NO: 564517 - DNA, 576 bp, Homo sapiens
aactgtgtgaaacatatgtgagagtgtcagagagggaaagagcaaaagtgactttaaagcaaaaagaaaatccttgttggttaaacgtttactgattaggagattagggaatgaaaaaataaaaaacaagaaaatcatgtgatatttaaaaatctttgaaagactttcccttcccttggtgattcacatactatcagctatcagaggtcagcatgacgtagggataattgctagtaatttgcttgtggtaattaagaaagtttaaagagatacttccagataaatcaacagcaaagcattaatgacaggttggaaagactggagagatcagagtcacacaggaaacgcacagtttgttattatagttgtccagcccacttaccaaaggaaattataaactatgattttttttaatctaaatctaaaaacacagttagaagatgkgttgtgctgcaaagatgacctttctcttgagaaaaggggtaacttgtagttcctcataatagctatagttttaaatgttatatgattaagtatcatttgagaagcttgtttaaaaagcagacgccttagtct

SEQ ID NO: 564518 - DNA, 509 bp, Homo sapiens
ggagccacccttcccggacacaactttttttttaattgatcaagttttggattatcaattagatttgaacaggattagagcactagtagaacagatattaacatcagccaggtcaaaaaattaatatttcsaagaaaatcaatcttttcattttatttgaatatgtatattgttaatggcaaaaataaaattttattttccctgaatcaatttttttaatatttctttttagtagcattgtttctatttttcctttgttttgtgaatgacctacaagattatacccattttttcaaatttctttagatcaattataggattaatacaattgggaaatcattatttgaatcttatgattaaactgtacattatattaaagcacatacaatgttataaagcatttaatttaaaagtagtttatataatttgttttatctgtcttttctaatattctagaaattggagaaattatattaggtcatagaattgtgcatagtaatattaatttg

SEQ ID NO: 564519 - DNA, 509 bp, Homo sapiens
ggagccacccttcccggacacaactttttttttaattgatcaagttttggattatcaattagatttgaacaggattagagcactagtagaacagatattaacatcagccaggtcaaaaaattaatatttccaagaaaatcaatctttycattttatttgaatatgtatattgttaatggcaaaaataaaattttattttccctgaatcaatttttttaatatttctttttagtagcattgtttctatttttcctttgttttgtgaatgacctacaagattatacccattttttcaaatttctttagatcaattataggattaatacaattgggaaatcattatttgaatcttatgattaaactgtacattatattaaagcacatacaatgttataaagcatttaatttaaaagtagtttatataatttgttttatctgtcttttctaatattctagaaattggagaaattatattaggtcatagaattgtgcatagtaatattaatttg

SEQ ID NO: 564520 - DNA, 504 bp, Homo sapiens
acatttaatgactagatatgagtttatagccagcttgaaaggagaaattcttgaaggcagaatcaggtaatttaccaaactaaggaattaaaagatgttttcagttgtgtcagagtgaaatgcatgctgtctacaattgtgaaaaacagagatatatgtatgctatcaaaaacaaaaaccaacttttattytagagttaattgatggtatgacctggaattgaaatggtaacatcattagagatggcctttacctccttgtacttttctccatctgttctattctctgccctctaccaaatatctttctctctttactcaggcttcttttttctctgatctattatcttttcacatgtcacctcttcttaccttatttatatcataatcttccttttcccccccaatataactggcaagattcctgtagttaacaattcaaatatctgaaaaagagattctaattgattcagcccatcttgaaaaaaaaaaatcacatgcctaa

SEQ ID NO: 564521 - DNA, 637 bp, Homo sapiens
tcaaaaaaaactctaacaacacgcagaatagaattgtgatgccatactcacaaaccttagctaaactaacaaataacctgctattttttgacacatgtaacactacacaatagctcatttgtcatttctaacccacacaaataaaacatataaatacttatatggaagaggtaacaaatagtcttgatcaaagagctaaacagttatagatatttaaaaagtatcaaagaaaaatgaacaaatctgttggtctcaaatatagaagtgttgcatgtgtacacattgcaatgaagaagacactctttttatccaaaattatgtctgaatctttctcctacaatcagaaattctatgtggtcaggaatatggaagtaggaatgtagctttataattgatcttgattttctttggaggatcagctttcccttaattcttataatayactctgattttaatttggggtttatatggatccagcaaaatttatcatagaatgaaacctcctttagatacataaattccattgaatgatccaatgtcgagcatgttttcaaactgaaaacattgaatctctggacctttgcagtgaatgcaaaaagcaaaacaaacaaacgaattaccccacgcattttggaat

SEQ ID NO: 564522 - DNA, 637 bp, Homo sapiens
tcaaaaaaaactctaacaacacgcagaatagaattgtgatgccatactcacaaaccttagctaaactaacaaataacctgctattttttgacacatgtaacactacacaatagctcatttgtcatttctaacccacacaaataaaacatataaatacttatatggaagaggtaacaaatagtcttgatcaaagagctaaacagttatagatatttaaaaagtatcaaagaaaaatgaacaaatctgttggtctcaaatatagaagtgttgcatgtgtacacattgcaatgaagaagacactctttttatccaaaattatgtctgaatctttctcctacaatcagaaattctatgtggtcaggaatatggaagtaggaatgtagctttataattgatcttgattttctttggaggatcagctttcccttaattcttataatatactctgattttaatttggggtttatatggatccagcaaaatttatcatagaatgaaacctcctttagatacataaattccattgaatgatccaatgtygagcatgttttcaaactgaaaacattgaatctctggacctttgcagtgaatgcaaaaagcaaaacaaacaaacgaattaccccacgcattttggaat

SEQ ID NO: 564523 - DNA, 593 bp, Homo sapiens
acatgaaattgaagggtcaaagtctttgttttatatattttaaacaaaattatttaagtctgtgcccacaggtcaactagagagctgcctgggcaggagtcattatagaaataattgtttaatacatgttttgcaatttgaaaatcaaaatgttatatttctttttatttttatttgattctcatcagctaaaacttgaaccttttatttataatattataatttcttatatcayacaattgaattgtaagcctaagtcaaaacaaggtctttgaagtctgcttggaatttttgataatgtagggcaattattacaaataatacaaaaatttccatgagtatttttaaaaattttaatcacacaaggaatacttgggcccacatgctgtactagaagacctagttatatatctgcctctgtcattgtcccatgcttccctttccaatattatagacatttagctatttaaatttaattcaatttaaaaaatacaaaatataattcctcaatttcacaagccacatttcaaaggttgaatagactcttttgtctagtggctactatatgaatacacatatagaatatttgcatc

SEQ ID NO: 564524 - DNA, 499 bp, Homo sapiens
aagccacatttcaaaggttgaatagactcttttgtctagtggctactatatgaatacacatatagaatatttgcatcattgaagaaaaatatattggagagtgttggtcctgttacgtgtgtttgaaataacacacaaattccattcctttttcctgtgctttctttcattcattccaacaataataacaataataacgaggccytaatgcttgctggagacaagaatttggtaatgaacaaacaaacccctggctttgtgaagaaaacaaacccctgctcacatatatggaagggaagtaaataagtaaacacacaaacatagtgttttatagtaagaaatacattaaagatactaaaatttagaaagttgtattagttaagcttgtctgtgaaatataagaagactatcttggtagagacttaaatgaagagaaggaaaataaaaactttaaggatgtctgtaaatgaaacattccctgtggagggaatagtgcaaa

SEQ ID NO: 564525 - DNA, 499 bp, Homo sapiens
aagccacatttcaaaggttgaatagactcttttgtctagtggctactatatgaatacacatatagaatatttgcatcattgaagaaaaatatattggagagtgttggtcctgttacgtgtgtttgaaataacacacaaattccattcctttttcctgtgctttctttcattcattccaacaataataacaataataacgaggccctaatgcttgctggagacaagaatttggtaatgaacaaacaaacccctggctttgtgaagaaaacaaacccctgctcacatatatggaagggaagtaaataagtaaacacacaaacatagtgttttatagtaagaaatacattaaagatactaaaatttagaaagttgtattagttaagcttgtctgtgaaatataagaagactatcttggtagagacttaaatgaaragaaggaaaataaaaactttaaggatgtctgtaaatgaaacattccctgtggagggaatagtgcaaa

SEQ ID NO: 564526 - DNA, 474 bp, Homo sapiens
gggtttttcttactgtgggtcaaggaagaacaataatcccagtgtaactgaaaggaaagaatggtatcaagggccagattacctccatgctgcatctttgaagtcctttaaaggattttggattatacaatgaaataagagagaaagccattggaaasttccaagcaagaggtgagtaatttccttattaatggcatcattctgtctgtcttgtggagaacaaaacattgtggacatgagcaggaatggaaacaaagctaccagagagatgactgggcaggagtctaggtgacagattgcatggacttgatcaatctggcaacaatggaagtgaggagaactattgggtctattgagaatgatgcattctctactggatttattatgtctcccatgtttcttctgtagtcatggaccaggaagacagtgtccagagacttatattgtgctagattgttatttctgttgaggtgt

SEQ ID NO: 564527 - DNA, 474 bp, Homo sapiens
gggtttttcttactgtgggtcaaggaagaacaataatcccagtgtaactgaaaggaaagaatggtatcaagggccagattacctccatgctgcatctttgaagtcctttaaaggattttggattatacaatgaaataagagagaaagccattggaaacttccaagcaagaggtgagtaatttccttattaatggcatcattctgtctgtcttgtggagaacaaaacattgtggacatgagcaggaatggaaacaaagctaccagagagatgactgggcaggagtctaggtgacagattgcatggacttgatcaatctggcaacaatggaagtgaggagamctattgggtctattgagaatgatgcattctctactggatttattatgtctcccatgtttcttctgtagtcatggaccaggaagacagtgtccagagacttatattgtgctagattgttatttctgttgaggtgt

SEQ ID NO: 564528 - DNA, 467 bp, Homo sapiens
acacattaaaacgtacgtagtctctttctctctctctctctctctctctctctctctctcwcacacacacacacacacacacacacacacgcagttaaatagaaatgtctgtagtcatcagtagtccctaaaacaaagtcatgaccaaataaggaaactgaagcaatccctttgataatcatttttttcaatttgtctgctttttaattgtgattgttattttataaagatctttaacatttattttcatagttaaatattattacaattcacgttgcccaagttaagaaactgaaacttaaggaagtgatttgttttagaatttggtgcaggaagcaagtatatggttgagtgcgaacctaaagccaggtgttctaactaaatcaaatttccagcacaccagaagatactgataaatgagcacatgtatagagacaaaattgttgatgtttgttgatttttataat

SEQ ID NO: 564529 - DNA, 444 bp, Homo sapiens
gcccaagttaagaaactgaaacttaaggaagtgatttgttttagaatttggtgcaggaagcaagtatatggttgagtgcgaacctaaagccaggtgttctaactaaatcaaatttccagcacaccagaagatactgataaatgagcacatgtatagagacaaaattgttgatgtttgttgatttttataatatatccaaacacaatccaaagacaagacaattagcactctgcttaccrttacttctttaattatattacacttaactttctttctctttaaagtttttttttttttaattttctactggaagatgttttacaagttgaggaattaggagataaacatctaattttagtcctccagccaatattctcaatggcttcaagcaagtctctttcatgtaaaataggaaggtaggactagaattggaggctttcaatc

SEQ ID NO: 564530 - DNA, 532 bp, Homo sapiens
agccatatatattctggttatgtgtttctacataataactgtcataaaacttaatggcttaaaataatatattattatctctaatgattttgggtattgatgggccaaactaaattgttgtcatttggagtccctcatatagtggcagttagatggtagctgatattggagtcatcaagaagcttcttcactttctttcacttagactgaaatggctgaactaaaagagaggaatcataatctatctttccattggtaatctgtccttccacgtgacctctccatgtgactatcttgatcttcctcacagactggcagttttccccaatgcctctgcaattctagagtgacaattttggcatcccggaaagctgccttgttttacatatacgacattgtttaggccaaacacgtaaattttctttatttaygtatatggaatcatttactgtcatgtaattctttgactcccttgagttttatcataatggtatgtgtatgaattttctacattaaaggcaatatttactca

SEQ ID NO: 564531 - DNA, 552 bp, Homo sapiens
cataaaaaccccaaactccattgacagaggagcagagtggtgtggcagtgaaggagagaagagaagaagtggctgaacgtccaggagagaagaagcaactgcatgtcagaaactacagatagacaccgcttaactttagatggcatgactttggagaggagccyggctggagacagctgggcttcaggaaaagatccccttcttcccataccatcccctttccagctccccttccactgagagccactcccatcacttaataaaatcctctgcattcatcgcctttcaaacctgaatgtgacctgattattcctggaggccaagttagaacctggtaccaacaggatagtatgtaaaaggctgtcaccctgactccactgagctggttaatacttagccatccacagatggcaactgctaaaagagcattaactgtaacacacccatagatgctgctgtgggcctggagcacaaaagtgcttgccctagccctggcatccacttgcctgagtgctcctcctcccacaaggggtttgatcactgcggtggcca

SEQ ID NO: 564532 - DNA, 598 bp, Homo sapiens
acaccatttactctctttataattctttctacctccatacattgcctgtcactttatgagacatttataaattgagggtaatagaccagtgtttatttttctcatgtgagttctggctctgatcacagtcatttttctctaatagtttgtaattgacctgactgtctctaacttatttttttaatccttctctttgactctaagttattgactttcattggattmttggcctacattttcagtgttttattctttggttagtattactatattttctttactctttagtacccttagcacttctagaataactgccttctctggtagaaacagatttttatcagccataggagacaaaattagagctatgtttcctaatattgtttccccctcttttttccctgtagtaaacaagtgagtctgatacactttgttgccctttatacttgtgaactagcctctcaaggagcccaaatcagaaatcttgcttttaaatgaaatactatgtatgtgggggtaaatatagtatttgaggttatggattctggagcctgactgcctgggtttgtaaataagtatttacagctaaataagtatt

SEQ ID NO: 564533 - DNA, 592 bp, Homo sapiens
tcatagaatagaatatccattcattgtttgagccttgaggtgagtacatagagatatcctattgtagttttaatttgcattgctatgataatgaatcaagttcagccccattatatatgtgtattatccatttgggtattctcttttatgaattgcaggctcaaattccccaattctctattgcattacctgcctttgttgttttgttgttgttacatatgtttcctagatatacaatttttttcctcccattctgtggcttgtcattgtacttactgtcttaatggtctcttaattatgttaagtacaattaattgatttttctccttgttggcatgttgtgtgttctaataaacccttgattatcctaaggtcatgaagatagcctcttattattttttaacatyttatcatatatacacacacaattcatgtattttatcatatacacacaatttttatattttaaattgacaaatgtaaattatatatatttatggtgtacaaggggatgttttgatgaataaatacattttggaatgacatattcatcacttcacattcttagcagtttttgtggtgagaacattta

SEQ ID NO: 564534 - DNA, 453 bp, Homo sapiens
cagcctcttaaagcgctgggactacaggcctgagccatcatgcatggtccttaaaatattttaaataattatatgttgttttcctgacacttatttttcctaaaaatgacacaaagtaaattggaactattacgaaaagcaaactaataagcaactttcatctctggcaaaaataagcctgttttgtttcaacattcagaatgtagttgcggtgtcagtgggtggcagtaactgttaacacatgtgcaaagattagtcattaaatttctttaaaccaaaattccatctactgcaaaatgggaatatttataattttattaaaattatccaagataagagttggaatgtgaaaagtagattgcttttactttaggtggcaactattatattattacaacaactacactctgtgagatatgctgatatmctcttgaaattcactatagtaggaca

SEQ ID NO: 564535 - DNA, 492 bp, Homo sapiens
aatggggtgatagaggcagaggttggttacaggtatccaaactgatgggaggtcaaaatctggatatgatatctagtttactgtgagatataattaccattgtatgtctcattgttttactttactcagtgatattttggaataaactrtcactatgtggctccaactctattcttggtttccccaaaaatcagacgagggcataagttgtattaggaatctcaggcatcaggagtgagggtgaaggggtgttgggcaaggaaatatgaagatcaaatataaagaatcgtctctgagctatcaactgctgaatacaagcagtgtccaagaaggtaagacaaataatgatgttagaacaagatttttataagagagaaaggaaatcatttatccactcactttcacattttcattgatcaaatatacaacccacgggacagtactcctgcaatcgtagatatttaggcaccaaggagggttttgtactgttgt

SEQ ID NO: 564536 - DNA, 492 bp, Homo sapiens
aatggggtgatagaggcagaggttggttacaggtatccaaactgatgggaggtcaaaatctggatatgatatctagtttactgtgagatataattaccattgtatgtctcattgttttactttactcagtgatattttggaataaactatcactatgtggctccaactctattcttggtttccccaaaaatcagacgagggcataagttgtattaggaatctcaggcatcaggagtgagggtgaaggggtgttgggcaaggaaatatgaagatcaaatataaagaatcgtctctgagctatcaactgctgaatacaagcagtgtccaagaaggtaagacaaataatgatgttagaacaagatttttataagagagaaaggaaatcatttatccactcrctttcacattttcattgatcaaatatacaacccacgggacagtactcctgcaatcgtagatatttaggcaccaaggagggttttgtactgttgt

SEQ ID NO: 564537 - DNA, 417 bp, Homo sapiens
tttgtgaagtgctttggagcttcttctcagtccaaccactcagctggtcatcaccggttgtcatataaaatccactttttggtacacatcatagtccaaaagagaaatggagccttrcttttgcttaaaataagaggagacaacacttcaaaacgatgacttttttgattttcgctcagctcatgaggcaacaacttagcgagctttttcacttttctatttgcttcaaattctgaacaaccgtagaatggttggcattgtgttctttggcaacttctcttgtagttgtaagaggatcagcttcgatgattgctttcaactgctcattgtcaacttctgatggctggccactatgttcctcatctttcagcctctcatctccattgcaaaacttcttgaaccaccactgcactgtaa

SEQ ID NO: 564538 - DNA, 387 bp, Homo sapiens
ttttctttataaactacccagtctatgatattttgttatagcaacagaaaataaacaaaggcatctatcattgtattactagatataatatacataaattttatacaaaccgtacatgtttgtgtgaattgaattgtgtccctcaaggagatgggttgaagtcctaattctgatacctattaatgtctataaatgtgtatattcctatgtatgtattagagtaattaaatgtttaatacttttaatatcttaaacatcacagtgtgtattggggagggataatgtttagagatcacctmtgctattgacaataaaggtattggggtgaagtgtcttcatattttctgtatgttttgcatactttaagtgtttcaaagttaaaactta

SEQ ID NO: 564539 - DNA, 491 bp, Homo sapiens
gtgctgggattacaggagtgagccactgtgcctggccgtttggttggttttctttagtgagctagggtcttgctcttcactcaggctggaatgcagtgacaatgagatcatagcccactgtaacctcgaactcatgggctcaagttatcctcccacccctgcctcccaactaggactacagacacatgccactatgcccagctaatttttaaatttttcrtagtgatggggtctcgttatgttgtccaggctggtcccctggcttgaaactcctggcttcaagagatcctcccacctcagcctcccaaagtgctgggattacaggcatgagccactgtgctcggcctcattctaaacacttttacatagattagtttatgtaatccttccaccctatgaggtaggtactagtatcatctccattttacagatgagaaaacggaagcacagagagattagtatcttgcccacagcctcacaactaataagtg

SEQ ID NO: 564540 - DNA, 606 bp, Homo sapiens
gaattctcaacaggtccccaaggaaggatgaggccacattcctccaagtcactgctctgtcacccagacttggggcggggagtggggctcagggctcctccctaggaatcatggggccttacctccctctagaatgaaccttggtagatgctccccgtccctgcaaccaacaggttcaggaggtccccagggagccagtccagagtgatccagctgcaaagcccttgggaagagccaggagcaaatcctcgggaggcaccaccagaggctaaagcccaacagtagagccctgacctcttttccaccctcacctgcccccacctagtctggctgtccatctgggaggggtggaggcagggccccaggaggcctgcacaggtgggcggaggccggggcascacctgtgatgaagtagctgagctctgcattgaggcccacgtcgttgtccgtgcagttcagccagaccacccggaactcgcgtggcacgtcctcggacacagacacattgtacacggccgggaagaaggtgggcgtctcgtcgttcacatccagcactgcggggcagaacgggcgccggggctaggcctggcttctgccgcagaagac

SEQ ID NO: 564541 - DNA, 508 bp, Homo sapiens
accataataggaactacctcatagggctattgtggggttaatttaattaagatcatggaaatcttagaacagtgccaggcactgtttatttatacagtcacagaaatacaatgacaggaaataaaaacaccgggtgttcacatgcgtctaacttgtgactcattactggacagttcaacctatccaaccttatcgtgcattgataattaatagttataaaataatttcctaattacattgtgaagagcataattacattgcctcgagttgttttagtgtgctaaatctgaacaattaaacaacatttcttgttcgcctgtatttsgtctttctttgtattttggtgtaactgaaatgcaaacatcaccctgatagtggcgtgctggtaaatgtttgacaactggctccccaaaataaaaaaaaaaaaaggcatttgccaatttccttggtgtaaatagccccaccagggcccattttaagctaccaacttggtggtattgaatatgga

SEQ ID NO: 564542 - DNA, 556 bp, Homo sapiens
tcgttcaggggaatttataagggtttttattttctctttaatgttcagttaaggccttcacttttatttccagttccgtgaaatcctgactcaaggtatcagcttttccagccaccctgtccagaccctgagaacagcttgtcctgaagctgtgcccaccaaggcttctggctccrgcccctcctgccacccaactgccagctctggcccagtggtgaggaggtccggtgcacaggttcctggaatcttcacacccagactggacccctcagggcctcggcaggcgccttcacctgcctgagcatcacttcttcccctgggaccgggtctaaagataccctctaacttgtgagtttgctgctgggatcctgagggataaagcattgaggccacaggctgagccccacagggagctccactgggctgcagggctggtggtgaccatccagcggatgaatcagcagtcccgaggggcaaggggccaggcaggccatagtggccctgtggccctggggcctcaaatatgaccctcaggcctgccttgagcaggaggaca

SEQ ID NO: 564543 - DNA, 556 bp, Homo sapiens
tcgttcaggggaatttataagggtttttattttctctttaatgttcagttaaggccttcacttttatttccagttccgtgaaatcctgactcaaggtatcagcttttccagccaccctgtccagaccctgagaacagcttgtcctgaagctgtgcccaccaaggcttctggctccagcccctcctgccacccaactgccagctctggcccagtggygaggaggtccggtgcacaggttcctggaatcttcacacccagactggacccctcagggcctcggcaggcgccttcacctgcctgagcatcacttcttcccctgggaccgggtctaaagataccctctaacttgtgagtttgctgctgggatcctgagggataaagcattgaggccacaggctgagccccacagggagctccactgggctgcagggctggtggtgaccatccagcggatgaatcagcagtcccgaggggcaaggggccaggcaggccatagtggccctgtggccctggggcctcaaatatgaccctcaggcctgccttgagcaggaggaca

SEQ ID NO: 564544 - DNA, 556 bp, Homo sapiens
tcgttcaggggaatttataagggtttttattttctctttaatgttcagttaaggccttcacttttatttccagttccgtgaaatcctgactcaaggtatcagcttttccagccaccctgtccagaccctgagaacagcttgtcctgaagctgtgcccaccaaggcttctggctccagcccctcctgccacccaactgccagctctggcccagtggtgaggaggtccggtgcacaggttcctggaatcttcacacccagactggacccctcagggcctcggcaggcgccttcacctgcctgagcatcacttcttcccctgggaccgggtctaaagataccctctaacttgtgagtttgctgctgggatcctgagggataaagcattgaggccacaggctgagccccacagggagctccactgggctgcagggctggtggtgaccatccagcggatgaatcagcagtcccgaggggcaaggggccaggcaggccatwgtggccctgtggccctggggcctcaaatatgaccctcaggcctgccttgagcaggaggaca

SEQ ID NO: 564545 - DNA, 555 bp, Homo sapiens
tctctgcctcagcccactcatgggaactcccatttgcactagcgacaggctggggcatgggtgcggctgctgctatgcrtggctgtcattacagcgataagacattccaggtgccaggtgccacctgcacaatcccatttcagcctcacaaaaatatcatgaggcaggtatcacgattaccaccattttgcagatgaggaagttgtttcagagacccaggtcacacagcaagagggcagcagagccaggtttcaaacccatgtgcctccacagccacacccctctttccacagccacacccctctttccacttggtgtctccagggggggtggagcaggctgcacattcaccttcctgtcctactgggggcccagcacagaattcactgcctccttgtgcagagcagcatcctggctggttgaaagcgatgggtgggttggtcagggttgtgagtgcagctacgattagaggaggcttgggggctgtggtcaagtctgggaaactaaggccaggtttaggtgatgtggtcagggtcgggccatggggtaaagtgc

SEQ ID NO: 564546 - DNA, 363 bp, Homo sapiens
tttggacagatactgcctttaaaaaattatttacatgagtggaaacgtcatgactaagattgaagaagacgcagagaaagttcttttggccagtatttgtcacgttacttatgactctctcagtagctgtgatgggatgctgttctgtacgagtaagtctctttttcaggcattgataccagagggccatgtggcttcctatagcactaggaataaaactcaagtgtgtccgcaaggtcgccygtcacctggtgattggccacctctcagctcctccccctctcttctgtctggcctgctgtccagccttctggccccttccttcttggtgctcagagattttccattttgaattccacctct

SEQ ID NO: 564547 - DNA, 363 bp, Homo sapiens
tttggacagatactgcctttaaaaaattatttacatgagtggaaacgtcatgactaagattgaagaagacgcagagaaagttcttttggccagtatttgtcacgttacttatgactctctcagtagctgtgatgggatgctgttctgtacgagtaagtctctttttcaggcattgataccagagggccatgtggcttcctatagcactaggaataaaactcaagtgtgtccgcaaggtcgcctgtcacctggtgattggccacctctcagctcctcccmctctcttctgtctggcctgctgtccagccttctggccccttccttcttggtgctcagagattttccattttgaattccacctct

SEQ ID NO: 564548 - DNA, 507 bp, Homo sapiens
ggtaggaggcacagcctggagggagagtgtgggctttggagtcaacacaacaggatgaaccctcacacgctgctggtgggaaagtaaaatggtgcggcctctttggaaaacagtttggcaattcctaaaaaagtaaagcacagagttaccgtaggacccagcagctccactcctgggtggagaaatgaaagaaatccctaagagaaatgaaagaagaaatgaaatccctaagagaaatgaaatccctaagagaaatgaaagaagatgtccacacacacgtatacatgaatgtgcatagcaacattattcataactgtgaaaagtagaaacagtccacatgctgtccacacaaacacaygtatacatgaatgtgcatagcaacattattcacaacgacgaaaatcggaaaaaatccacatgcccatccactgatgaatggagaaacaaaatgtgatctatcttacaatgaatgttattcagccagaaacaaaatgtgatctatcttac

SEQ ID NO: 564549 - DNA, 540 bp, Homo sapiens
ctgtagcctttctgtagcctgaccgcagaccagcagcgctcttaactgatctggctattttttctcagctrtggacacagtcccttggcagattctcctggctgactgcaaggcagaggagcagagtagttggtgtaaacaccacctcctcagcttctcagtctccctggagtgtggttttctcacctgcttctcctgagtgaaactcgtgatcacagaggaaggctctaaaaagctactacgatgtcgctcctgctgccccgaattcttggaggaggcaaatggggaagcatgctcttggttcagatacttcctgtatgtagaatccccaggtcatgtctgtggaatgcagggatgagggccaggaaactgcaggaaaaaaggctggctggagggctggtgggtccattcgttcagcagctacctcctgaacacctactgtgtgctttggggcaagaagaactgagcgttgctgttagaaaatccaccatcctgcaggagaggctacacatgtctgcaccgttaataacaggggtgtcc

SEQ ID NO: 564550 - DNA, 499 bp, Homo sapiens
gacgtgattggtatctgtttaacacattgcctgtgtggattacrtgggaaaggctgtggagagacctggcatctgagtggcaggagacatttgtcatttcccttctttcgccttggggcccaccatgttctctgcctctctgaggttacttctaaggcttccagtaccctccgtgagggtgaccctgtgtcctgggcttggtatgttgccaggcatcaggcctgggagtcagtctcagtgtctactcagcgattttgttgaaactgagagtccaccacccagcttaagacgtagaacattgttggcacctgtgaatctacttgcacaagccttggtgatcctgtcctcttccctgaccaggcagcccctaccctgaatagcatctcatttattcccttgtttttaaaaagcagttgatagcatgtctatgagccctacctgaatagtctgtttagttttgcttggtttttatgacaatagtgtcacacaggaggcattt

SEQ ID NO: 564551 - DNA, 537 bp, Homo sapiens
gggtggaggcaccaggtggggcaggaaggaggaggaagaggccagcagcagctgctctgtggctccgtccacctgaggactaatgtttgaaaactgcagaatttgcaaagaaactcatagcaataattattctaaaagatactgttttaagtcatttcttttattatttagattattttggttgcttgtcagtgtgacaggccatgcctgagctgtccatgtaaagttcccaaggggcataaatgggagactgcagtgcagcctcagatgtggggggaccacccagtgccacgcggcaagaacttaacacccgggtgttgacgaggcagggaagaaaaggggcgcatctgcagctcagcgcccctccagcctggctggcgtctcacactactcatgtcagagaacaattcagcgggctacacaggagccatggtccacccaggagctttcttacaacctccttcccctgtgcattgcttccttgatgcttctgcartaaatcaaattaaaagcaaacttgaaccaagtccaggttgt

SEQ ID NO: 564552 - DNA, 593 bp, Homo sapiens
taccacaggcactgtgagctccctgtgggctgttttgcagctttgcccctgcccaggaccagggaccagccagagcttcataattgtcagctgagtggaatcccttcttggggcaagtcagtgagaaagactttctcaggctgcagttgacaacccttggctgaggcccccactgtgagctgggcaggttggccagggaataaggaggaggagactrcttacttagcatcagtcaaggttgaggggccatgggccaaggtgaggttcagaggtgacagaagggaggcagaactgctccctggtcatgttaccttctcgaaacccgctgggagctgcgaaggcaattgtcactctccagtctggctttgagtgacgcacagctcccaggcctcctgtcctgtctgcccgctaggctgttgttgcctgggggtaccagaccagagctgagggttctgagaaggaaatgcaatttgctgttggtgtaccaggccttcttctgtgctaccatgtactgctcagtggactgaagcctttgctcattagcagggcctcatcccaggccagttcatcctgggcctctggaggggctgggg

SEQ ID NO: 564553 - DNA, 593 bp, Homo sapiens
taccacaggcactgtgagctccctgtgggctgttttgcagctttgcccctgcccaggaccagggaccagccagagcttcataattgtcagctgagtggaatcccttcttggggcaagtcagtgagaaagactttctcaggctgcagttgacaacccttggctgaggcccccactgtgagctgggcaggttggccagggaataaggaggaggagactgcttacttascatcagtcaaggttgaggggccatgggccaaggtgaggttcagaggtgacagaagggaggcagaactgctccctggtcatgttaccttctcgaaacccgctgggagctgcgaaggcaattgtcactctccagtctggctttgagtgacgcacagctcccaggcctcctgtcctgtctgcccgctaggctgttgttgcctgggggtaccagaccagagctgagggttctgagaaggaaatgcaatttgctgttggtgtaccaggccttcttctgtgctaccatgtactgctcagtggactgaagcctttgctcattagcagggcctcatcccaggccagttcatcctgggcctctggaggggctgggg

SEQ ID NO: 564554 - DNA, 456 bp, Homo sapiens
gagctctgagtttgggcctggcatgcagctccacagagtctgctcagcattttctgccagcagagccagccctgctggtcccaggagcaagtggggtagagtctgagatcctcttcttctgccaagtgttggggctctggggctctgggggtctgtcctgggatctcctctcttcacctgtacacaggatccaagatcagctcctccactcaatggcttcacagtaccccctgccccagcactgatgatccctgaacccacgtgatccagccttatctggacatctccacttgcatgtcccagagacacccaggtcatttagtgtcccaaggcgggaacaccatcatcctcrccactacccccgctcccgtcctgtgctgtcatctcagggaatggcctggcatccagcctcgtcctgcctctgccctctcccatgttaagcttattgagtgtagc

SEQ ID NO: 564555 - DNA, 577 bp, Homo sapiens
ttaccaaaacatttaaatatataaatatgtgatatagtcatatatgtgctttttatatatcattaaataacaagatctaggggttggtctaataactactataatttaaaatattaatgagtataaatgatatttttagatatctgcaataattacattatgacctgaaaatacctgtgacttctaccggggacagagtcacaggtgttgctaataccactgtggtttattgtctagttttgtgattaactgaaatgctagatatggattaaggattaaytaaaatagaaagtctgtgaatttggactttctgaaatctatccacaaccccaggtcaggagctccttctagtctgacccagctttgtgggcattgaagctgtgatatcaattctgaaactggctctaatagactcgtggcttggaaagggcaacattcaaattaatctttttaaattaaaccagctaatcactggcacggaaccagacaccattgaggcttcaaacttccaactggaccgcaagacacgcttcatcatccatggcttcttagacaaggcggaggacagctggccatc

SEQ ID NO: 564556 - DNA, 560 bp, Homo sapiens
gagtggggcctgggatttctctgttcctttctttttttttttttttttttaactcccaggtgactctggtttgcagccaggatggagaacaagtggcatgtcttgattgtgttttggcttcgtgcaccttggagttgtrtgcagggtgtggattggggggcttggagccaaccttaacaagcattgctacctagcagggaccccaaagctctgcatgcctacagccttcgggtaactttggggtgtgcagccagactgtgaccacactccttagatggccttgctcgccttatagcacactgacttaaggctagagccttacgttcccatggtgatgctgatccaagcttgtacaacccacggcccacgggctgcatgcagcccatattggctttgaatgcagcccaacacaaattcgtaaactttcttaaaacattatgagattttttgcaagtttttaaacttttatttttatttatttatttatttttagctcatcagctgtcgttagtgtattttatgtgtggcccaagacagtccttccaatgtggcccagggaa

SEQ ID NO: 564557 - DNA, 617 bp, Homo sapiens
ttcctttaacccagtaacttcacttctcagagtgtaccatagagaaatacttgcgtgtgtgcataagatgatgtgatcaaggatgctcgctctttatttttaagagcgaaagattgaggggaaaacctaaatgtccaccagttgtaaatgactaaatactatagattaaatactacatgtaaccattaaaaagaaggttatacctctgcgtactgaagagagaaaacctctaaggtgtattaagtaagaaggcaagtgacaaaacaacatgcaacacacccattgtcttcattggttcagactgctgtaatgtagtaccatagactgggtggcttataaatagtagaaawgtatttctcacagttctggaggatggaaatctgagaccagggtgccagcatgatcaggttctgctgcacattgctgtcttcttgctgtatactcccacgtggtggaaagaggaaaagagcactctctgtggtctcttttatgaggttactgatcccattcatgtgggctcttacccacatgaattcagtccattgtaccatgtatcagtcaaaatacacatgtgcagtatcagctgcccttcattcatccaagagcacataccttgc

SEQ ID NO: 564558 - DNA, 342 bp, Homo sapiens
ttttttttgactttttaataatagtcattctgactggtatgagattgtatctcactgtggttttaatttgcatttctctaataattagtgatgttgagaatttttttatatgtttgcttgatgtttgtatgtcttttgagaagttctttgcccactttttaatggggttgttagtttttttcttgytgatttaagttccttatagattctagatattaatcttttgtcagatgcatagtttgtaatattttctcccactctgtaggttgtctgtatactccgttgattgcttcttttaatgtgcagaagatctttagttcaattcagtcccatttgtctatt

SEQ ID NO: 564559 - DNA, 517 bp, Homo sapiens
gtgtcctggctgtcaattatacagaggccattatctatagtaaggaatcccaaatgccattaagtgtggccctgcctccactgcttctataaagctaatacaacaacatctccctygggactactctcacccaggggatagtccagttcagtccccacaggttgacttggacacactaggaacagaagagaaaggctaagtcaacacctcgacacaaatagagtttcctatagtcgaggcttgagagaaagaaaggaagctgaagaaaagaaaatccagacccttctgtggaggtagagaaggaagattgctaaaagacaggttaaagaaaatgctctatcaagaaatgtgatcaaggacagagctaaaggaactaggagttttaagaaatacctacagcaccgttccaagtagattaaataaaggcctactcaaagcatcttccacttcaagcactaagttaccctgaaatcccataatacagagagagtcaatgttttcacatcaaggaatcaga

SEQ ID NO: 564560 - DNA, 517 bp, Homo sapiens
gtgtcctggctgtcaattatacagaggccattatctatagtaaggaatcccaaatgccattaagtgtggccctgcctccactgcttctataaagctaatacaacaacatctccctcgggactactctcacccaggggatagtccagttcagtccccacaggttgacttggacacactaggaacagaagagaaaggctaagtcaacacctcgacacaaatagagtttcctatagtcgaggcttgagagaaagaaaggaagctgaagaaaagaaaatccagacccttctgtggaggtagagaaggaagaytgctaaaagacaggttaaagaaaatgctctatcaagaaatgtgatcaaggacagagctaaaggaactaggagttttaagaaatacctacagcaccgttccaagtagattaaataaaggcctactcaaagcatcttccacttcaagcactaagttaccctgaaatcccataatacagagagagtcaatgttttcacatcaaggaatcaga

SEQ ID NO: 564561 - DNA, 510 bp, Homo sapiens
caaaaaccctggattgcagtgcttaccattttcagtggtgtaaatactctgactgtggccagtttcaggctaccaacatgatgtctctgaatttggagttgggaagggatactcatgctggctytcgtgagccagaataggcaggctctaacctgtcattcttcatctctccccttgttgccagcctggcatataggactccagcatccaccttgctttctctctggtgtgaattattctctatacattcttctactctcgctctgcccttgccagaaatgtgcattcctgtgttttctaaactgtatcatttttaagctagattcagaggttgcctcctgcaggaagcctctatatcattgaattgactgctctttctctctgatttcccagttttcctctgccacataactcatgtcatctaaaattttagccatctcctgccaaaagttgtttacttttttttctcttccactccacaggaccatgaactctgagggtcaatgcaaa

SEQ ID NO: 564562 - DNA, 443 bp, Homo sapiens
gagggagagggtgtcttgccccagacccaggcatgtgtgctagaaacctgggtggagccaacagcctcttctaagaagggagggagtgtcagtcattgggtggtgatgtctgacgtctgctctctaggggaaatatccaaaggaaggcaggtcaaaaagacagaggcaccatgagcacaggcctggaaggggaccacrctttggggctggcacatagaatagctgaactgaaatcgaggacctcagtggagcagtagtgaaagaagagtttaaagagagaaagtttgttgagactatcatgatggtcaaggcttgggagactttgccttggagcagatgatggtgatttggggggaaatgagatgctggatgagtgctttaaggcagggactttcaggatccattgcagggggcagagttgaaagggaggaggcagctgggca

SEQ ID NO: 564563 - DNA, 443 bp, Homo sapiens
gagggagagggtgtcttgccccagacccaggcatgtgtgctagaaacctgggtggagccaacagcctcttctaagaagggagggagtgtcagtcattgggtggtgatgtctgacgtctgctctctaggggaaatatccaaaggaaggcaggtcaaaaagacagaggcaccatgagcacaggcctggaaggggaccacactttggggctggcacatagaatagctgaactgaaatcgaggacctcagtggagcagtagtgaaagaagagtttaaagagagaaagtttgttgagactatcrtgatggtcaaggcttgggagactttgccttggagcagatgatggtgatttggggggaaatgagatgctggatgagtgctttaaggcagggactttcaggatccattgcagggggcagagttgaaagggaggaggcagctgggca

SEQ ID NO: 564564 - DNA, 571 bp, Homo sapiens
ctctggaggagaccagaacagctggggagaccagcttaggcccagagagatgtcctcgagccatgtcagggtgtgagtgacttagggcccaggccacagagctggcagcccaccccggctctcagagcatacctggcacattttagatccagtacatttcacccaagagagcaratactggtagaaagaagagatgtcgtcaaattatcgctccccgattcctccaggcagagatgccggagtatgggtacacatgggtttatgcacacatgtgcccctccctgaccagaatggggctccctgagatatgtgttggtgccccatgggcattcgcccctcctgcttctctcccctatactgtcctctgtgtggacctcgtcctcctgcgctcaagtgccttcctgcctatttgagaaagaaacatagcccacctctcccatagaccccatttctcctccatcactgctcccccataagctggaatgccacaaacccccatatttggaagtgacatcctcccaaagcatcccagtaggagaggcgcctgctttagcatccaacagaaaccgaa

SEQ ID NO: 564565 - DNA, 556 bp, Homo sapiens
ggtccagaatccagttttgaaagatggggtgccccyagacttggccaagatgcagagagaggcctcaagacccaggaaatgcgaacttcttgtttggccctggcccagtggctgtggggaggtcactgcaggtgacactcacgttctttccttctcccctgtttaagtgttagttgcctgggaggagctgtgtgctgctgtttgtaaaactgacctcagaggtcaaggggacatgcaagcccaggatttgctttttgtgcacatttgcctgcaccttccatgcagcctggcacccacacatgcgctgcccctccaccgcactgtttgcacacaccagggcccagaaacacgcagatgcttgcccgctgtgggataatttccacccaccataaaaatggctttggaccgtggggaatagaccagagctgggcacaggcaagaatctgggtggcggggcctatcaagaggactgggctcaagctgggatgatgaatacagttaaattgctgttactctcccagtaatcaggcttggaagcagcagaacaggaggggcc

SEQ ID NO: 564566 - DNA, 568 bp, Homo sapiens
gaaaaccctccaacattaggaaactgggcctggcacaatctgcatcctttctggtggagccttctagaagcattgtttctagggaggagtaggagaaggaatataggcattggcattaaaggccatggcttcaaatctcagtgcgaccacttacaagccttatgactttttcacctctatcctcagtttactaatcaatgaggtctaacatttgttgagcatctgtgatgtgctggacactgtgctgaactaagtaggmttattacctgcttttatcctcacatcagccctataagataagaattactcctcccctttttatggttaaagaaacgcaagcccagagagggtagataacttgcccacggtcacacagctagtgagaagtaatgctgaggttcgaaccctggtcctagccactgcaatatctgccctttcaaaaagatcagatctcccatggcatcttaaaactgaaaacgtcctgggaatctccagattccctgaaccccatccctcagggcccccttggagggtaacggggtgctgggtgtgctggactccacacccc

SEQ ID NO: 564567 - DNA, 574 bp, Homo sapiens
ttgtattgaccttttttttttaaaaaaaaaaagaaagacaacaaatgtaattcagatcaatcaaaagagaaagttgaaatgrctggagcaatggttcttcattggggcgattgtgcctctcaggagacatttggcaatgtctggagattattttgattgtcatatctgggggaaagtgctaccagcatctagtgggtagaggccaggggtgctgctgaacaactcacaatgcacaggactgcctcccacaacaaagaattatccagccccaaatgccacagtgctgagtctgaaaacctctgtcctagcactatcactcagataatctgtgttcacattttgctaacatttcattccttttttctatgtgcacattttttaagccaaaaaaagtatcttatggaactgtgctgatcattgtccttttttaaaacacatcataaacacatctgttttttcaagttacaagcatctcttctgcaacgttttagtggcttgctgcatttcatatcataacttatttaatgaatcccctattgttggacatctaggttacctccagtttttcttacta

SEQ ID NO: 564568 - DNA, 606 bp, Homo sapiens
gaattctagtgtcagatccaggctyagtgggtgtcaggggattccttccaggtgttcttgcttgggacagagtttcctcacttcgtagtcccaagttcccatggtccttggaaagggatggggaaaacctatagagccgggaggagatgtgaaatatgagaaggggcatcccttggtcggtggtgccaaggacagctgtgtcaggcccagtccagtttggggctggcgctggggagcaggctttggtgaatgtgagccgagcccctcaggctaggtttttatccagaactggggcagctgctgggcctgagctcagcctcctctgtgagtcgctaggaaccagcagatccggccagcctccctgggttcctggcttccttcatccaagcctcacccacccccttctcaagctcccagccccagggtttatgaagccatgaaaggtgagggcccatttcatcaggtaacagctctcacagcaggaccgtgtgcctaaaggagttcaggccctgcagggagatggtggggaccccgcgtgctggcctatccatgccactcttagcgccttcattttctcatctgcaaaatgggccccagagctagtaa

SEQ ID NO: 564569 - DNA, 608 bp, Homo sapiens
aagaattctagtgtcagatccaggcttagtgggtgtcaggggattccttccaggtgttcttgcttgggacagagtttcctcacttcgtagtcccaagttcccatggtccttggaaagggatggggaaaacctatrgagccgggaggagatgtgaaatatgagaaggggcatcccttggtcggtggtgccaaggacagctgtgtcaggcccagtccagtttggggctggcgctggggagcaggctttggtgaatgtgagccgagcccctcaggctaggtttttatccagaactggggcagctgctgggcctgagctcagcctcctctgtgagtcgctaggaaccagcagatccggccagcctccctgggttcctggcttccttcatccaagcctcacccacccccttctcaagctcccagccccagggtttatgaagccatgaaaggtgagggcccatttcatcaggtaacagctctcacagcaggaccgtgtgcctaaaggagttcaggccctgcagggagatggtggggaccccgcgtgctggcctatccatgccactcttagcgccttcattttctcatctgcaaaatgggccccagagctagtaa

SEQ ID NO: 564570 - DNA, 601 bp, Homo sapiens
ggcctgttccaccagctgtaaggccacagggcctctccctctgctctgtaactgtcaggacacccccagccttcaggctcagagatcacccctgtccctccatgctgctgaatccaagaactctaacatgggttctactcaaggtgctggaaacctaatagcccagccagatgatccaggaaagccagttcactgcctgtcttagtcttggtgctccctggggcaaaccccagttcctccctggtccctctgcccccagcagaaggacatgttgctctgcaacatctgtggaagcctctcagctgtatctatctactactgcaggagggaaccttgctataggagcaaggctttggaaccagaaacccagcttcaaattctggctctgctgcctgctgtctctatggccctgggcaggtgcttagctgtgtcctgaccctcagtctccagagtgtgctgtrgagagaataataataatacttatcccacaatgaagagagacggggcatttaaagcactttgtgtattagaaggcactgggtaaatggcaggtgtcttatctgggagtcggtggaacttcagagagcattggtatttaagc

SEQ ID NO: 564571 - DNA, 415 bp, Homo sapiens
tttaaaaaataattatccaggtgtggtggtgcacacctgtagtcctgactacttgggagactgaggtgggaggatcatctgaggctgggaggtcaaggctgcagtgagtcgtggttgyaccgctgtactccaatctgggtgccagagcaagactctgtctctaaaaaaaaatcaccaaaaaagaagacataacttactgccaaagtgagaaagacaatgggataaattcagattgagacctatggttcctagttcaggcaacacttgaagacagaaggggcctgtcataacatggagttgggagttggtttttttcctctggctaacctaagcattggcttagaggttatcagagtgggggaagacagagaatacttctctgaaagactccctttgttttcctcctacagagagg

SEQ ID NO: 564572 - DNA, 415 bp, Homo sapiens
tttaaaaaataattatccaggtgtggtggtgcacacctgtagtcctgactacttgggagactgaggtgggaggatcatctgaggctgggaggtcaaggctgcagtgagtcgtggttgcrccgctgtactccaatctgggtgccagagcaagactctgtctctaaaaaaaaatcaccaaaaaagaagacataacttactgccaaagtgagaaagacaatgggataaattcagattgagacctatggttcctagttcaggcaacacttgaagacagaaggggcctgtcataacatggagttgggagttggtttttttcctctggctaacctaagcattggcttagaggttatcagagtgggggaagacagagaatacttctctgaaagactccctttgttttcctcctacagagagg

SEQ ID NO: 564573 - DNA, 653 bp, Homo sapiens
gggtttcaccgtgttaaccagggtggtctcgatctcctgacctcgtgatccgcccgccttggcctcccaaagtgctgagattacaggcatgagccactgcgcccagctcctggttgtttttttactcttctcttgacatacttctcacacactgcaktctgttgcataaaaggaattacatggttttgaattacagataaagatggacattgtctatgtggtaaatacgtggtagtttctgggtgtctttttatatgcttcatatgaaaaatgatcgtacgtaaaactgtctctttcagaaggaacataatctggaccattcagatacaccgaaattcagctgttttctacatcatctgtgtgggtgtagctaaaatatgagcttttaagcttaaaaacaacttctgcatgttatttggaaatattttttactgaatttctcaaccaccccaaaacttaaagggcaaatttaaaatatgcatttaatgccttagtattttagagtatagccttcaacaaagtcctttgagcctcactgtaaaaaatattgactttttattataagtcttgtgtcccatgtccttgctaattcattatttctaatcgtccatctgttgattctttttaattttctgcttatacaattgtatcat

SEQ ID NO: 564574 - DNA, 616 bp, Homo sapiens
gttcttttttcttagtattgctttggctatgcagtctcttttttggttccatataaattttaggatttttttctagctctgtgaagaatgatgatgttattttgatgagaattgcattaaatctgtagattgctttgggcagtatggtcattttcacaatattaattctacccattcatgagcatgggttgtgtttccatttgtttgtgtcatctrtgatttttcaggagcgttttgtagttttccttgtagagatctttcacttccttggttaagtatattcctaagtattttattttctttttgcagctcttgtaaaagggattgggttgttcatttgattttcagcttggttgtcattggtgtgtagcagtgttactaatttgagtaccttgattttgtatcctgagactttcttgaatttgtttatcagatctaggagctttttggatgagtctttagggttttcagggtatacgatcatatcagcgacagtttgacttcctcttttccaattcaaatgccctttatttctttcatctgctctcgctagcacttccagtactatgttgaatagaagtggtgaaagtgggcatccttgtcttgttccagttct

SEQ ID NO: 564575 - DNA, 616 bp, Homo sapiens
gttcttttttcttagtattgctttggctatgcagtctcttttttggttccatataaattttaggatttttttctagctctgtgaagaatgatgatgttattttgatgagaattgcattaaatctgtagattgctttgggcagtatggtcattttcacaatattaattctacccattcatgagcatgggttgtgtttccatttgtttgtgtcatctgtgatttttcaggagcgttttgtagttttccttgtagagatctttcacttccttggttaagtatattcctaagtattttattttctttttgcagctcttgtaaaagggattgggttgttcatttgattttcagcttggttgtcattggtgtgtagcagtgttactaatttgagtaccttgattttgtatcctgagactttcttgaatttgtttatcagatctaggagctttttggatgagtctttagggttttcagggtatacgatcatatcagcgacagtttgacttcctcttttccaattcraatgccctttatttctttcatctgctctcgctagcacttccagtactatgttgaatagaagtggtgaaagtgggcatccttgtcttgttccagttct

SEQ ID NO: 564576 - DNA, 616 bp, Homo sapiens
gttcttttttcttagtattgctttggctatgcagtctcttttttggttccatataaattttaggatttttttctagctctgtgaagaatgatgatgttattttgatgagaattgcattaaatctgtagattgctttgggcagtatggtcattttcacaatattaattctacccattcatgagcatgggttgtgtttccatttgtttgtgtcatctgtgatttttcaggagcgttttgtagttttccttgtagagatctttcacttccttggttaagtatattcctaagtattttattttctttttgcagctcttgtaaaagggattgggttgttcatttgattttcagcttggttgtcattggtgtgtagcagtgttactaatttgagtaccttgattttgtatcctgagactttcttgaatttgtttatcagatctaggagctttttggatgagtctttagggttttcagggtatacgatcatatcagcgacagtttgacttcctcttttccaattcaaatgccctttatttctttcrtctgctctcgctagcacttccagtactatgttgaatagaagtggtgaaagtgggcatccttgtcttgttccagttct

SEQ ID NO: 564577 - DNA, 573 bp, Homo sapiens
ttttcgtctttaagaatcaataattgtaaattctacttttactctcttccatcttgctcctttaattcctaaaatttaaatataacaattgtctccagcaccttcatcaacctctgtggtagactctgtggacatgacttctctcccctcagcagattttttttttttttaattttactttaagttctgggatacatgtgcagaacatacaggtttgttacataggtatacatgtgctatggtgctttgctgcacctatcaacccatcatctaggttttaagccccacatgtattaggtatttgtcttaatgctctccctccccttgccccctacccctcaacaggccccagtgtgtgatgttcccctccctgtgtccctgtgttctcattgttcaamtcccacttatgagtgagaacatgcggtgtttggttttctgttctgtgttagtttgctgagaataatggcttccagcttcatccatgtccctgcaaaggacatgaactcattgttttttatggctgcatagtattccatggtgtatatgtgccacattttctttatccagtctatc

SEQ ID NO: 564578 - DNA, 525 bp, Homo sapiens
cttgtgaatttggttctgggtacccattggttattgatccacagcctcctagaaataatcattgttttccttgcctctgtcttttgtgtggtttctcrtaaggaggaaaataatagaataagattctccttctgtcttgttttatgtcttgaaaactagactttgtgagctgtgaaaatattctctctggtcttcaccataacaggggcacaagttctcaggcttgcatcaggcagctagctagctggccaggggtctgaaacacggagtgtctctttttgcgactctgccagcactcagaagaatttgtcttaattgtctcaacctttgttgccttgttaacattgagtgtctttgtttttttagcaaaaactttggatcttgaggcgaaccgcatcctttgtaccatctttgggataaaatgcatgcatccgtaattatgtcataaaaggattattgattttgaaccataaaaaggcttattggttttgaatcacaattaacataggtatacttttgaagatt

SEQ ID NO: 564579 - DNA, 525 bp, Homo sapiens
cttgtgaatttggttctgggtacccattggttattgatccacagcctcctagaaataatcattgttttccttgcctctgtcttttgtgtggtttctcataaggaggaaaataatagaataagattctccttctgtcttgttttatgtcttgaaaactagactttgtgasctgtgaaaatattctctctggtcttcaccataacaggggcacaagttctcaggcttgcatcaggcagctagctagctggccaggggtctgaaacacggagtgtctctttttgcgactctgccagcactcagaagaatttgtcttaattgtctcaacctttgttgccttgttaacattgagtgtctttgtttttttagcaaaaactttggatcttgaggcgaaccgcatcctttgtaccatctttgggataaaatgcatgcatccgtaattatgtcataaaaggattattgattttgaaccataaaaaggcttattggttttgaatcacaattaacataggtatacttttgaagatt

SEQ ID NO: 564580 - DNA, 604 bp, Homo sapiens
tagtcctgagaaggtaaattgattcaacaggggtattcagaatcaaaagtaatttaggatggaattgaagattagcgatatacagatacagaaaacatttggcaccagattcctttaagacatcttacagtggggctgtttatatatccgcaaatttcagaatggatgttttgctctcagtaacttggtaaatattctgaagagtaacctatgtttttctgtacttgttgtggatgactcaagactcaggtggatgactcaagactcagcttggtgggcagggtaaacccagcccctctgaggcaatgagagggagaaatgcccaatattatcttagagaaaagagaaatggcaggagccagccagagaaacaaaggagatccttttgttttactgtcaagttggctaccatgcagagatgtgacatcatkatggacaggactcagagatatgtaaggaagacatccacttcctcacctggggtagcatgaataatggctcccatagatatctggctcttaaccccttgaacctatgaatgttaccttacatggtaaaagagaatttgcagatgtgattttgagatgaggagattatactgcag

SEQ ID NO: 564581 - DNA, 531 bp, Homo sapiens
taggtaaaggaaaatacagtcaagggggttgttctctggctggcaggggtgggggtcacaaggtgctcagtgggggagcttttgagccaggctgagccaggagaaggaatttcacaaggtaatgtcatcagttaaggcagggaccagccattttcacttcttttgtggtggaatctcatcagtaaggcaggaacaggccatttaaatttcatttcttttgtgattcttcagttacttcaggccatctggatgtatacttgcaggtcacaggggatatgatggcttagcttgggctcagaggccggacactttcctttttagctcatgtatttaaacagcacctggcttcctactgtttctaaaacatatcaagcttgtcattgccttaaatcttcacactagctattgcttttcctgtcactcagctcttggcttaaatatctcttcttcgtagaaccctaactcagctttctaatcaacattagaaaawtagtcatgctctattacataacacacattctctggaaagca

SEQ ID NO: 564582 - DNA, 546 bp, Homo sapiens
ataaccactattctactctctccttctttgagatattttttttttagctcccacatatgaatgagaacatgttgtatttgtctttctgtgcctggctcatttcacttagcatacaaaaaatcctaaaaatagaattaccatatgatccagtaattccggatatatatccaaaggaaagaaaatcagtacatcaaagagagatttgcacttccatgtttattgcagcagtaktcacaatagccaaactattaaatcaacctaagtgcttatcaatagataagtgggtaaagaaagtatggtatattgatccatttttgacagggaggaaaattagttgcaaaatctgttgtggcaactcattcatctaatgactatatagatttctctgttttccttcctgtgccaattctggcccaagcctcttaaaacagcacagagttgattgaaatgggtatcctttttagctaaaggaagaccattctgtaataaagaattctgtaataaagaatggtcttcgttgaggactcagatgaaatagcaccatgt

SEQ ID NO: 564583 - DNA, 546 bp, Homo sapiens
ataaccactattctactctctccttctttgagatattttttttttagctcccacatatgaatgagaacatgttgtatttgtctttctgtgcctggctcatttcacttagcatacaaaaaatcctaaaaatagaattaccatatgatccagtaattccggatatatatccaaaggaaagaaaatcagtacatcaaagagagatttgcacttccatgtttattgcagcagtagtcacaatagccaaactattaaatcaacctaagtkcttatcaatagataagtgggtaaagaaagtatggtatattgatccatttttgacagggaggaaaattagttgcaaaatctgttgtggcaactcattcatctaatgactatatagatttctctgttttccttcctgtgccaattctggcccaagcctcttaaaacagcacagagttgattgaaatgggtatcctttttagctaaaggaagaccattctgtaataaagaattctgtaataaagaatggtcttcgttgaggactcagatgaaatagcaccatgt

SEQ ID NO: 564584 - DNA, 592 bp, Homo sapiens
tatctggttttacatttcttctttgttgttggtgcctaggaatttctcttattttcctttaagctcatctgtatatttcacttcattattttgattacatgtgatttactgtttacttatgtagcaagagatgtgcttttttactacartcaggttgtaagaactgtactgaaaaataataatagaatttgttattgaaccaattcctttatttacttttgaaatttgttgttgaaccaattcctttatttactttatttatcaatgtatatcttccttcccatccttgatttcctttattttacattgaccccatgtagagacaacctcataatttcagatcctgtcctacgtgaaatctatgtctatgtagagcctttcatttcttttcacccacgaaattagtctctagatgtgcctaggtacttactgtataattttttaccctataatttaaaactgtgtacataaaatacttatggggtgagaaggtataaatccttctagccgaaagaaatgtaattagtgtttcggcatatttgagtgtgtcgttgcaaaatactgttctctaggttagtggtgtggtttggta

SEQ ID NO: 564585 - DNA, 569 bp, Homo sapiens
catgcagcattcgcattccatagttaatgttgcaggcataaataatgttagaatgaggtagatagggattattgtctttcttctttgctacctttattctcctctggcagaccatctgtgactcagagaggcagaatttagtagtggagcaggtatgtcagctatttagttctcataaataatcaagcactaaaccttgaggccagagccactccctgcccttcaatcacagagaaacactgaatagaacaactcctttccagtacagtttgtgttttccatcaaatttgctacagttggaaatttcacttatataattattaaaagaggaagagagggtgcaactcagaaactgtgtaggytcttctgcaaataaccttgatgcagacacacaaaagacttatttatctagtggggaagcaatgaaggttattaattaaatatgctttatgtcaaaatttttgtagatgtattctttgctctgggtgaagaagggtcatttggttctcccttaactgttttagtagggtttcagtgttagggttttggagccagactggtttgaattc

SEQ ID NO: 564586 - DNA, 569 bp, Homo sapiens
catgcagcattcgcattccatagttaatgttgcaggcataaataatgttagaatgaggtagatagggattattgtctttcttctttgctacctttattctcctctggcagaccatctgtgactcagagaggcagaatttagtagtggagcaggtatgtcagctatttagttctcataaataatcaagcactaaaccttgaggccagagccactccctgcccttcaatcacagagaaacactgaatagaacaactcctttccagtacagtttgtgttttccatcaaatttgctacagttggaaatttcacttatataattattaaaagaggaagagagggtgcaactcagaaactgtgtaggctyttctgcaaataaccttgatgcagacacacaaaagacttatttatctagtggggaagcaatgaaggttattaattaaatatgctttatgtcaaaatttttgtagatgtattctttgctctgggtgaagaagggtcatttggttctcccttaactgttttagtagggtttcagtgttagggttttggagccagactggtttgaattc

SEQ ID NO: 564587 - DNA, 551 bp, Homo sapiens
agagaacctctaatgcatcccttcaagtccttcagtatcctgaactcagcagcccctgccttggyatttttctagcacaaggaaaaagaacactgggggagggaggatacgtatgggaggttttgtggcccaggcctgaaagtgatgcaagtcacttccactcatattctagaattgagccacaaggcacacacaactgcaagagaaattaggaaatgtgatgtcctttgacacagggacaaaggaagcttttactaccctaatcatgactttcaactaatagtggtcaggcacattataatttaatcatcttggataaaacataatgtaggtcacagaaatattaacctaattttctatctatactgattttgctgaggtaaaagaaaattctctttttataaatcagagactatttttaaaaatgtcagttagaatggtgatcattaaaaagtctggaaacaacagatgctggcgaggatgtggagaaataggaatgcttttacactattggtgggagtgtaaattagttcaaccattgtggaagacag

SEQ ID NO: 564588 - DNA, 551 bp, Homo sapiens
agagaacctctaatgcatcccttcaagtccttcagtatcctgaactcagcagcccctgccttggcatttttctagcacaaggaaaaagaacactgggggagggaggatacgtatgggaggttttgtggcccaggcctgaaagtgatgcaagtcacttccactcatattctagaattgagccacaaggcacacacaactgcaagagaaattaggaaatgtgatgtcctttgacacagggacaaaggaagcttttactaccctaatcatgactttcaactaatagtggtcaggcacattataatttaatcatcttggataaaacataatgtaggtcacagaaatattaacctaattttctatctatactgattttgctgaggtaaaagaaaattctctttttataaatcagagactatttttaaaaatgtcagttagaatggygatcattaaaaagtctggaaacaacagatgctggcgaggatgtggagaaataggaatgcttttacactattggtgggagtgtaaattagttcaaccattgtggaagacag

SEQ ID NO: 564589 - DNA, 617 bp, Homo sapiens
ttttgaactcatttgggtaaatgacaaagagtgcaatagctgaattgcatggtaagactgtgtttagttttctaagaaactgccacattgtcttccaaagtgaaaatatactgttttgcattcccatcagcagtgaatgagaatttctgttgctctacatctttgccagcgtttggtgctttctgtgttttgaattttgattattctaatggatgtgttttggtatctcattgttgtttaaatatgcatttccttgatggcatatgataagcgtctttccatatgcttacatgcaatttgcattgttttcagtaagatgtcacttcaggattttgcgccccccaccccccatacataattaggtttttcattttcttatttttgagttttacaaattatgtgtacattttgtaaaatagcctttattatatttattaaacaatagtccttaacattagaaaataatctgcaaattttttctaccagtttgtgacatctcctcattcttttggcattgtttttcacagaacaagaatttttcattataatcaagcctcattartcaattgtttctttcatgtatcataactttggtttttcatctgaaaagtgatatc

SEQ ID NO: 564590 - DNA, 441 bp, Homo sapiens
ttttttcgaacagttctacttatttcagtagttgataataagactcacacattaactgaaaaaaaggaacatggtgactctgtaatatatcagacatactaggttgtataagaaaatattatacaataacaaataataacagaattaaggtagttattaattttatatatatatcaaataattccttaggggtggcctaaaaatttctttcctatggacctataactaattatatcctctcagacatttctttggagatgattggattactgtgcctgtccttatacccatcatgttactcatatcaactttgttctttttaaaaactttactatggttcttatacttggattctatgtttgyaatccacacagacatactaaaattggagagcccatttcaattggaactgtttagttcattattcataggtgcattttt

SEQ ID NO: 564591 - DNA, 603 bp, Homo sapiens
tgaggttgggatagtctttcagtaaaacagaggcagcagagccaagcctctgtgtctcacatggaccagtcttctgggacaggctgcttttgggtgcctaccctgagggaggatgcctactgctggggagggcagcttctttctgccaaggccttcctgcagaggattccactgcgagccagcagcaggtagtgccaggcagctgcaggaggcacctgagaaggcatctgcatggctgaccacaacatccgctaggttatgacacctatggatggaagtgaaggtgcagagatgaacttgtctaagctcacagcattcatatggggcggaattgagatctcagcctaggtcaactccgaatcctatattcttttctcatggttcaaagccacacaattatatcagaaacatttgcataaaaattgaaacactagttccctatccctccatccttcacacacacacacacacacacacacacacacacacactctcacacacgccatgttaaagggaagctagawgggccaagactaaagttgcaggaataagggactaaagagattaaacgaagctatggcagcaatggtaggacaagcctag

SEQ ID NO: 564592 - DNA, 630 bp, Homo sapiens
gatataacacactgtttggacttctagctaaacgtgaaaaattgaacacgtgtgtttatttcctctcccttccaaatcttcactaaaatgaaaacaaagaatataagaaaggcataaactcataagaaccccaagaagaggaaaggagactgccgcatataaaagacatcaactatttctctaagacagaggcagatgggggagtggcaactggccgaggatgccaaggactaaggggctgcagaaagagggctgtcagagagtttgtagactcacccgcaacacccgaagtcactggaactagagggcagtcaggcccaggaatggatagaaaagccccagaagcagatcaggcttcacgtgctggagagaaggatgtaaggagtgggtcatggtgggattcgaggctgaggaagagggtgccagatgtttggttccggcagtgtagtggcccagataaccagcatgcatgcccatgacaaagacctagaaaggcgagcatcctttaaatgcaaaactgagctttaagccaattcacctgtgagccaggcacaaaggatctggagcaggaagcacttgaattgacactacagcsgctgcatgattttgccggcattgggaacccaagca

SEQ ID NO: 564593 - DNA, 505 bp, Homo sapiens
tttcagtaagttaaggtatttaccatttttgtaggaaaaaaatgccatcattgacatagagtatgttttttaatgtcactaaagttgagcttgactatgtgacttactttggcctatggaatgttggtaaatgagatataaagcagtattttgaaatattcatgtggcaaggaactttccctmctgtgcttctgcagtcatcaaaaagcagagactcctggaggggaactatctcaggcaaaccacagtaagaagcagtgccataccaatcagcctttatatttgtgagtggtaaatgttttatttgcagtattttgaagtgtttacatattaaaaaattaatgcaatgagaaacaagtgcatggtggctggaattcaggataaaaggggaaaataatttgaggataataatagtaaaattatgacaaagtgaacaatgttgaaggccattctgaatatatatgtgtgtgtgtgtgtgtgtgtgtgtgtgtgtgtgtgtgtgtgt

SEQ ID NO: 564594 - DNA, 505 bp, Homo sapiens
tttcagtaagttaaggtatttaccatttttgtaggaaaaaaatgccatcattgacatagagtatgttttttaatgtcactaaagttgagcttgactatgtgacttactttggcctatggaatgttggtaaatgagatataaagcagtattttgaaatattcatgtggcaaggaactttccctactgtgcttctgcagtcatcaaaaagcagagactcctggaggggaactatctcaggcraaccacagtaagaagcagtgccataccaatcagcctttatatttgtgagtggtaaatgttttatttgcagtattttgaagtgtttacatattaaaaaattaatgcaatgagaaacaagtgcatggtggctggaattcaggataaaaggggaaaataatttgaggataataatagtaaaattatgacaaagtgaacaatgttgaaggccattctgaatatatatgtgtgtgtgtgtgtgtgtgtgtgtgtgtgtgtgtgtgtgtgt

SEQ ID NO: 564595 - DNA, 593 bp, Homo sapiens
agtgcagagtggaagctggaggagaaatctccccgctggagggtgagcagagaaggcgtctttagagccctggtcacagaggctgcaggaccggctctcagcccagcacgcgtgggcrcttggggacccaaatcttctaaaaatgcttgagggcaggaacgatggctcctccttcattttcctctctgaatttgatgctatttctccaaatattacatgttccatttggtctaggtttctccatccttttaccccaatcctaacccccagaaaatagaggaggcttctaataggataagcgacttcttcaccaccctctgcccacggacttcaaggcagtccaagatccaaacccaaggcaatggaatgtggccattctcactgcatgtgtcatgtaacctttgtatgaaacacagctgtttcaagtgttatcatgtatctgtacaaattatacaagatgggtagctcgacaacatagatgaaagtgaaacaaatagacttcaagctcgctttaagctctttcggaaactctatgtggcaattatcataataacgcttagcatcttcaaagctacttcaaaacagtagcgaat

SEQ ID NO: 564596 - DNA, 593 bp, Homo sapiens
agtgcagagtggaagctggaggagaaatctccccgctggagggtgagcagagaaggcgtctttagagccctggtcacagaggctgcaggaccggctctcagcccagcacgcgtgggcacttggggacccaaatcttctaaaaatgcttgagggcaggaacgatggctcctccttcattttcctctctgaatttgatgctatttctccaaatattacatgttccatttggtctaggtttctccatccttttaccccaatcctaacccccagaaaatagaggaggcttctaataggatargcgacttcttcaccaccctctgcccacggacttcaaggcagtccaagatccaaacccaaggcaatggaatgtggccattctcactgcatgtgtcatgtaacctttgtatgaaacacagctgtttcaagtgttatcatgtatctgtacaaattatacaagatgggtagctcgacaacatagatgaaagtgaaacaaatagacttcaagctcgctttaagctctttcggaaactctatgtggcaattatcataataacgcttagcatcttcaaagctacttcaaaacagtagcgaat

SEQ ID NO: 564597 - DNA, 593 bp, Homo sapiens
agtgcagagtggaagctggaggagaaatctccccgctggagggtgagcagagaaggcgtctttagagccctggtcacagaggctgcaggaccggctctcagcccagcacgcgtgggcacttggggacccaaatcttctaaaaatgcttgagggcaggaacgatggctcctccttcattttcctctctgaatttgatgctatttctccaaatattacatgttccatttggtctaggtttctccatccttttaccccaatcctaacccccagaaaatagaggaggcttctaataggataagcgacttcttcaccaccctctgcccacggacttcaaggcagtccaagatccaaacccaaggcaatggaatgtggccattctcactgcatgtgtcatgtaacctttgtatgaracacagctgtttcaagtgttatcatgtatctgtacaaattatacaagatgggtagctcgacaacatagatgaaagtgaaacaaatagacttcaagctcgctttaagctctttcggaaactctatgtggcaattatcataataacgcttagcatcttcaaagctacttcaaaacagtagcgaat

SEQ ID NO: 564598 - DNA, 582 bp, Homo sapiens
agatttaatgactgccctgctgggttttgaacttgcatcaggcctctagcccctttcttttggaaagtttctcccttttggaatgaaaatgtttacccaatgcctacaccctcattgtatcttagaagtaaataacttgttttgattttatggcttcaaaggtggaagtaactcatctccagataaaaattaggactttggacttttgaattaatgctggaattagttaagactytgggaaactgttgggaaggaattattgtattttgcaatatgagaaggatatgaaatttgggggacaagaggggaccagacaagaggtatttagatcatggggatgtatgtcttcatgtatgtcttgggccccatggtgataagtgagctttcactcagttcacacaagatctgttggtttaaaagtatatgttacctccccctggccagccattctttctcccttgctcctgctttcaccatgtgaagtgctgcttccactttgtcttttgccatgatttcaaacttcatgaggcttccttagaaaccaagcagatgccagcaccatgcttcctgtatagcctgcaa

SEQ ID NO: 564599 - DNA, 582 bp, Homo sapiens
agatttaatgactgccctgctgggttttgaacttgcatcaggcctctagcccctttcttttggaaagtttctcccttttggaatgaaaatgtttacccaatgcctacaccctcattgtatcttagaagtaaataacttgttttgattttatggcttcaaaggtggaagtaactcatctccagataaaaattaggactttggacttttgaattaatgctggaattagttaagactctgggaaactgttgggaaggaattattgtattttgcaatatgagaaggatatgaaatttgggggacaagaggggaccagacaagaggtatttagatcatggggatgtatgtcttcatgtatgtcttgggccccatggtgataagtgagctttcactcagttcacacamgatctgttggtttaaaagtatatgttacctccccctggccagccattctttctcccttgctcctgctttcaccatgtgaagtgctgcttccactttgtcttttgccatgatttcaaacttcatgaggcttccttagaaaccaagcagatgccagcaccatgcttcctgtatagcctgcaa

SEQ ID NO: 564600 - DNA, 516 bp, Homo sapiens
gcatgcgccaccaccaggcccagctaagtttttgtatttttagtatagacagagttttaccatgttgcccaggctggtcttgaactcctggcctcaagtgatgcacccaccttgacttcccaaaatgctgagattacaggcatgaaccactgtgcccagccaagagttctcttttaagagttcctcaagccagagctaaatgtatttccttgactttctttctgttccacagtggtacttctagattttgaccatgttgagagccagctggagatcctggaggaaaaatattgtaaactaactgctwgtttggtgctacttgaaatttttctattcttccgcatctgcctatgactgcaggtagaggggcagtagcaccatcctctgaagaaaggaaccagccacttggtagcaggttgactttgtttcatccttcaaccctcacaggggcagtcattcatcctgactgctaaccttacttttgtaagctccaggaacacagatcactaagaattc

SEQ ID NO: 564601 - DNA, 594 bp, Homo sapiens
tttgtaccatatcaaattgtgattatagattactcagtagactttatttttaagaaatgaatcttcctatagaacttcatttatttattcattgattcattcaacaagtatttcctgggcgtctgttatktacactatgtctcttatataggggggttgaatacttattggatgaatgaattaataaatatcatgttgtttgttggtgctgagcatccagcaataactagcttactgatctcgtgggggttacaatttagtgggcaaagaagatagatattaaaaactatatatgtaatgtaattaatatttatattacctatttgattataactaattatttagttattactggaggagctaccaaggaaaagcatatggcgtgctgagaatgttggagaggaggccctaacctagtatagggagtgaggactggtacctgtgaggaagtgtcattttaagatgagacctgaagatgagtagacatcaaactgataaaatttcagtggggaggatttacagctcttcaaacattgtgaaatctttacatctcctgagttcaccacattgccttgcactacataggcactcaat

SEQ ID NO: 564602 - DNA, 628 bp, Homo sapiens
tgagtttgaatcccctaactcaggggaaattccccaggttgctatgtagatcagtggtccttctgagctctagccctgcagcatttaagagccaaaagcacatgtgtgcacagggagatgtttatagcatycaaactccaggctcctcacatccaaaatatcctaccgcaccaaagtaatttgggtcactttggtattttcaattttttattatgaaataacagtaccatgattatagatttttatagatattaataattacatcctttatagacattaataattatgtcctattatagacattaatgattatagacattaatgattttaccctaggagtaatttcctagaaacagaacaatgggggaaaagggcatttttttttttttgagacagtcttactctgtcacctgggctggggtgcagtggcgtgatctcagttcactgcaacctcctgggttcaagctattctcccacttaacctcccaacatagcaggcatgtaccaccacacctggctaatttttcttcttgtgttttctgttttactttttggtaattttttagtagaaatggggtttcgccatgtaggccaggctggtctcgaactcctagcctcaagcaatcca

SEQ ID NO: 564603 - DNA, 395 bp, Homo sapiens
ggaaaagggaaaatgggtcttgaaattgaggaaccacagttataactaccttaactaatttacaaaacactctccatgaaagaggatgtaaaaaaatgtaaacgtggtgtgcacaacayaaacggtttctttcatttgacaaaagatacctcttgttcctctctatagtcggcatgttttatctttagcatttacaaagcattggcattttcaagaatattattcagatcaccttgatgctttccctcctgggatcttccttcccaatcaatagaagtgccagcagcaggaagaatcaagaaatccttgttgagctgagaatgcctgttcagaacaaactgggaggatttcctgacttgtttatctttgggattttcagccggtgaccatgaatt

SEQ ID NO: 564604 - DNA, 395 bp, Homo sapiens
ggaaaagggaaaatgggtcttgaaattgaggaaccacagttataactaccttaactaatttacaaaacactctccatgaaagaggatgtaaaaaaatgtaaacgtggtgtgcacaacacaaacgrtttctttcatttgacaaaagatacctcttgttcctctctatagtcggcatgttttatctttagcatttacaaagcattggcattttcaagaatattattcagatcaccttgatgctttccctcctgggatcttccttcccaatcaatagaagtgccagcagcaggaagaatcaagaaatccttgttgagctgagaatgcctgttcagaacaaactgggaggatttcctgacttgtttatctttgggattttcagccggtgaccatgaatt

SEQ ID NO: 564605 - DNA, 395 bp, Homo sapiens
ggaaaagggaaaatgggtcttgaaattgaggaaccacagttataactaccttaactaatttacaaaacactctccatgaaagaggatgtaaaaaaatgtaaacgtggtgtgcacaacacaaacggtttctttcatttgacaaaagatacctcttgttcctctctatagtcggcatgttttatctttagcatttacaaagcattggcattttcaagaatattattcagatcaccttgatgctttccctcctgggatcttccttcccaatcaatagaagtgccagcagcagraagaatcaagaaatccttgttgagctgagaatgcctgttcagaacaaactgggaggatttcctgacttgtttatctttgggattttcagccggtgaccatgaatt

SEQ ID NO: 564606 - DNA, 573 bp, Homo sapiens
ggaacttaaaatatgctctgaatgagtttatctaaatattattcagtccaaaatatgaccagaaccaaaaatccactggataattaggcagtaaatgcacaactttttaaataatcacagttcaacagccctgagaaatagtgatggacaattctcccatattctggagtacatatattgaaggcccatagcggagaaaactgtaggttcttggagatcaaaggatcgcttatattcagaaaaaattaggatgtgtttggtgcacatccacgaaaattaggacgtgtttggtaccctgataaaggtatttctacagttcctagtgtcacacaatttgaaagaatataacgaatacaagtcattctctctgcttctttctccctcttagtcctaagtaacattacttgaaatgcagcaactgtctggactttttctcactttaaaaaaaatwatttttacaaccattcttattggtaggtccatattgtggtttacttttccatactaaagagaggatgtgtggttaaaaacccctgtgaagaagatggctaggttatagtaaggaaatcagaa

SEQ ID NO: 564607 - DNA, 514 bp, Homo sapiens
tgttttattctgacttcttttcaaacattagctctaattctctcagaatttctacaaactcaaggcaccatctccattttttctcttaaaaataattgcttttgctttttatctttttaattaatgtattttttactgttagagtacttgattttatttggtgtaagtttggttatttgactttttttgatacatgataattgtacgttatttggggctgcatgtgatatcttttgatayatgcatacaatgtgtaatgatcaaatcagggcaatgagcatatctagtgccttgaacatttgtcatttctttgtgttgggaacgtttcaaatcttctcttttagctattttaaaatatacaataaattattgttaaccaaagtcaccatactctgctatcaaacactagagcttattccttctatctaactacatgtttgtacccatgaaccaacctttctttctgttttttttttgtttgtttgttttttgttttcttttgagacggagtctc

SEQ ID NO: 564608 - DNA, 443 bp, Homo sapiens
catttttgagacaaagagacatgcatcccatccttattattgctgacaaaattgaagctgccatagaatcagaggcttagttaattaaattaaaaggcaatattaggtttattttctgccaaaataaaatacaaacaccaaccagatttatcattcataaccatttttaagaaatatsgaaaaaattgtgataagaaaacagttggctttctcaaagtaataattatattttttcctcccagaattatttaatcattatgaaagttatttttcttctctttcccttttttttcttttcctttttttttttttttgagacagagtttcactttgttgcacaggctggagtgcagtggcacggtctcagctcactgcaacctccgcctcccaggttcaagcaattctcatgcctcagcctcctgtataactgggattacaggcgc

SEQ ID NO: 564609 - DNA, 345 bp, Homo sapiens
aaccaactagaactgtctgttaaagagtatcagtgaaccagctttgaaatatatcatggcaaatatttaacagcaaataacactgattggtaaagaggaacagatattacttcagtaaaataataggaagcttcagaaagttggtgaagaattatccaatttgaaatttggccaaaaacagtgcctgacacacacccacaccctccttcagcaatatgtttgctgctattttaaatagccacraacagccatagtattagttttgtagctaagtgttcagcaaatggagtcggtgctctgaattctaattccaattccctatttagtttctttataacaatgcct

SEQ ID NO: 564610 - DNA, 559 bp, Homo sapiens
cccaggctggagtgcaatggcgcaatctcggctcactgcaagctccgtctcctggsttcacgccattctcctgcctcagcctcctgagtagctgggaccacaggcgcccaccaccacgcccagctaattttttgtatttttagtagaggcggggtttcattgtgttagccagggtggtctcgatctcctgacctcattgatccacctgcctcagcctcccaaagtgctgggattacaggtgtgagccacctcaccccgccagctcagttttttaaaatcactgaatgttgcctcacatggatatatcacaagacatctgttcacctataaaataatatcttggctgcttctagtttttgataattatcaataaaactgctaaaacattcatgtgcaggtttttgtgcagacataagttttcaattcatgtgggcaaatacctagaagtgtgagtgctgaattgcatgataagactatgtttgtttttgtaagaaactgccaaaatgtcttccaaagtagctgtaccattttgcattcccaccagcaataaatgagagtt

SEQ ID NO: 564611 - DNA, 559 bp, Homo sapiens
cccaggctggagtgcaatggcgcaatctcggctcactgcaagctccgtctcctggcttcacgccattctcctgcctcagcctcctgagtagctgggaccacaggcgcccaccaccacgcccagctaattttttgtatttttagtagaggcggggtttcattgtgttagccagggtggtctcratctcctgacctcattgatccacctgcctcagcctcccaaagtgctgggattacaggtgtgagccacctcaccccgccagctcagttttttaaaatcactgaatgttgcctcacatggatatatcacaagacatctgttcacctataaaataatatcttggctgcttctagtttttgataattatcaataaaactgctaaaacattcatgtgcaggtttttgtgcagacataagttttcaattcatgtgggcaaatacctagaagtgtgagtgctgaattgcatgataagactatgtttgtttttgtaagaaactgccaaaatgtcttccaaagtagctgtaccattttgcattcccaccagcaataaatgagagtt

SEQ ID NO: 564612 - DNA, 561 bp, Homo sapiens
cctgtgagacaggatagacactttaatacattctatgtccccgtgctcctcaactccttccacagactttttccctcagcaaattcttttttctcactagactttaaaaaatgcattgcagattaaaggcctagtatgaaaaaatgaactgttaaatgatagaatatatttatgatttcatatagggaaaaatatttctaaaccagattccctccaaaaagtgtgagtaatgctgaatgtttacatcgtactacataagcaatgaacctgcaccaattgactcttctgaaatttaaatgactaattccgaaaggatcaaattaagttttactgaaatcatattttggaagctttctaaaccattctggccatgaakattgggagactaataaacaaattccaaacttcatctgaagttaatttatactttgtggagctcagattcctggcttcagttacacctaagcagcgtgggcaaataagcttgatagttctgctgtttcaactttcttctctttctatttttgcaatatgaaacttgcagttgattacaaatgactg

SEQ ID NO: 564613 - DNA, 214 bp, Homo sapiens
ttgacaagttgacagaagtaggcttcagaaagtcagtaataacaaacttctccaagctaaaggaggatgtttcgaacccattgcaaggaagataaaaaccttgaaaaaagattagatgaatggctaactagaamaaacagtgtagagaagaccttaaatgacctgatggagctgaaaaccatggcacaagaatttgtgatccatgcacaagctt

SEQ ID NO: 564614 - DNA, 524 bp, Homo sapiens
gcaaatgggattcatccagggatgcaaggatggtccaatgtatgcaaatctatcaatgtgctacatcataacaactgtattagtttgttctcacactgctataaagaacaaacagagactgggtaacttagaaaaaaaagaggtttaataractcagttccacaggctgtacagaaagcatggctgagaggcctcaggaaacttacaatcatggcagaagggtgaagggagagcaagcatgtcttcacatgggggcaagagaaagagtgaagggggaagtggcacacattttaagcaaccacacctcctgagaactcattcactataatgagaacaggaagggggaagttaggccccataattcaatcacctcaaaccagaccactcctccaacatgtggggattacaattcaacatgagatttgtgtgggaaaaaaatccaaaccatatcactctgcccctggcccctctcaaatctcatgtccttctcacatatcaaaacacaataataccttaccaacagt

SEQ ID NO: 564615 - DNA, 472 bp, Homo sapiens
tgaataaaatacaatcccagaaaaatccaataaacatattcttaaattagaaaaataaaatttaaaaataatgtgtatatatatatgttaaaaatttttctactatgcatccagtagaatatcaatagcagtaaataatcaggctaatattaaatagctgttgctaaatgacaaattctgctgattaaaacgaaatgggtgacttgttaaacagaggtattagtcaaggttctctgcaaaatcagaacccagagagtacagacagatagatatggaggtaacaggagatttgttatggaattggctcctgcaattatggaagctgagaggtcccgtgacacgatgtctgtaagctggagaaccaggaaagcaactgatataatacagtcccagtccaaaggcctgagaacmaggggactaaaaagtataactaactcccagtctgtgggttggagttgggggtgctgatata

SEQ ID NO: 564616 - DNA, 589 bp, Homo sapiens
ccagtgtaatcaacctgacatgagatagctagctgatcaccttagagaatggtgccatattggaggcgctgatcaccttagagaatggtgccatattggaggcaccatgttggtatctgctgctggcagattgggcactctttggtggtggtagctaggttatttccttsgtgagtgaaagtccatgttgctgagcttatgtataacctccatgcctgccaccatttccactttgctcatgagcatattgggcattactcagtctactgattcaaagggtgatctcctctggaaatacccagaaatgatattttatcaactatctgggaatctcttagtccagtcaagatgacatacaaaattaatcatcacaatagattttttcaagtctcactatggatctattaagttataattaatgaaattaaatactcaagggtttacatgtttataacgctcccaagtgaagcatccagatttgcatatgacattggtatgttgatccattgagtgagtagtggaataatactgaggcagttaacagtaaacatcataataaagtcataaatttttttttgagacaaagtct

SEQ ID NO: 564617 - DNA, 538 bp, Homo sapiens
gttcattgctggctttttgtagattttctttatcaaattgaagactttcaccatcaactcctacttttcttggagttttttttttttaatatgagtgggtgttggatttttttgttggcagggggacgcggtttcactctgtctctcaggctgcagtgcagtgccctgcactgcagactccgcctcccgggttcaaacaattctcctgcctcagcctcccaagtaggctggcttacaggcgcccaccaccacacctggctaatttttgtatttttaatagatatgaggtttcaccatgttggccaggctggtctcaaactcctgacctcaggtgatctgcccacctcagcctcccaaattgctggtgttacgtgcctgagycatcgtgcctggctggtgttggattttttaatgttttcctctgttacttagcataatcagaatttgcttttttgactttttgatatggtgaattgcactgtttgatattcaaatattcaaccaggcctgaaaccctgaaataagtttcaactggtca

SEQ ID NO: 564618 - DNA, 488 bp, Homo sapiens
gagatcaaagtatttattttataagttgtcatggaaattttacatgtacagcattggcaaatgtatctccaaacaccccaacaaaatcatcatactaatccctgggaatatttccaagcacagtcttacgataacaattttaaaaactagaaaaagtgattctgtagtcacaatgagggcaagtgttgacaaagaggacttagcaagtgatatacaggtggctttaatataggcaaccatgtgcttgcctctgggaagtattctaaaggacaggtcctgaagaaacacgtagcatcagcagtggastgggtgaataatcaagtaagctctgtgactctataccactcacaatttagagcagctaaagggagaaaactccaacaagaaaaccactgtaataattgagccataattattagcattttagagagaacattaaaattaagctcaatgtaccgtgtctgtccttttaaaaaatgggacaaagg

SEQ ID NO: 564619 - DNA, 700 bp, Homo sapiens
cattctggtggttatgaattccctcaggttttgcttgtcttagaaagactttatttctccttcatttctgaaggttggctttggtaggtatggtattcttggctggcagcttttattctttcagcactttgaatatatcctgtgctctcctggcctataaagttctgctgagaaattcactgttagtatgctgggaactaccttatatgtaacttgaccctattactatttttagaattctgtctttgatttttgacggtgtgccttgtaraaaacctttttgagttgaatctatttgggctttccttgagcttcccatatctgaatgtttctgtctctagcaagacttggaggctatcagctattatttcattaaataagttttctatgcttttgcctatctcttcttctggaactccccaaaatagagtatttgggtgctttataatgtcccacatgtcatgtaggctttcttcatttttttttatttttgtctgactgggttattttaaaagacgtgtcttcacatttagaattgttttcttcttgatatagatgattgtggaagctttcaactgtatttttttattttatcttttgaattcttcacttttcaaatttctgttttgttcatttttatgatatctgtctttgttgaatttcttattgaaataataaaattgtttctgatttatttgta

SEQ ID NO: 564620 - DNA, 358 bp, Homo sapiens
gaattctgtctttgatttttgacggtgtgccttgtaaaaaacctttttgagttgaatctatttgggctttccttgagcttcccatatctgaatgtttctgtctctagcaagacttggaggctatcagctattatttcattaaataagttttctatgcttttgcctatctcttcttctggaactccccaaaatagagtatttgggtgctttataatgtcccacatgtcatgtaggctttcttcatttttttttatttttgtctgactgggttattttaaaagacgtgtcttcacatttagaattgttttcttcttgatwtagatgattgtggaagctttcaactgtatttttttatttt

SEQ ID NO: 564621 - DNA, 560 bp, Homo sapiens
gagtaggcttggttctccttaaatcggtagttgaaattagctatacaaaaatcacatgaactgagtgaagagaaagaaggcattccgcattagaaaactgaggtgcaggccaggcacggtggcttacacctgtaatcccagcactttgggaggccgaggcgggtggatcacctgaggtcaggagttcaagaccatcctgaccaacatggtgaaacaccgtstctactaaaaatacaaaaattagcaaggtatggtggtgcaggcctataatcccagtgacttgggaggctgaggcatgagaattgcttgaacccaggaggcggagttgcagtgagtcaaaatcgcgccattgcattccagcctgggcaacgagagcaaaactcggtctcaaaaaaaaaaaaaaaaaaaaagaaagaaaaagaaaactgaggtgcacataacaaaagaaatggtaatggacaacaggcaactatgttcaccagtgttgatcaaactcctattttagtatcttcaccttttctttaccaatcaataaattgtattgtttacagatgaggagg

SEQ ID NO: 564622 - DNA, 560 bp, Homo sapiens
gagtaggcttggttctccttaaatcggtagttgaaattagctatacaaaaatcacatgaactgagtgaagagaaagaaggcattccgcattagaaaactgaggtgcaggccaggcacggtggcttacacctgtaatcccagcactttgggaggccgaggcgggtggatcacctgaggtcaggagttcaagaccatcctgaccaacatggtgaaacaccgtgtctactaaaaatacaaaaattagcaaggtatggtggtgcaggcctataatcccagtgacttgggaggctgaggcatgagaattgcttgaacccaggaggcggagttgcagtgagtcaaratcgcgccattgcattccagcctgggcaacgagagcaaaactcggtctcaaaaaaaaaaaaaaaaaaaaagaaagaaaaagaaaactgaggtgcacataacaaaagaaatggtaatggacaacaggcaactatgttcaccagtgttgatcaaactcctattttagtatcttcaccttttctttaccaatcaataaattgtattgtttacagatgaggagg

SEQ ID NO: 564623 - DNA, 577 bp, Homo sapiens
caggtaatgtgattcttccagttttgttctttttgtgcaggatgccttcrgcatttctgggtcttttgtggcttcatataaattttaagttttttttttttatatttccatgaagaatgtcattggtattttgatagagattgcattgaatctgtagattgctttgggcttatggatattttaacaatttgattcttccaatccataaaaagggactatctccccattttttgtgtgtccccttctatttgtttttcagtattttatagttttcactgtagagatctttcacttctttggttaatttctaggtattttattttatttgtagctattgtaaatgaaattactttcttgatttcttttcagattattggctgttggcatatagaaatgttatggaattttatatgttgatttttttatcatgcaactttactgaatttgtttatgagctctcacagtttttggtggagtctttaggtttttccaaatacaaatatcatctgcaaacaaggataatttgatttctgcattgttaatttggatgccctttatttctttctcttgtctgatt

SEQ ID NO: 564624 - DNA, 492 bp, Homo sapiens
cacccggtatcttcatttaaggaccctaaacccttatgttcacaagttccaggtatttctgggactaagaactacaccagaacatcaagacattataaaatttaattccctatgaaatgaaacaataggaaaaataacatcttttctatggttaattccgtttgttaataaaaaattgttttttgttgatattttttacatggagcattcaatctctacagccaaatattgttactgttgagttatgtcaaatcggtgcytgatgttgcatccctaaatgcttttggagaacattatggtgaagttgatcattagagcttaaggatcatcattcattttaaaccaaagctataaaaagcatgaaatgtccacagtgatgatcagctccttgaaaagatgtgaggatactggtgcatatttctttaaattactcagtcaattttaaaagagaaatattgttgctattttcatcacttttcttcataagggatg

SEQ ID NO: 564625 - DNA, 492 bp, Homo sapiens
cacccggtatcttcatttaaggaccctaaacccttatgttcacaagttccaggtatttctgggactaagaactacaccagaacatcaagacattataaaatttaattccctatgaaatgaaacaataggaaaaataacatcttttctatggttaattccgtttgttaataaaaaattgttttttgttgatattttttacatggagcattcaatctctacagccaaatattgttactgttgagttatgtcaaatcggtgcctgatgttgcatccctaaatgcttttggagaacattatggtgaagttgatcattagagcttaaggatcatcattcattttaaaccaaagctataaaaagcatgaaatgtccacagtgatgatcagctccttgaaaagatgtgaggatactggtgcayatttctttaaattactcagtcaattttaaaagagaaatattgttgctattttcatcacttttcttcataagggatg

SEQ ID NO: 564626 - DNA, 544 bp, Homo sapiens
agaaaccttataaaccaagagagattgggggcctgtgttcagtagtctgaaagaaaagaaattccaaccaagaatttcatatctcatcaaactaagcttcataagaaaagggaaatataatcttttccagacaagcaagtgctaagggaattttttttcccactagaacagcttacaagaaatccttaagggacttctaaacatggaaacaaaagagcaatacctgctaccacaaaaacagagttaagtacgtaaccaacagactcgataaagcaattgcacaatagaagctacaaagcaaccaggtatcaacttcacagtagggtcaaaacctcacatatcaatattaaccttgaatgtaaatggcctaaacaccccacttaaaaggcacagagcggcaaattggatacaaaaaaaaaaaaaccctatctgtctgctgtcttcaagggacccatttcacacatcgtgacacccctatgggtgcaaagtaaagggttggagaaagatctwcacaaatggaaaactataaaaagcagcaatcact

SEQ ID NO: 564627 - DNA, 645 bp, Homo sapiens
atgtatataattgtggggtatatgagacgttttgacacaagcacgcaacgcataataatgtcatgaagaatgaggcagaataacatagattaaatggaaatttaaaataattccaccctatcaaccttttwttccacgtcagtctcctgtcattgttcctaggagaaacagcaaaattcctaacatagcctagaaggtgaagcatatgtaatgacccctacgcacttcctccagcttattttgtactatgttcttcctcctaatgatagctggtcttctttcatttcctcaatgtacaaccctatacccagaatattcttttttgatcccttcctcacagatttaactctccttattgttatgggaagtcagggaccccaaacggagggaccggccggaactgtgtcagaggaccataaattgtgaagatttcatcttaatatggacatttatcagttcccaaataatacttttataattttttatgcctgtctttactttaatctcttaatcctattatcttcgtaagctgaagatgtatgtcacctcaggaccactgtcatgattgtgttaactgtacacattgattgtaaaacatgtgtttgaacaatgtgaaatcagtgcaccttgaaaaagaacagaata

SEQ ID NO: 564628 - DNA, 645 bp, Homo sapiens
atgtatataattgtggggtatatgagacgttttgacacaagcacgcaacgcataataatgtcatgaagaatgaggcagaataacatagattaaatggaaatttaaaataattccaccctatcaaccttttattccacgtcagtctcctgtcattgttcctaggagaaacagcaaaattcctaacatagcctagraggtgaagcatatgtaatgacccctacgcacttcctccagcttattttgtactatgttcttcctcctaatgatagctggtcttctttcatttcctcaatgtacaaccctatacccagaatattcttttttgatcccttcctcacagatttaactctccttattgttatgggaagtcagggaccccaaacggagggaccggccggaactgtgtcagaggaccataaattgtgaagatttcatcttaatatggacatttatcagttcccaaataatacttttataattttttatgcctgtctttactttaatctcttaatcctattatcttcgtaagctgaagatgtatgtcacctcaggaccactgtcatgattgtgttaactgtacacattgattgtaaaacatgtgtttgaacaatgtgaaatcagtgcaccttgaaaaagaacagaata

SEQ ID NO: 564629 - DNA, 645 bp, Homo sapiens
atgtatataattgtggggtatatgagacgttttgacacaagcacgcaacgcataataatgtcatgaagaatgaggcagaataacatagattaaatggaaatttaaaataattccaccctatcaaccttttattccacgtcagtctcctgtcattgttcctaggagaaacagcaaaattcctaacatagcctagaaggtgaagcatatgtaatgacccctacgcacttcctccagcttatyttgtactatgttcttcctcctaatgatagctggtcttctttcatttcctcaatgtacaaccctatacccagaatattcttttttgatcccttcctcacagatttaactctccttattgttatgggaagtcagggaccccaaacggagggaccggccggaactgtgtcagaggaccataaattgtgaagatttcatcttaatatggacatttatcagttcccaaataatacttttataattttttatgcctgtctttactttaatctcttaatcctattatcttcgtaagctgaagatgtatgtcacctcaggaccactgtcatgattgtgttaactgtacacattgattgtaaaacatgtgtttgaacaatgtgaaatcagtgcaccttgaaaaagaacagaata

SEQ ID NO: 564630 - DNA, 367 bp, Homo sapiens
tccattcttttttatgggcatgttttctcattttgtgtttctgagcatatttcaaagcttcatcgcttttctttttttctgtttgttcagtgcattgttagagtctttcctcaaacatttgatgatttgtggatacctgattggaaattaagtagctctgtgtgggacttactaactgataggcttcactgcaagatgggcaggtatggacacagttgtctttttgagggaccataaaagtagtctccatagcacttcctccttgtgcaagttatgcttcccaaatgaaaatcttccaggttcattgcttaggataaaggaaatggttttacaagtttcaytgttagtgttcaggaagctgagtggg

SEQ ID NO: 564631 - DNA, 648 bp, Homo sapiens
atagactgttatgaatacatttacgtctcacccccaactatgtttttaatcaactagaacttagttctagattagtataaatatacattctttggtccattcttttgaaataatattgaactttactaagttacttaccgttttatctcacatattttatcattttcttctgtatttatttctccttgaatcagagaacttcccacaagcatgttttcaaagaggatcttcatgtagtaagcctgaggtcatgtatacctgagaatatctttattacatcctaatacttataatagtttacatgaatatatcagaaatataattttttttagctggacaactccattatcttgcatccagtgttgtcattgagaagtctaatgtcagcatgattcttattctttttttattattatactttaagttctagggtacatgtgcacaacatttgtttgttacatatgtatgcmtgtgccatgttggtgtgctacacccattaacttgtcatttacattaggtatatctcctaatgctatccaccatggaatactatgcagccttaaaaaaggatgagttcatgtcctttgtagggacatggatgaagctggaaaccatcattctgattcttattcttttttaagtgatatg

SEQ ID NO: 564632 - DNA, 658 bp, Homo sapiens
tgaattctttcctgggcaaagccaagagcccttgtgggttaagctccagtttagttgtgtaattactttaaattttttaagataccaatattatatgacttccgatctttttaaaattttcttcaaaccgaatcttgctctgtcatgtagtctggagtgcagtgatgtgatttcgactcactgcaacctcygtctcccaggttcaagcaattctcatgtttcagcctcccgagtagctggggttacaggcatgtgccaccatgcccagctaatttttgtctttttagtagagacgggatttcaccatgttggccaggctggtctcaaactcctgacattaggtgatcacccaccttgaccccccaaagtactgggattacagggcgtaagccaccacgcctcgcttgatcttttgttggaaatgaatagtgtataaattatctcagggaaatttaaataataagcatacattctaatgcagtcctcagtgtagctttgtgcccactgtctgttttctagagccctcttcaatacagtgtaacctactcaacaatgtgttaataacatctactaaaaacacactggattcctgggatgtcttaaccatctaatatctactgttgaaaattgtaagtcttccttttggttctgttagtgc

SEQ ID NO: 564633 - DNA, 309 bp, Homo sapiens
tctccctgactcatcccaacccttttcattacacacagccaaattgcagggctgtgcagtcrgaattcttacacaaggaccaggatcgtgtcctgtagcctttttgtccaaacaacttgaccttactgttttagactggccatcatgtctccgtgcagtggctgctgccaccctaaaacttttagaggccctcaaaatcacaaactatgctcaactcactctctacagctctcataatttccaaaatctattttcttcctcacacctgacgcatatactgtctgctccccggctccttcagctgtactc

SEQ ID NO: 564634 - DNA, 309 bp, Homo sapiens
tctccctgactcatcccaacccttttcattacacacagccaaattgcagggctgtgcagtcagaattcttacacaaggaccaggatcgtgtcctgtagcctttttgtccaaacaacttgaccttactgttttagactggccatcatgtctccgtgcagtggctgctgccaccctaamacttttagaggccctcaaaatcacaaactatgctcaactcactctctacagctctcataatttccaaaatctattttcttcctcacacctgacgcatatactgtctgctccccggctccttcagctgtactc

SEQ ID NO: 564635 - DNA, 309 bp, Homo sapiens
tctccctgactcatcccaacccttttcattacacacagccaaattgcagggctgtgcagtcagaattcttacacaaggaccaggatcgtgtcctgtagcctttttgtccaaacaacttgaccttactgttttagactggccatcatgtctccgtgcagtggctgctgccaccctaaaacttttagaggccctcaaaatcacaaactatgctcaactcactctctayagctctcataatttccaaaatctattttcttcctcacacctgacgcatatactgtctgctccccggctccttcagctgtactc

SEQ ID NO: 564636 - DNA, 602 bp, Homo sapiens
ggctcactcattgtggaacatactaataaagactctttttgtctcaaatgagagaaatacagcttaaactagtttgaacaagattgaggctattgtctcatagaatccaggaaagagtgggataaaggaaggactctctaaagtcagatatagctgctttagggactattggaaccagcaacccaaatagtatagaactcatcccttttctctgctccttacctgtttcttttagattaaaaaaaaaaaagttaaggtttattctcaatcactaaagacagctttatttcccatcatgrgaaacatgggtaccaaaatctccaaagtaatatttctaataacttataacacagaataaggagtcatattctcagttctagtcaaaacctgggaaaatggtgctgactcagtttgggtaagatgttcacccacagagataaggttgtccaaaaccaaggcagctcttacaacagccacagagatgagagacatgctaaagaaaggggtgctgagcagaaactatcatggtcattcacagagcactagtagtaaatgtattggaataaaattaagttaatctggccttctatgaaccttattgt

SEQ ID NO: 564637 - DNA, 663 bp, Homo sapiens
atggaatctatcatccccttaccgtatatcaaattctttaggcacatggcataagagggcatttaaacagatgccaggacaaagcatagatgggttagtcagagaccactcattctttgaaggatatttctacctttaccatcagagggcagaaacttaaacccaaatataccagctattctgttttaagcctaaaaagaatatatattcgagaaatggatctcctcatatccccaggcttttttatccttattactttttaaattaaaagaatttcattttggctttctttattactccttcacgaatccattccattaacacttgttaagaacattccatgttccaattgctagtgaagggctaaggaaaaaaaaaaaatccatgagccattggtcctgccctgcagaagctctgttcatttgcaaactcctgggygagcccaggcagaaaggcatgtctgttcaccgtgtattttgtaagagtcccaccagtctaagcagacttgtttatttaactgtcttatatagctgcatattctaggtctctagttctgtctgggcttaggtttccataattcacatgaattttcagtttcacatttctgtaattccttgtatcaaatgaaaacatagaagcactcagaaaaataatagctcacat

SEQ ID NO: 564638 - DNA, 663 bp, Homo sapiens
atggaatctatcatccccttaccgtatatcaaattctttaggcacatggcataagagggcatttaaacagatgccaggacaaagcatagatgggttagtcagagaccactcattctttgaaggatatttctacctttaccatcagagggcagaaacttaaacccaaatataccagctattctgttttaagcctaaaaagaatatatattcgagaaatggatctcctcatatccccaggcttttttatccttattactttttaaattaaaagaatttcattttggctttctttattactccttcacgaatccattccattaacacttgttaagaacattccatgttccaattgctagtgaagggctaaggaaaaaaaaaaaatccatgagccattggtcctgccctgcagaagctctgttcatttgcaaactcctgggcgagcccaggcagaaaggcatgtctgttcaccgtgtattttgtaagagtcccaccagtctaagcagacttgtttatttaactktcttatatagctgcatattctaggtctctagttctgtctgggcttaggtttccataattcacatgaattttcagtttcacatttctgtaattccttgtatcaaatgaaaacatagaagcactcagaaaaataatagctcacat

SEQ ID NO: 564639 - DNA, 582 bp, Homo sapiens
attcctgcctctcgttggctgctgtgccagattacttggtgctggcttatggtgtagatagaacactccgaaagtcacctgtagtatgtcatggccagcagagcactggcaacctgaggccacactgtgacagccactggggccatatggcttgctgatggccatgaagcttcatctttgatggaggtcatccctgagaccaagctaccagaatgctgagcctggaagcaaatagaaaactgaataggtcctagtctttgtgcttaaaatacacttgcaagaaaaagaactgagggaagaaatccctaaatgtccaaaacagtataaggtgatagctcatgccataagatcactgactagaagatggatcaggagccatccaatttcacacgactggggccagaatcagctttttttttttttttttttttttgtgagacagagtctcactctgtctcccaggctggagtgcagtggcaaaatctcagctcactgcaagctccacctccggggttcacgccattctcctgcctcagcctccttagtagctgggactacaggcrcctgccaccatgcccagct

SEQ ID NO: 564640 - DNA, 599 bp, Homo sapiens
tggctatgtgggctttttatttgttccatatgaatttaaggattgtttttctagttctttaaagaataatgatggtattttgatgggaattgtattgaatttatagattgctcttggcagtatggtcattttcacaatattattctacccatccataagcatgggatgggatgtgtttccatttgtttgtattatttatgacttstttcagctgcgttttgtagttttccttgtagaggtcttttacctctttgcttatgtatagtcctaagaattttatttttatttgtattttcattttgcaccttttgtaaaaggggttgagttcttaatttgattctcagcttggtcactgttggtgtgtagcagcgatactgatttgtgtacattgattttgtatcccaaaattttactgaattcatttatcaaatctaggagctttttggatgagtcttttgggttttctaggtatataatcatatcatcagtgaacagcaacagttagacttcctctttaccacttttgatgcattttttttccttgtctgattgctctggttaggacttccagtactacgtgaaatagaagcagtgaaagt

SEQ ID NO: 564641 - DNA, 634 bp, Homo sapiens
gacgtttcaattctcagcttaaacagcaattcctcagaaatgtttccctggactatcctagcctaagatagcaacacgttgtattctcctttagcatattttatgtaacactcatcagactgaaaactatctgttggatgctgttttcttcactaggctggggtgcagcctggttctaacaacaggagaatattttcagggagaggataagccrggtaatgaggtcaaccctgttggcttgtgaggaagcaaaacataaagaaggcaacacaacactttcttacctgtctcgtcatgtgagcactgatgcttccattgtgtattaaacagtctaactcttggtttcatttgtttcttttgacagatttttatcatagcccccacaagcatgtcaatatattgccttaaaattattggaaaggagctacattgagagaatgtgccaagaaaagcgaaatatgaggtgttaaaaaacctctccctctatctgagcagtcaaagcttcatctgccttattgaccactctttgcaacagagctaggcacaaagtactctttggagaaataatatttatggattaaaggcaccaagcttaacactggagctgtacaagacagggactttgcccacaggg

SEQ ID NO: 564642 - DNA, 439 bp, Homo sapiens
cttgatttgattctccgcttggtcactgttggtgtatagaagagctactgatttgtgtacattaatcttgtatccggaaactttgctgaattcttttatcagttctaggaactttctggagaagtcctttgggttttcaaggtaaacagtcatatcatcagcaaacagcgacacttcgacttcctctttactgatttggatgccctttatttctttcttttgtctgattgctctggctatgacttccagtactgtgttgaagaggagtggtgagattgggcatccttatcttgttctagttctcagagggaatgctttcaacttttccccattcagtattatgttggctgtgggtttgtcatagatgtcttttattacgttaacgtatgccycttgtatgccaattttgctgagagttttaatcacaaagcgatgctgg

SEQ ID NO: 564643 - DNA, 560 bp, Homo sapiens
ttggtgcacccatcacctgagcagtacacagtgtacccaatttgtagtcttatgtatttatttttagtttttgtcaaatttgtgaagttttcagacattatttctgtaagcactctttcagccctttcactttctcctctccctctgagattcttatgattatatatacagagagagagagatgagatttttaaagaattggctaatatcgttgtggaggttgggcaagtccaaaatcagcagggtaggttggtaggctggagatccggagaagagttgcagttccagttgaaaggtggtccactggaagaattccctcttttcttyagggagctcagttgtctgctattaaagctttcaactgattggatgaggcccacctgcattatgaaggataagctgttttacttagtctactgatttgaatgttaatcttatctttaagaaatgcatgtaaaataatttttgaccaaatatctgaataccatggtctagccaatttggctcataaaactgaccatcacagttccacaggaccctgaggaacagggacctttatt

SEQ ID NO: 564644 - DNA, 529 bp, Homo sapiens
tatgtttgcaaacttcaacattcctctcaataattaatagaataagtggggaaatcagtgagcatatatatgacttttacttaacctagttgwcagtgataaaacaaaaaaagaatatccattattttaatgtacacagaaagcattcacaaaattagaccatattcagaatcataaaacaaatttcatcaaatttaaaaggattgtaatcatactaagtatgttttctgtccattattaaattaaattagaaatcaataacaagtggataactagacaatgttaaaatatttgaaaattgaaacatacaagtttgaataacccatgaattaaagaagcagtagaacagttgattagaaaatatttcaaactgaaggaaaatgaaaacataacatcaatatttgtaaggtgtagctaatgtaatgctttgagggaagtatacagacagtccagacttacagtggtccaacttatgacttttcatctttgcaatggtgtgaaaacaatacacattcagtagaaactatac

SEQ ID NO: 564645 - DNA, 529 bp, Homo sapiens
tatgtttgcaaacttcaacattcctctcaataattaatagaataagtggggaaatcagtgagcatatatatgacttttacttaacctagttgtcagtgataaaacaaaaaaagaatatccattattttaatgtacacagaaagcattcacaaaattagaccatattcagaatcataaaacaaatttcatcaaatttaaaaggattgtartcatactaagtatgttttctgtccattattaaattaaattagaaatcaataacaagtggataactagacaatgttaaaatatttgaaaattgaaacatacaagtttgaataacccatgaattaaagaagcagtagaacagttgattagaaaatatttcaaactgaaggaaaatgaaaacataacatcaatatttgtaaggtgtagctaatgtaatgctttgagggaagtatacagacagtccagacttacagtggtccaacttatgacttttcatctttgcaatggtgtgaaaacaatacacattcagtagaaactatac

SEQ ID NO: 564646 - DNA, 529 bp, Homo sapiens
tatgtttgcaaacttcaacattcctctcaataattaatagaataagtggggaaatcagtgagcatatatatgacttttacttaacctagttgtcagtgataaaacaaaaaaagaatatccattattttaatgtacacagaaagcattcacaaaattagaccatattcagaatcataaaacaaatttcatcaaatttaaaaggattgtaatcatactaagtatgttttctgtccattattaaattaaattagaaatcaataacaagtggataactagacaatgttaaaatatttgaaaattgaaacatacaastttgaataacccatgaattaaagaagcagtagaacagttgattagaaaatatttcaaactgaaggaaaatgaaaacataacatcaatatttgtaaggtgtagctaatgtaatgctttgagggaagtatacagacagtccagacttacagtggtccaacttatgacttttcatctttgcaatggtgtgaaaacaatacacattcagtagaaactatac

SEQ ID NO: 564647 - DNA, 529 bp, Homo sapiens
tatgtttgcaaacttcaacattcctctcaataattaatagaataagtggggaaatcagtgagcatatatatgacttttacttaacctagttgtcagtgataaaacaaaaaaagaatatccattattttaatgtacacagaaagcattcacaaaattagaccatattcagaatcataaaacaaatttcatcaaatttaaaaggattgtaatcatactaagtatgttttctgtccattattaaattaaattagaaatcaataacaagtggataactagacaatgttaaaatatttgaaaattgaaacatacaagtttgaataacccatgaattaaagaagcagtakaacagttgattagaaaatatttcaaactgaaggaaaatgaaaacataacatcaatatttgtaaggtgtagctaatgtaatgctttgagggaagtatacagacagtccagacttacagtggtccaacttatgacttttcatctttgcaatggtgtgaaaacaatacacattcagtagaaactatac

SEQ ID NO: 564648 - DNA, 586 bp, Homo sapiens
tctctgttttctcttcttataaggccattctaaatccaggattttatctcaagttgcttaactacttacrtatacaaagaccctatttccaaatatggtcgcattctgaggttctgggcgggcataattttgagagaattgctcacccaaaacagcacctgacatgaataagaggttcaataaatgatgactggatgtaactgaatgagccacatctgtgccaccgatgaagaatcagggcaattaattctgtcaattcaccacagccccaaactcttccctctgccctctgcactcaagagctgcctggttatcagaccctcacaccaggtgaacctcaccaggaaagattttgtcccagcagtcagttgtttaagtacttaatgtggttaatatccattccacacaacgaggacatttaaattttctgggacgctcaactgtatggcagctaatggaagatgtttgcttatgtttaacggaaagataagtaaaaatgtaatcattggcatcaagatcctagcttgtttattctcgtctggttaagttcccttcacggctcatgaataaagcacttaggcagcac

SEQ ID NO: 564649 - DNA, 586 bp, Homo sapiens
tctctgttttctcttcttataaggccattctaaatccaggattttatctcaagttgcttaactacttacatatacaaagaccctatttccaaatatggtcgcattctgaggttctgggcgggcataattttgagagaattgctcacccaaaacagcacctgacatgaataagaggttcaataaatgatgactggatgtaactgaatgagccacatctgtgccaccgatgaagaatcagggcaattaatwctgtcaattcaccacagccccaaactcttccctctgccctctgcactcaagagctgcctggttatcagaccctcacaccaggtgaacctcaccaggaaagattttgtcccagcagtcagttgtttaagtacttaatgtggttaatatccattccacacaacgaggacatttaaattttctgggacgctcaactgtatggcagctaatggaagatgtttgcttatgtttaacggaaagataagtaaaaatgtaatcattggcatcaagatcctagcttgtttattctcgtctggttaagttcccttcacggctcatgaataaagcacttaggcagcac

SEQ ID NO: 564650 - DNA, 576 bp, Homo sapiens
tattttttgaaggactgaaatctaaaattgtatatattatgtaatcaaatacactagttttttctttcatgtttcttttcttctgatattttagatcatataattttattcttcattttgttaatgtgttgtatcrtgtttacagatttgtgtatgttgaaccatcccagcatcccagggataaatcatatttgatcacagtgaacaattcttttaatgtgctgttgaattcagtttcctagaattttgttgaggatttttgcatctatgttcctcagggatgtcggcctgtaagtttattttcttgtagcgtccttgtctggctttgatatcagggtaatgctggacttgtaaaatgagtttggaagggttcctttctcttcaattttttgggaacagttagagaaggattggccctaattcttctttaaatgtttggtagactccaccattgatgctataaggtcctgtgcttttgtttgctaggggaattttttcttcctgattcgatctgtcttcttgttattggtctgttcacatatttttttctttatgactcagtcttggtaggtagtg

SEQ ID NO: 564651 - DNA, 576 bp, Homo sapiens
tattttttgaaggactgaaatctaaaattgtatatattatgtaatcaaatacactagttttttctttcatgtttcttttcttctgatattttagatcatataattttattcttcattttgttaatgtgttgtatcatgtttacagatttgtgtatgttgaaccatcccagcatcccagggataaatcatatttgatcacagtgaacaattcttttaatgtgctgttgaattcagtttcctagaattttgttgaggatttttgcatctatgttcctcagggatgtcggcctgtaagtttattttcttgtagcgtccttgtctggctttgatatcagggtaatgctggacttgtaaaatgagtttggaagggttcctttctcttcaattttttgggaacagttagagaaggattggccctaattcttctttaaatgtttggtagactccaccattgatgctatmaggtcctgtgcttttgtttgctaggggaattttttcttcctgattcgatctgtcttcttgttattggtctgttcacatatttttttctttatgactcagtcttggtaggtagtg

SEQ ID NO: 564652 - DNA, 564 bp, Homo sapiens
ggctgggtgtggtggctcatgcctgtaatcccagcactttgggagcgagaggtgggaggactgcttgagccaaggacagcctgggcaatttagctacactctgcctccacaaaaatttaaaaattagctggttgtggtgctgtgtgcctatagcccccactactcagaaggctgaggtggaaggactgcttgagccccgaaagttgaggctgccatgtccataccactgcaccactccagtckgagtgacagagtgagatcctatctcaaagaaaaaagaaaaaccatctgtatttccaattcttcttctcaacagagtatagcagaaaaatgacacacaaacatcacatgtagagtttgcatcagaagaggtctttaaaaagatcaagacaacagatttttacagttaaaagagacctcttggttatctagttcaactttcttctatgtatgaatctctatagtatgcctgataaatgctcatctaccttctacttgaatattctcagtgatggagaaatcactatttgagaaggtacttgattccttattttgacaattata

SEQ ID NO: 564653 - DNA, 528 bp, Homo sapiens
ataactttttgcattattctaaacagtaagctatgatgaaaaaatagttgaaaagctaacaaattaggtttcccatctaatttttattacaaaactctgtaacaggtttttaattcctgaaacccactctgggaatccccacaggatcccccacatgattatgcccacctttctctacacggtcatgtgccccataacaacattttkgtcaaggatggaccacatatatggcagtagtttcataagattataatggagctgaaaaattcctcttgcctagtgacatcatagctgtcatcacatagcagcacaatacattattacaaaaacctatgataaaaaaagaaacagagcaagcaaatcaccatggacatatttttgaaaagagtgacacctcctcaagaagagcctcaggcaggtccttcaggagtttttccagaagaaggcattgttatcataggagatgacagctccatgcatgttattgcccctgaagaccttccagtgggacaagatgtggaggtggag

SEQ ID NO: 564654 - DNA, 587 bp, Homo sapiens
ctttcaacattgagaattacaattcagcatgagattttggtggggacacaaagccaaactatatcaattacttttaaagtcattatgttttctcatgttgaacatgaaaagaacataattaatggcataaccctctgaaatgttagaatatttgttatgaagaaaagtaaaagaaacataatatgcttcatcctatgaaaatacagggggagtttaaagatcaagtgataaaactatagaatgagatgataatattgaagaggcatttcagcattcctttttcactttagcttcattttttgatcaaacttacttaaaattaactttaaatgctttttaacttaaaagcagtataagtaattttatgtccttctaatttctyattattccctgggtacatatgatcatcccatgttaacagttgttattttgggatgataacattttgcataactacttttttagttaacaatttgtagatcatagtattgtttgaattttaaataataagcatgcattatttttaaagtacaataaagtcatctaaaaacaataaaaaaggaagttaaaatctctcataaattaat

SEQ ID NO: 564655 - DNA, 393 bp, Homo sapiens
ctcaaaaaaaaaaaaaaaaaaaaaaaaaaaggagggaggagaggggaggggaggggaaagcaraggaaagttggctgtaaggaaatgtctaaacaccttaaggtgctgctcggaaggacaacctcctttcatcactgttttgaaaccggcagcttcacataggactgttgctaggggtcatgaatatattctgagaacagagcaaagcattttataaaagggtcctttctctcgaatgcttaagtggtgaatgttcccagcttagagtcaagctcattcattgccatcacactggcaaatgactagtaaacatgaatagtatttaaataggttttaagaagtagactcaggctgaggtaccatggtgattattcagggaaatggggaaagctt

SEQ ID NO: 564656 - DNA, 393 bp, Homo sapiens
ctcaaaaaaaaaaaaaaaaaaaaaaaaaaaggagggaggagaggggaggggaggggaaagcaaaggaragttggctgtaaggaaatgtctaaacaccttaaggtgctgctcggaaggacaacctcctttcatcactgttttgaaaccggcagcttcacataggactgttgctaggggtcatgaatatattctgagaacagagcaaagcattttataaaagggtcctttctctcgaatgcttaagtggtgaatgttcccagcttagagtcaagctcattcattgccatcacactggcaaatgactagtaaacatgaatagtatttaaataggttttaagaagtagactcaggctgaggtaccatggtgattattcagggaaatggggaaagctt

SEQ ID NO: 564657 - DNA, 393 bp, Homo sapiens
ctcaaaaaaaaaaaaaaaaaaaaaaaaaaaggagggaggagaggggaggggaggggaaagcaaaggaaagttggctgtaaggaaatgtctaracaccttaaggtgctgctcggaaggacaacctcctttcatcactgttttgaaaccggcagcttcacataggactgttgctaggggtcatgaatatattctgagaacagagcaaagcattttataaaagggtcctttctctcgaatgcttaagtggtgaatgttcccagcttagagtcaagctcattcattgccatcacactggcaaatgactagtaaacatgaatagtatttaaataggttttaagaagtagactcaggctgaggtaccatggtgattattcagggaaatggggaaagctt

SEQ ID NO: 564658 - DNA, 393 bp, Homo sapiens
ctcaaaaaaaaaaaaaaaaaaaaaaaaaaaggagggaggagaggggaggggaggggaaagcaaaggaaagttggctgtaaggaaatgtctaaacaccttaaggtgctgctcggaaggacracctcctttcatcactgttttgaaaccggcagcttcacataggactgttgctaggggtcatgaatatattctgagaacagagcaaagcattttataaaagggtcctttctctcgaatgcttaagtggtgaatgttcccagcttagagtcaagctcattcattgccatcacactggcaaatgactagtaaacatgaatagtatttaaataggttttaagaagtagactcaggctgaggtaccatggtgattattcagggaaatggggaaagctt

SEQ ID NO: 564659 - DNA, 596 bp, Homo sapiens
aatctacaaattcaaagcaattcccatcaaaatatcaccatcattcttcacagaattagaaaaaaaaaattctaaaattcatatggaacaaaaaaaaagcccacatagtcaaagcaagactaagcaaaaagaacaaatctggaggcattgcattacctgacttcaaactatactataaagccatagtcaacaaaacagcatggtactggtatacaaatagacacgtagaccaatggaacagaatagagaacctagtaataaacccagatgcttacacccaactgatcttcgacaaagcaaacgaaaacataaagtggggaaagaacatccttttcaacaaatgatgctgggataattggctagccatatgtaggagaatgaaactggatcctcatctcaccttattcaaasatcaactcaagatggattaaggacttaaacctaagacctgaaactatgaacattctggaaaataacattggaaaaacccttctagatattggcttaggcaaggatttcatgaccaagaatccaaaagcaaatgcaataaaaacaaagataaatagctgggacttaattaaactaaagagcttttg

SEQ ID NO: 564660 - DNA, 596 bp, Homo sapiens
aatctacaaattcaaagcaattcccatcaaaatatcaccatcattcttcacagaattagaaaaaaaaaattctaaaattcatatggaacaaaaaaaaagcccacatagtcaaagcaagactaagcaaaaagaacaaatctggaggcattgcattacctgacttcaaactatactataaagccatagtcaacaaaacagcatggtactggtatacaaatagacacgtagaccaatggaacagaatagagaacctagtaataaacccagatgcttacacccaactgatcttcgacaaagcaaacgaaaacataaagtggggaaagaacatccttttcaacaaatgatgctgggataattggctagccatatgtaggagaatgaaactggatcctcatctcaccttattcaaacatcaactcaagatggattaaggacttaaacctaagacctgaaactatgaacattctggaaaataacattggaaaaacccttctagatattggcttaggcaaggatttcatgaccaagaatccaaaagcaaatgcaataaaaacaaagataaatagcygggacttaattaaactaaagagcttttg

SEQ ID NO: 564661 - DNA, 632 bp, Homo sapiens
ttctgttcaatatttgctgctttaaattaaaaatgaatcataaaagattttaaatgataaaagctctaatacatgactattatcaaaatcacaaatttatgcttatgatgagatataactcctgtgtctttatgtgccagatagtgttctaaagtcttgaaatattttaacatattaaatctcataaaacttccttgaagtgagtacaggtattacccatgcataaggaaagacaactgaggcacaggcaagtaaattctccaaggtgatagagtccccaagtaatcggctgggatatgtcctygtgattaattaggggtcatgctttctaaaaatttatatatataaatgaaattttgtgaagtatgagttaaatttattataaatgacttaaattagaatgattattttaattttagttgctttagttttttcataaaggtacaattaggaaactggtgactttttcatttgattatagaagtcctatatgcaagttcaaatatagaaaatgttcaaattcattaagttacattgtttcggaaagaagacattttcaagacatgaaataatgctgatttcctctctcttgaaagtacaatcattgtttaaatcgcccaagggctcactag

SEQ ID NO: 564662 - DNA, 532 bp, Homo sapiens
aaataaaagaatagaaaactgaaaatatgmctgagaataattagtttgaggactgttaagaagaccagagagagagagagtggtgtttaacaggccaaatgagttgtttaagaagtgagtgattaaccagttagacaatgcagaggtataaagaaaaatgagagtaatttgtcaatttagaggtagtagaaggatttcagtagaatggaagggtcatagaagggtcagaaaccagactttagcagtttagaaattactgggaggtctggaagtggagacaatgagaacagatggatcatcattttaaaaatataaaggcagcacacataattgttggaaaaggtcatggaggaggtaagaggaaagggaatctaaaggacaggtagatgaaacagtttttggaactttcaaaatgttacgatggcctggttgatgtcttgctacactctttgcaataaagcagtcaataaaaatgagactaaacacacaaatatcaatagctgtgccagtttattcataatgtatattgatt

SEQ ID NO: 564663 - DNA, 369 bp, Homo sapiens
aaatacatcataaatacaatacattatttacgctgggcttccagattttggtggacattctgtaggatatctaagatatataaacctgcgtgctactgataatgagggattcattctggcaatagcagaactgttgagagaattatcyaatttataagaataactgttcagtggtttgcagagttttgggcatctatgtaagatgtaaaggccactgtcattgtgattgtggttgtagtgtctttgtcatatttcttgttaggtttttgctatgatcctggttgttacctagcatttctcgtttccaccctagttgaaaacccagttctcctgcctgctgattacaggagccaccttaaaacttttcaa

SEQ ID NO: 564664 - DNA, 369 bp, Homo sapiens
aaatacatcataaatacaatacattatttacgctgggcttccagattttggtggacattctgtaggatatctaagatatataaacctgcgtgctactgataatgagggattcattctggcaatagcagaactgttgagagaattatctaatttataagaataactgttcagtggtttgcagagttttgggcatctatgtaagatgtaaaggccactgtcattgtgattgtggttgtagtgtctttgtcatatttcttgttaggtttttgctatgatcctggttgttacctagcatttctcgtttccaccctagttgaaaacccagttctcctgcctgctgattacrggagccaccttaaaacttttcaa

SEQ ID NO: 564665 - DNA, 543 bp, Homo sapiens
tctgaaacctaattgtgaaattgtacactgaacccttcaaataattttggaagcttttttcttttttttttaatcttcaaatgactctactttgtcaggcatttcggttatgagagaacagtggtagtggtggtgactcaacgtggaggttgaaatagagatgtaattaaatacattctgaaattagaaaacaaggttaacgatgatatttgaatgaaatcttttcaaacccactgtcaaaacacaacttcttttccactcttgtttgaatctcatggcaaccttgctaccttttacagtgacttctcttctggggtgtgttttctgaatgcctttcatttaataggcatattttagaaacctaatttctctgtctgcgtcacatcagcaatgctgtagaaacctaaccattttagactgtctggatgctgttcttatcaagtcattaacattattattgagggtgacatagagaagttaactcccctcactcggagcatcttatttgttaaagaycacagccctttaacctttataaaggat

SEQ ID NO: 564666 - DNA, 293 bp, Homo sapiens
ttatttagcagcagggagaatgaaaccccttttccatccccgaaaaacactgggagcccagacaaggaattctctgctgttcagtgaagccgaatcaaattytcaaacagagccttcctttttttttttttttttttttttcctgtgcttgatagacctgagtttgagttctggttctgacagctccacatcaatttctaccaattgcttaaccttaacccccatctcatccgaggccaataatgctggaattctgtcaggaaagtattgaaatttggagggcacaatattat

SEQ ID NO: 564667 - DNA, 541 bp, Homo sapiens
aattattacgaattttccctcatactgcctagcatatggcacacagcaaaccccagaagatgtgcattaaatttgtttaaggtgtaacaaccgacaaattcagctacctctcccatccttctggtttattattatatatggctctcctattctcactttattgcatacacatgtatttacatttatagcaattttattgatgaatatatatgtgtgtgtgtgtatatatatatacatatatatatatataacaccaatgtttataaagttcaaatttcttcaagataaattaggacagtggaaaaatattgctttgtgtcattttatcagatctctccagaaaattttgctgtataaatctaatacataataaataacataccttgaacaagggaacatcctcagacatatgactatgcaaagggaaaaagctgatttttgcttgtttacacaaatgtcttggaagagactcaggttttttttttttttactttcatctctattagttgaaaaytgaaatgaacatttttaccaaagacca

SEQ ID NO: 564668 - DNA, 638 bp, Homo sapiens
atacttttgtctttttaaatttttggttttttgagacagtctcactcttttgcccaggctggagtgcagtggcacaatcttggctcactgcaacctctgcctcccaggttcaagcgattctcctgcctcagcctcctgagtagctgggattacaggtgcccaccatcacgcctggctagtttttgtattttgtagagagggagtttcaccatgatggccaggctgctctcgaactcctgatcataagtgatatgcccgcctcagcctcccaaagtgctgggattacaggtcagatgcatttctaatacactaacaatgaacaatttaaaaaggaaatattaaaaaaaatccatttgcatcagcatcaaaaagaaaaatgaaacaaggaggaaaagacttgttaacaatgaaaactacaaaatgttgctaaaaggaattaaagaagatgtaaataaatgggaagaaatcccacattcackggttggaagacattatattgttaaatatcgacaccacccaaattgatttatgaattaaaagcaatcactatcaaaatccccagtgaggcccaacagctcacacctccgatcctagtgctttggtaggttgaggcaggaagactgcttgaggccaggaat

SEQ ID NO: 564669 - DNA, 579 bp, Homo sapiens
caggagcgtgaggcaggagaatcacttgaaccggggaggcggaggttgcagtaagccaagactgcgccatggcattccagcctgggctacaaagcaagattccgtctcaaaaaaaaaaaaaaaaaaaaaaaagactgagggaaaaaataattaaacactatacagttttacaagaagataaaaagcacttcatatattgatgagaaatctccagaataaattaagaaagaaaaaaaaaaaagycaaagccacatctggttggtatgctacatttgtgaaaaagaaagaggaagaaaaatgtatacagttcgctatttatacaaaaaaatctgatatacctgagaagataataactgcatgcttgagagatggggcagaaaggaaaaacatgtaatatattttttatatttacttttggaattttgaatcatgtggatatatgcctatttaaaaaaaaaaaaaaaaaaacagtacatcagacaagaaacataccaatacaataattcaggatagaagggtagactgtataaatgagaataacaggaaaatgtctctttattaaaccaggatggtttcatg

SEQ ID NO: 564670 - DNA, 587 bp, Homo sapiens
cattaaaatagtaagtaaactgcaaaacactatgcaaatgtgagtttagtgttataaatctgtgytacacagtagggcgtgggctgtgtcttttatatctctaactttccagtattgttctttcaatggtggtgttggtagagagacctcttctgtttcctcacgctgagaggcagagtgtgaatatgggatacatcatgttccagtccacccactgggtaacttttgggatatgggtctctcagtagcgtcaagttttctgtgtaactgaggatttagttttttaagtataaacacttttaacaatatttcttgatgaaagtgttaaaaatatatatttaatggagaaggagcaagtgaagaaggagcagtaaattatgtgttgtgaatagaaggaaataaaaatatattctggctctactttattgctttataaatgctaataactttccattttattgttaattcaggcacattattattaatattagttaactctgctataacactctgatgacttcagagaatatgctgcatattgaattatttccttttatatcaaataattccagattgttttgatgttt

SEQ ID NO: 564671 - DNA, 537 bp, Homo sapiens
atcctaatactcttcttccctgccatattatgaatttatagaaaaaaacctaaggctattaagatatttgccagagacaatgagcagtatgattgttgtggtggtctgacaaccctgtgtagaccatttcggtcaccccctgtccttaggctccctggccagccagagttgatgctacactatcccaccttaatacatctcctacaaagaataacggcattagacttcccagactaaaataaaaataaactacactgttactgtcaggaaacagaagggggcaccctaagaatatttagtagttgcaaacggcagctctaaagtctttaaatacaatgaatgctttctctcaagcatagaaagcaaagcatggtcaattttayaggtaaaatttttctatggagccacatgactaagggataaagattaagagtgcctaagtcaatctctgagaaaaaggtaaaaattaaaatgaagcttcctatctcacgtgacagatagtatgataatagaaacaaaatattcctccaaacataa

SEQ ID NO: 564672 - DNA, 535 bp, Homo sapiens
  misc_feature 530, 531, 532, 533, 534, 535: n = A,T,C or G
aatctctgcaacactgattagtgttacatgtcaaccsttgcagagaagccagagttaaaaataccatggccttgcacagtggctcatgcctatcatcccggcacttagggaggcagaggagggaggatagtttgagcctaggagttcaagacaggtctgggcaacatagtgagatcccgttctccacaaaaagggaaaaagaagccaaatcacccccacaagtttgaaaaataccaagaaacagagagtttggtggtcatcaaccagacactcaacgacagttgaggctaagcatgtcacacaaatgcttcaagtggcctgggggtagtagtgaggactgtgatgggatgggatggagactgcacacctcctttaaagggatttaaattcaattttttttgtaatattgtgtgtgcttaccataatacattttgggcttgatgtgggataaggatgccagtttgcaagtccttcttttaggggagccatggatctccactttacaacatttttccgtttatttcaataannnnnn

SEQ ID NO: 564673 - DNA, 535 bp, Homo sapiens
  misc_feature 530, 531, 532, 533, 534, 535: n = A,T,C or G
aatctctgcaacactgattagtgttacatgtcaaccgttgcagagaagccagagttaaaaataccatggcctkgcacagtggctcatgcctatcatcccggcacttagggaggcagaggagggaggatagtttgagcctaggagttcaagacaggtctgggcaacatagtgagatcccgttctccacaaaaagggaaaaagaagccaaatcacccccacaagtttgaaaaataccaagaaacagagagtttggtggtcatcaaccagacactcaacgacagttgaggctaagcatgtcacacaaatgcttcaagtggcctgggggtagtagtgaggactgtgatgggatgggatggagactgcacacctcctttaaagggatttaaattcaattttttttgtaatattgtgtgtgcttaccataatacattttgggcttgatgtgggataaggatgccagtttgcaagtccttcttttaggggagccatggatctccactttacaacatttttccgtttatttcaataannnnnn

SEQ ID NO: 564674 - DNA, 535 bp, Homo sapiens
  misc_feature 530, 531, 532, 533, 534, 535: n = A,T,C or G
aatctctgcaacactgattagtgttacatgtcaaccgttgcagagaagccagagttaaaaataccatggccttgcacagtggctcatgcctatcatcccggcacttagggaggcagaggagggaggatagtttgagcctaggagttcaagacaggtctgggcaacatagtgagatcccgttctccacaaaaagggaaaaagaagccaaatcacccccacaagttygaaaaataccaagaaacagagagtttggtggtcatcaaccagacactcaacgacagttgaggctaagcatgtcacacaaatgcttcaagtggcctgggggtagtagtgaggactgtgatgggatgggatggagactgcacacctcctttaaagggatttaaattcaattttttttgtaatattgtgtgtgcttaccataatacattttgggcttgatgtgggataaggatgccagtttgcaagtccttcttttaggggagccatggatctccactttacaacatttttccgtttatttcaataannnnnn

SEQ ID NO: 564675 - DNA, 535 bp, Homo sapiens
  misc_feature 530, 531, 532, 533, 534, 535: n = A,T,C or G
aatctctgcaacactgattagtgttacatgtcaaccgttgcagagaagccagagttaaaaataccatggccttgcacagtggctcatgcctatcatcccggcacttagggaggcagaggagggaggatagtttgagcctaggagttcaagacaggtctgggcaacatagtgagatcccgttctccacaaaaagggaaaaagaagccaaatcacccccacaagtttsaaaaataccaagaaacagagagtttggtggtcatcaaccagacactcaacgacagttgaggctaagcatgtcacacaaatgcttcaagtggcctgggggtagtagtgaggactgtgatgggatgggatggagactgcacacctcctttaaagggatttaaattcaattttttttgtaatattgtgtgtgcttaccataatacattttgggcttgatgtgggataaggatgccagtttgcaagtccttcttttaggggagccatggatctccactttacaacatttttccgtttatttcaataannnnnn

SEQ ID NO: 564676 - DNA, 625 bp, Homo sapiens
acggtggcactccatgctcatggtctctctgctcatgttgtcttttttatcttcctagaatattcttcctatgcattttcatcctgttaatggaggaaaatcctgattaaaactctgattttagtcaaatcatcacttagattatacccgattgttttagttcatagtgacactattttctgaaccaaagttctagtacacgctgttcaatcctgccattcaaaccaccttaaacttatacacaaacatagcatgtctcaactcaatctgaataactcagaaaatagacaccttggtttttcatgtttttaattatttcccattttgtagcaaagtcctgggcaaagtgatttgtaatatctatatctatatctatctactatctatctatccagttgcaggcttgttcaaccaaagtttgtctccaaaggcacttgctatgattggtttcaggaaacaaactattccctttgcactagttagttttttctmattatgttgagataattttcattatagtacttatgaaagtctaacattatagcatttattttgtactttattgtcggttccccacaagccaatagaacagacattcaagacagtgggaaacttgccatttttt

SEQ ID NO: 564677 - DNA, 511 bp, Homo sapiens
aaaaaaaccatcactggtaaaatgtaaataaccccctcagtctttaatgattctgtaaatatgggactaaagtaattgataaagccattaaaataaatcctggctggaacactcactgaagcaatttcacagattactttttcttgttttcatartagtgtagagatctgactcactgctgaatataacattcccttctttgatgtctccagtacatgtaatgtccacataagaactcccaattttgcaaaccttttcaagtcccccaccagtgctggagggtatatgggcggggagtagataatgagctgggctttggagtcagacttcccagattcaaatcctggctccgacactcagtactgcatgaacttgagaagacctcactttcataagccttctttatatgacttccctcatctgtaaaatggggtaatgacaatatttttgtgtgctaattcatttaaaacacttaataaactggtatttcataaatgcttaatacatatta

SEQ ID NO: 564678 - DNA, 511 bp, Homo sapiens
aaaaaaaccatcactggtaaaatgtaaataaccccctcagtctttaatgattctgtaaatatgggactaaagtaattgataaagccattaaaataaatcctggctggaacactcactgaagcaatttcacagattactttttcttgttttcataatagtgtagagatctgactcactgctgaatataacattcccttctttgatgtctccagtacatgtaatgtccacataagaactcccaattttgcaaaccttttcaagtcccccaccagtgctggagggtatatgggcggggagtagataatgagctgggctttggagtcagacttcccagattcaaatyctggctccgacactcagtactgcatgaacttgagaagacctcactttcataagccttctttatatgacttccctcatctgtaaaatggggtaatgacaatatttttgtgtgctaattcatttaaaacacttaataaactggtatttcataaatgcttaatacatatta

SEQ ID NO: 564679 - DNA, 591 bp, Homo sapiens
gaggtaataaataaaagagcaggggcaaaatcacaagaagctttgcataccaggctaaagagcttgtacattatgcagtaaactaaagcttttcacattgtgataactgagtaataaaaacaaaatcctaagctccacatctgactgaacaagcccccttttggtcaaggggaccttaaaaattgagttcccagtaatgactggataggaggtagggcactccttaacatgccccttgtattagtctgttttcacactgctgataaagacatacccaaaactgggaagaaaaagaggtttaatggacttacttacagctccacatggctgggaaggcctcacaatcatggyggaaggcaaggaggagaaagtcatgcgttacaaggaaggtggcaggcaaagagagaagaggacttgtgcagggaaactcctatttttaaaaccatcagattgcttgaggcttattcactactgtgagaacagcaggggaaagacctgcccccatgattcaatccctcccacaatacatgggaattatgggagttacaagataaaatttgggtggggatacagaaccaaaccacatcactc

SEQ ID NO: 564680 - DNA, 591 bp, Homo sapiens
gaggtaataaataaaagagcaggggcaaaatcacaagaagctttgcataccaggctaaagagcttgtacattatgcagtaaactaaagcttttcacattgtgataactgagtaataaaaacaaaatcctaagctccacatctgactgaacaagcccccttttggtcaaggggaccttaaaaattgagttcccagtaatgactggataggaggtagggcactccttaacatgccccttgtattagtctgttttcacactgctgataaagacatacccaaaactgggaagaaaaagaggtttaatggacttacttacagctccacatggctgggaaggcctcacaatcatggtggaaggcaaggaggagmaagtcatgcgttacaaggaaggtggcaggcaaagagagaagaggacttgtgcagggaaactcctatttttaaaaccatcagattgcttgaggcttattcactactgtgagaacagcaggggaaagacctgcccccatgattcaatccctcccacaatacatgggaattatgggagttacaagataaaatttgggtggggatacagaaccaaaccacatcactc

SEQ ID NO: 564681 - DNA, 655 bp, Homo sapiens
caaaaatttaactttaaaacatatgcaatttttctaaaaagtttagaaataggtacccrcttgatataaaatgattcctttaatgattcctttaatgaatgtagcttcagaccgatgggtaatgatcaaggcccttggggctacctccagcttttcttcctgatgcatggccctgtttctgtgttggaagtaaggaaacttgctgttccagggcttaacctatatctagagaatgattcagatataatgaagaaagtacctggtgttataatatcttagcccttgctgagcatttcaatcccttaaaaaatcctatttgcaggatttttaaaaactgtattactcatatcttggagaaaacggggggtattctgaagtaaaactttgacccagggataaagcacattagcttgaggatgaagaggactgggtttgggtctgccatttgctagtttggacaaggctgctttaccttccttgacctcaatttgttaatttatattattaatgaagatgttgaactacacgctttttattgaaatagtatgacaagtgaatgtgaagataaataaatgccttaaaacttaataaaactaaatttcactttacggatgagccttactttcatccttttaaacacaattttgagacatac

SEQ ID NO: 564682 - DNA, 430 bp, Homo sapiens
actcccaacatataaaagagatttcagtaggtgcattggaatgaagaaaatcttgtttaaatatggttaacggcaactctaaaacacaaactttgggcactttcaaatcaagaacctgattagtagtaaagaaccctggcacgtggagtgaccagtccagtgaaaaaatggtgtggacaagaatacaatacagtacttaggatgcaggcttgcttgttataagaataaggcctccaaacatattggcttgcttgacttaaacaggatcaaagtttgccttattcatctcctagaagggagtccaaggctggtagaattatttgacagtactgaagatggaagcttgctcatttggttgctctcccatcttgagcgtrttgccttatctgcatgtttgcagatggctctcctccacttccatattccagtc

SEQ ID NO: 564683 - DNA, 434 bp, Homo sapiens
gtatttgagtttattccttactctgcctcctgctggccttgtgaccttagctacgtcatttcacttctctgaaactcagttccctcatttgtaaagtaatgataatgtctgcctgtcagggttattgtgaggaccaaatgcaaaaatataggtaaagcactaaagagagtacctgacatatgataaacattcaataaatggataatagccgcctttattaatatttttattttcatcatcatcatcattagattgtgctcaatactctgtgagaagtgaagtagattctggtttcatgtagttacacccatttgtctactaaaatatggtccgtggacacgtatcaccaccagcattacctgggagcacattagaaatgcagagtttcaggaggccgcraggaaagaccaaaaatgctgtgtctgcccagcctc

SEQ ID NO: 564684 - DNA, 631 bp, Homo sapiens
gggggactactgtattcaacaaaccaaaaattgccattttcatggctgatttggatttttttaacgtaaaatgaacaactatttattgtatttgtttaaatatagaccatattgaactgtttaaaaatattgtttaggtttgcagtcatagttatcacccagtgtacatttttaaatgcttargaaaggataaaggaaaaaaataaatgacagatggaggaaatagctattattcctaagtcagagaatatggatggaccaaaataaaagaagttatgattgataccaaattagttttgctgaggaagaacttgtaagatagtttggttggtcaatgggggcgagatgggaataagataggaatatacaccataataaatttcttacttccattgcacctaaaagatttgcactctctccaatgctttcttctatgtacctacgttcttcatctgtaatagtaggatgctttgcaggactttcataagacaccaaaagccaaaacatgtaccagaccattccaaagcttcctgcaagcaacagttcagaaggagaaagtcacttccatttaacagtgatgtgctgcaataaaactgcaatcatctcaagacaaacatattctattagaaag

SEQ ID NO: 564685 - DNA, 482 bp, Homo sapiens
  misc_feature 382: n = A,T,C or G
gttcatggattggaagaataaatatagttaaaatgtccatactgcccaaagcaatctacagattcaatacaacccctgtcaaaatattaagtttggtacaaaagtaattgtggtttttgccattactttcaaagacaaaaactgcaattacttttgcaccattctaataccaatgacattcttcacagaaatagaaaaaacacttctaaaatttatactgaaccacaaaacacccagaatagccaaagttattctgaacgaaaagaacaaaactggaacaaaactgctcatggggtattactcaagaaatcacattatctgacttcaaattatactacagagctatagtaatcaaaacagcatggtattgggcataaatagncgagacacatagaccgaatggaacagaatagagaacccagaacaaatccatgcatctayggtgaactcattttcaaaaaaggtgccaataacatatattg

SEQ ID NO: 564686 - DNA, 549 bp, Homo sapiens
ttgctgacttaagtgagattctcttcatttcttgcctctcctaactggtcttcatgcctctagtcaggactttttcaatctgcccttctgaaaactgccattgtgaccttctaaaacacaaatctgcctgtaatcccagtccttttggaggccaaggcaggaaggatggcttgaggctaggagtttgaggccagcctgggcarcaaagcaagaccctgtctctacaaaacattttaaaaattagccaggtatagtggctcacaaactgtagtcacagctacttgggaggcagaatcaggagaatcgtttgagcccaggactttgaggctgcagtgagctatgattgtgccactgcgctccagcctgggcaacagagaatgaccctgtctctaaaaacaaagctaatatcaaacaaacaaaacccacaaatctgctctttaccactcccctacttcagtggttccccatggcttctctgcttagcaaatgacacccttcataatttgatttatttctgcctaaatctctatatcttattttccagaactc

SEQ ID NO: 564687 - DNA, 549 bp, Homo sapiens
ttgctgacttaagtgagattctcttcatttcttgcctctcctaactggtcttcatgcctctagtcaggactttttcaatctgcccttctgaaaactgccattgtgaccttctaaaacacaaatctgcctgtaatcccagtccttttggaggccaaggcaggaaggatggcttgaggctaggagtttgaggccagcctgggcaacaaagcaagaccctgtctctacaaaacattttaaaaattagccaggtatagtggctcacaaactgtagtcacagctacttgggaggcagaatcaggagaatcgtttgagcccaggactttgaggctgcagtgagctatgattgtgccactgcgctccagcctgggcaacagagaatgaccctgtctctaaaaacaaagctaatatcaaacaaacaaaacccacaaatctgctctttaccactcccctacttcagtggttccccatggcttctctgcttagcaaatgacaccctycataatttgatttatttctgcctaaatctctatatcttattttccagaactc

SEQ ID NO: 564688 - DNA, 484 bp, Homo sapiens
ggtgtgcaacaccaagcctggctaatttttttgtatttttagtagatggggtttcaacatgttggccaggctggttttgaactcctgacctcaggtgatcctcctgcctcggcttcccaaagtgctaggattacaggtgtgagccactgcacccaacctcaaaccaggtattcattttgtgaaggaaggaggaagaaaacggatattggagagtcaatgaatgatgctttccccagatacctttgaaaacaaaccttgttttgattgatgtccctgccaattagtgaagtcccatcrtccaggtgcagaggctagatgacggtgtgacaagggaggtcctagcatgtctctttctcttctctgttaccatgtcaaagaatctgggtttttattgttggtggaagaaaccttggcagttgcttactataaccccccattttattcatgatgaaatagacaactagagagcataaatcagtcatca

SEQ ID NO: 564689 - DNA, 484 bp, Homo sapiens
ggtgtgcaacaccaagcctggctaatttttttgtatttttagtagatggggtttcaacatgttggccaggctggttttgaactcctgacctcaggtgatcctcctgcctcggcttcccaaagtgctaggattacaggtgtgagccactgcacccaacctcaaaccaggtattcattttgtgaaggaaggaggaagaaaacggatattggagagtcaatgaatgatgctttccccagatacctttgaaaacaaaccttgttttgattgatgtccctgccaattagtgaagtcccatcatccaggtgcagaggctagatgacggtgtgacaagggaggtcctagcatgtctctttctcttctctgttaccatgtcaaagaatctgggtttttattgttggtgsaagaaaccttggcagttgcttactataaccccccattttattcatgatgaaatagacaactagagagcataaatcagtcatca

SEQ ID NO: 564690 - DNA, 424 bp, Homo sapiens
gattatatctaaagaatgaagaattatatggtttagagaacccattgaaatataacaaagtagttctccctccaaatttttaaagaagtgactattgctaccagatttacaaagaataataaaattcccaagcctggctgtgtactcgaagactggttgtctggatgctcaccaatcccatttcctcttctggggcacacagggagactccattttccaggctccttcaggatgggccatgtgattaagtcctggccaattggaagtggatggaaatgatgtacaacagttctaggactggctakaaaactgtgtgatttttcgtaatctttcttctccttcaatagcaacaatggaggccatgtattgaaatcgtatgacacgaagagcctgagttttataggtatcacctgaaagaagaatt

SEQ ID NO: 564691 - DNA, 413 bp, Homo sapiens
  misc_feature 385, 386, 387, 388, 389, 390, 391, 392, 393, 394, 395, 396,397, 398, 399, 400, 401, 402, 403, 404, 405, 406, 407, 408,409, 410, 411, 412, 413: n = A,T,C or G
gaatccacctctataaaaaaaaaaaaaaattagctgggcatggtagcatgtactyggggtcctagctacttgaaaggtggaggtgtgaggatcgcttgagcccacttaagtgagctgtgatcttgccactgcacttcaacctgggtgacagagtctgactaactcaaaaaaaaaaaggatcagggttgatgtgcctggagtagctgaggaaggtttggtggaagagggaacatgaagggtgggtgggatttgggtgagaggaaaggatcagcatgagtaaagtgtcaattgatcctcatcatctgttgccttctgtttctcctctctgcccttcccctaggaggcagacctccatgaaagtgtactaattcattaagcagagcannnnnnnnnnnnnnnnnnnnnnnnnnnnn

SEQ ID NO: 564692 - DNA, 421 bp, Homo sapiens
  misc_feature 385, 386, 387, 388, 389, 390, 391, 392, 393, 394, 395, 396,397, 398, 399, 400, 401, 402, 403, 404, 405, 406, 407, 408,409, 410, 411, 412, 413, 414, 415, 416, 417, 418, 419, 420,421: n = A,T,C or G
gaatccacctctataaaaaaaaaaaaaaattagctgggcatggtagcatgtactcggggtcctagctacttgaaaggtggaggtgtgaggatcgcttgagcccacttaagtgagctgtgatcttgccactgcacttcaacctgggtgacagagtctgactaactcaaaaaaaaaaaggatcagggttgatgtgsctggagtagctgaggaaggtttggtggaagagggaacatgaagggtgggtgggatttgggtgagaggaaaggatcagcatgagtaaagtgtcaattgatcctcatcatctgttgccttctgtttctcctctctgcccttcccctaggaggcagacctccatgaaagtgtactaattcattaagcagagcannnnnnnnnnnnnnnnnnnnnnnnnnnnnnnnnnnnn

SEQ ID NO: 564693 - DNA, 413 bp, Homo sapiens
  misc_feature 385, 386, 387, 388, 389, 390, 391, 392, 393, 394, 395, 396,397, 398, 399, 400, 401, 402, 403, 404, 405, 406, 407, 408,409, 410, 411, 412, 413: n = A,T,C or G
gaatccacctctataaaaaaaaaaaaaaattagctgggcatggtagcatgtactcggggtcctagctacttgaaaggtggaggtgtgaggatcgcttgagcccacttaagtgagctgtgatcttgccactgcacttcaacctgggtgacagagtctgactaactcaaaaaaaaaaaggatcagggttgatgtgcctggagtarctgaggaaggtttggtggaagagggaacatgaagggtgggtgggatttgggtgagaggaaaggatcagcatgagtaaagtgtcaattgatcctcatcatctgttgccttctgtttctcctctctgcccttcccctaggaggcagacctccatgaaagtgtactaattcattaagcagagcannnnnnnnnnnnnnnnnnnnnnnnnnnnn

SEQ ID NO: 564694 - DNA, 649 bp, Homo sapiens
tactctgtaggctgacgtgagagaactgcttgagtccaggagttcaagactgtagcgcactatggtacctgtgaacagcccactgcactccggcctgggcaacatagtgagacccagtctcttcattaattaataacaataaatttcaaaacattattttaaaatgacaataattttgacagtgtggtattgtgtatggatcggtgaatagatcaaatagaaaagaaaaaaactatcattgttatcattattaaaaaactatcactagcccagaaattaacctactcatatgtggacacactgcatgacaaaggtaacaccgcaaagcaaagaggaaaggtcagtcttttcaataaatgsactaagtcaataagatattcatatgggaaaaaattattcttggctcctacctcacactaaatataaaatttccaggtcaattagagatcaaaatgagaaaaataaattagacttctagaagataacataagagaaagccttcatgacctcagtaggcaagacttattgaatatgaagagatgatccacagaatgggagataatatttgaaatatttacacctaacaaaggactcatatccaggatatagaaagaacttctcaaattagtcccaacaacaacaacaaaaa

SEQ ID NO: 564695 - DNA, 649 bp, Homo sapiens
tactctgtaggctgacgtgagagaactgcttgagtccaggagttcaagactgtagcgcactatggtacctgtgaacagcccactgcactccggcctgggcaacatagtgagacccagtctcttcattaattaataacaataaatttcaaaacattattttaaaatgacaataattttgacagtgtggtattgtgtatggatcggtgaatagatcaaatagaaaagaaaaaaactatcattgttatcattattaaaaaactatcactagcccagaaattaacctactcatatgtggacacactgcatgacaaaggtaacaccgcaaagcaaagaggaaaggtcagtcttttcaataaatgcactaagtcaataagatatycatatgggaaaaaattattcttggctcctacctcacactaaatataaaatttccaggtcaattagagatcaaaatgagaaaaataaattagacttctagaagataacataagagaaagccttcatgacctcagtaggcaagacttattgaatatgaagagatgatccacagaatgggagataatatttgaaatatttacacctaacaaaggactcatatccaggatatagaaagaacttctcaaattagtcccaacaacaacaacaaaaa

SEQ ID NO: 564696 - DNA, 544 bp, Homo sapiens
cacccagctgccactcacctctaaggtggcatagggaggctggttctgggagcgttgaaaggagctagaaactagagccagcttctgccacgaggaagaagggccattgctggggcaaccctggcaagcatagaggaagcataaaggaaagatcagtttcctgcttcctctgcctgccttccagtgtccaactagtatcacygccaatgaaaaccagaagtcccatgtcaaaggatataccagccccagcatcacaaagagagcattaaaaggtgggatttgagccaggcgcggtggctcacacatgtaatcccagccctttgggaggccaaggcaggcagatcacttgagatcaggagttcaagaccagcctggccaacatgatgaaatttcatgggcttgtggaccttaaattccaggtagggaagatagacaacaaaccaataaaaagagagtagtaaaaatctactaaaaacacaaaaattagtcgggcgtggtggtggacacctgcaatctcagctacttgggaggctgaggcaggaga

SEQ ID NO: 564697 - DNA, 544 bp, Homo sapiens
cacccagctgccactcacctctaaggtggcatagggaggctggttctgggagcgttgaaaggagctagaaactagagccagcttctgccacgaggaagaagggccattgctggggcaaccctggcaagcatagaggaagcataaaggaaagatcagtttcctgcttcctctgcctgccttccagtgtccaactagtatcactgccaatgaaaaccrgaagtcccatgtcaaaggatataccagccccagcatcacaaagagagcattaaaaggtgggatttgagccaggcgcggtggctcacacatgtaatcccagccctttgggaggccaaggcaggcagatcacttgagatcaggagttcaagaccagcctggccaacatgatgaaatttcatgggcttgtggaccttaaattccaggtagggaagatagacaacaaaccaataaaaagagagtagtaaaaatctactaaaaacacaaaaattagtcgggcgtggtggtggacacctgcaatctcagctacttgggaggctgaggcaggaga

SEQ ID NO: 564698 - DNA, 544 bp, Homo sapiens
cacccagctgccactcacctctaaggtggcatagggaggctggttctgggagcgttgaaaggagctagaaactagagccagcttctgccacgaggaagaagggccattgctggggcaaccctggcaagcatagaggaagcataaaggaaagatcagtttcctgcttcctctgcctgccttccagtgtccaactagtatcactgccaatgaaaaccagaagtcccatgtcaaaggatataccagccccagcatcacaaagagagcattaaaaggtgggatttgagccaggcgcggtggctcacacatgtaatcccagcsctttgggaggccaaggcaggcagatcacttgagatcaggagttcaagaccagcctggccaacatgatgaaatttcatgggcttgtggaccttaaattccaggtagggaagatagacaacaaaccaataaaaagagagtagtaaaaatctactaaaaacacaaaaattagtcgggcgtggtggtggacacctgcaatctcagctacttgggaggctgaggcaggaga

SEQ ID NO: 564699 - DNA, 562 bp, Homo sapiens
aagccattaagccattaagttaatgtatccattaagttttgtgttatgctataataaacaactaatacaggtgtgatcatggtaccatagttatgatttttgatgcacagtgaaatatttatataatgtctgtgattagcttcaaaataatggggagggtgaaaggaaagaatgtggttgggagtgaaacaaagatggatccctgagtggaaagttgatgaagttgaaggatgggtactgctatggtttgaatttgtctcccaaaacatatgctttggaaacttaatccccaatgccacagtattgggaggtggggcctaatgagaggagattaggccaaatcttgcatggtgaaaagtatgctgatctgtatactgtagatcagaatccacattcttcccccttttgagaactgaaatggtgtacatttatcttcagcaacacttcctactyttcctcctcaaggacagagagagtggctcagtgatcttccctccaacttgatctgtggatcacgagttctctgctcagtgtggagcacagaactcatttagagcagcca

SEQ ID NO: 564700 - DNA, 444 bp, Homo sapiens
cttagcaaacagcacaccaggagattatatcccacgcttggctcagcgggtcccatgcccacagagccttgctcactgctagtgcagcagtccaagatcgaactgccaggcagcagcatggctgggggaggggcgtccaccattgctgacrcttgagtaggaaaacaaaggggcagggaagcttgaactgggtcgagcccacgtcaggcctgcctccctctgtagactccatctctgggggcagggcatagttcaacaaaaggcagcagaaatttctgcagacttcaaagttccggtctgacagctctgaagagaagagtggttctcccagcatggtgtttgagctctgagaacagacagactgcctcctcaagtgggtccctgaagcctgtgtagcctaactgggagatatctcccagtaggggcctactgacacctcataca

SEQ ID NO: 564701 - DNA, 444 bp, Homo sapiens
cttagcaaacagcacaccaggagattatatcccacgcttggctcagcgggtcccatgcccacagagccttgctcactgctagtgcagcagtccaagatcgaactgccaggcagcagcatggctgggggaggggcgtccaccattgctgacgcttgagtaggaaaacaaaggggcagggaagcttgaactgggtcgagcccacgtcaggcctgcctccctctgtagactccatctctgggggcagggcatagttcaacaaaaggcagcagaaatttctgcagacttcaamgttccggtctgacagctctgaagagaagagtggttctcccagcatggtgtttgagctctgagaacagacagactgcctcctcaagtgggtccctgaagcctgtgtagcctaactgggagatatctcccagtaggggcctactgacacctcataca

SEQ ID NO: 564702 - DNA, 444 bp, Homo sapiens
cttagcaaacagcacaccaggagattatatcccacgcttggctcagcgggtcccatgcccacagagccttgctcactgctagtgcagcagtccaagatcgaactgccaggcagcagcatggctgggggaggggcgtccaccattgctgacgcttgagtaggaaaacaaaggggcagggaagcttgaactgggtcgagcccacgtcaggcctgcctccctctgtagactccatctctgggggcagggcatagttcaacaaaaggcagcagaaatttctgcagacttcaaagttcckgtctgacagctctgaagagaagagtggttctcccagcatggtgtttgagctctgagaacagacagactgcctcctcaagtgggtccctgaagcctgtgtagcctaactgggagatatctcccagtaggggcctactgacacctcataca

SEQ ID NO: 564703 - DNA, 570 bp, Homo sapiens
tgctgaattcctttttttttttacgttttgttattgattgtatttcctgtggactagtagctagatacaagatacagaggcttgataagatttagattcacattttaaaatcaatattcttcatagatagcgttgtgtacttccaactgtttttatcaggaggtacattgtgtctggtttatcttaagaattgagctttcatgtattgtgagcctaacacatgtgttaaaaacgtatccatctggtgttccctaatgatattttgagcattatttgagagtcattattcattaggatatgaacgtggtgatattctaggtttatttttctttctttatttcttagctgtaagtcttctagaaagtaaaactcgtaccaactgtttcttccacttaggcacagttcatgtaactgtaagtttgattattttcctttgtttgctggttttcagaatatcttggtttcctagcatcaaacatwatatatattttattttattttatatctgttggattgattgcctattgaatatcaatatgctgaaattaacacaaatttggctagtgaaag

SEQ ID NO: 564704 - DNA, 583 bp, Homo sapiens
catgcccggctaattttgtatttttagtagagacagggtttcaccatgttggccaggctggccttgaactcctgacctcaggttatccgcccgccttggcctcccacagtgctgaaattacagatgtgagccactgcgcccagccatgagatcaaatatttcatagccaaatcttgattcaaaacctatttactaagcatctaaccatgttcaaggtctaaccatrcttatttacctgattcttaatagttatctttccataagccagaagtttaatctatattcaaattctgattctactaggtgccttagggcacatattcctttcttagcttcctctttctgtttattttttaaattggaataataagcattccttcttacctcactagacgttaggattaagttaggataacacatgtaacatgctttagaaatacaattggcattaggaagtactctgatttattagctatttttattaccttcttttttgaagtgtcaaagttgtttgatttctccgataggttcctttgtgtctcgtgtaagatatcattcctccttctctttatttattaaaatt

SEQ ID NO: 564705 - DNA, 558 bp, Homo sapiens
ccaccaacctgcacaaaagacctataaatatggggcaaaaagtcttcctgactcaagggtttaaaaccactgatcatgcattattgtacaaataggctattctgccccaagggtgactcctgagaagctagtctttaaaatatcatcacagacatccctgtggatgtggaagactgtgcattctcaagctgtaccttcttggaagcaatgagagagggatgaaatatgctacacattttgagatcctcaccaaatgtgggaccagaaaatgaaaactttctgatatgtgctatcagcctgcacaacacacatgcatccagagacaaaaggtaaaaatataactggtaattaaacataagttttgaccagtaagtggcttatgccaatccaggaacacatcctargtagcagagcaaaaaaagtaaaaacaaggagaaaggggggaaaaacaaggggaaaaaaaatctagcagagatatgagaggctaaacatagttaaggaaatagactttgagaattagttcagtcaagtaactaaacaaataaacaaaatggccaa

SEQ ID NO: 564706 - DNA, 485 bp, Homo sapiens
gcgagactttgcctcaaaaaaaaaaaaaaaaaaaaaagattgcaaatggaagcaaagatgcatgaggattaaracactgcaatcttcaatgcttgaacaactaaaataggagaagcagcatgtttatgaaaggaaaggggacacttgctgttagagaatgttgagccaaggatgaaaggggaatattcagagagaaacatccaggaggcaggtggtgacgtggagctggaaattccaataagaagctggcataggttttgggctgtccttagagaggtgacgggagaaagcatgagaagagatacatgaatatatcacgtggacaatggaagcaagtgaagacctgtatatgtaattaatacttgctttttaaaatttttttttaattttaaatttttgtttattctttttaaataaagatagggtttcgccatgttgcccaggctggttttgaactcctgggctcaagcaatctgcccgcctca

SEQ ID NO: 564707 - DNA, 603 bp, Homo sapiens
ggctctattttgttttatagatctgtgtgtctgttttyagccagtaccatactgttttgattacttcagctctgtgatattgtttgaaatcagaatgtgtgaattccccagctattttatcattctcaagattgtcttggctattcaaggactttttaacccatttatgcctagtattccactattagaatgctaagtatgtgggagttatttatatcctattgctgaatgtcattgccaaggtctgattgcaaaaattcaaaaaattgcaacctcaggcataaatgggttaatttcatacaaattgtaggattgttttttctatttgtgtgaaaaatgccatgagaattttgatagagatcgcactgaacctgtagatcactttgggtaaggtggacattttgacaatattaattgttctaatccataaatatggtatatcacttcatttgtttgtttcttgttcaatttatttcatcaatgtcttatacttttcggtgtacaaatctttccactccttggctacatttatttttaaatgttttattatttttgaagatattataaatgcaattattatcttagcctttttttaaaaaatat

SEQ ID NO: 564708 - DNA, 578 bp, Homo sapiens
gttccacatggctggagaggcctcagaatcatggcaggaggtgaaaggcacttcttacatggcagtggcaagacaaaatgagaaagatgcaaaagcagaaactcctgataaaaccatcagacttcgtgagacttattcactatcacaagtacagtatgggagaaactacccctatgattcaaattatctcccactgagtttctcccacaacatgtgggagttatgagagtacaagtaaagatgagatttgggtggggacacagtcaaaccatatcatcctgctataatgytattaaggatggaaaagcaacccagtagcctatctgcctaatctcaggtagcaacaacaacaaataatctgccctaatcaaagccatcatttgagagacaaaagatggacacttttaaatgtattatgattataaaggaagcaaatgggtaataagtattttatatttctagatttctattggttgatataatttttattctagagccttccccctttatgctctgtgatgttttctccatttcctttcctcaagccctccctctcctcttctaccactaacttataa

SEQ ID NO: 564709 - DNA, 578 bp, Homo sapiens
gttccacatggctggagaggcctcagaatcatggcaggaggtgaaaggcacttcttacatggcagtggcaagacaaaatgagaaagatgcaaaagcagaaactcctgataaaaccatcagacttcgtgagacttattcactatcacaagtacagtatgggagaaactacccctatgattcaaattatctcccactgagtttctcccacaacatgtgggagttatgagagtacaagtaaagatgagatttgggtggggacacagtcaaaccatatcatcctgctataatgctattaaggatggaaaagcaacccagtagcctatctgcctaatctcaggtagcaacaacaacaaataatctgccctaatcaaagccatcatttgagagacaaaagatggacacttttaaatgtattatgattataaaggaagcaaatgggtaataagtattttatatttctagatttctattggttgatayaatttttattctagagccttccccctttatgctctgtgatgttttctccatttcctttcctcaagccctccctctcctcttctaccactaacttataa

SEQ ID NO: 564710 - DNA, 576 bp, Homo sapiens
ctatttcttactgagtcaatttcattagtttgtgtctttataggaatttgtctatttyatctaagttttggcacacagtcggttatagcagtcccttaaaacctttcaatttctgaaaggtttgtagtaatattttttaattcctgattttagtaatttatttcttctatttcacttactccagcaaaagtctgtcagttttgttgatctttgcaatgaactgacttttggctctgttttttctattgagtttttaatctctctttcattcattaatactcttacctgcttggtttgaatattatttccaattctcttctctagtttcttaatgtggaagggtagaaaataattgatttgtgatcactcttctttcttactatgagtctatagctataaatttccctctgatcacttggttagctacatggcataactttaatgtttcatatcttcctttgagccactggttatttagtagtatgctgctaaatttccacatattcatgaatttacaaattaccttttgttatttatttcacattaattccatattgaccagagaacatgtactac

SEQ ID NO: 564711 - DNA, 576 bp, Homo sapiens
cctaggaccccaaagcacagtggcaaagcttgcccagaaactcaagttttgactgctggaataggcaattcccctctgccttgggctggtccaaatgcccctccatgaaccagcactagctgagtccagcgcagatttattttccaatgggacaaggcagtagcgagttcaatgtaaagcccccaagtttctgtyctctctctctccccaaagtgcaaagatttcttctctgtgctgcatggccattgccaggggtagggttggggtggcactggtgattcaagactctctctcctgtcgctctcaatgcctcttttggtgatgtgaagttagaaccatgtactgtgattgctcacctgatttttggttcttgtgacagtgcttttctgtgtgtatatagttgttaaaatgtggtgttccagcgagagggatgaatgatgtaggcttctaatctgccatattgctctttcctgatttctatttctttgttaaagttcgcattttgttcatgtattgttttcctgatttcatttggctgtatatctgtgttctcttgtgttttgttgagcttatttt

SEQ ID NO: 564712 - DNA, 597 bp, Homo sapiens
aaaaacaatacagtataacaactatttacatagcatttgcattgtattaggtattttaagtaacctagagatgatttaagttataaaggaagatgtgcataggttatatggaagtaatatgccattttatatcaggttcttgagcattcmtgaattttggtattcatgggggtcctggaaccaatttcctgcagatactaagagacagttgtactgtaagtcatcatgttcagtgcagcatgttgtttcatggtatttctatattacagtttacttacaattcttaacagacatttggacatctttttccattagttttgtaaaggggaacacataaggctgcatattaatcatctactatccacaaacagtttcatgtatttctgaatccagaccttcagttcttaaatatcaaagctccatgtgaggtgtgtgtgtctgtgtaaattaaccttaagaacttttgttatacgccatgtgcaagattgggtataaaaaaaaaaagtagctattcctaagattcctgtcaaggctatgccatacaacattacatccctaaaacaggtgtttctggcctgcatgcatagataaaggtta

SEQ ID NO: 564713 - DNA, 380 bp, Homo sapiens
ttttgacttctattagaaaagggagagaatcaagaacatatcttcatatatgattgcatttccatgaaaaaaccatggcagtrcacaaaatcaataaataaaataaataaattttaaaagcagccaggggaaggatggggtgagaattagattgaaaggcagactccatatatacacttttaaatttaatttttgaaccacacacgtttattacttatccaaacattaaatgaatagtagaaaacacaaagttaaaattacaaaatggtaaatgaaaatatatatataaaaaaaaaaaaaaacaggaaaaaccagtaaaatctcttcaaaaattcttttccctatgttcttgcttggggaactctttctttcctttcttg

SEQ ID NO: 564714 - DNA, 554 bp, Homo sapiens
tgtaaatcatttatatccttagtatgcagactaacagagaaaacaattaaaaataataactaaaataatttgttaagagacaggcaatataaaagatataaattgtgacatcaaaaatccaaaatattggaagacaatggagttgaagtgtgcagttctttttgtttcttttttttccctttgtgatcagttagattatcagtttaaataacttgttataactataggatgcttattgtaagccacatggtaatgacaaagtgaaaacctayaatagagacactaaagttacaaagcaaggaatcatagcatgctcctggagaaaatcacttaatcacaaaagaagagagtatgagaggaagaaggttaaaaaaaaagggatctacaaaacaattagaaaacaagtaacaaaaaggcagtactaaagcccttacctatccataattaccttgaatgtaaaagatttaaattttacaattagaagacatagatggctgaatggattaaaaaacaaagacccaactatatgctcctcacaagaaacccaccttcac

SEQ ID NO: 564715 - DNA, 603 bp, Homo sapiens
aaaaatcttcaacaaaatactagcaaactaagttcaacaatatattagaaagattattcattgtgacccagtggtatttatccctgggatgcaaggatggttcsacatacacaaatcaaacaacatcatacattataccaaaagagtgaaagagaaaaaccatatgatcgtttcaattgatgctgaaaaagcatttgataaaattcaacatcccttcatgataaaaacctcaaaaaactgggtatttaagtattattcctcaacataataaacaccatatatgacagacccacagctggtatcatactgaatggggaaaaaccaaaagcctttactgtaagatatgaaagacaattaggatgcccactttcaccactgttgttcaacacagcactcgaagttctagctagagtaatcagtcaaaagaaagaaataattagaaaggaagaagtcaaagtacccttgtttgcagataatatgattttatattcggaaaaacctgaagacgccaccaaaacaatattagaactgataagttcagtaaagttgcagaatacaacatcaacatccaaaaatcagtagcatttctataggccaacagtg

SEQ ID NO: 564716 - DNA, 603 bp, Homo sapiens
aaaaatcttcaacaaaatactagcaaactaagttcaacaatatattagaaagattattcattgtgacccagtggtatttatccctgggatgcaaggatggttcgacatacacaaatcaaacaacatcatacattataccaaaagagtgaaagagaaaaaccatatgatcrtttcaattgatgctgaaaaagcatttgataaaattcaacatcccttcatgataaaaacctcaaaaaactgggtatttaagtattattcctcaacataataaacaccatatatgacagacccacagctggtatcatactgaatggggaaaaaccaaaagcctttactgtaagatatgaaagacaattaggatgcccactttcaccactgttgttcaacacagcactcgaagttctagctagagtaatcagtcaaaagaaagaaataattagaaaggaagaagtcaaagtacccttgtttgcagataatatgattttatattcggaaaaacctgaagacgccaccaaaacaatattagaactgataagttcagtaaagttgcagaatacaacatcaacatccaaaaatcagtagcatttctataggccaacagtg

SEQ ID NO: 564717 - DNA, 603 bp, Homo sapiens
aaaaatcttcaacaaaatactagcaaactaagttcaacaatatattagaaagattattcattgtgacccagtggtatttatccctgggatgcaaggatggttcgacatacacaaatcaaacaacatcatacattataccaaaagagtgaaagagaaaaaccatatgatcgtttcaattgatgctgaaaaagcatttgataaaattcaacatcccttcatgataaaaacctcaaaaaactgggtatttaagtattattcctcaacataataaacaccatatatgacagacccacagctggtatcatactgaatggggaaaaacmaaaagcctttactgtaagatatgaaagacaattaggatgcccactttcaccactgttgttcaacacagcactcgaagttctagctagagtaatcagtcaaaagaaagaaataattagaaaggaagaagtcaaagtacccttgtttgcagataatatgattttatattcggaaaaacctgaagacgccaccaaaacaatattagaactgataagttcagtaaagttgcagaatacaacatcaacatccaaaaatcagtagcatttctataggccaacagtg

SEQ ID NO: 564718 - DNA, 603 bp, Homo sapiens
aaaaatcttcaacaaaatactagcaaactaagttcaacaatatattagaaagattattcattgtgacccagtggtatttatccctgggatgcaaggatggttcgacatacacaaatcaaacaacatcatacattataccaaaagagtgaaagagaaaaaccatatgatcgtttcaattgatgctgaaaaagcatttgataaaattcaacatcccttcatgataaaaacctcaaaaaactgggtatttaagtattattcctcaacataataaacaccatatatgacagacccacagctggtatcatactgaatggggaaaaaccraaagcctttactgtaagatatgaaagacaattaggatgcccactttcaccactgttgttcaacacagcactcgaagttctagctagagtaatcagtcaaaagaaagaaataattagaaaggaagaagtcaaagtacccttgtttgcagataatatgattttatattcggaaaaacctgaagacgccaccaaaacaatattagaactgataagttcagtaaagttgcagaatacaacatcaacatccaaaaatcagtagcatttctataggccaacagtg

SEQ ID NO: 564719 - DNA, 550 bp, Homo sapiens
tagagaacccagaaacaaatccatacatctacagttaactcatttttgacacaggtgccaagaacaaacattaagaaagggacaatgtcttcaataaatggtgttgggaaaactggatatccatatgcagaagaacgaaactacacccctctttcaccatatgcaaaaaamcaaatcaaaactaattgaagatttaaatctaagatcttaaactatgaaatcactaaaagaaaggattggggaaatgctaccacaagttggactgggcaaactcaggtaaccaaagcaaaaatggacaaatgggatcacatcaagtttaacagtttctgcacagcaaaggaaacacaagtgaaggaaaaatgcacagagcgggagaaaacatttgcaaactatccatctgacaaggaattgctaaccagaatatgtgaagagctcaaacaactcataggaaaaaaatctaatagaccaatgaataaatggacaaagatctgaatagacatttctcaaaagaagatacacaaatgccaaacaggaacatgaaaaggtgctc

SEQ ID NO: 564720 - DNA, 360 bp, Homo sapiens
tccatcacagtcttcttccactaatggagatacaatgagaggcttacatgtttactgttgttttctttaggaacagagaatcagaggtggagatttggtgaaaaaatagatgaccacagtaagggaaattatggcatagtaaaaagtgaaagaaaaagacaagctcytcagtgacttcctcatttttgctgcattcctttttctctacacaatacaaaaggcaaccaagagcaataaaaaagggataggaaacttgtactgagggcaactgctgggtcgaacattaaagtgaaatataaaagcaatttatgtggttctttactcatccatttaaaaaattaacagaatgagtgatcaaat

SEQ ID NO: 564721 - DNA, 622 bp, Homo sapiens
aacatttataaaaatcagtcatttcacaggccacatagaaaaccttaataaattcataaactaatgactcagttattttctccaacccaaaggcagtacaaataaaaataacttattaaataacacaaaactaacaaattaaagattctgacaactattaaataagtcatgagccaatgagaaaattaaaactaaagttactaattacttgaaattacaacaaaaacactatacatccaaacctaagtgaagtgaccaaagctgtacttactcaagggaaaactagtttctctgcctgaaatgtgttttctttcattctttgtattttaaaatccaattcattggcaaaaccattctgtgccttctatttggaattaatcttccttacccctgtacttccccaacatcttttcaaaatcacttcatttcacatttattctgcttggctttacagacacttgagtccaagtccatctcaacccagtggacttttcagctatcagagtgaacaggcctgctttaacacttctgtatcacctmagggcacagcactgttaaagtcactgttctctaatcgtaagagcataggtttggaagatcagttagatctcagttagaattt

SEQ ID NO: 564722 - DNA, 597 bp, Homo sapiens
tttgtgggaaatagaattaaaggttaaaattraaatataaactttatttctcaacatacgatttgtcaagttcaagatgataagcaatgataccagccatttagttcatccttaaagaaccgagggtcctgggaattcatgtcaatgcagtcttttttacagtaataatgtaatgttaataacagaagaaaaatgcatgccttttaaagaattgttaagattaggaaacaaaaataagtcagaaggagccaaattaggagtatgaggtggatgcctaacgggtttccatcaaaatcctaacaaaattgcctttgtttgatgagaggaatgagcaggagcattatgttggagaaggactctctagtgaagctttattgaacattttcctgctaaagcttttactaactttctcaaaaatactttcataataagcagatgttatcattcattgtccctccagaaagtcaagcaaaatctcttgaacatcccaaaagactgttgccaagacctttgttcttgactgatttgcttttgctttggctggacccttccacctgttggtagccattgctttgattgtgctttgtcttcaggatc

SEQ ID NO: 564723 - DNA, 597 bp, Homo sapiens
tttgtgggaaatagaattaaaggttaaaattgaaatataaactttatttctcaacatacgatttgtcaagttcaagatgataagcaatgataccagccatttagttcatccttaaagaaccgagggtcctgggaattcatgtcaatgcagtcttttttacagtaataatgtaatgttaataacagaagaaaaatgcatgccttttaaagaattgttaagattaggaaacaaaaataagtcagaaggagccaaattaggagtatgaggtggatgcctaacggktttccatcaaaatcctaacaaaattgcctttgtttgatgagaggaatgagcaggagcattatgttggagaaggactctctagtgaagctttattgaacattttcctgctaaagcttttactaactttctcaaaaatactttcataataagcagatgttatcattcattgtccctccagaaagtcaagcaaaatctcttgaacatcccaaaagactgttgccaagacctttgttcttgactgatttgcttttgctttggctggacccttccacctgttggtagccattgctttgattgtgctttgtcttcaggatc

SEQ ID NO: 564724 - DNA, 523 bp, Homo sapiens
ggatatgttaatttacttcactataggaaccattttactatctatatgtatttcacaaaatcatatgctttaaatatacacaataagaattatttttaaaagatttcggtaccccactttcaataattgataaaacgaagactttagcaacactatcattaactgatatttataaaacactccactgaatgacttcagagtactcattcttttcaagtgcacatgtaacattctccaggatagactatgtratagagcccaaaacaagtctcagtaaaatttttaaaaagattgtgattgtacaaagcatgtgctctgaccacaatggaatttagagatctataagggaaagaaacctgagaaaacatcaaatatttggaaattaaacaacacacttctaaataacccatgagttgaagaaatcacaagggaaattaagttttactgaatgaaaacaaaaacacaacatcaaaatctatgggatatatctaaaatagtacttagaaataaatataactttgat

SEQ ID NO: 564725 - DNA, 562 bp, Homo sapiens
agatgtagttcagaagcaaagtatgtcaggaactctgaagggtctgagattttactgtatttgtaagctaacaagttagcctgccactatttcatggaggctcagcaaatgggaaactcctgggtcaaagacaaaggctttgatttctcacaccaccagttccctacaccccarttccccagatcaatgtgaagagggccagatgacacccgcatatgcattgagttgcattacaagtgaggaactctgaacttagggaacccgaatcttttatattgggcaataaaggtgtgtgccctttgctctagagacattgtttttattattttgagcagtaaacattcttgctgtttgttccagagggagacactatctctatcttccaaggctatgaaacattcaatccttgattacatagtctggaacaaggaaatttaagagactcttagagaattgtctctcaacagagtttagcctttagtaagagcttggacacctcatccattttaaatggtagagggtgaggggtggggaagatagattattggaaaagattctagta

SEQ ID NO: 564726 - DNA, 667 bp, Homo sapiens
tcactaaaccttaaagtttcaaaatgatcttctttgactctatgtcttacatccaagttgtgctgatgcaagaggtgggcttccatggccttgagcagctctgcccctgtgtctttgtggggtacagctcccctcttggctgctttcatgggctggcattgagtgtctgtggcttttccaggtgcacaatgcaagmtgtgagtggatctaccattctggggtctggacgatggtggccccattttcacagctccaccaggcagtgccccagtggggactctgtgtgggggctctgaccccccatttcccttccacaatcccctagcagaggttctccatgaggcctatacccctgcagcaaacttctgcctgggcatccaggcatttccatatatgctctgaaatcttcatagaggttcttaaacctcaatctttgacttctgtgcacccacagattcaatatcacatgtaaactgcaaaggcttaagcttgcaccctctgaagccacagcctgagctgtacattggtcccttttagccatggctagagcagctgggatgcagggcaccaactcccaaggctgcacacagcaagtggccttggacctggcccaggaaaccatttttccctcttaggcctccaggcctgtgatgggaagggctgccat

SEQ ID NO: 564727 - DNA, 578 bp, Homo sapiens
gagcagagccggatactgtcttgagaggatctttgagctgagcattgaaggataagtaggtgttttccagaggcaaatgaaaaggaacaaacatgtttaaaagaataaagtgaaagaacatggcccattatagggacaataagtagttcattaagtccagtacatattgaatatgtggtgaagtactagaaaataaagccagaaaaatgacaccagaatcatgctggaatccctttggtgattatgagtgagttggacttagtagtgtgtgcctagaaacggatggctgctgtgggccaggtgagagatgatgagggccaaccaaaaggcaactccaatgtgaatgatgatgagaaaacagtaaagaacttcaggatttggtgactaattagatggagggaatragaggaagaaacgaagaatgactcataaaaagctataaaatctcattctcctctatcctgggtagttctttctatctagatactaatatactaataattgtttccctccaccttaatctttcccttcccttcccatttatctcaattattctctttcctgttccctaaaagggt

SEQ ID NO: 564728 - DNA, 554 bp, Homo sapiens
gtgacctcagaaatccactgattttttgccaaagaaataggctgtgataagtaagttagtatcagtctcttttctcatatcaactgcttgccatgttctttggtgagttggtcacagtctgttcaactagaaaagcagttctggcagcagggtaggaaaacaagaagtgtcaggatgactaaccacagtttcagagaagtagaagatggcttttgacagataaaagcaggattattattttggagtgttgcatgcctcctggttcatgccttggtccagaaagrgattgctatcattttctccagttgcagacacaccaatcaactttctgcttaaaaggaatttgactaacaattgatattagaggtcaaaaacactttatatccttatctatcagtcagtcccagctcttttggtagaacattcagctgttaggacaagaagctggtgtcttacctgtcacccacacccagaacagcacctgataattcagttatctccccctaccttttattgttttatcgctctgaaatgggggatctcaataaaataaa

SEQ ID NO: 564729 - DNA, 517 bp, Homo sapiens
ccagctggagggagtccaggtgcgccaaagtgaaggggacggaggtgcatctgggtccaccacgggtgtggggactgcttcattggcaccttctggttggggctgtgagstcacgggctggaaaaaggaccatttccttcagttagtttgcttcctcctcccaggcaagacaacccacaggcccaggtggcactggcacccaatttcctcacattatacatttttatttgcaaagagtctagcaagaaaggacctacccaagtacaagggattgtcatcaaggttacaaggaggggtgactggcctatgttggccccggcctcactaggattgtctttgtgatggtggacttacacgcatatgtccaatgagtaaaagcaccccacctatggctcacccttgcccagcagtgccaccctctttgtcatctgaagctgcagccactgggagctaacaggtagatctggccacctggtctctgcaactcagaaaaccactcccacctcccacaaataaa

SEQ ID NO: 564730 - DNA, 517 bp, Homo sapiens
ccagctggagggagtccaggtgcgccaaagtgaaggggacggaggtgcatctgggtccaccacgggtgtggggactgcttcattggcaccttctggttggggctgtgagctcacgggctggaaaaaggaccatttccttcagttagtttgcttcctcctcccaggcaagacaacccacaggcccaggtggcactggcacccaatttcctcacattatacatttttatttgcaaagagtctagcaagaaaggacctaccyaagtacaagggattgtcatcaaggttacaaggaggggtgactggcctatgttggccccggcctcactaggattgtctttgtgatggtggacttacacgcatatgtccaatgagtaaaagcaccccacctatggctcacccttgcccagcagtgccaccctctttgtcatctgaagctgcagccactgggagctaacaggtagatctggccacctggtctctgcaactcagaaaaccactcccacctcccacaaataaa

SEQ ID NO: 564731 - DNA, 517 bp, Homo sapiens
ccagctggagggagtccaggtgcgccaaagtgaaggggacggaggtgcatctgggtccaccacgggtgtggggactgcttcattggcaccttctggttggggctgtgagctcacgggctggaaaaaggaccatttccttcagttagtttgcttcctcctcccaggcaagacaacccacaggcccaggtggcactggcacccaatttcctcacattatacatttttatttgcaaagagtctagcaagaaaggacctacccaagtacaagggattgtcatcaaggttacaaggaggggtgactggcctatgttggccccggcctcactaggattgtctttgtgatggtggacttacacrcatatgtccaatgagtaaaagcaccccacctatggctcacccttgcccagcagtgccaccctctttgtcatctgaagctgcagccactgggagctaacaggtagatctggccacctggtctctgcaactcagaaaaccactcccacctcccacaaataaa

SEQ ID NO: 564732 - DNA, 583 bp, Homo sapiens
tatggcaaacatatttaagggaataattaaggaaaacttccctgcccttgctaaagatctagacatccaaatacaagaagttcaaagaacatctggaaaattcattagaaaaagatcattgcataggcacatagtcttcaggttatctaaagtcaagatgaaggaaagaatcttaagagctgtgaggcaaaaggatcaggtaacctataaagaaaaacctatcagattaatagcagatttctcaggagaaaccctacaagctagaagggacygaggtcctatctctagcctcctgaaacaaaacaattatcagccaagaattttgtatccagcaaaactacgcttcataaatgaaggaaagatacagtctttttcagacaaataaatgctgacagaattcaccactaccaagccagcactacaagaactgctaaaaggagctctaaatcttgaaacaaatcctcaaaatacaccaaaatataacctccttaaagcataaatctcaggggacctataaaacaataacaacaaaattgaaaaacaaaaacaaggtattcagggcaacaactagcatgatgaatag

SEQ ID NO: 564733 - DNA, 486 bp, Homo sapiens
gaactcttcattttttatggctgcatagtattccatggtgtgtatgtgccacattttcttaatccagtctatcgttcaggcttcaagtcaatagcgaaggtattcctgggtaggcaccagttgtggtgaaggcaggtgggtagatgtaatactcagtggtgggctgaggtcccagccttgatgagtgtggctggggaagctcttaattaggttttatcagggttaagagtaggaactaccagagctcccatgccaggtcaccaggaaagctgttcacctcacagcctsgctcctgtccttgtgttttagctattcacatcagacaggcatctcttttcatctgtaggaatgttgatgttccaagtagggaggaattgtgactcttcctctgtcggcctgaatctggggtgtgcttcttctgtggggctgcactcaccctggatttttccagaaaggctgtctataagtgcatccagtgtttctgtt

SEQ ID NO: 564734 - DNA, 457 bp, Homo sapiens
tgttaaacatttaccagtacagaacattttgygagctcatttctgaggttaggatgtggatggagtagtgacaatgaagggactaagggctgaagagcctaaggttgagttcttgctgaacaggtgcgggaggaggcaggcttggaccctgaataatcctgcaggtgccttgggtgtctaaagatgtctgtagttagcagccaggatgatagaactagcatttaccatttcctgtggccctcaggcacccactttctcttcttgagtaagtttactcccacaggagtagaagtgagagaaggaagagaagcagctggagagtgataagaaatgagaaggaaaggaagaaggaaaagaaaaattaggaagaagaagaataaaagaagtaaaaggcaaagggcaagaataaagatagatggaagggaagagaggacaaagaagaaaaacaagagaaaga

SEQ ID NO: 564735 - DNA, 553 bp, Homo sapiens
gcaaaggaaacaatcaacaaactgaagagaaagctcacagaatgggagaaaatatttgccaatcgccccagtgacaagagattaataaccagaacatataagaagctcaaacaactctataggaaaaaaatctaataatccaatttagaaatgggcaagcaatttgaatagacgtatctcaaaagacatacaaacggcaaacagccatattaaaaggcgcccagcatcttgatcattacagaaatgcaaatcaaaactacaatgagatatcacctcaccacagctaaaatagcttacatcaacaagacaggcaataactaatgctggcaaggatgtggagaaaagggaacccttgtgtgctgttggtgagaatgtaaattggtacaactgctatgtagarcagtttagagtttcctcaaaaaaaaaaaaaaaaaaactaaaaattgagttaccatttgatcccacaagcccactgctgggtatgtacccaaaagaaaggtaatcagtatatagaagcaatatctgagctcctacgttagttgcagcactgttc

SEQ ID NO: 564736 - DNA, 573 bp, Homo sapiens
aaacgacatgcattgttcctagattcagagtggtcaaagcttatgatttatgggsggcagggataacatttagatgatttaggttataaattattctgactccaagggatacaacagttcagcagtaagagaatagcatcatgttggtgtgtatccaggggcaggagctgatgctttccagggacacaatgacctacactgatacaagctgaatctatcactagtttaatatatgactaaagagttgaaacatcttttatgaaacaaacgatattttattgaaagaaatacataagtctgtttattcttaagcaatagactggtcaagggaaaatatattattttacaaagaaacagagtacttttcaattctatttttttttttttttgagaccgtgtcttgccctgtcacccaggctggagtgcagtggcatgatctcggctcactgcaacctccacctcccaggttcaagtgattctcctgcctcagcctcctgagtagctgtgattacaggcacataccaccacacctgtctaatttttgtatttttagtagagacagggtttcatcat

SEQ ID NO: 564737 - DNA, 573 bp, Homo sapiens
aaacgacatgcattgttcctagattcagagtggtcaaagcttatgatttatgggcggcagggataacatttagatgatttaggttataaattattctgactccaagggatacaacagttcagcagtaagagaatagcatcatgttggtgtgtatccaggggcaggagctgatgctttccagggacacaatgacctacactgatacaagctgaatctatcactagtttaatatatgactaaagagttgaaacatcttttatgaaacaaacgatattttattgaaagaaatacataagtctgtttattcttaagcaatagamtggtcaagggaaaatatattattttacaaagaaacagagtacttttcaattctatttttttttttttttgagaccgtgtcttgccctgtcacccaggctggagtgcagtggcatgatctcggctcactgcaacctccacctcccaggttcaagtgattctcctgcctcagcctcctgagtagctgtgattacaggcacataccaccacacctgtctaatttttgtatttttagtagagacagggtttcatcat

SEQ ID NO: 564738 - DNA, 260 bp, Homo sapiens
aaatagaattcctcctggggggayttgccgtctagttctggtggaagtcttacatgcagagaaacacttaacaacatttacatgtagaggaacactggaaacacttaaatctaaatctaaactcatggttacagaccaaagagtatgaatttatgtgggaagctatgcaaatggcaacttgtgtgcttatttattttcaggggaggtattttactcctccagtcagtaccaagtttggagataggtaatttccctatttt

SEQ ID NO: 564739 - DNA, 547 bp, Homo sapiens
gtgccaccacatccagctaatttttagtagagatgaggtttcaccatgttggtcatgctgctcttaaactcctgaccttgtgatctgctcgtcttgattttccaaagtgctgggattacaggcgtgagccaccatgcccagccggcattcttttacatgtactgaatatccctttggtgtttggtgccttgatttcctttttctaacagaatagaaggcagctagatttttttttwaattaattaattaattttttattatacttaaagttctagggtacatgtgcacaacgtgcaggtttgttacatatgtatacatgtgccatgttggtgtactgcacccattaactcgtcatttacattaggtatatctcctaatgctatcccttccccctcccccaaccccatgacaggccctggtgtgtgatgttccccttcctgtgtcgaagtgttctcattgttcaattcccacctatgagtgggaacatgcggtgtttgttttttttttgtccttgcaatagtttgctaagaatgatggtttccagctt

SEQ ID NO: 564740 - DNA, 547 bp, Homo sapiens
gtgccaccacatccagctaatttttagtagagatgaggtttcaccatgttggtcatgctgctcttaaactcctgaccttgtgatctgctcgtcttgattttccaaagtgctgggattacaggcgtgagccaccatgcccagccggcattcttttacatgtactgaatatccctttggtgtttggtgccttgatttcctttttctaacagaatagaaggcagctagattttttttttaattaattaattaattttttattatacttwaagttctagggtacatgtgcacaacgtgcaggtttgttacatatgtatacatgtgccatgttggtgtactgcacccattaactcgtcatttacattaggtatatctcctaatgctatcccttccccctcccccaaccccatgacaggccctggtgtgtgatgttccccttcctgtgtcgaagtgttctcattgttcaattcccacctatgagtgggaacatgcggtgtttgttttttttttgtccttgcaatagtttgctaagaatgatggtttccagctt

SEQ ID NO: 564741 - DNA, 564 bp, Homo sapiens
gggtcaggtttctcccatccacctcctctcctggcatgaaaagaagataatgcccatggtgcctccaagggagagggcaatggggcagccaagactgacatttcagacaggcctggctgggttgctgctgctcagcctgcctgtgtctgctttaatcccacccactctgggcagcaggatctagtttccagcatgaagatgtgtgcaacttgatcttacctgcttgtttgtaactaacccctcatccatggcaatttttaccccaagccggggatacagaatacatatatggctttaagaatatctcttaagaataatctggttatttctcaagggtcagtggacagcagttagaaaattatgatctagttagtaccttctgagaatgaagatgggcatggacttcttttttttattttacattttgttttattgtgtgggtgctttttccttttttaaaaaaaatatactttaagttctgagatacacatgcacaacgtgcaggtgtgggtttgttacataggtatacaygtgccgtggtggtttgctgcacccatcaaccca

SEQ ID NO: 564742 - DNA, 576 bp, Homo sapiens
tttaactcttcctctctggtttggaaagaaggataaccaagcggtatggttttggtcattacatcaaaagtcctatcagtaggaaattatggcatcttcacatttaacatgtatcagagaaatttcattatggagtttaaactatgtgccgttgtctattcttgtacataggagggttaacactctaagaggaaaaacataaaagcaaacatatttgcatcacaccctctcaactacaaacctgaccacaagtgtttgcatctgaatcacaggagaggattatgagagctcacctagttcttcccacgcacagtcttgcacatttcattgctttatagcaaagcatacactttttttattttgctaaatgtcattgaaatcaccaggcagcttttaaattaagtcatgccacttatttttaaataaacttttgagccttcatgacagagcaaacttttcagaagcctgagcttgctggcttttattctgagctgtaacctctgaacttytcactacggctcatttaaagagattataaccttcttctagggaggactgcaaaacaaaattacccaa

SEQ ID NO: 564743 - DNA, 363 bp, Homo sapiens
ctctcgacagatgaaattacaggtccctccctcaacatggggagattacaagatgagatttgggtggggacacagagccaaatcatatcaccccctccacccacaatcactgrgctgcctgagcttcctgtctggtaccctcatttcctcatcctcctatggctaatgctgcttcatctttttaagacaagttctggtgtcacctcctctaggtaccctccctgaccttcaacctgagttagatattgctcacttgtgtcattgaacctgggacaccccttcaacctagcatttactgcactgttttgaaattatatcagtctgactattctatgaacagctgagtgcgggtgcattatccct

SEQ ID NO: 564744 - DNA, 566 bp, Homo sapiens
actctttgtggcccttccttgcatcctctcctgcattaagagatcattctgtgatttccatcagcttagaaagctgccttggctgtccttgatatgttggcttgtccatgacagatcgttcaccttgcaaaactttgggagtttccattcacagagaatatgatgttgtgagaaaaaaaaaagaatggataaaagtcacatgtgacatagcttgtgcaatgtggtggtcctggtccttcaggtgtaacatgttacctcctgaacattatgcacaatcctgaaatcttctactccatcagtgtggggatctcacattggttggcttaaatacctttgtgtctatccatcagcaaagcccaaacraaattagacagatacagtcttcaactggactccagggagagggccaccccccttcaggaggttgaagcctgacctaaagtgctccattcttctccccagcactggcctgtgatgtagccagctgcccagcccccaccccatctgagccagctgccctcccagaggtaggtagtgtgacttgggataactttgtgggagactca

SEQ ID NO: 564745 - DNA, 532 bp, Homo sapiens
caaaggagtccaaaaaaatcccaggagttagtgggggagatacagagaagttagagaagtaaaagcatcctgaaagcttcattttagtatggcgtgtatggctgattttaattaaataaaagctatactaaaaagtctcctcttgaaacattgagatgtttactgtattggtataaaaatacaaacttgaagacactcttcaaaatatatgtattcaccaaaaaatagaaacatttaaatgattccaaatcatcaaatgccragagagtagctaaaaataaaaactctttcaatacagtaaaacttggtgagggaaaaaataggaacaaataatacataatagtacagaaagcataaaataagataaaataagaccaaacatgtccttcattttaattaccacaattgtatttaacatctctattataaataatgataaaaaggtattaaaccatcattaaaaacaatcattatgatgattattttcataagtgtacaatcgtgcactttaaaatatttgcagttatggtac

SEQ ID NO: 564746 - DNA, 532 bp, Homo sapiens
caaaggagtccaaaaaaatcccaggagttagtgggggagatacagagaagttagagaagtaaaagcatcctgaaagcttcattttagtatggcgtgtatggctgattttaattaaataaaagctatactaaaaagtctcctcttgaaacattgagatgtttactgtattggtataaaaatacaaacttgaagacactcttcaaaatatatgtattcaccaaaaaatagaaacatttaaatgattccaaatcatcaaatgccaagagagtagctaaaaataaaaactctttcaatacagtaaaacttggtgagggaaaaaataggaacaaataatacataatagtacagaaagcataaaataagataaaataagaccaaacatgtccttcattttaattaccacaattgtatttaacatctctrttataaataatgataaaaaggtattaaaccatcattaaaaacaatcattatgatgattattttcataagtgtacaatcgtgcactttaaaatatttgcagttatggtac

SEQ ID NO: 564747 - DNA, 575 bp, Homo sapiens
acttttgtccaaataagatacacaaatatccaaaaaaaaaaaaaaagctcaatgttagccatcagggaaatgcaaatcaaaatcacaatgagatatcagttcacatccactgggatggcaataataaagaagacaggtaattacaaatgttggtgagaatgtggagaaattagagccctcatacactgctagtgaaatgtaaagtgatgcagccactttggaaaacagtccagcagttcctcaacagattaaaagactagcttccatatgacctaaaaattttacttctaggtatatacttcactccaaggtaaaatggaggtatatattcacacaaatatcttgtatatgaatgtttatagcagcattactcataayagccaatatgtggaagcaacccaaatgtttatcaaccaataaatgaataaataaaatgtggtacatctatacagtggagtattatgtggcaatggaaaagaatgaagtactgttacatgctagagcatcggtaaatcttgaaaacattatgctaagtgaaagcagtcagtcacaaaaaaattgcataacatatgatt

SEQ ID NO: 564748 - DNA, 575 bp, Homo sapiens
acttttgtccaaataagatacacaaatatccaaaaaaaaaaaaaaagctcaatgttagccatcagggaaatgcaaatcaaaatcacaatgagatatcagttcacatccactgggatggcaataataaagaagacaggtaattacaaatgttggtgagaatgtggagaaattagagccctcatacactgctagtgaaatgtaaagtgatgcagccactttggaaaacagtccagcagttcctcaacagattaaaagactagcttccatatgacctaaaaattttacttctaggtatatacttcactccaaggtaaaatggaggtatatattcacacaaatatcttgtatatgaatgtttatagcagcattactcataacagccaawatgtggaagcaacccaaatgtttatcaaccaataaatgaataaataaaatgtggtacatctatacagtggagtattatgtggcaatggaaaagaatgaagtactgttacatgctagagcatcggtaaatcttgaaaacattatgctaagtgaaagcagtcagtcacaaaaaaattgcataacatatgatt

SEQ ID NO: 564749 - DNA, 572 bp, Homo sapiens
ggaaagtagaattttcatgaaagctttcttctcatcaccaagatggtgaactataatagcatcggctacwgctttcctccacaaagtcaatgatgaagaaagtatatagagaaaagtggaattgaaactaataacaacaaaagccatgagaaatccccagggagaaggagcactgttttggattgatgtgtgtgggaaagaggtgagaggggtgggaaagaggtgaggggggtgggaagagtgcagcaaatctggcaatgggcggctacacacagcagtaaaaaaaagcaaattaggaaaacaaacaaacaaacaaacaaaaactgtttaagctctgccatttggcttacttgcatttccatggagtaatcattgcttagctccttgccacacaaagcatgcacaactggctaaacactggggcaggtgttcatgggggaaatgtcaggatcagtgcaaaaggttttgtgaggtaaggagttgataagaacaggtagagactgagcagccttaggcattctctttccctacaaatcctaggctgatggattatcaatgttgcttctccctta

SEQ ID NO: 564750 - DNA, 572 bp, Homo sapiens
ggaaagtagaattttcatgaaagctttcttctcatcaccaagatggtgaactataatagcatcggctactgctttcctccacaaagtcaatgatgaagaaagtatatagagaaaagtggaattgaaactaataacaacaaaagccatgagaaatccccagggagaaggagcactgttttggattgatgtgtgtgggaaagaggtgagaggggtgggaaagaggtgaggggggtgggaagagtgcagcaaatctggcaatgggcggctacacacagcagtaaaaaaaagcaaattaggaaaacaaacaaacaaacaaacaaaaactgtttaagctctgccatttggcttacttgcatttccatggagtaatcattgcttagctccttgccacacaaagcatgcacaactggctaaacactggggcaggwgttcatgggggaaatgtcaggatcagtgcaaaaggttttgtgaggtaaggagttgataagaacaggtagagactgagcagccttaggcattctctttccctacaaatcctaggctgatggattatcaatgttgcttctccctta

SEQ ID NO: 564751 - DNA, 564 bp, Homo sapiens
ttatccagtcactgaattattatacctgagaaatcaaattagtcattcaaagacttatttggtgaccatgaaatcaaaaggaagcctatggtttgaatgagtttacagaatcctattttccttctagcttttatctggctcattgcttcattcatttattcattcattcattcagcagttcctgaactcgtgtatgccaggtactgtgctggacattaactcacaggactcgttgccctgggctttgttgggcagaccatgaaaaaagacttcatctccaacattacttttcctaggctcattgaagtgttaatgcaaatctaattttactaatagtacagctttttaaatctargattctggggttgaacaaaatattacttattgagtaattcctagaattccccaaaggacaggagtcctttttattttaggactttaggggtctattgttcactttgctgcttcacattattgattgcagaagctttaaccattagcaagattttcatttaggtagctgattctcaacgattgctttctcttttggggacagagaaaaag

SEQ ID NO: 564752 - DNA, 564 bp, Homo sapiens
ttatccagtcactgaattattatacctgagaaatcaaattagtcattcaaagacttatttggtgaccatgaaatcaaaaggaagcctatggtttgaatgagtttacagaatcctattttccttctagcttttatctggctcattgcttcattcatttattcattcattcattcagcagttcctgaactcgtgtatgccaggtactgtgctggacattaactcacaggactcgttgccctgggctttgttgggcagaccatgaaaaaagacttcatctccaacattacttttcctaggctcattgaagtgttaatgcaaatctaattttactaatagtacagctttttaaatctaggattctggggttgaacaaaatattacttattgagtaattcctagaattccccaaaggacaggagtcctttttattttargactttaggggtctattgttcactttgctgcttcacattattgattgcagaagctttaaccattagcaagattttcatttaggtagctgattctcaacgattgctttctcttttggggacagagaaaaag

SEQ ID NO: 564753 - DNA, 476 bp, Homo sapiens
acctgaatctgattaaacctctgactataaccatcagtttataagaaatacagggcactgaggaatattttaaggagctatattcgattcaaccacaagacaaattacctctttttttttaaacaaatacctgacaagaaaataaaaaataaaagggaaacttctagataaaaagaggcccaataatcayatcaatccattgtaatatgctgcccttgtttggatcttgatttgtgcaaactgctatacaaacaaataatgacaataagacaattaggaatattaaaacaatgagtagattttggacaatattaaagaatgattgtttcaggtcttacaatggcaatactcatttttcaaaacatttacaaagaaaataatatgattgctagaatttgctttaacataatccagtcatgatgagagagtgggtgtggagggggtataaataaggtgattgcccatatttgataatt

SEQ ID NO: 564754 - DNA, 504 bp, Homo sapiens
agagttattccactaattcccttgctggtcggtttaggactttccacctccactattgctctaggtactggaatagcaggcatttcaacctctgtcacgaccttccgtagcctgtctaatgacttctctgctagcatcacagacatatcacaaactttatcagtcctccaggcccaagttgactgtttagctgcagttgtcccccagaaccgctgaggccttgacttactgctgaaaaaggaggactctgyatatttttaaatgaagagtattgtttttacctaaatcaatctggcctggtgtatgacaacataaaaaaactcaaggacagagcccaaaaacttgccaaccaagcaagtaattacgctgaacccctttgggcactctctaattggatgtcctgggtcctcccaattcttagtcctttaatacctatttttctcctttatttggaccttgtatcttccatttagtttctcaattcatccaaaaccgtatccaggc

SEQ ID NO: 564755 - DNA, 504 bp, Homo sapiens
agagttattccactaattcccttgctggtcggtttaggactttccacctccactattgctctaggtactggaatagcaggcatttcaacctctgtcacgaccttccgtagcctgtctaatgacttctctgctagcatcacagacatatcacaaactttatcagtcctccaggcccaagttgactgtttagctgcagttgtcccccagaaccgctgaggccttgacttactgctgaaaaaggaggactctgtatattyttaaatgaagagtattgtttttacctaaatcaatctggcctggtgtatgacaacataaaaaaactcaaggacagagcccaaaaacttgccaaccaagcaagtaattacgctgaacccctttgggcactctctaattggatgtcctgggtcctcccaattcttagtcctttaatacctatttttctcctttatttggaccttgtatcttccatttagtttctcaattcatccaaaaccgtatccaggc

SEQ ID NO: 564756 - DNA, 504 bp, Homo sapiens
agagttattccactaattcccttgctggtcggtttaggactttccacctccactattgctctaggtactggaatagcaggcatttcaacctctgtcacgaccttccgtagcctgtctaatgacttctctgctagcatcacagacatatcacaaactttatcagtcctccaggcccaagttgactgtttagctgcagttgtcccccagaaccgctgaggccttgacttactgctgaaaaaggaggactctgtatatttttaaatgaagagtattgtttttacctaaatcaatctggcctggtgtatgacaacataaaaaaactcaaggacagagcccaaaaacttgccaaccaagcaagtaattacgctgaacccctttgggcactctctaattggatgtcctgggtcctcccaattcttagtcctttaataccyatttttctcctttatttggaccttgtatcttccatttagtttctcaattcatccaaaaccgtatccaggc

SEQ ID NO: 564757 - DNA, 598 bp, Homo sapiens
agattctgggcataatgggaaggctctatattttgattgacatggtatttaaatgagatataagtttgttggaatgcctctaactgtacacttaaaatgggtatcttctattgtatgcaagttatacctcaataaagtttgttttaaaaggtaaaaaaagtagggaataccaccacagattaccttttttstctcataatacatcattagaattgtgttgcccctgagtattctgaacacagtatgtgacacatcccttcaagggataagctacttgtccatgaataagctataatgtaagtatttttagagtaagaggttagcagaggtgaatgtacattttgtggccagagttctaaaatgtattgacccagttaattaaataacatcttcattgcctgagaaaaaaaatctgtctcttgtctcttttctaaaatgcctgagggaagaaatcatattctgggaggatatggttgattggaaatacagtgaccaagagagtagttatctttccttaattctcaagcaatccatcattggcaaaagcagcagcataaagtttaaaggactcattccagtgcccctatgactgaagctt

SEQ ID NO: 564758 - DNA, 598 bp, Homo sapiens
agattctgggcataatgggaaggctctatattttgattgacatggtatttaaatgagatataagtttgttggaatgcctctaactgtacacttaaaatgggtatcttctattgtatgcaagttatacctcaataaagtttgttttaaaaggtaaaaaaagtagggaataccaccacagattaccttttttgtctcataatacatcattagaattgtgttgcccctgagtattctgaacacagtatgtgacacatcccttcaagggataagctacttgtccatgaataagctataatrtaagtatttttagagtaagaggttagcagaggtgaatgtacattttgtggccagagttctaaaatgtattgacccagttaattaaataacatcttcattgcctgagaaaaaaaatctgtctcttgtctcttttctaaaatgcctgagggaagaaatcatattctgggaggatatggttgattggaaatacagtgaccaagagagtagttatctttccttaattctcaagcaatccatcattggcaaaagcagcagcataaagtttaaaggactcattccagtgcccctatgactgaagctt

SEQ ID NO: 564759 - DNA, 598 bp, Homo sapiens
agattctgggcataatgggaaggctctatattttgattgacatggtatttaaatgagatataagtttgttggaatgcctctaactgtacacttaaaatgggtatcttctattgtatgcaagttatacctcaataaagtttgttttaaaaggtaaaaaaagtagggaataccaccacagattaccttttttgtctcataatacatcattagaattgtgttgcccctgagtattctgaacacagtatgtgacacatcccttcaagggataagctacttgtccatgaataagctataatgtaagtatttttagagtaagaggttascagaggtgaatgtacattttgtggccagagttctaaaatgtattgacccagttaattaaataacatcttcattgcctgagaaaaaaaatctgtctcttgtctcttttctaaaatgcctgagggaagaaatcatattctgggaggatatggttgattggaaatacagtgaccaagagagtagttatctttccttaattctcaagcaatccatcattggcaaaagcagcagcataaagtttaaaggactcattccagtgcccctatgactgaagctt

SEQ ID NO: 564760 - DNA, 478 bp, Homo sapiens
caattatttattcattcattcattgtttagcagctattaggcatggggccccaggataggctttggggatacawtggtcagtaaaaaaggtatggtccctgcctttgtgaagtttacagtctaatggacaataagcaatgtaagaatgctaataaacaaaaagcaagcaaatacatgtataatttcagatgatgtcaagtactatgaaataagagagaaagaaacaagcacatacctaccccaacacacacacacacacacagagagagagagagagaagagaagggagggaggatacagtgtgagaaaatgggtaagccctctctgaaaagatggtacttcaagccaaaactctagtaatgtgaaggaggctgatattcaaagggtagacgtgaggccattttaggtgaaaggaatgacaggtacagaggtcctgaagaaaaaagttcttgttgtgttgagtgaacaaaataagggg

SEQ ID NO: 564761 - DNA, 478 bp, Homo sapiens
caattatttattcattcattcattgtttagcagctattaggcatggggccccaggataggctttggggatacattggtcagtaaaaaaggtatggtccctgcctttgtraagtttacagtctaatggacaataagcaatgtaagaatgctaataaacaaaaagcaagcaaatacatgtataatttcagatgatgtcaagtactatgaaataagagagaaagaaacaagcacatacctaccccaacacacacacacacacacagagagagagagagagaagagaagggagggaggatacagtgtgagaaaatgggtaagccctctctgaaaagatggtacttcaagccaaaactctagtaatgtgaaggaggctgatattcaaagggtagacgtgaggccattttaggtgaaaggaatgacaggtacagaggtcctgaagaaaaaagttcttgttgtgttgagtgaacaaaataagggg

SEQ ID NO: 564762 - DNA, 372 bp, Homo sapiens
cctgcctttgtgaagtttacagtctaatggacaataagcaatgtaagaatgctaataaacaaaaagcaagcaaatacatgtataatttcagatgrtgtcaagtactatgaaataagagagaaagaaacaagcacatacctaccccaacacacacacacacacacagagagagagagagagaagagaagggagggaggatacagtgtgagaaaatgggtaagccctctctgaaaagatggtacttcaagccaaaactctagtaatgtgaaggaggctgatattcaaagggtagacgtgaggccattttaggtgaaaggaatgacaggtacagaggtcctgaagaaaaaagttcttgttgtgttgagtgaacaa

SEQ ID NO: 564763 - DNA, 671 bp, Homo sapiens
agctggttattgcatggcaaaagatactaagatctcaggagcccttctcaacaagagaattaagctctaccgaagatgactggagggaatattttctcatttctctcaaggatgtgcttagctagyatgattctcaacagagaggaaataagttaattcattacatataacaaatgccttagggcagtggttctcaagatttttggtatcaaaaccttttgcaattaggaaagactccaaagagtttttgcttatgtgaggtgtatctatcaatatttacatattagaggccaggcacagtggctcatgctgtaatcccagcactttgggaggccaaggcgggcagatcccttgaggtcaggagttcaagaccagtctggccaagatggtgaaactccatctctactaaaaattcaaaaattatccaggcatggtggcaggcacctgtagtcccagctattcaggaggcttaggcaggagaatcacttgagcccgggaggcagaggttgcagtgagctgagattgcgccactgcactccagcctgggcaacagagcgagactcagtctcaaaaaataaaatgactaaataaaaaaatttaccatattagaaattaaaacaaattctaaaacatgtttttattaatttatttaaaataacaatcataaaaca

SEQ ID NO: 564764 - DNA, 439 bp, Homo sapiens
gagaaataaagactttctcagacaaacaaaagctgaaaaatttcatcaacaccagacctgttctacaagaaatgctgaagagagttctttaaccttagagaaaaagatgttaataagcaataaataatctgaagttacaaaactcactggtaatagtaagtacacagaaaaacacagactattataacactgtgtctgtggaatataaactattcagatcttaattagaaaggctaaatgatgaaccaatcaaaaataataactacaacttctcaagacatagacagtaccrtaatacacaaattgaaaaaacaaaaagttaaaaaacaggaggacaaagttaaagtgtagagtttttataggctctctttgcttatttgtttgcttatgcaaacagtgttgttatcagcttaaaataatgagttacaagatagtattt

SEQ ID NO: 564765 - DNA, 439 bp, Homo sapiens
gagaaataaagactttctcagacaaacaaaagctgaaaaatttcatcaacaccagacctgttctacaagaaatgctgaagagagttctttaaccttagagaaaaagatgttaataagcaataaataatctgaagttacaaaactcactggtaatagtaagtacacagaaaaacacagactattataacactgtgtctgtggaatataaactattcagatcttaattagaaaggctaaatgatgaaccaatcaaaaataataactacaacttctcaagacatagacagtaccgtaatacacaaattgaaamaacaaaaagttaaaaaacaggaggacaaagttaaagtgtagagtttttataggctctctttgcttatttgtttgcttatgcaaacagtgttgttatcagcttaaaataatgagttacaagatagtattt

SEQ ID NO: 564766 - DNA, 439 bp, Homo sapiens
gagaaataaagactttctcagacaaacaaaagctgaaaaatttcatcaacaccagacctgttctacaagaaatgctgaagagagttctttaaccttagagaaaaagatgttaataagcaataaataatctgaagttacaaaactcactggtaatagtaagtacacagaaaaacacagactattataacactgtgtctgtggaatataaactattcagatcttaattagaaaggctaaatgatgaaccaatcaaaaataataactacaacttctcaagacatagacagtaccgtaatacacaaattgaaaaaacaaaaagttaaaaaacaggaggacaaagttaaagtgtagagtttttatargctctctttgcttatttgtttgcttatgcaaacagtgttgttatcagcttaaaataatgagttacaagatagtattt

SEQ ID NO: 564767 - DNA, 394 bp, Homo sapiens
gggaagccatcatgattcctattttataaacaartaaacccagcaagtgatagaaattagatttaaacaaatgtttttcttctacttgttactatttaattctaagtagaaaatttaagatagctttgcctttgtttcccaaatataaagtcaattactatgttcattgttcctgataaaatgtctctgacagaatatcataatgagatgagctcttcaggcattagggataatctattagatattccctttggacatttaacttggctgtaagaggatatggaaaacatcgtgtctttcacatttcccctgcaagccagttcaacagctggcttcatgtgggtctagaagtggccaccaggttgttttaagaacagaaaagactgcagacaga

SEQ ID NO: 564768 - DNA, 394 bp, Homo sapiens
gggaagccatcatgattcctattttataaacaagtaaacccagcaagtgatagaaattagatttaaacaaatgtttttcttctacttgttactatttaattctaagtagaaaatttaagatagctttgcctttgtttcccaaatataaagtcaattactatgttcattgttcctgataaaatgtctctgacagaatatcataatgagatgagctcttcaggcattagggataatctattagatattccctttggacatttaacttggckgtaagaggatatggaaaacatcgtgtctttcacatttcccctgcaagccagttcaacagctggcttcatgtgggtctagaagtggccaccaggttgttttaagaacagaaaagactgcagacaga

SEQ ID NO: 564769 - DNA, 643 bp, Homo sapiens
tcgctggtccccagccacactttgagtatgaaactcgaaatgagggtgctgtttaagcaaaatagctcagccattagtgtaccctgatggcaatttccttaaggggcagcactttgaattcacaaatggagctgcctgagatgcaattaatacaggtccacagatagataagcactaaatacccactgcttggtgacttggcctccctgctgatttgtggataagagacaatgattattgaatagcattgttactgaacagtatgtgaggattcaaggcgttgttacctcctgactccaatttgaagctcctcatagtaggaaatgaaaaaacgagtgggagagggggagtgaaagaatgtgtcatccactgaaattaacagacctccattattcctttgatctgaagctccacaaagacttgttttttarggacagagatccaaccttccccgacagtagagaaagagacagatgattgttttggtgtcatcacaggttttgctcagcactgtaatgtcccacctaattttaaaaagtggtaaagagaatcttcaagtttcatatcaaatattttaaaatcccagcagaaattgcatattcattaaagaaaaacaagtttctttgctttgggatgaattgta

SEQ ID NO: 564770 - DNA, 653 bp, Homo sapiens
tagtttgttcatctgcgcatttgtcaatgcttttgatagtttctggaaagcaayaggcaattaattctgtttactgaataaatgaattaacaagtgaatgaatctctgaaggtcacccaccatgtggttagctcctcgaggatcagaacagctccttttctcctgtattctgccctcgtaatcaggaacttctttgcccactcactgacctgacagaacttgtttcaaaaagctttctccatttcagtgcaaaataataaattgaacaacacaattccttgtctgtagcacccagacaaaaggtcaattcttgtcctttcttggccgcttttcaagaaatcctgcccaagaggcacctgtgagtctttatggaacaagaggaccaaatcccagtctgagactagtggctgctctcccatcctaggtacctttctcttaagaaagcactcccttttagggttgtacaactgctgatcctgcatttacataatccagagagtgagtgccttcttaaattttactccctagttgcctcactcttccatggttttgacctcatcaacttggctgagtcctaaaaagaaccagacagcaaggaaatactctctaagaattactgaatccaatttgtctcaatgtacaatgtcttcttt

SEQ ID NO: 564771 - DNA, 599 bp, Homo sapiens
atgggagtggtgtatcctctaatataaggtcttaagataagataaaggcccagggacctttatggaatagctaatacgttatctcagcaaagtagtgtttgaaagggagtaaagagctaaggttgattttcacttatattcaaatcgtattgaaacatcatttcctatttttcccagggtcaatttctgacagcagtttgaaagtagaagacttaatacacatattcttatgtgtgtgtgtgtgtgtgtgtgtgtgtgtgtgtgtgtgtgtgtgtcgagagaaagcatatggacactattgcagcggcaacagaagagaaagtagtatggacttttcgtgctagaggagattttagagatctgccggcccaacccacacattttacacatgaagaaatccgcactcataaaatttagatggctaacttaagggtgtacagctattaagtggcaraacagagactcggatctcagatctcaggcagaacaaatctcagatccccaatccattgagcttcacaacccagctctattatatttttgtctccagaaagaaagtctttattattaggttggtgcaaaagtaattgtggttttta

SEQ ID NO: 564772 - DNA, 515 bp, Homo sapiens
cctgggtaagaagcctgcttagtctgtagagatcctatgatcagaacctcagtagaacctgatgttcaaccttctgtcaagtgtaagctgaattcccatctaaataacttttcttcaggatattaacttgatgttttgtaagatgaagaaattagagaatatacttaaaatatcatgagaataaagataaatggaaataaaatgggtgacattattaataatggcaaacagtaatatcacaacagtaaaacacattataaaaataaaaccagttcatgctttaaaaatttttcttttcaccagcacacacttgatggattttttttttctactttaagttctgagatacctgtgcagaatgtgaaggtttgttacataagtatatatatatgtgctgtggtggtttcctgcacccatsaacccgtcatctacattaggtatttcttctaatgctatccttcccctaaccccccaccagccgacaggccccagtgtgtgatgttcccctcctcgtg

SEQ ID NO: 564773 - DNA, 582 bp, Homo sapiens
gatttagttatcagggcttaaggaaattgttgtaggggcattgttacacagattaataatggaaacaagaatttatctgaagtaaatatttctgctagtgaggagccaaattagacaacaactttgcagttctaaaacgatttcttcatatgttgtaattttaaacattgtctctagatgggatcaagtaaatgtatttactttaaatatctaattgatcatctaaagatgaaaaagattctaagggaaagtcctataatatccaaattatgtagatcattcctgagcacaggtcccaatccttacctaactactgattctaattactttctcaggtattgctccttcaggatggcctaaaactaaagcctactatctcatctttgagatatacctaatgctaaatgatgagttaatgggtgcagcacaccagcatggctgtttttgagacatacacatgtttagatacatatgtaactaacctgcacattgtgcacatgcaccytaaaacttaaagtataataataacaaaataaaaaaagaaaaattgtttcaaaaataaataaataaataaaaagaaat

SEQ ID NO: 564774 - DNA, 544 bp, Homo sapiens
aaagatagacacaacccctgcagtcttggggcttagttaggaccactgaaaatgtgtggtgagggagagaacaggaggaactgtttctgtccttaacacagtttccccaaatcatattctttcaaacattaggcacaatgatgtgatgaatttgaagacttatgaaaatatgtcaaaaatactatccgggaaaaatccattgaatatgagtaaacagatttcatatccctttaccccctcaccttctattctttaggttaaaacatttacacttgtcagaggttcctagcatagattttggagttataggaacctgggtttgaagcccagcrtttctgcttttggtgctgcaaacttgaagctcagtgtccacatatgtgaaaatgaagatttcagcatttctgaccaaataaggttctttgatagtcaaatgaaataattcctacaaggttcttagtgaagtgtctagttcaataaatgttaactactgtgatgatgatgatgatgatgatgatgatgatgatgatgatgatagtggtgatga

SEQ ID NO: 564775 - DNA, 544 bp, Homo sapiens
aaagatagacacaacccctgcagtcttggggcttagttaggaccactgaaaatgtgtggtgagggagagaacaggaggaactgtttctgtccttaacacagtttccccaaatcatattctttcaaacattaggcacaatgatgtgatgaatttgaagacttatgaaaatatgtcaaaaatactatccgggaaaaatccattgaatatgagtaaacagatttcatatccctttaccccctcaccttctattctttaggttaaaacatttacacttgtcagaggttcctagcatagattttggagttataggaacctgggtttgaagcccagcgtttctgcttttggtgctgcaaacttgaagctcagtgtccacatatgtgaaaatgaagatttcagcatttctgaccaaataaggttctttgatrgtcaaatgaaataattcctacaaggttcttagtgaagtgtctagttcaataaatgttaactactgtgatgatgatgatgatgatgatgatgatgatgatgatgatgatagtggtgatga

SEQ ID NO: 564776 - DNA, 544 bp, Homo sapiens
aaagatagacacaacccctgcagtcttggggcttagttaggaccactgaaaatgtgtggtgagggagagaacaggaggaactgtttctgtccttaacacagtttccccaaatcatattctttcaaacattaggcacaatgatgtgatgaatttgaagacttatgaaaatatgtcaaaaatactatccgggaaaaatccattgaatatgagtaaacagatttcatatccctttaccccctcaccttctattctttaggttaaaacatttacacttgtcagaggttcctagcatagattttggagttataggaacctgggtttgaagcccagcgtttctgcttttggtgctgcaaacttgaagctcagtgtccacatatgtgaaaatgaagatttcagcatttctgaccaaataaggttctttgatagtcaaatgaaataattcctacaagsttcttagtgaagtgtctagttcaataaatgttaactactgtgatgatgatgatgatgatgatgatgatgatgatgatgatgatagtggtgatga

SEQ ID NO: 564777 - DNA, 544 bp, Homo sapiens
aaagatagacacaacccctgcagtcttggggcttagttaggaccactgaaaatgtgtggtgagggagagaacaggaggaactgtttctgtccttaacacagtttccccaaatcatattctttcaaacattaggcacaatgatgtgatgaatttgaagacttatgaaaatatgtcaaaaatactatccgggaaaaatccattgaatatgagtaaacagatttcatatccctttaccccctcaccttctattctttaggttaaaacatttacacttgtcagaggttcctagcatagattttggagttataggaacctgggtttgaagcccagcgtttctgcttttggtgctgcaaacttgaagctcagtgtccacatatgtgaaaatgaagatttcagcatttctgaccaaataaggttctttgatagtcaaatgaaataattcctacaaggttcttagtgaagtgtctagttcaataaatgttaactactgtgatgatgatgatgatgatgatgatgatgatgatgatgatgayagtggtgatga

SEQ ID NO: 564778 - DNA, 607 bp, Homo sapiens
gcttgcagtctcactcttgacaggcaactacacaaataactgtcttgcctgaaagggctaatgcagtactaatgaacaataaatcaactttgattatcaagtgtcagccgaatgcgttctcagttcagctctatcacatcctacagtaagtcagccagtgtctctgggtaggcagtctgtattttggtttcatttttacacacttttcactgaaatgtgtcaggcagctacaaagaatcacataaaacagatatagaccttttctcaatttatgcamagggcatcaattaggacaacgtgcttctgtcttcaattgatttacttagtggtcaatcttaataaccaaggaagctttgtattcttttaaacaacagtaacagcaacacacacacatcaaaccctaaactagaatcttaatgtgatcatgttccagctctttggcagtgacatgctagcttgcgctctttaccacataaaccacctctgattgcatctatacattcctcttggaaaactcgttatataaaaacaaaaacagcaaaacagggccgcttttaaaataaaaatgccacttgctttaaactttaaaaaatctggcttaacactg

SEQ ID NO: 564779 - DNA, 536 bp, Homo sapiens
ccctgggtctcagacaaatccactggcaccatgaatccaaggagacccatccactggtctgcctacctcaaaggatattcaaagcaacctatctcctgggtcacctttgcctgggaagtggatgacaaagcatggaccacagcaaacctagcgacctggagatgcaagaatgttcctacaatgtcttgctttctccttgtttagacacaaagtgttctccttctcccctacactccccaccccctgccactcccttcccaaactcagggaccactatcatctttgtgctctgagatgctttcctttctgacaacagcaatttgggagaggtaacttttatccttctttctgctgtgtaactttccccttcccatttctttatgtgccctctgagctcatctgaactttcatgttctcccagcatgcagacgtgcattccaaactatgtctcacagaccaaataagaggttaataagaagtggcaacagaaaggaaaaacrcaatccctggtaactgataagaatgacagtggcagc

SEQ ID NO: 564780 - DNA, 566 bp, Homo sapiens
ttcattgacaaaggtttttgaatgcatagatgagcgagcttacttaatctttatcataatcctatgaagattctgttttcagtctacattttatagatgagaaaactgaggtctagaaacttaaataactcactcagagttaggcacctgttacacagaaccagcatttaaaaataatgcctagaaagtataaacaacatgcacaagacacgccaattgctcatttcagagcaggacccccaaatcaggtcttgtgcttctctttcttgtgaatcactagtrtggaccatacctctccaatcacctctcctaccagctttctgtttctcttttctgcagaaacagacgtagctaaagaaatttccaaattaaaacctggcaatggtttctatattcttgtttcctaaacctataaatcaaaagtgtctaaacaggtcataaatgttcctcagcaatataatgggaaaagttctgatttatagtgccggtggaataattttaaataattacataagagttttgaaaaaatgcaattaacacctttagaagttttttgagatgaaaat

SEQ ID NO: 564781 - DNA, 600 bp, Homo sapiens
aatgcagcttgtggaaccatgagccaaataaacctcttttctttataaattacccagccacaggtatttctttatagtgacacaagaacagcctaacacacttaccaatcagcacatctcctcccttctccacagtgactggttcatgtatagataagtgacccaagtcactcaattgattcaagggatttcgctggaattactgagcaagagatactctctttctgaggggttgctaagctgtaagtatgtgaagcagggactctcagaagccctctggcctcagcaagggaaaaacytgacaaagaacggagccaataggaaagaaacagaacagaacagaacaattggaacagacccttcctgatgacgttacctgagtgcctggttccagctgggtctgaggccaggctaacccttgaacttttaagctctgtgagcgtacacactctctcaccccaacccctcatcacttgccagtctgagctgggttttgacatttgcatgggaaaaagtcttgactaatacaggtacctccttccacaagaagattaggaagtggtcatagtgtaacacttccaaacaacctagaaaagcact

SEQ ID NO: 564782 - DNA, 492 bp, Homo sapiens
tctttcccctttccaattaatttaatggagtatccaggacatattctgaaatgacagaacttaaagagattcaaccaactgattccaattccggagagagaaagctaaagcaacaggaatacaaaatgtaagcccagtaacatgcctgatggcctactcaggaaagcgcgcctccccagaaggaggactgctttaagtatttctccaaagaatggcaatggggcagccaattagagttactaaattgcaacagcaatgccccattcctgagatctggggatttgtctccaaggaaccaccattctgtcttgatttaagcagtgcttttacttaaaaatataaattaatacatcatccatctacagggagctaaggcagttagctccatattgatattgtttatgtcactgttatgcrtatgttgacaatgaagctaattatgttgtttttcttctgtgcctgcaagtttggccaagggaaaacactgagttc

SEQ ID NO: 564783 - DNA, 504 bp, Homo sapiens
gcgccactgcactccagcctgatgacagagcgagaccccgtctcaaaaacagcaacaacagcaaaaccttayagattatgtacatatgcaataagcgcaggaaataaaggttgagtagctctcctctagaggataatctaaacacttttgttaaatggtaacaaccttgaattttgctataaatctactgaagttactaattatttcaataaaaactatgtccggatataacaatttaacacgtgggacagcagaaggcacatttaagtttcagtacgcaaagcaggtttttccatttaaatgaaacaattgttctttcaaattagttgtactcactttggagtctatagtttctcacacacgcacaaaaagttcatgacagttgttattgttttggctccattgtcagaagacaatcttggcacacagttgaatgaggccaattttataccaatgcgatcacatgctttaaataaaagaatcagctaatctcactaatggatt

SEQ ID NO: 564784 - DNA, 504 bp, Homo sapiens
gcgccactgcactccagcctgatgacagagcgagaccccgtctcaaaaacagcaacaacagcaaaaccttatagattatgtacatatgcaataagcgcaggaaataaaggttgagtagctctcctctagaggataatctaaacacttttgttaaatggtaacaaccttgaattttgctataaatctactgaagttactaattatttcaataaaaactatgtccggatataacaatttaacacrtgggacagcagaaggcacatttaagtttcagtacgcaaagcaggtttttccatttaaatgaaacaattgttctttcaaattagttgtactcactttggagtctatagtttctcacacacgcacaaaaagttcatgacagttgttattgttttggctccattgtcagaagacaatcttggcacacagttgaatgaggccaattttataccaatgcgatcacatgctttaaataaaagaatcagctaatctcactaatggatt

SEQ ID NO: 564785 - DNA, 539 bp, Homo sapiens
cacatatttttgcttttctttttccccatgcagtggatgaattcttaaattatgtatattaaacatgtgacacaggaatgcgagttagcaagaagtggtcattttacgagttagttagaagtggtcatttataaaggagacagatgataagcatctgtcaattactatggtgaagatacatggcaaaatatttaaaaagtaaagcaataaaaagcaacaacaaaacaatccactgaagctacatcaagaatattgtaataacagtcagatgtttattacttatatttaacatttaaaaaattcagttagattattagctgcctgacagtagggaacattctaaaactgtaaaaagggagaamcaagaaagggcaaatcatctttacagtaagaggaatgagtttacttttacacataggaagcttgagatgatggcaggatttggccaagttctcagatatgtgaaagcttccagataaacagacaggccacaacttggactaaccagtgaaagttttaaggtgacaaatcccaatcaa

SEQ ID NO: 564786 - DNA, 565 bp, Homo sapiens
tatccttagcaaactgatacagaaacagaaaaccaaatactgcatgttttcacttttaagtgggagctaaatgatgagaacacatgaacacaaagggaagaacaacagacactggggcctacttaacagggagagtaggaagagggagagaatcagaaacaaatatccattgggtaataggcttagtacatgggtgatgaaataatctgtayatcaatgccctgtgacatgagtttacctctataataaacctgcacatgtaaccctgaacctaaaacaaaattttttttaaatttttgttttaatgtatatacaccaaatgggtagttcttacatgtagaacgtaattaaagatgaggttactttttgctgtctttgaagtgtttaatgacagtcagttacagaataatggaatagacatgtttttctatatgctgtgttccaaacaaggttattatatactttcttagtagctgttgcttcgttacgtagatgaagtactaactgacaaaaacagctttgaagaattgaaaattaatccctgtattcttacattgccatatta

SEQ ID NO: 564787 - DNA, 565 bp, Homo sapiens
tatccttagcaaactgatacagaaacagaaaaccaaatactgcatgttttcacttttaagtgggagctaaatgatgagaacacatgaacacaaagggaagaacaacagacactggggcctacttaacagggagagtaggaagagggagagaatcagaaacaaatatccattgggtaataggcttagtacatgggtgatgaaataatctgtacatcaaygccctgtgacatgagtttacctctataataaacctgcacatgtaaccctgaacctaaaacaaaattttttttaaatttttgttttaatgtatatacaccaaatgggtagttcttacatgtagaacgtaattaaagatgaggttactttttgctgtctttgaagtgtttaatgacagtcagttacagaataatggaatagacatgtttttctatatgctgtgttccaaacaaggttattatatactttcttagtagctgttgcttcgttacgtagatgaagtactaactgacaaaaacagctttgaagaattgaaaattaatccctgtattcttacattgccatatta

SEQ ID NO: 564788 - DNA, 565 bp, Homo sapiens
tatccttagcaaactgatacagaaacagaaaaccaaatactgcatgttttcacttttaagtgggagctaaatgatgagaacacatgaacacaaagggaagaacaacagacactggggcctacttaacagggagagtaggaagagggagagaatcagaaacaaatatccattgggtaataggcttagtacatgggtgatgaaataatctgtacatcaatgccctgtgacatgagtttacctctataataaacctgcacatgtaaccctgaacctaaaacaaawttttttttaaatttttgttttaatgtatatacaccaaatgggtagttcttacatgtagaacgtaattaaagatgaggttactttttgctgtctttgaagtgtttaatgacagtcagttacagaataatggaatagacatgtttttctatatgctgtgttccaaacaaggttattatatactttcttagtagctgttgcttcgttacgtagatgaagtactaactgacaaaaacagctttgaagaattgaaaattaatccctgtattcttacattgccatatta

SEQ ID NO: 564789 - DNA, 565 bp, Homo sapiens
tatccttagcaaactgatacagaaacagaaaaccaaatactgcatgttttcacttttaagtgggagctaaatgatgagaacacatgaacacaaagggaagaacaacagacactggggcctacttaacagggagagtaggaagagggagagaatcagaaacaaatatccattgggtaataggcttagtacatgggtgatgaaataatctgtacatcaatgccctgtgacatgagtttacctctataataaacctgcacatgtaaccctgaacctaaaacaaaattttttttaaatttttgttttaatgtatatacaccaaatgggtagttcttacatgtagaacgtaattaaagatgaggttactytttgctgtctttgaagtgtttaatgacagtcagttacagaataatggaatagacatgtttttctatatgctgtgttccaaacaaggttattatatactttcttagtagctgttgcttcgttacgtagatgaagtactaactgacaaaaacagctttgaagaattgaaaattaatccctgtattcttacattgccatatta

SEQ ID NO: 564790 - DNA, 540 bp, Homo sapiens
tttttcccaaaatatagcaagattgtttctaacctaaactgagcattgttacataaactactgttctgtaacttggattctgaaagatattcattttaatattagcatttttccactgaataaaattaaaattagatttaatatttcctttaaatatcataaaatgtactatagcctgcctttttctcaattatatttattattttaccttattttccaataattctggaaataaaagaggtttagatattaaagtcataatggataccattaactctttgctgaaagatacagctaaattctcgcacattcagcccagcacacatgcactctggatggtyactttctgactttaaattcaggatgtgaatttagacatcgaagagaaatgtgttccagatttgtcccattttccccttctttgcacctcttgtacaaagttactgaatttaattttaggattcagttttaggataaccacggtttaagaaatacataatagagaggtagatttagctgcagatattctatcttcagatt

SEQ ID NO: 564791 - DNA, 521 bp, Homo sapiens
tttgtataaatgtaaatttttcagaagatggaaaaaaggcccatgtacttgtgagaaactgttttaaaagtatagaggcttcattatcttaatagttcagcatgctttatgccatataaaatattcaaaactgggattgccatagcttgaatagcttataacttcataatgacattttttctctcatagcacaggcaacatatatttttttctaacttaagasacttctaacttaagaaaattatctgaatagtacttgaatattttcatgcctcttggaataaattatattcttttattctgaaactatgatgaaatcattgaaaagtgtcagaagagaagaccctaggaaagctattaactatttatcattttcagttcacacgggaatatgaattccacttgccaaagagtttattattgatcaactttaggctgaaaggcaactatcacaacagagttgatattcctagctgggtttatcttgaatatattatcttaaacaacaatacaggacatgc

SEQ ID NO: 564792 - DNA, 568 bp, Homo sapiens
tctttcgattctgagcatttttctcctayccatgcttctacttgtcaattttggagagatggctttcttttctggccagttttaacagatctttatgagcagtgccttcacaagaagtgcaggtaatgtgcttgttgagagaaaagattaatagtgctatgtgtagtgttttcatgagatgattattgttatttatcagtgtaaatgctagtggtactgatggcattacagggaacgaaggatataataatgttttgatgggaacacaaaatataaacaattttcatgccagttttaactaatttggacattgaaaagtaaacaatgaactttcagttactgacaggtactgtggagttttggctaccatcagtcatttgtcaatgaggtcacaaagcaacaagcttttagtcacaagaacttcttcctaaaactccatcatgagcaacttattatatacatttttctagattttactgtttgctcttggctgtttttgcttagtacacttaaaattgagccaagaattggaagagtcgtttaataattaaatctatatgatttaaaa

SEQ ID NO: 564793 - DNA, 564 bp, Homo sapiens
tggtataccttcaatattagtcctttgtcagatatgtgtttgcaaatattttctctcaagctttggcttttcttttcatcctcttcacacggcttttacagagtaaaagtttaaattttgatgtggtccatttattaattttttcttttatgaattgttctttttgtttcaattttaaagaactctttgcctaatcccagattattacaatttgtttttcctaaaaatttaatagttttacrgttttcatttaaattcttacccatttgacatttgactcactgtttataaaagatagaggtttatgttggattcattttttaaaaaaattttactgtggatgtccaattacttcagcatcaattgtcgggctaagatgatttgatgtaagttttagtataaatatttttatcccactgatatgacagcatagataacatcactaccaagttgacagagggctttaaacacttttgttatatttttgtttagagcaattctttttaaatgacatgtctatcaagccattaacagagatttgctgttacacaatatttggcatta

SEQ ID NO: 564794 - DNA, 493 bp, Homo sapiens
cccttctagggaaactgaatataaaatccttaggcataaaaagaatctttcatatgtagactccttgggaattcaattcacactcttctgtactttctttctcactgtttcttttgaacttgacggaaaaaatttcttatgctgttcacttaccttgctctcagataaagaagagagagagagctaaggtgcttaaatgtcaaggtttgtaaaattggcaaactggccccatgaggtttgtggtttgaatgatgggtctccatcaggtttggtgacaatgatagtgaaggagtctaagctggtaatgtagcagatgcttytttggcccttcctctgtttcagtcactgttctgagatctatgtgtgcattatttcatttaatcatcccaatgaccttaggaggtaatggtgttatgattgatgctattgttaaattaccttacttttttgcagatgaggaaactaatgtctgagaggtaagtgttgtgcccga

SEQ ID NO: 564795 - DNA, 604 bp, Homo sapiens
  misc_feature 604: n = A,T,C or G
acccacgtcctccttctccaagtccccatcttctctcctgggataactacactggcttccttggctcctttcgtacttcttcccccaaatcatcctgcatagcagccaagacttcttttttttttaatgtaagttaaattagtactcatctactcagaatgcttaaatggcttttcattgaactcagaataaaatccaaactattaaatattacctgcaaggctgtgtgggatttaaacactactgtccctttgacaattcctagcaagcttttaggaacaagagcttcttagaccctttttcatttctgcagatgtgttgagctctttcctatsttagggatcattctggtcttttgcccagtagccctgtccagccctaacgcctaaacacacatacgcacacacgtgtgcacacacacaaactcacagggttttttttttcatttatgtttttttcgacaggcgtcctcactctgtcacccaggctggagtgcagtggtgcgatcatggttcactggaacctcgacctcctgggctaagtgattctcccccttagtctcctgagtagctgggcactatagaccactcaaaaatgccccggn

SEQ ID NO: 564796 - DNA, 573 bp, Homo sapiens
tttccttcctttttaaggctgaataatattctgttttatgtacttacttcattttgtttatgcattcatttgtccaggaacacttgggttgcttccatattttggctattgtgaataatgttgctatgaatataggtgtacaaatatcactttgagattctgttttcaattcttttggatatatacccagaagtggaattgctgggtcctatgaaaattctatttttaattatttgaaaaacgccattctgtttttcataccagtggcaccattttacattcccaccaatagtgcaaaagggtttcaatttctcartatccttaccagtacttgttattttcttttttttttccaatagctatcataatgggtgtgagatactaatttttcactttaaaaattatcattagccaggtgtggtatctctcacccatactcctagctaaactgggaggctgaggtgagaggatcacttgagcccaggaatttgagggtacagggagctgtgaccatgccaccacattccagcctgggctacagaatgagatgagacccgatctctaaaaataaaa

SEQ ID NO: 564797 - DNA, 621 bp, Homo sapiens
ggctcaagtgatcctcccaactgtgcctcctgagtggctgggactacaggtgcatgccgctatactcaacaaatttttaatttttttttttttttttttttgtagagagggggtcttactatgttgtccaggcttgttttgaactcctgggcgcaagtgatcctcccaccttgggctcccaaagtgttgggattattaacatgagctatcatgcctggcctagcatgacttctgaatctctgatagatgactatgaaatagctgaaattatttcaacacgtttgagttcctgctgtrtgatacataccactttaagcactacagtgactacataacctaaaatctgatacctacagatttgctactagggagcagggggcacttgcatatcctccaagaagggacctttttgaatcttgagaagacaaagagtggatcatttcctctgctgacagtcgatgatgcttctgggtacctgttttcaagatgctcagaatagcatggaggagatacacagttaaacaaaaacaatttgaggggagttttaagagtatgtgaaagcgctaggagaatacaaatgaggaagcaattagctagattcaatacactgttggttataat

SEQ ID NO: 564798 - DNA, 574 bp, Homo sapiens
tgttcgtgctaaaaatacattcgcatttttatcattattatcatgaaaattaggagaatctaaaaattagtttcattgttagtctcttcatggattgctttatagtaattctaattttccttttaactcagtatttttattatttattttattttactttaagggggtttattttttattttggcatcattctttcatttcaaggatcagatcatttcttccatagcgcttcatggtctttcaaagaactattctttgctgacagcccaattcctatcacatgctgaaacaggcaaacatagtgggaaataatatttgtttatgtttcagccaggggtgcaataatttgtttcatttattatttaatacaatgctttgagtatttctattctcaattttcaaacaaaaaaaggggaaactgagatataattatttcctgggtcaagtggcaaataacttctagattaaaggctgggtctgattacaactcttatgtatccattaattttttttwaaaaaaagaaaatgtcaaaaagctgtctctttatctatatgcctatttagtcaaactttc

SEQ ID NO: 564799 - DNA, 562 bp, Homo sapiens
atattaatgaatattctatgtgttttgcgtgattgcccatcagactaagcagaagtaaaacatataggcagagagaagaaaaatcatgttgtatgtatactgaagaaaccatcaataatttagaattattttctcatcaggygcctgtaaagataaacctatggtcagaatatgaagattttctcttttttgttcaacttttattttagattcagggggtacatctgcaggtttgttacaaaggtatattgcacgatgcagaggtttggagtaagaatgatctagtcagccaggtacttagcatagtacccaaaagttagttcttctacccttgctcctttcccttcctttcccctctggcagtcactgatatctattgttcccatctttatgtccatgagtacccaaattttagctcccacttatcattgagaacatgtgaaagttggttttctgttcctgtgtaaatttgcttaggataatggctttcagctgtatccatgttgctgcaaagaacatgatttcatgcttctttatggctgcatagtattccatgtcacat

SEQ ID NO: 564800 - DNA, 562 bp, Homo sapiens
atattaatgaatattctatgtgttttgcgtgattgcccatcagactaagcagaagtaaaacatataggcagagagaagaaaaatcatgttgtatgtatactgaagaaaccatcaataatttagaattattttctcatcaggtgcctgtaaagataaacctatggtcagaatatgaagattttctcttttttgttcaacttttattttagattcagggggtacatctgcaggtttgttacaaaggtatattgcacgatgcagaggtttggagtaagaatgatctagtcagccaggtacttagcatagtacccaaaagttagttcttctacccttgctcctttcccttcctttcccctctggcagtcactgatatctattgttcccatctttatgtccatgagtacccaaattttagctcccacttatcattgagaacatgtgaaagttggttttctgttcctgtgtaaatttgcttaggataatggctttcagctgtatccatgttgctgcaaagaacatgatttcatgcttytttatggctgcatagtattccatgtcacat

SEQ ID NO: 564801 - DNA, 599 bp, Homo sapiens
atatgggcaatactgtgtgtggtgcctggcgttcaataaggactcccaaagtgcctgtcgccattagtattattaataccagtgttgtcatttctcagcatttcaaacaaatgtaaagcagcagtctatggaagaagtaaaaactgaagacacctagtctagaaacttggtccaaggaggacagggttatttggttgaaaggagattgcaagttacacatggatttccctcttcatttctccatccccccactaccttggttaattgaattggccactagatggaagcatatatgtttaytggtttttttaatctgtgaaccaataggtcatttataatgtgtaaatctgaaatcaaaatatcatctacagtcaattcaatctgataatttttgaaatctttaactaactagactgagactcttctgtatttgaaaaaagagcaaaaataactaagattctggagctgcatattgcagatttgaatacatgcagtttatggttaatgtgttggtaatgtttaaaaataattagcaggacattttgtcttgccagtttagatggcactattataattatttttaaattcatttatataca

SEQ ID NO: 564802 - DNA, 375 bp, Homo sapiens
gttgatacagtgctatgtatgcactaacaactataaaaagcttgctgctgctaagaaaaaaaaagccacagattcattctttttcaagtctgaataaacaaaattactagaggttacattgaggtttcgaataaaacactgcttgtaataaaacaagtgaccttgtcttctgcctgcagatccctgggaatctcatcacagagggtggagaagatgggggagaggtcttgtaggagrtcaggatttgagcatctagggtttctggctattttcctttccttcatgtttgaaaatttattgagattatttaaaattttgtatataaatatcaatatcattttgaaaatattgttatataatggaagatttttgtag

SEQ ID NO: 564803 - DNA, 603 bp, Homo sapiens
agtaggcttgatatattgacactgaaagtaaggttaaagccccaacacaatatatattacttataacttattctaagcaatatgcatattcttggtcatgtatattctaaatctatcatatatctatcatctatatatgaacatacatatatactatactaaggccatactatacattggcaataactacctctgcattacctataattaaaatggcattgatacaaaatctgacagtttataaagacttaattgtataaaaaggcttaaccggattaaaattaaaattaacatttgaatagcttatggcaggcagtcacctatgaaatgwtcattttatctcatatgcatatttaagaaagtgtgtgaaggatcatatagagtacagccaattttcactcttgcatttatcataaatatagtacataatttcccccttatggcaccagttatgtgctgtatttatacaggctaaaatatttctgctgatgttaaaatattagattataaacaatttccttccaaaattgtgacatgagctcatcaaattacagtcatatcatttggatgatttgatttaattagtgcttataattgatcaaa

SEQ ID NO: 564804 - DNA, 603 bp, Homo sapiens
agtaggcttgatatattgacactgaaagtaaggttaaagccccaacacaatatatattacttataacttattctaagcaatatgcatattcttggtcatgtatattctaaatctatcatatatctatcatctatatatgaacatacatatatactatactaaggccatactatacattggcaataactacctctgcattacctataattaaaatggcattgatacaaaatctgacagtttataaagacttaattgtataaaaaggcttaaccggattaaaattaaaattaacatttgaatagcttatggcaggcagtcacctatgaaatgatcattttatctcatatgcatatttaagaaagtgtgtgaaggatcatatagagtacagccaattttcactcttgcatttatcataaatatagtacataatttcccccttatggcaccagttatgtgctgtatttatacaggctaaaatatttctgctgatgttaaaatattagattataaayaatttccttccaaaattgtgacatgagctcatcaaattacagtcatatcatttggatgatttgatttaattagtgcttataattgatcaaa

SEQ ID NO: 564805 - DNA, 568 bp, Homo sapiens
aagctgttaacttacttagatttcacaaagccaaatgaaaaataagatatattaaaaccacaaacactcagatttcatgccaaagaacacagctccactatccctcccccacttagggtaagcatctacttaaaacattttacttaattttgtttaaataggcatgcaggcaataaatatgcagcagctaaaaatatccctaaaatactgggactcggagtaacttaaaagaagtgtggaaagtcgtagaattttttaatttagttcataacttttttcttaacatcaaacataactaataattgattattttatacatacaaaaaaggagagcaatgctttcttattgtatcytaatacaatatatttttctcctataagaaaagctagcagttcataaacatttatcattcatttattctcttacataaaaattgttacctacttattgctatgtagcaaaagtcactacaaaattgtttatcaaagtgagtaaaaaaaacatgagcaacttttacagcatacagtctcaagtattattttaacatgggtaaaataaatatatttc

SEQ ID NO: 564806 - DNA, 581 bp, Homo sapiens
aaagtgtgttaccttaaacaatttcataatattactttctttttaaaacaaaattactttagtttactctatatctcatatatacatatagcctaattacaaattgtgaaagttcatctatgagaggagtaacattaatttggatgaactgtgttgctttactttgttcaattaagaaaaacatttgagtataataaattatattggggcatgtttccaagttggattataaataaggagatatcaatttttatgttgtatttacttacaaaaaaggacattttaaccctctgggatctgtttctccatatagtaattaattttccaggtttgtaattaaacagtttcaatacgttgcaatcaggaggcaataacattcaattaaargcccaggacacattttcaccttaaaatgtttttacccttgaagtaataccaatggaagaggataaaatagggtattaacacttttcaattatgctcaatgactttaatcctgcaaatgatgtcctgttttaattagaagctcttctctttattgcaacatgatggatgtccactttattagattcaagtgtgac

SEQ ID NO: 564807 - DNA, 500 bp, Homo sapiens
cagttattctgctataagtaacagaaaatggactaagatagacaattggtaccaggaattaggggtagggctgaaaagtcccaaccctttaatcgggccttggtctttcaggtgaccagccctccattctgaaactaggggatgtcagccataagtcaactcattagcatacaaaaaagacatttatcactttggagactgctcgaattttaggagtgtatgcctgaaaacagggataaagaccagagatatatttcataatatcacaatccaaaagacagagaatgtcagtctggattttaaaaactatccaactatatgttattgtttccaagagatataccttagatccaaaaacacagactgaaagtaaaatgatgaaaaartatcacacaaatagctacaagaaagctggaatgcaggccaggcacagtggctcacacctataatcccagaactttgggaggccgaggtgggtggattacctgagatcaggaatt

SEQ ID NO: 564808 - DNA, 597 bp, Homo sapiens
tgaactcctgacctcgtgatctacccacctcgacctcccgaggtgctgggattacaggtgtgagccactgtgcccggccataaatccagttttatcagactaaagtgaattatcttgatcatgacatcatcatgcaaaagggaaaatctcttttccttcagagaaaggaagctctttatgattttacctggccaattaccagaacataatttagagaatttcttggactcatgatattgtagacactggattctgaatttgtctatactggctccccctttctataatcaaaactagttgacacacctgagttcttgtcccaaataaactcactacccttgaattccctaattgttataaactctactttctatttgtgtataaaaaatcaggagaaattttagaggtgttaacagcatgatggacatcaaagacccgtttcttgttacatcttctcatttggccccgtagcagttgcctaccctctttgggtacttacagctgcaaagttaactaaagccactgaagayttaatcttagtagcttcacttaacctcattgtcatgccattcagaccttattgttcttttacttttt

SEQ ID NO: 564809 - DNA, 556 bp, Homo sapiens
acttctgcctggacatccaggcatttccatacatcctctgaaatctagacagaggttcccaaaacccaactcttgacttctgtgcactcaaaggctcaacaccacatggaagctaccaaggcttggggtttgcaccctctccgaagccatgacctgagctgtaccttagcctcttttagtcatggctggagcagctgggatgcagggcaccaagttcctagactgcacacagcagagggaccctgggctcagtccataataccatttattcctcctaggcctctgggcatgtgatgggaggggctgctgggaagacctctgatatgccctggagtcattttccccattgccttggcgattatcatttggcttcccatgactttagaaatttcttcagctggcttgaatttctcctcagaaaatgggattttcttttatttatcattgtcaagccacaaattttctgaacttttatgctctgcttcccttataaaactgaatgcttttaacagcacccgagtcacrtctttaatgctttgctgcttagaaatttctt

SEQ ID NO: 564810 - DNA, 619 bp, Homo sapiens
tcttttaaaagggcactaatgtcattaatcagggttccactctcatgacttaaattatctcccaaaggccctaccttctaatactatcattttgaaagttaggatttcaagacaagaatttggggatggggagctgggagacaacaaatgttaagtccataacagtatcttttcccagcacaaataaatgaatgcaaatctgtaaggaaaaaccacaagtaaatagtagtaattacttstgggaagtcaagtgaagactgggattacagatggcagtcaagggagactgtaaccatatctatcatcttccaaaggtgttcaagctgggaggatagattggtaaatcacttgtataattaacttttttcttttcaaagtaatttaaaacattattttacattttggcatgtttctgcagtggctggtaccagttgttcctttccatgtttagtgcttcttccaggagctcttttagggcaggcctgatggtgacaaaatctctcagcatttgcttgtctgtaaagtattttatttctccttcacttatgaagcttagtttggctggctatgaaattctgggttgaaaattcttttctttaagaatgttgaatattggccc

SEQ ID NO: 564811 - DNA, 574 bp, Homo sapiens
atgcaactcccttacgttctttatcagccacctgcatgcaaacagcattatgtctgaagttaaaacatgtaagatatatgagagtggaatccttggtgcatttcactcttgaactcttgtctatggagtaagtagcctgggggtagtttctcctcctttttttatatgtggggagaaggaattaggtggctgattatcttgtgctaaataggtttctctgccgatccacaaggtggcagggagtccttagtgccactatgacagattaaccaaataggcatctgtcgaaatgtctgatgcattagttgcactgcctgtaaaaragatgggcctccttgagaaataaatccacactgaatttcaaatgtggttgtgtccccaaaattagcaacgttttcaaaggtgtacccttcaaaggagagcagaaataaactgtaccttaaaagaactagtgctcagaggcctttgtttaatcaatggttagtttggtggtgattgcacaaattcactacattaaatttaatcagggatgtttctggtatgtgggtggcatgcttactgattaattcattta

SEQ ID NO: 564812 - DNA, 638 bp, Homo sapiens
gaatttaataaatagaagtagtagaagccaaaaataatgggatttattaatttagaacaaatctagagtagactatcagaaaaaatccagcagatcacatgattgtaacatagttagtgaataaatatgcaccctcagggaaaatgatcagggggtcataggggaccaagaataataaggcagctatgtagcrctaatgaagagcaagctgaattcagaaataaatcaagaaaatgaaaaacattttctttacttcatattaaacctgtatagacatttctagttcttgtcctgatttgaaagggattcagaaaaatttcaagtaagtttggaagattgtcacaaatatgattaattacatatgaaaggaaaaagccaaagtgtgatttttatgagaagaaaaccattagctacctttgcactttcacttgtggcattaagaaagaattgatttatataatagtgaagcatatttggttagtcattggggaaaattatcacatgaaattaagtggcagaaatttttttttaaaaaaatagaaaatgtgttgaatcacattctggggaagtcttaggaaacaggttttatcatcgggcctttacaactgtggaggcaggaaaaagaatgctgtgggttt

SEQ ID NO: 564813 - DNA, 590 bp, Homo sapiens
gctcatgcctgtaatcccactttgggaggccaaagtgggtggatttcttgaggccaggagttcgagaccagcttgggcaacacgatgaaactccatctctactaaaaatacaaaaattagccaggcatgatgctgcttgggaatctgagctgcttgggaggctgaggcaaaagaatcactggactccaggaagcagaggttgcagtgagccaagatgactccactgagcaacaacagccagactctgtctcaaaaaaaaaaaaaaaagagtctgtatttccaatagacatgtttatattaagaatttggaatttatggacaacttttccagatctccrtgtactctgtgacatgagagaaagacagcaagtatggatcttcacctagcctggggcagaattttacatcagtgcgtgaagtttggagggataaatgatttctaaatcatgtttaagggtctatgcatttgtgttttacttgtaattagtagaactacaattatttcttagagtcaacatttcagacttttaaaatgttactatgtatcgaatgccacactggctgattttgaaaatattctctctaaatct

SEQ ID NO: 564814 - DNA, 565 bp, Homo sapiens
ctcctggagaagatgatcagaaytgaagccttttaacttttcggtggactatagggacagtagcaggagatcagctacatatcccagaagcaatgtttcttccaggtcagtatcatgtcattcacaagtgaaaaaataaacactaaaaataaatagaagttctataacagagacaggaaagggactctccttgctgtctcctgtctacatgtccttttagccttaacaccttccaaaggaaggagaaaaatagctttgcaggtttgcaaatgtgtgtagttagcattttaagaacaaaaacgggctgcctctcacagctgtgttggaatttgcttcagattctgccttcaaatcacagaagacgtgagtaagggcacgtccgtgactcagtcctcaacccttgccaaagtagtagttttctagatataaaactacagggaaagaaaaatagaaagtcagaagaggaagaaaaactgcatgttcataaatcttgcacaaaactgaatctcgaaggtgtgataaaaagatcaggatcggggagtgtttaggaaagagaaacacacat

SEQ ID NO: 564815 - DNA, 380 bp, Homo sapiens
tggaatcccagctacttgggaggctgaggcaggagaatcactggaacctgggaggtagaggctgcggtgagccaagatcacaccactgcactccagcctctgtgagaaagcgagactccatgtcgaaaaaaaaaagaaatgtaatttctgttaatatcttaatatacaaagatcttttctaacttttaaggaaaatcactaaaagtctaatagatacaatcagataaatttgcaaaaaaaatgcagattggtaacaaaaatttaaaatttaagctaagattygtgacatacatatttcaaatgactcagctagaaataattgatcagaactcaatgtaccaaagtcatgtaagacaagtatagaccaagaaactggcaca

SEQ ID NO: 564816 - DNA, 428 bp, Homo sapiens
gtatggtgattcctcaaagaactaaaagtagaactaccatttgatccattttatacttcttgatgtctccactcccaattttgttacayatatcattgtatttagatgtgttaggaattgatgtcataactttcagcaaactttcaaatctagatttagcatttatagcctttgctattatcagcctttaaaagatgagtaaattaagtcataaacattttctaccatgctcccttacccacaatattataacatttgggtaatgtctttatttttgtgattatctcactacagtatttcttagtaaatgtttcaaaaaaaactcctttgactttatctgagtaaattcctctgcatttagccagctatagttattttctttccttcgaggtaatcttttctcctggcttttgaatttatactttctc

SEQ ID NO: 564817 - DNA, 428 bp, Homo sapiens
gtatggtgattcctcaaagaactaaaagtagaactaccatttgatccattttatacttcttgatgtctccactcccaattttgttacatatatcattgtatttagatgtgttrggaattgatgtcataactttcagcaaactttcaaatctagatttagcatttatagcctttgctattatcagcctttaaaagatgagtaaattaagtcataaacattttctaccatgctcccttacccacaatattataacatttgggtaatgtctttatttttgtgattatctcactacagtatttcttagtaaatgtttcaaaaaaaactcctttgactttatctgagtaaattcctctgcatttagccagctatagttattttctttccttcgaggtaatcttttctcctggcttttgaatttatactttctc

SEQ ID NO: 564818 - DNA, 428 bp, Homo sapiens
gtatggtgattcctcaaagaactaaaagtagaactaccatttgatccattttatacttcttgatgtctccactcccaattttgttacatatatcattgtatttagatgtgttaggaattgatgtcataactttcagcaaactttcaaatctagatttagcatttatagcctttgctattatcagcctttaaaagatgagtaaattaagtcataaacattttctaccaygctcccttacccacaatattataacatttgggtaatgtctttatttttgtgattatctcactacagtatttcttagtaaatgtttcaaaaaaaactcctttgactttatctgagtaaattcctctgcatttagccagctatagttattttctttccttcgaggtaatcttttctcctggcttttgaatttatactttctc

SEQ ID NO: 564819 - DNA, 428 bp, Homo sapiens
gtatggtgattcctcaaagaactaaaagtagaactaccatttgatccattttatacttcttgatgtctccactcccaattttgttacatatatcattgtatttagatgtgttaggaattgatgtcataactttcagcaaactttcaaatctagatttagcatttatagcctttgctattatcagcctttaaaagatgagtaaattaagtcataaacattttctaccatgctcccttacccacaayattataacatttgggtaatgtctttatttttgtgattatctcactacagtatttcttagtaaatgtttcaaaaaaaactcctttgactttatctgagtaaattcctctgcatttagccagctatagttattttctttccttcgaggtaatcttttctcctggcttttgaatttatactttctc

SEQ ID NO: 564820 - DNA, 628 bp, Homo sapiens
ttaagaaaagttaaaattaggaaagtctatatatcaaagaccccattaagaaagttaaaaggtaagccacagaatggaagaaaatattagtaccatatataacagacaaaatgtttatatgcagtctatttttaaaactcctacatatcaattagaaaaagaaaacagaaaaataagcagaagacttcaacaagcacttcacaaaagaggatatacaaatggtcattgaacacataaaaaggttctcagtctcactagtaattatgggaatgcaaattcaagccacratgagatatctttacacactcatgagaatgggctaaaattaaaatatctgacaatacaagatgttggtaacaatgtagaggaacaggagttctcacatactactgataaacatgtaaactggcacaactattttggaaaccagttttgcgttatgttctaaagttaagatatgcatgcctcataactcagcaattccactcctagattttttcccaagagaaatgtgtgcacaggtacaaaatagtcccaggcagcatgcacacctcatttgagacaagtgaaaaatggtcatagccacattgttcataatagccccaaacttgaaacgaaccacacatcc

SEQ ID NO: 564821 - DNA, 628 bp, Homo sapiens
ttaagaaaagttaaaattaggaaagtctatatatcaaagaccccattaagaaagttaaaaggtaagccacagaatggaagaaaatattagtaccatatataacagacaaaatgtttatatgcagtctatttttaaaactcctacatatcaattagaaaaagaaaacagaaaaataagcagaagacttcaacaagcacttcacaaaagaggatatacaaatggtcattgaacacataaaaaggttctcagtctcactagtaattatgggaatgcaaattcaagccacgatgagatatctttacacactcatgagaatgggctaaaattaaaatrtctgacaatacaagatgttggtaacaatgtagaggaacaggagttctcacatactactgataaacatgtaaactggcacaactattttggaaaccagttttgcgttatgttctaaagttaagatatgcatgcctcataactcagcaattccactcctagattttttcccaagagaaatgtgtgcacaggtacaaaatagtcccaggcagcatgcacacctcatttgagacaagtgaaaaatggtcatagccacattgttcataatagccccaaacttgaaacgaaccacacatcc

SEQ ID NO: 564822 - DNA, 628 bp, Homo sapiens
ttaagaaaagttaaaattaggaaagtctatatatcaaagaccccattaagaaagttaaaaggtaagccacagaatggaagaaaatattagtaccatatataacagacaaaatgtttatatgcagtctatttttaaaactcctacatatcaattagaaaaagaaaacagaaaaataagcagaagacttcaacaagcacttcacaaaagaggatatacaaatggtcattgaacacataaaaaggttctcagtctcactagtaattatgggaatgcaaattcaagccacgatgagatatctttacacactcatgagaatgggctaaaattaaaatatctgacaatacaagatgttggtaacaatgtagaggaacaggagttctcacatactactgataaacatgtaaactggcacaactattttggaaaccagttttgcrttatgttctaaagttaagatatgcatgcctcataactcagcaattccactcctagattttttcccaagagaaatgtgtgcacaggtacaaaatagtcccaggcagcatgcacacctcatttgagacaagtgaaaaatggtcatagccacattgttcataatagccccaaacttgaaacgaaccacacatcc

SEQ ID NO: 564823 - DNA, 316 bp, Homo sapiens
gctattcccatcaaactagtgatgtcattcttcacagaattagaaaaagttattctaaaattcatatggaataaaaaatgaggctggatagccaaagcaatcctaagcaaaaagaacaaagctggaggcatcacactactcaacatcaaactatactataaggccacagttactaaatcagcatggtaccagaagagaaagatagaccaatggaacagaatagaaaactcagtcataaagccacacacctacaacaatctgatctttgatgaggccaacaaagacaagcaatggyggaaggactccgtattcaata

SEQ ID NO: 564824 - DNA, 540 bp, Homo sapiens
gcctgtttatttttgaaatatacattttttctctgaattgaattctagtttgtcctttttatccagcacttaaataatgatgttattccattttattcttgcttgcatggcttctgacacaaaatctactattaattttatctgtattcctctgtgtgatgaattctgtcctttttttctctgttattcttagagagttcctctttatcactggacttcagcaaattccatgtagcatgtatctgtaagttgtgattgtttcttggtttatatttaatgttaattatgtgctctcagcttcrtagacctgttgcctaacaccttccttatggggaaaattcttgaccaatatcttttcagatactttttcttccctgctctgttgctttcatctcaatattctaactacatgtacgttacactccttggtgttttcctgaagttcttgtgtactcttttctttgtgttttattttcacatttttccctctttgtgttcagtttgcatactatttctaaatctttaagttcacctgagatt

SEQ ID NO: 564825 - DNA, 636 bp, Homo sapiens
ttacaaatttctttcttcagtaataaattaatctgagcttactctaaaaattttgctttattaactttttctttttttaactttgggactttttaaataatgcttaacttaaaacacattttgtatagctttagaaaaatattttttatatcattactttataagcttttttctatttttaatttaatttaatttttttttttactttttaaattttgtttaaaatgaagacayaaacacacatattagtctagatttacacagggtcaggaacatcaatatcactatcttctacctccacatgttttaccactggaaagtcttcaggggaaattacatgcatggagctgtcatcctttataataccagtgccttcttctggaaagtcttctgaagggcctgcctgagattgttttacagttgactttttttttttttaataagtagaaggcgtacactccaaataatgataaaaagtgtattatagtaaatatataaactggtaacatagtcatttattgttattatcaagtattaggtactgtacgtaatcgtatgttccatacatctatatgactgacagcatagtaggtttatttataccatctccacaaacacctgagtgatgtcttgctc

SEQ ID NO: 564826 - DNA, 636 bp, Homo sapiens
ttacaaatttctttcttcagtaataaattaatctgagcttactctaaaaattttgctttattaactttttctttttttaactttgggactttttaaataatgcttaacttaaaacacattttgtatagctttagaaaaatattttttatatcattactttataagcttttttctatttttaatttaatttaatttttttttttactttttaaattttgtttaaaatgaagacacaaacacacatattagtctagatttacacagggtcaggaacatcaatatcactatcttctacctccacatgttttaccactggaaagtcttcaggggaaattacatgcatggagctgtcatcctttataataccagtgccttcttctggaaagtcttctgaagggcctgyctgagattgttttacagttgactttttttttttttaataagtagaaggcgtacactccaaataatgataaaaagtgtattatagtaaatatataaactggtaacatagtcatttattgttattatcaagtattaggtactgtacgtaatcgtatgttccatacatctatatgactgacagcatagtaggtttatttataccatctccacaaacacctgagtgatgtcttgctc

SEQ ID NO: 564827 - DNA, 606 bp, Homo sapiens
tagaaaaatattttttatatcattactttataagcttttttctatttttaatttaatttaatttttttttttactttttaaattttgtttaaaatgaagacacaaacacacatattagtctagatttacacagggtcaggaacatcaatatcactatcttctacctccacatgttttaccactggaaagtcttcaggggaaattacatgcatggagctgtcatcctttataataccagtgccttcttctggaaagtcttctgaagggcctgcctgagattgttttacagttgactttttttttttttaataagtagaaggcgtacactccaaataatgataaaaagtgtattatagtaaatatataaactggtaacatagtcatttattgttattatcaagtattaggtactgtacrtaatcgtatgttccatacatctatatgactgacagcatagtaggtttatttataccatctccacaaacacctgagtgatgtcttgctctatgacattatgacagctagaaggtaaatagcttcataagtgtatgtggttcaccattcaccacaatgttattatgtgatgtgtgactatagttaatgtgc

SEQ ID NO: 564828 - DNA, 606 bp, Homo sapiens
tagaaaaatattttttatatcattactttataagcttttttctatttttaatttaatttaatttttttttttactttttaaattttgtttaaaatgaagacacaaacacacatattagtctagatttacacagggtcaggaacatcaatatcactatcttctacctccacatgttttaccactggaaagtcttcaggggaaattacatgcatggagctgtcatcctttataataccagtgccttcttctggaaagtcttctgaagggcctgcctgagattgttttacagttgactttttttttttttaataagtagaaggcgtacactccaaataatgataaaaagtgtattatagtaaatatataaactggtaacatagtcatttattgttattatcaagtattaggtactgtacgtaatcgtatgttmcatacatctatatgactgacagcatagtaggtttatttataccatctccacaaacacctgagtgatgtcttgctctatgacattatgacagctagaaggtaaatagcttcataagtgtatgtggttcaccattcaccacaatgttattatgtgatgtgtgactatagttaatgtgc

SEQ ID NO: 564829 - DNA, 568 bp, Homo sapiens
ggaaagttaatgtgacaggtagaatagtggccccactaggatgttcacattctaatccccacaatctactagtatgttaccttacatagcataaaaagacttttccaatgtgctcragttactgatcttgagatggggagggtattcttgacgatctgggtgggccaatgtaaccatgagagtcgttataagagggaggcagaaaggtcagtcgccgaaggagatggaacagcagaaacaaaggtgagatttatgcaaagacatgagtcaaggaatgtaggtagcctccagaacctggaaaagacaggggaattaagggtgtcctagaggctctcgtatttttacagtccttctggcccattcttggacttctcacctccataactgttagacagtacagttgtgttgtcaaaagccattgatttcatggtaatttgttacagtaataagagaaacaaatactctttactttgaagcaataatggtcatatattttgatgaatgttgtaatttgaagaataaatcataaattgaaggcacaaacaaagtttttaggaattatttaaaa

SEQ ID NO: 564830 - DNA, 568 bp, Homo sapiens
ggaaagttaatgtgacaggtagaatagtggccccactaggatgttcacattctaatccccacaatctactagtatgttaccttacatagcataaaaagacttttccaatgtgctcaagttactgatcttgagatggggagggtattcttgacgatctgggtgggccaatgtaaccatgagagtcgttataagagggaggcagaaaggtcagtcgccgaaggagatggaacagcagaaacaaaggtgagatttatgcaaagacatgagtcaaggaatgtaggtagcctccagaacctggaaaagacaggggaattaagggtgtcctagaggctctcgtatttttacagtccttctggcccattcttggacttctcacctccataactgttagacagtacagttgtgttgtcaaaagccattgatttcatggtaatttgytacagtaataagagaaacaaatactctttactttgaagcaataatggtcatatattttgatgaatgttgtaatttgaagaataaatcataaattgaaggcacaaacaaagtttttaggaattatttaaaa

SEQ ID NO: 564831 - DNA, 517 bp, Homo sapiens
acacaggactaattatctagaatctgtaagaaacatgaacaattgaacaagcaaaaaccaaataactccattaaaaagcaggcaaaggacatgaacagactcttctcaacaacaacaacaaaagacatacaagcgggtaacaaacatgaaaaagtgcccaacatcactaatcatcagagaagtgtgacacaaaatcacwatgagataccatctcacaccaatcagaatggctgttattaaactcaaaaacaacagaaattggcaagcctgcagagaaagtgaatgcttagtcactgttggtggtaaagtttattagttcagtccttgtggaaggcagtttagaagtttttcaaaggactaaaaatagaactatcatttgactcaggaatcccattactaggtatgtaccaaaagaaaattaatcattctcccaataagttacctaccctcatatgtttattgcagcactattcacaatagcaaaggcatgggagcaacctaggtgcccattaagagt

SEQ ID NO: 564832 - DNA, 556 bp, Homo sapiens
ctccaggatactagactgggcaaagattgcttaagtaataacccacaagcacaggctaccaaagcaaaaattgacaaatgaaattacatcaagtaaaaaagctctgcatagcaaaggatacaatcaacaaagcgaagagataactcacggaatgggagaaaatatgggaaaattacttatctgacaagggattaataaccaaaatatataaggggcacaaamaactcttgaggtaaaaatctattaatctgactaaaaaatgggcaaaatatctgaacagttatttcttaaaagagacatacaaatggaaaacaggtatatgaaaaggtgctccacatcattgatcatcagagaaaagcaaatcaaatctacaatgagatatcatctcactccagttaaaatggctcttacctaaaagacaggcaataactaatgctggtgaggaagttggggaaagggaaccctcacacactgttcatgggaatgtaaattattacaatcactatgaagaaaagtttggagatttctcaaaagatgaaaaatagagctactatat

SEQ ID NO: 564833 - DNA, 553 bp, Homo sapiens
gctattaaaacgtcttcctataagaatgtagatatcagactggtgaaaatttaaggagctgaagtaattttaaattttaattgtaagattttcgtggaggtgatttttcaaaaaggtttagttactgatgttggttcctgtgttatttctggtagatgaatcaattatattaggtaaaagtattatcattggcatgattaaaaagatgttttagcttaaaacctaaatgatgggttgataggtacagcaagccaccacagcatgtgtatacaacctgcatgttctgcacatgtatgtaacaaacctgcatgttctgcacgtgtgtttaacaaacctgcatgttctgcacatgtatcccaggacttaaagtaaaaaaaaacaaaaaaacaaaaacacaactttttttttttttttttttgagatggagtctcactctgtccctcargctggagtgcagtggcgtgatcttggcccctctgcctcccgggttcaagcgtttctcctgcctcagcctcctgagtagctggcactacaggcacccaccaccacgccc

SEQ ID NO: 564834 - DNA, 473 bp, Homo sapiens
agaaagtgaatttggaattctatcagataaatttaacaaagagattgaaattattaaaaagaatcaagcagaaagtccagagttgccaaatgcaattaacatactgaagaattcatcagtctcttaatagcagaatttatcaagcagaagaaagaattattgagcttgaagacaggctatttgaagatacacagtcaaagaagaaaaaagaaaaaaaataaaaaagaattaagcatgtctatcatacctagaaagtagcctcaaaaggccaaatctaagagttattggctttaaaaaggaggtagagaaagataaaggggtttatctttaagtttattcacaggartagtaagagaactttccaaacttagaggaagacattaatatttaagtacaagaaggttatgaaacaccaagcagatttaaccccaagaagactacctctaggcatttaataatcaaacttttaaagg

SEQ ID NO: 564835 - DNA, 405 bp, Homo sapiens
caatcatatgtacacaaaccataaaacttgaaattatcctagacatctattcttcaactcatagacacacaaatttctatccattccacgtccctaagtatcttcactaccttcaatattatataaccatgttatcttttgcctatatataagaaattccttctaataactcttttgctgtattcatatttttatggttccccaaaaaagcaaaaatcagttacatctttaatcaytatgcctagtacctattataaaacttaactataagcacttgttaaatagtttagaccaataaataaacccatctaattaaaacattgcttaaaattccttttcttgaaattttgttaatgactaaaaaagtcagctgtatcagtgagcataattcaatttatatatttt

SEQ ID NO: 564836 - DNA, 646 bp, Homo sapiens
taaatttagtgcaaaggggatagatatagatcttgaattcactgtgttttgctaaggtcttaatttttttataataacttcagtgtaaaaaaagttacacattgggtacagtgtatactgcttgggtgatggtgcaccaaaatctcagaaatcaccactaaagaacttattcatgtaagtaaacactacttattccccaaaacctattgaattgtttttaaaagtaaattaaaaataaataaataaaaggaaaacaaagttaaagtcataaaaatattaatgaaataacagtacagcaggtaataagacatgacaaaaaattatgtaagggaattgtgatgcccaaaaccagcaaaatatcctgttaaatgaagtttccctcagagagaagtattgaatcctatgaatccatgtatgtgcagaacaaaaaaaaaaacagtttctaaattgaataacttacatagaaaaggatatctgttaactctactattctaattaatatgagaatattaataaattaaaatatatyatattcctctatgacttagaaaagttgaccacataaatatgaatccatatctagaattatttctttattcttttttctttttttttgagacagagtttcattcttgttgcccaggct

SEQ ID NO: 564837 - DNA, 463 bp, Homo sapiens
cagctctgtcttaatcatgcaatacagtaaagcttcaatagctagagtcccggggcagtgtagagaagagagaatatcaatagagactatcagtttaccatttgtgtgtctgttttattaatgacaatgacagtctctacaagaacaggaaggtggtaatatggatcagctgtatgtccccacccaaatstcatgtcaaatttaatccccacctcttgaaggaggggccccgtgggaggtgactggatcatgggggcgatttcccccttgctgttctcatgatgagttttcacaagatctggttgtttaaaaatgtgtagcacttccaccctcactctctctctcctgctgtgtcatggtaagatgtgctggcttcccctttgccttacaccatgattgtaactttcctgaggcctcccagccatttttcctgcagagcctgcagaactgtgagttaaccaaa

SEQ ID NO: 564838 - DNA, 561 bp, Homo sapiens
tacttcaacttactttttttggtaaaagttaaaggagaagtgacttctttattacactgactgaggtagaccagaagctcctggttttaggaaaaactggtctgaggctctataatacctgcttcctcaaagtgtcattttgatcaygtgtcattcagcatgagtgactctgttttggtttgatttggtctggtctattagggcctagtgcggaagctcagtccaaaacaatagcctcccataatttttgtttaacacattttatactgtatataaaaaacatacttttttttttttttgagacggagtctccctctgcaagctgaaatgcagtggtgccatctcagctcactgcaagctccacctcccaggttcacgacattctgactcagcctcccgagtagctgggactacaggtgcccgccaccacgcagggctaattttttgtatttttaggagagacggggtttcaccgtgttagccaggatggtctcgatctctgacctcatgatccaccagcctcagcctcccaaaatgctgagattacaggcttgagccacc

SEQ ID NO: 564839 - DNA, 561 bp, Homo sapiens
tacttcaacttactttttttggtaaaagttaaaggagaagtgacttctttattacactgactgaggtagaccagaagctcctggttttaggaaaaactggtctgaggctctataatacctgcttcctcaaagtgtcattttgatcacgtgtcattcagcatgagtgactctgttttggtttgatttggtctggtctattagggcctagtgcggaagctcagtccaaaacaatagcctcccataatttttgtttaacacattttatactgtatataaaaaacatacttttttttttttttgagayggagtctccctctgcaagctgaaatgcagtggtgccatctcagctcactgcaagctccacctcccaggttcacgacattctgactcagcctcccgagtagctgggactacaggtgcccgccaccacgcagggctaattttttgtatttttaggagagacggggtttcaccgtgttagccaggatggtctcgatctctgacctcatgatccaccagcctcagcctcccaaaatgctgagattacaggcttgagccacc

SEQ ID NO: 564840 - DNA, 610 bp, Homo sapiens
tggtaggatccatgatgccccacaagccacaaaaaccagcaagtttttattagggagtttcaaaaggggagggagtatacraataggtgtgggtgacagacatcaagtacttaacagggtaatagaatatcacaaggcaagtggagacagggcgagatcacaggaccacaggaccgaggtgaaattaaaattgctaatgaagttttggcaccattgtcattgataacatcttatcaggagacagggttttgagatcaaccggtctgaccaaagtttattagtcgggaatttcctcttcctaataagcctgggagcgctatgggagactggagtttatttcacctctgcaatctcgaccataagagacaggtatgccccgggggggccagttcagagacctacccctaggtgcgcattctctttctcagggacggaattcagcgatatttctcccatttgcttttgaaagaagagaaatatggctctgttctgcccggctcaccggcggtcagagtttaaggttatctctcttattccctgaacaattgctgttatcccgttctttttttcagggtgcccacatttcatattgctcaaacacacatgctgt

SEQ ID NO: 564841 - DNA, 610 bp, Homo sapiens
tggtaggatccatgatgccccacaagccacaaaaaccagcaagtttttattagggagtttcaaaaggggagggagtatacaaataggtgtgggtgacagacatcaagtacttaacagggtaatagaatatcacaaggcaagtggagacagggcgagatcacaggaccacaggaccgargtgaaattaaaattgctaatgaagttttggcaccattgtcattgataacatcttatcaggagacagggttttgagatcaaccggtctgaccaaagtttattagtcgggaatttcctcttcctaataagcctgggagcgctatgggagactggagtttatttcacctctgcaatctcgaccataagagacaggtatgccccgggggggccagttcagagacctacccctaggtgcgcattctctttctcagggacggaattcagcgatatttctcccatttgcttttgaaagaagagaaatatggctctgttctgcccggctcaccggcggtcagagtttaaggttatctctcttattccctgaacaattgctgttatcccgttctttttttcagggtgcccacatttcatattgctcaaacacacatgctgt

SEQ ID NO: 564842 - DNA, 610 bp, Homo sapiens
tggtaggatccatgatgccccacaagccacaaaaaccagcaagtttttattagggagtttcaaaaggggagggagtatacaaataggtgtgggtgacagacatcaagtacttaacagggtaatagaatatcacaaggcaagtggagacagggcgagatcacaggaccacaggaccgaggtgaaattaaaattgctaatgaagttttggcaccattgtcattgataacatcttatcaggagacagggttttgagatcaaccggtctgaccaaagtttattagkcgggaatttcctcttcctaataagcctgggagcgctatgggagactggagtttatttcacctctgcaatctcgaccataagagacaggtatgccccgggggggccagttcagagacctacccctaggtgcgcattctctttctcagggacggaattcagcgatatttctcccatttgcttttgaaagaagagaaatatggctctgttctgcccggctcaccggcggtcagagtttaaggttatctctcttattccctgaacaattgctgttatcccgttctttttttcagggtgcccacatttcatattgctcaaacacacatgctgt

SEQ ID NO: 564843 - DNA, 442 bp, Homo sapiens
gctaatttttgtatttttagtagagatggggtgttgccatgttggccaggctggtcttgaactcctgagctcaggtaatctgctcatctcagactcccaaagtgctgggatgacaggcgtgagccaccaagcccggctgtttttgaatttttattatctacctgtagattggactggatcctcaaacttttcttgttcccttcaatatctggcttccactagtgacaagaacagttctgttcttgaagccctataatctggagcccgacaagtcaacatcattttctaggggcaactttgtgccttgagagttcactgaaatgacaaatrccacaaccagagaccttcatactgcaaacaggatgagaagttgacaacttcaagttgtggacagcttttcccaagacataagaataagattcatcatcatgagactcttacc

SEQ ID NO: 564844 - DNA, 522 bp, Homo sapiens
agggtggagtgcagtggtgtgatctcagctcactggaacctctacttcccaggctcaagcaatcctcttgcctcagcctcccaagtagggaggcactacaggcatgccaccatgcctggctaatatttgggtttgtttgtttgtttgtttgtagggcaggctttcaccatgttgcccaggctggtctcaaactcctaggctcaagagatccacccaatgccttggcctcccacagtgctgggattacaggtagcatgagcaacacacaaggccccagtatttttcactagtgaagttcatgtgaggtgaaaggaaagaggaaacaggaagattgctccctggtgtttggattggcataagacttacmtgatgtcaatttaatttccacattcactatatatgcctaatggtaggggtgaggtataactcttccttgatttgcttttcagtggcagctatctccccctttccttttgaacttatgtcttttgataacttaagtgttttctttcctcagaattc

SEQ ID NO: 564845 - DNA, 317 bp, Homo sapiens
aataaaaattaaaaaattgaaataaaaaattgttttggaaattacagtttagaatgatctcaagagctcttgttttcacttagagtagtagctctttttccatttagttatatcatttaagtgggttgaggagaaagctattttgacattcattgtaagatgaagaatagcatctgcagattattttattctttgttagtacagaattttattttctaattataaacktatatttagctgtataaatagaaagtttggaaagcagaggagaagtgcaaagtacctgcaatctaagggaaatatttgatttcacagca

SEQ ID NO: 564846 - DNA, 525 bp, Homo sapiens
ccctcctaaataccaaaaggataaaagcaaataaaatagaacaaggtggttccctgttatctgtgatgtaaaaaatggacttggctcacctattaaatggaaaacagtcttggattggctcacaaagcaaaatcaaacaccatactgcatataagatatacagctataaaaggctgggaaaatatatagagaatttataggactcagaaaaaaagtaactgtcacaggmaactttatagcattaaatacctatatcaatacaaatttaaataataaaaataaattatttaaacatataactgaaaaagccagaaaaagaataagtgaaccaaaagaaagaggggaattattacaaataaaagcagatattattaagtagaaaaagaatagaactaagaagtaaatccaaaagctggctctcaagataaaataatcaaccaaaacaaaccactaggtatctgattagaaaaaaaaaaataagaaagttacaagtgctaacagaagaaaatttaaacattgtaaaag

SEQ ID NO: 564847 - DNA, 525 bp, Homo sapiens
ccctcctaaataccaaaaggataaaagcaaataaaatagaacaaggtggttccctgttatctgtgatgtaaaaaatggacttggctcacctattaaatggaaaacagtcttggattggctcacaaagcaaaatcaaacaccatactgcatataagatatacagctataaaaggctgggaaaatatatagagaatttataggactcagaaaaaaagtaactgtcacaggcaactttatagcattaaatacctatatcaatacaaatttaaataataaaaataaattatttaaacatataactgaaaaagccagaaaaagaataagtgaaccaaaagaaagaggkgaattattacaaataaaagcagatattattaagtagaaaaagaatagaactaagaagtaaatccaaaagctggctctcaagataaaataatcaaccaaaacaaaccactaggtatctgattagaaaaaaaaaaataagaaagttacaagtgctaacagaagaaaatttaaacattgtaaaag

SEQ ID NO: 564848 - DNA, 574 bp, Homo sapiens
actcagttgtatgtaagaaaacccaattccccttgaggaagagaaagggctggagtcctttaaaattaactgcctgtttttctctctgtggctagtgagactcatctctccctttgccatgcattgtgaagactctgtttctctagctgtgcagctctaaggtcactagacagataatctcaagtcgtaaaacatgttgttccttgaaaagtaagaaataatgtaatgcatgtcttaattaaataactgtctttgtttctcgcttctgtaatatgctttgccccgcacagatctccctccgccccatgaaatgcttaaaaggtagcttgactctttgtttggggctcagtcctttggatgttaatccgactgactcggtgcacctaaataattaaataattcctcctcaacccctgcctctgattcctcaattatcccacagcaattacatagtccttctttgtgttttgtgacagtttttgacttttatccgatataagtaggccactcctactcccttttagtagagaacatggaatatctcttgcatgsaatctttttccatattttcagc

SEQ ID NO: 564849 - DNA, 417 bp, Homo sapiens
caaggatgcccacttttaccactgttattcaacrtagtactggaagtcctagctagagcaatcagacaccagaaaaaaataaaagacattcaaactagaaaggaagaaatcaaataatccttgtttgcagacatgatcttatacttggaaaaacctaaagactcaaccaaatagggcaggcacagtgactcatgtctgtaatcccagcattttgggaggctgagatgggaggatggcttgaggcccagagttagagagactccaccaaaaggctattaaaactaataaacaaattcaaaatcaacagaccaaaaacacttgccatttctatacaccaaaagcagacaatctgaaaaaataaaattaaaaaagtacaaaaaaaattaaatacctaagaagtaactgaaccaaagaagt

SEQ ID NO: 564850 - DNA, 551 bp, Homo sapiens
acgtatacaccatggaatactatgcagccataaaaaagaatgagatcctgttttctgcaggaacatagatgggactggaggccattatcctcatatcctaaattatgagaacacatggacacacagaggggaacaacacatacttgggcctacttgaggctggagggtgggaggagggagaggatcagaaagactatctcttgggtactaggctaatacctgggtgatgaaataatctgtacaacaaaccccccagacatgagtttacctacatagcaaacctgtacatgtagggtgatgaaataatctgtacaacaaaccccccagacatgagtttacctgtatagcaaacctgtacatgtagggtgatgaaataatctgtacaacaaaccccccagacatgagtttacctgtatagcaaacctgtacatgtagggtgatgaaataatctgtacaacaaaccccccagacatgagtttacctrtatagcaaacctgtacatgtagggtgatgaaataatctgtacaacaaaccccccagacatgagttta

SEQ ID NO: 564851 - DNA, 551 bp, Homo sapiens
acgtatacaccatggaatactatgcagccataaaaaagaatgagatcctgttttctgcaggaacatagatgggactggaggccattatcctcatatcctaaattatgagaacacatggacacacagaggggaacaacacatacttgggcctacttgaggctggagggtgggaggagggagaggatcagaaagactatctcttgggtactaggctaatacctgggtgatgaaataatctgtacaacaaaccccccagacatgagtttacctacatagcaaacctgtacatgtagggtgatgaaataatctgtacaacaaaccccccagacatgagtttacctgtatagcaaacctgtacatgtagggtgatgaaataatctgtacaacaaaccccccagacatgagtttacctgtatagcaaacctgtacatgtagggtgatgaaataatctgtacaacaaaccccccagacatgagtttacctgyatagcaaacctgtacatgtagggtgatgaaataatctgtacaacaaaccccccagacatgagttta

SEQ ID NO: 564852 - DNA, 604 bp, Homo sapiens
ccattcacaaactcgctgatactattatgccaaatattttacatttcttcctctttctcctttacctacaatattctttttcccaactttttatattctaatcttccctctcatttagattctagtatagacgctgttttgtaaaacccacagaggttgcttctccttgtcacctaacataccactctatctcagtcttgagcttcaggcccaatatcttactgaatacctctactttatgtatttaactggcatctgaaacttagcaaggctagagaagaatcactaattttccacacattcttcccaacatcttctgtttgacaaatatcttcagaatcatccctgttaaaaccctcagaatcatccctcatttttcatcttcactcactcagtacaaatttaagttctctttctaaactgtatcaattttgtcacctacattccttctctactatcattacactagtcatcatattttgcctatactactgtaatgtcaccgcaactagagtccctgctttcactcctcgtcctagtacaattacctstctacatcctaggcaagttgaccttttgaaaaatgtaaataagattctataat

SEQ ID NO: 564853 - DNA, 553 bp, Homo sapiens
tttcacatttgcaaatatccctgtttcctttagtttcggttctccatgcttagtaacattatttatatacatatgtgtaytatatttttcaataaaagagttttaatggggaatgaggaaacaatactatgtctttactagcataatcttgtgttgagtttcaggttatcacaaatgagtttcatttaggtgtcattaatcctcacacaaaatgccctgttaatatttttcatgacaagctctttgatgtataagaattacacataaaagggtttgtacacattaaatatattccatttttatttgacaattataccttaataaagctgaaagaaaaagcacaaagggttaatgtctctcagatagtagaagtggaaaggaataaaaaaaacatgaatactaatgccttaatagaaaaataagcaaaagcaatcttaaaagaaagtaacgaaaccattgtttttttttaatttttaatttttttatttttttgagttaggatcttcctgtgtggcccaggctagagtgcagtggctattcacaggcacaattg

SEQ ID NO: 564854 - DNA, 599 bp, Homo sapiens
ggtgtcatgggttgtaaattaacctctctaaaaggttttaagcatagaagaaataactatcttgaatggattaggtatatctcagaagcagggattccctttcaactctaggtttctatggtatcaatgctcttttgattctctatagaagttcagaatggcactactaagctttgaagtaattacatatagtcagatagtataattagccatccagttacaataggcgattccattaaaaatagattttaataaattaaacttaatatttgagtagctaactggctgaatgttggccagatacctgtgtcctaaataaaaggccaaatgtcttcacttaggagctatgactgttattaatgagtatgtatctaatgtatctaatgtgttaatgagtatgtatctaatgtatctaatgagataaatccatataagcctggctactggtggaaattgctctactttgaagaaattttgaaggctataaaacacaaaatatgcacataacataaaatatgtgcatataggtatataaacaccaycaaatatacattcaccttctatggtaaatgatataatattatgttgtagtgctttac

SEQ ID NO: 564855 - DNA, 560 bp, Homo sapiens
  misc_feature 391: n = A,T,C or G
gattttaaacatggatatattaccttgaggataagtgattttgacaggaatctattttcccctacatctatttttttttttaaatcctttggattcagtaattactttttgaagaaagaaggtagtttcagatgytactttttgaaacgacttttgctccttacattttgtatataatactgtaattagaaaaattgttcaaaatatcaaaactttggcccagttcatgcatattttctgactcagaaaatctgccctgcaataataataagccgcattgataaaagaacttacagcaagtttaaaaaacactgccatatgggtaaagctgacctggttttattgaatctgaggttccctaagtaatataaatacatgtttggtcatgatntagagagaactaaggcttattcctgatttgggttcaggtcatgatgcagaagataaagtagaggaaggaaggaggatgagccatgcactgggagaccataataaaatcttttaaacctttaaattctggtggcataattttatatctttttacttatctcatttgctgt

SEQ ID NO: 564856 - DNA, 512 bp, Homo sapiens
tgtccccacccaaatctcatcttgaattataatccccataattcccatgtgtcaagggcaggacctggtaggaggtgamtggatcatgggggtggttttcccccatgctgttctcaggataatgatggatttctcaggatatccaatgattttataagtgtttgaccatttctcccacacacactctctcacctgccgccatgtaagacgtgcctacttccctttccaccatgattgtaaatttcctgaggcctccccagccatgcagaactgtgagtcaattaaacaacttttctttataaattaccccatcttgggtatgtctttatagcagtgtgagaacagactaatacaccacttaaggcagctttgaaaggccacttctgtcaggatgcctaggtggcagccatttcaacatatgccaaagaaatatattttggggcagaatattttcattttcttcataggtgtgagtgattgtgcccagtcagtcccctctgttttgaacccta

SEQ ID NO: 564857 - DNA, 512 bp, Homo sapiens
tgtccccacccaaatctcatcttgaattataatccccataattcccatgtgtcaagggcaggacctggtaggaggtgactggatcatgggggtggttttcccccatgctgttctcaggataatgatggatttctcaggatatccaatgattttataagtgtttgaccatttctcccacacacactctctcacctgccgccatgtaagacgtgcctacttccctttccaccatgattgtaaatttcctgaggcctccccagccatgcagaactgtgagtcaattaaacaacttttytttataaattaccccatcttgggtatgtctttatagcagtgtgagaacagactaatacaccacttaaggcagctttgaaaggccacttctgtcaggatgcctaggtggcagccatttcaacatatgccaaagaaatatattttggggcagaatattttcattttcttcataggtgtgagtgattgtgcccagtcagtcccctctgttttgaacccta

SEQ ID NO: 564858 - DNA, 512 bp, Homo sapiens
tgtccccacccaaatctcatcttgaattataatccccataattcccatgtgtcaagggcaggacctggtaggaggtgactggatcatgggggtggttttcccccatgctgttctcaggataatgatggatttctcaggatatccaatgattttataagtgtttgaccatttctcccacacacactctctcacctgccgccatgtaagacgtgcctacttccctttccaccatgattgtaaatttcctgaggcctccccagccatgcagaactgtgagtcaattaaacaacttttctttataaattaccccatcttgggtatgtctttatagcagtgtgagaacagactaatacaccacttaaggcagctttgaaaggccacttctgtcaggatgcctaggtggcagccatttcaacatatgccaaaraaatatattttggggcagaatattttcattttcttcataggtgtgagtgattgtgcccagtcagtcccctctgttttgaacccta

SEQ ID NO: 564859 - DNA, 427 bp, Homo sapiens
  misc_feature 422, 423, 424, 425, 426, 427: n = A,T,C or G
accacacctagctaatttttttgtatttttagtagagacagggtttcactatattgaccaggctggtctcaaactcctgaccttgtaatcctcctgccccaaagtgctgggattacaggcatgagccgccgtgccctgccaagggtggttttcgtcttggccaatgtcctagagttagcacaaatagaaactccaagccttctcactcacwtcccatgtttttctgttatttgttttgaaggaagggggaaatcgatttgctttttgcttttgtcagtagcaagcagtgtcacataccatggacaaagatctaaatgacacatgttataatcttggagttccttgcaactggctttggggttgctcactaaagtccctaggcaggtgcttcattaaatatgacatctaaatgactcacctannnnnn

SEQ ID NO: 564860 - DNA, 671 bp, Homo sapiens
acaacagtcaatgttatcatcgttgaaacaaacactcaggtcatgtggctggagagtatatatttattggacggtaatttagcagtacttgtcaacagccgtatatgcttatactctttgatgaactaacaaatacaacatggtattagttattatgatgaaaaattggaaaatataatggwtgatgataagtaataagtaagtatagtttagctgtataatgagatatcttggggacattaaaaataaagaattagagtcaaatttacaagacaaaatgttcttgagttatatgcacatatgtaacttgtagtatttggttgcattttcctccattcattaccttaaatcatattttatcagatctggaggaagtcctcataaactggggctagaagtcagctaaaaccatataaaaaattaaattcaattggttgtattttaaaatatccttaaagttgtatggtcctagtaatattgaataatgcacaatctcatcacacccaaagcttttttggttctagattatacagaccaatcaataaaaaaatcttttttttttttttttttgcatttacactaatgagtttatttttttttattttattttttttattttttttttattatactctaagttttagggtacatgtgcacattgtgcaggttag

SEQ ID NO: 564861 - DNA, 532 bp, Homo sapiens
gctacatcaagagtcaaagamacgtaggccgggcatggtggctcacacctgcaatcccagcactttgggaggctgtggcaggtggatcgtttgaggtcaagaatttgagacaagattgaccaacatggtgaaacctcgtctctactaaaagtacaaaaaaattagccgaatgtgatggcacatgcctgtaatctcagctacttggaagtctgaggcatgagaatcccttgaacccaggaggcagaggtggtagtgagctgagatggcgccactgcactccagcctggacaacagagcaagacttcgtctcagaaaagaaaaagagtcaaagacacaggcaagagtgaaatccaaggttctcaatgcccaggtcaggggaattaatgactataccctgtttatcctctaaccttctccttctggtctcctgttaattgccattctcatccaagcactgaagggcaggaattcattcctttcagcaaattcagtttgttggaagccaccttttactttgtcctcccaccaaagt

SEQ ID NO: 564862 - DNA, 510 bp, Homo sapiens
agcactacaccaagaagtgtgttggataatgcttgagatgtgagcactgcaccaggaggtgtcttagatcatgcctgagtgtgagcacctcaccaggatgtaccttgcatgatgcctgagttgtgtgggcactgcatcaggatgtgttttggatcacccttgaggtgtgagcactgyaccaggaattgtcttggatcatccctgagtgtgagcactacaccaggaggtgtttggggtcatccataaggtctcagcaccgcaccaggtttcttgtattatgcctgagtgtgagcactgcaccaggagatattttgaatcatgtctgagttgtgagcactgcatcaggaggtattttggatcatccctgaggtgtgagcattgcaccaggaggtgtcttggatcatccctgaggtgtgaacattgcacccagaagtgtcttatgtcatgcctgcagtgtgagcactgcaccaggatatctaggatcatccctgaattgtgagcactaaacca

SEQ ID NO: 564863 - DNA, 429 bp, Homo sapiens
tctgtcacccaggctggaagagttgaggaagaaatcggtgctctccctggatatggggaggaaagtgtctgaagtggtttcttaagtctgggctgctccctgccaccagctccctcccccttggcctccacaaagcctcaatttggccccagaacccacacgtctcagctcctgtcagtctctgaaagtgctcttgaatcaaagtcattagcaaagggccagctggctgtgtgaggggccatgggctttcacaggcagtgaccacaggaggcccctgccaaactcacatcctttaccaactcaggaccctctgtttccacaacaggacagacgccctgctcaaaagatactctcagggtcccccaggcgagcacgtctggatttmtgagttattgagccaaagaaatgtttatgttgcctttggctttt

SEQ ID NO: 564864 - DNA, 441 bp, Homo sapiens
attgtgaccatgacagacctgaatttccacctggctctactgttgcctctgtctggtcttggactagtcctataacctctctgcacccctataaaatgacagtaataatattaacaccagacagggttggatgaggattgracacatagcacattaactggtatataatatgccctcaatattttgtagttgttatacttatcatatgcttttctaagggtaaatcttgacagaataaggcctaccagccagggggagatcaggttacaagcatagggtgttgggatgagtgatcactgcctttcatgtctaccccttaaagagtaccttggaaggaaactatccagccaccaccatctcgggtcatacctgtaataggacagtgacatgagccatggactgggaaatgggaaaatcatgtcatctcaaatgctcttcatt

SEQ ID NO: 564865 - DNA, 441 bp, Homo sapiens
attgtgaccatgacagacctgaatttccacctggctctactgttgcctctgtctggtcttggactagtcctataacctctctgcacccctataaaatgacagtaataatattaacaccagacagggttggatgaggattgaacacatagcacattaactggtatataatatgccctcaatattttgtagttgttatacttatcatatgcttttctaagggtaaatcttgacagaataaggcctaccagccagggggagatcaggttacaagcatagggtgttgggatgagtgatcactgcctttcatgtctaccccttaaagagtaccttggaaggaaactatccagccaccaccatctygggtcatacctgtaataggacagtgacatgagccatggactgggaaatgggaaaatcatgtcatctcaaatgctcttcatt

SEQ ID NO: 564866 - DNA, 522 bp, Homo sapiens
acgcataaccaaatcatatcactttccttgtcttaagttttctaaattatgtttgaaatttgaagtaaaaaattatggcaccctctgatatagttctaattatgtaatagaaatatttaaaacaattatattataaatgaggatagtaaggggtcataaaggcaaataagatttctacacttcactaaaattggcaaaattatgacacctgtagactgtgataaattatgaatctataatgtaatacctacagcaactaaaacgccatgcaaagaggaactgatatggtttgactgtgtgcccacccaaatctcatcttgaattgcagttgccataattcccatgtgttgtgggaggtaactgaatcatggggacaggtctttcctgtactgttctcatgayagtgaataagtctcattaatcttatggctttataaaggtgagctcccctacacaagttttctcttgcctgctgccatataagatgtgactttgctccttattcaccatacgccatgatta

SEQ ID NO: 564867 - DNA, 513 bp, Homo sapiens
tccaagacacatgcagtgagttctcagtgtttactaccagcacacaaatgatggctgctttattatttggtgacctttgttgtttgttgtgattgttctgttcagttttagtccctcacagcactttcagccatttagaaagacagtatttgttctgctagagcatttgcaatctgtttctgattagcttaactggtcttgaccagtgctaagttcacatttcagctttgatttatgctgtctctatctgcagatatgtttcttgttacgctaaacaagaggaggcctcttcttactgacttcttattttcatgtgaacgaggtaataggtatcaggaataattagacaaggccatacgtgctartgtcataggagactgagatatggagagtaaataataacaaaattcctgattactagggcatagaaaaaaaatcttaggcaattccccaagttgataatcccaaatgtctaggtgtccttctcaaatagggaaacatgacattaaaact

SEQ ID NO: 564868 - DNA, 518 bp, Homo sapiens
gataaagacctgcagtaaggacgttttaatcttttaatctagacggttcacgagttccactggtgtgtctctgggggcaggctcccagatcacagactggttccaccgtgccccgtgacctcagcgtgccattagatgggaggccgttatttcagggraaaaatcatgtttgaaactaagtgggtccccggcagtttgcagcaacactggctgctcaaaaggacagcacgaggcttttcacagcatgtagatgccatggctttatgagagctttgagcttgggagggtctacttgtgcttttgcaaccttagtttagatttcatttgcatctactatttgtaagtgcaccatttttctaagggaagtatgtatgtgagaattatctacatgatttttgtaggtggctcacaaaacaaatgtcagtagccattctatggccttggagtatcatttcccacaccttttctatgggctgtctttatttttgactctaatacgtatcccttatcatacaaaa

SEQ ID NO: 564869 - DNA, 531 bp, Homo sapiens
ctgagccttggggacgctgggccgtggctgagggtgcagccccgtggcctgtatcttggggatatgtagtggggtgccctttagggccgacacagctagcccgtgccttaccactggacagcagcccaacttcgggcatggcaccaggcctcactcaacctcagtttccctagcatgatcatatgtacttcacagggttgccatccaaatgggacgagatgttattagtraagggccagcatgttgcaatccctatccatgtgacagtggatggtggtaaagcttctgctgcccagaaacttccttccctcaaagggtttttgacctatttgcaagttgatactcctctctgaggcctgttttacaaaacaagggaaatctgctgcccctacatattgtctaaattcctgctttctgattctcataaccttctttttcacacatgtggaggaaattattatctgtacccaatattattattattattattattatttcgagagagtctccctctgtcccaggctggggtgc

SEQ ID NO: 564870 - DNA, 531 bp, Homo sapiens
ctgagccttggggacgctgggccgtggctgagggtgcagccccgtggcctgtatcttggggatatgtagtggggtgccctttagggccgacacagctagcccgtgccttaccactggacagcagcccaacttcgggcatggcaccaggcctcactcaacctcagtttccctagcatgatcatatgtacttcacagggttgccatccaaatgggacgagatgttattagtaaagggccagyatgttgcaatccctatccatgtgacagtggatggtggtaaagcttctgctgcccagaaacttccttccctcaaagggtttttgacctatttgcaagttgatactcctctctgaggcctgttttacaaaacaagggaaatctgctgcccctacatattgtctaaattcctgctttctgattctcataaccttctttttcacacatgtggaggaaattattatctgtacccaatattattattattattattattatttcgagagagtctccctctgtcccaggctggggtgc

SEQ ID NO: 564871 - DNA, 456 bp, Homo sapiens
tggtggtaaagcttctgctgcccagaaacttccttccctcaaagggtttttgacctatttgcaagttgatactcctctctgaggcctgttttacaaaacaagggaaatctgctgcccctacatattgtctaaattcctgctttctgattctcataaccttctttttcacacatgtggaggaaattattatctgtacccaatattattattattattattattatttcgagagagtctccctctgtcccaggctggggtgcagtggcacaatctctgctcactgcaacctccgcctcccagrctcaagtgattctcctgccttagcctcccgagtagctgggattacaggcatgcaccaccatgcctgactgatttttctatttttagtagagacagggtttctccatgttggccaggctggcctcgaactcttgacttcaggtgatccacctgcct

SEQ ID NO: 564872 - DNA, 561 bp, Homo sapiens
attcaatggaggaaagatagactttttaacaaatggtgttttattggatatcctcagtcagaaaactcctcaatctaaacctcacatattgtgaaaaattaacttagaattgataatatgcctaaatataaaatgtaaaactctaaaacttttagaataaaacaggagaaaaatcttcattactagagttaggcaaataktccttagaagacctaaagcactatccataaaaaaaagataacatcaactggatttcatcaaaatacttttattctgcaaaatatattgttaaagaggatgaaaagaccagatatagactgggagaaaatatttgcaaattacatatttgatctaaaaggttgtacctagaatgtataaaggtggctctaaactcaacagtaagaaaacaaagaatccgattaagaagtggagaaaagaatgagcacacggaaagatgctcagcatcattagtcattagggacatgcaaattaaagctatgaggagacaccatgactcacatgttagagcagctaaactaaaaatactgacaataccagcag

SEQ ID NO: 564873 - DNA, 561 bp, Homo sapiens
attcaatggaggaaagatagactttttaacaaatggtgttttattggatatcctcagtcagaaaactcctcaatctaaacctcacatattgtgaaaaattaacttagaattgataatatgcctaaatataaaatgtaaaactctaaaacttttagaataaaacaggagaaaaatcttcattactagagttaggcaaatattccttagaagacctaaagcactatccataaaaaaaagataacatcaactggatttcatcaaaatacttttattctgcaaaatatattgttaaagaggatgaaaagaccagatatagactgggagaaaatatttgcaaattacatatttgatctaaaaggttgtacctagaatgtataaaggtggctctaaactcaacagtaagaaaacaaagaatccgattaaraagtggagaaaagaatgagcacacggaaagatgctcagcatcattagtcattagggacatgcaaattaaagctatgaggagacaccatgactcacatgttagagcagctaaactaaaaatactgacaataccagcag

SEQ ID NO: 564874 - DNA, 623 bp, Homo sapiens
ggaaaacaaaacaaatttccctcaacaggtgaatggatgaacaacctatggtatatccatamaatggaatagttctcagacatcaaaataaataaaatcccacaacatcaccaaaggagactttagtttcatctgtaatgttttaaggttttaagtagacagactattttcatgttctatttgttgttgagtttttaaaattgatgtttcttttattacaaagtatgaaaactacaagagcatacctccgtgcctggtcaatgtcctgtcatgtagatagattctccctcaccatagccaaaccctctctttgagcagtaggttctagccttctttctaccccaccaaattccttctcattctctcttgcatcatcaatttttctctttctaccaaattatttctatcaacaagtacacggatgggctattatttttcccatcttaacaaataaggaaatctctcttgacctcatttccccctccagctatagctttatttctagaaagcagtgtctgttctgtcttcaatttctttcccctttctctcctcactcaattcagagtttcaccccctcttccccagcaaatccttttttttgccaaatccatgtatacttttct

SEQ ID NO: 564875 - DNA, 623 bp, Homo sapiens
ggaaaacaaaacaaatttccctcaacaggtgaatggatgaacaacctatggtatatccatacaatggaatagttctcagacatcaaaataaataaaatcccacaacatcaccaaaggagactttagtttcatctgtaatgttttaaggttttaagtagacagactattttcatgttctatttgttgttgartttttaaaattgatgtttcttttattacaaagtatgaaaactacaagagcatacctccgtgcctggtcaatgtcctgtcatgtagatagattctccctcaccatagccaaaccctctctttgagcagtaggttctagccttctttctaccccaccaaattccttctcattctctcttgcatcatcaatttttctctttctaccaaattatttctatcaacaagtacacggatgggctattatttttcccatcttaacaaataaggaaatctctcttgacctcatttccccctccagctatagctttatttctagaaagcagtgtctgttctgtcttcaatttctttcccctttctctcctcactcaattcagagtttcaccccctcttccccagcaaatccttttttttgccaaatccatgtatacttttct

SEQ ID NO: 564876 - DNA, 623 bp, Homo sapiens
ggaaaacaaaacaaatttccctcaacaggtgaatggatgaacaacctatggtatatccatacaatggaatagttctcagacatcaaaataaataaaatcccacaacatcaccaaaggagactttagtttcatctgtaatgttttaaggttttaagtagacagactattttcatgttctatttgttgttgagtttttaaaattgatgtttcttttattacaaagtatgaaaactacaagagcatacctcygtgcctggtcaatgtcctgtcatgtagatagattctccctcaccatagccaaaccctctctttgagcagtaggttctagccttctttctaccccaccaaattccttctcattctctcttgcatcatcaatttttctctttctaccaaattatttctatcaacaagtacacggatgggctattatttttcccatcttaacaaataaggaaatctctcttgacctcatttccccctccagctatagctttatttctagaaagcagtgtctgttctgtcttcaatttctttcccctttctctcctcactcaattcagagtttcaccccctcttccccagcaaatccttttttttgccaaatccatgtatacttttct

SEQ ID NO: 564877 - DNA, 589 bp, Homo sapiens
cttcctccagcttattatgcaactttaccttgtgaacatgcaagtcaatattctccttaataaactccctttcagatatatagtctcctattaggcctgccctccggagaaccctaagatagatagatagatagatagatagatagatagatagatagatagatagatgatcgatagatagatagatagatagatagatagatagatagatagatagtgtcaggcctctgagcccaagctaagccatcatgtcccctgtgacctgcacgttcacatccagatttccagttcctgccttaactgatgacattccaccacaaaagaagtgaaaatggcctgttcctgacttaactgatgacattgtcttgtgaaattccttttcctggctcatcttggctcaaaagctctcccactgagtaccttgtgacccccagtcctgcccgccagagaacccccctttttcctttacctacccaaatcctataaaayggccccacccctatctccctttgctgactctcttttcggactcagcccacctgcacccaggtgaaataaacagctttattgctcacacaaagcctgtttg

SEQ ID NO: 564878 - DNA, 624 bp, Homo sapiens
tgatgtgatgaattactttgcatgggagaaaaatccctccaccatcttaaaccctggccactgtgggagcctgtcaagaagcacaggtaagaaacagaagagctgcctcttcccagcactttccactcctcatccccaatttcctgaccttcaggaaatccttttcagctaggtaatgcagtgtttatgtgccttctcccgtctcctctcatctctgccttctttgagtctcattctcctggattgagaaactggtgaagatgagagagaagctttaaatcctaggctaaaacctgggatgcctcttcactgggttcacaagttcccccagccccatgccttttatattctgtctccctaggatttctgaagtggaaagattataactgtgatgcaaagttaccctatgtctgcaagttcaaggactagggcaggtgggaagtcagcagcctsagcttggcgtgcagctcatcatggacatgagaccagtgtgaagactcaccctggaagagaatattctccccaaactgccctacctgactaccttgtcatgatcctccttctttttcctttttcttcaccttcatttcaggcttttctctgtcttccatgtcttgagatctc

SEQ ID NO: 564879 - DNA, 618 bp, Homo sapiens
ctttttacctaaacgttagactgttgataagaataaggcaatttataaatagtgatgaaattaattttatttttcttaaaataaacacactgaggtatatagatagtatgtatttaagtaaaaaatcagttttaaatattttatctctttgtcattttattgaaatttagtcctattttacatattgcctaaaattatcttactttcctaaaaaagtaccttcatggccaagtcaatgttttattctgagcattaatrcataaaaaaaatggtgtagttttgtattgaaataccttatctacattaattcctataatgatccacatctacagttaagacagctgtgttatattaagttttgaactctgtataattatattacctgaggtgatttctgagtgtgcactatttgtatctatgttgaattatgtcttttaactttactataatgttataatcaccattctaactagagtgagatgatattttattgtggtttagatttgcattttcctgatgatgagtgatgtggagcattttttcaaatacctgttggccatgtgtatgtcatttcttgagagctgtctattcagctaatttacttatttttttaatagg

SEQ ID NO: 564880 - DNA, 387 bp, Homo sapiens
ctggggaacccgtagtgcaaatctgtggaccactcagttatggagagaggttgtgcccgaaggtggacactggggtatgctccctccaccacctcatcctccactgctatcctcagtacagctgcttctggtaagcgtgcaggccatggacgccaccctcgatctgggctgacatggtccacttctcaaatttgagctctyctgagtacatcatggagccatgctggttactcgctatgaggtagggcacaaacttctgaatggaccctttgtcctggatggaggccgagacaccctgcacaatattcaccttttccccctcgctgaagtatcgtttctggctgctgctgctcttctccatggcatctagcgagcccatgccccagt

SEQ ID NO: 564881 - DNA, 399 bp, Homo sapiens
agaggtaaactgggggggtccacgccctacctggagaaaaagatattactcacttccatctgaatactgccatttcaacagacagtatcactggagcttttaaatctttaagagaagtcaaatatccagaatttcatgtaacatctcctgatttgtmaatgttggagactaagtcaaagcaccatgtgggctgaataaaactcattcatcctgtggcctgtcactttgcaaattccattataaattctattaagtacttttcactttttaaacctaagacaaaaaggggaagttttcatccagtgaaatgacatgatcacatttgtgttgaatttatttctaatgcaaccacatatacacagtgacacacacatttacacaaacctctgagtgtatgaa

SEQ ID NO: 564882 - DNA, 602 bp, Homo sapiens
tttggacttcagtcctccaaaacatataatttatataataaatatgtgccactttaagctaagaagttcatggtaatttgttatggcagcaataggaaagtaagagacccattattcagatgatgaagctaagactcgagagcatgtcccaggccccccatgtagttaggtggtaggatgatgtagatgtaagtgcagtcagcttaactccacactcttcctcttgtcctctgtacaaagtcaagggagttgatcaaacaataagaaacactgtgtgcaacactcagttcctgggattttggtgctataaggtcatgactattccaccctgcaatctcttcagcacccactctgtactttgggactgtttttcctctccatggaattctaagctcaaataactgcagtcagttgtaaaagtgcacagacaggaacaagacacctcctgcatgggtctcagagtctgatggaaagggcagtcgtaagtgagtagtaataaaacattgggaagaaaaactccatgggtgcagggcattgccttttcacargagtatccccagagccaagatcaatggctgactcatagtaggcacttaataaat

SEQ ID NO: 564883 - DNA, 602 bp, Homo sapiens
tttggacttcagtcctccaaaacatataatttatataataaatatgtgccactttaagctaagaagttcatggtaatttgttatggcagcaataggaaagtaagagacccattattcagatgatgaagctaagactcgagagcatgtcccaggccccccatgtagttaggtggtaggatgatgtagatgtaagtgcagtcagcttaactccacactcttcctcttgtcctctgtacaaagtcaagggagttgatcaaacaataagaaacactgtgtgcaacactcagttcctgggattttggtgctataaggtcatgactattccaccctgcaatctcttcagcacccactctgtactttgggactgtttttcctctccatggaattctaagctcaaataactgcagtcagttgtaaaagtgcacagacaggaacaagacacctcctgcatgggtctcagagtctgatggaaagggcagtcgtaagtgagtagtaataaaacattgggaagaaaaactccatgggtgcagggcattgccttttcacaggagtatccccagagccaagatcaatggctgacycatagtaggcacttaataaat

SEQ ID NO: 564884 - DNA, 603 bp, Homo sapiens
aaaatcagtacaacaatcccttggctcccatsaacatcgtagaccccactgtgtgcaggggccgcagtcgacggcagggtatgaggagaaacaggacaggtttccatgtcccttgtgagcgcagagtgtaggaggaagattgacaggaaaaccaaaataagacacctgaaactccacgatatgataaatgatatgacaacagggggaggtgctaaatgttacgagagtgcagcagaggcataaaataaaagaagcctgaagcaaacttttaattcgttacacaaaaaagtctttagtcttctttgccgagattaaagcagtgccactctgggtctggagccgaactggtagctggggtctagaagaattcagagttcatcccgagtcttctctagagatggaagcctggagaagcctggagaagcctggggaagccagaaggccctgaacccctgacaaaaagcctaaggatcctcacccagcaatgctgaccacgaccattaaaacatgaagcccacccccaaagaggaaaatccttgccctttaatgaagctgccaaaaacctccaaatttaacagtttgcactgtgtctttctgcagaca

SEQ ID NO: 564885 - DNA, 472 bp, Homo sapiens
ctgaggcacgagaattggttgaacccggcaggtggaggttgcagtaagccaagatcatgccactgcactccagcctgggtgacagagcaagactgtgtctccaaaaaaaaaaaaaaccacgatagtcctcaatcaaatcaaaccctccatttatacaaaatgtaatctaattataaacacaattttttaaaattcaacataacaccctaaaagaaatataaagcagacattaaaggaaagtaatatgtaataaaatagcaattaagtcaagatgtaaacatcccctatgtgactgtactagaggactagtgaagctgggagatgcctgcctctctcrtgataccatgagcatctttgtaaatgagtcagctgcaatgtaaactgctacatgtgtgcgggatagtggctccaaatcacatagagctttgccattggtgatgaaatttactatatcagttaacaacccttgcta

SEQ ID NO: 564886 - DNA, 472 bp, Homo sapiens
ctgaggcacgagaattggttgaacccggcaggtggaggttgcagtaagccaagatcatgccactgcactccagcctgggtgacagagcaagactgtgtctccaaaaaaaaaaaaaaccacgatagtcctcaatcaaatcaaaccctccatttatacaaaatgtaatctaattataaacacaattttttaaaattcaacataacaccctaaaagaaatataaagcagacattaaaggaaagtaatatgtaataaaatagcaattaagtcaagatgtaaacatcccctatgtgactgtactagaggactagtgaagctgggagatgcctgcctctctcgtgataccatgagcatctttgtaaatgagtcagctgcaatrtaaactgctacatgtgtgcgggatagtggctccaaatcacatagagctttgccattggtgatgaaatttactatatcagttaacaacccttgcta

SEQ ID NO: 564887 - DNA, 472 bp, Homo sapiens
ctgaggcacgagaattggttgaacccggcaggtggaggttgcagtaagccaagatcatgccactgcactccagcctgggtgacagagcaagactgtgtctccaaaaaaaaaaaaaaccacgatagtcctcaatcaaatcaaaccctccatttatacaaaatgtaatctaattataaacacaattttttaaaattcaacataacaccctaaaagaaatataaagcagacattaaaggaaagtaatatgtaataaaatagcaattaagtcaagatgtaaacatcccctatgtgactgtactagaggactagtgaagctgggagatgcctgcctctctcgtgataccatgagcatctttgtaaatgagtcagctgcaatgtaaactgctacatgtgtkcgggatagtggctccaaatcacatagagctttgccattggtgatgaaatttactatatcagttaacaacccttgcta

SEQ ID NO: 564888 - DNA, 472 bp, Homo sapiens
ctgaggcacgagaattggttgaacccggcaggtggaggttgcagtaagccaagatcatgccactgcactccagcctgggtgacagagcaagactgtgtctccaaaaaaaaaaaaaaccacgatagtcctcaatcaaatcaaaccctccatttatacaaaatgtaatctaattataaacacaattttttaaaattcaacataacaccctaaaagaaatataaagcagacattaaaggaaagtaatatgtaataaaatagcaattaagtcaagatgtaaacatcccctatgtgactgtactagaggactagtgaagctgggagatgcctgcctctctcgtgataccatgagcatctttgtaaatgagtcagctgcaatgtaaactgctacatgtgtgygggatagtggctccaaatcacatagagctttgccattggtgatgaaatttactatatcagttaacaacccttgcta

SEQ ID NO: 564889 - DNA, 533 bp, Homo sapiens
aatatgaaacaagatgaaacgcaagtaaaaaaactttaaaagaggaaaaggtgagcttaatctcatatttagtttttaaaacatcatacactgagaaagtataacaccaagttcaagaacctttatgcacataacacaatagcttcagatatcatgtcttcaaactgagaatttttcttagtgaaacccaaacaaaaacttcctatgcaattcaacctgctgttttcattttcactgaggctaggcagggtggtcctgagggaccccttaggacactatcttctctgcctggagataagaggaggaaaaatgacaacaggaagcagagtgcttttttttttctttgagacagagtctcactctgtcgcccaagctggagtgcagtggtgcaatcttgactcactgcaagctccacctcccgggttcaagccattctcctgcctcagcctcccaagtagctgggattacaggcgcccrccaccacacccggctaattttttgtatttttagtagagacagggttttcactatgt

SEQ ID NO: 564890 - DNA, 403 bp, Homo sapiens
agagaggacatccttttctatcctatcctcaaaattcaactcaatgagtcaagatgaaccagcatgctaacttctgtgtgcccacagcggtagttccctgactgtaaaaccataaaggtcaaagcaaactatgcaacatctatttatcttggacacaggtatctatttctgtcttcgtcttttccagaaaatattagagttaccttcaccagtccatctgggatatcatgatcctgaatacttcagtccagactcaactgttatctatgtcttgccagaaamtattaaagacccctcaaacaaatctctttaaaccatggatcctttgaagggtaaaagaataggttgagcctgggaggacacccagtttgaacatatttgaaataaagataagcttggaatt

SEQ ID NO: 564891 - DNA, 379 bp, Homo sapiens
gagagtgagactctgcctccaaaaaggtaatgataaaataaagtttatattgccagttgttggtggatacagacataaaagtatataatcttgcagaggagcagcaatcatctaatcaagctggtggttacttcacagattcatttaaatatgtatgaagattcacttttttgtatgtctgaaatatttcatcaccaaatgtctaagtggaagttaccccaaaagaactgaagcacctctcccactaccattttcagccctctccatctctcctctctctttctacctattaacctatacacattttaaccaatacacgttttacaaatatatakagagagaagacaggataaataggtagataagttgtatggatggg

SEQ ID NO: 564892 - DNA, 643 bp, Homo sapiens
tttccagcatcttaggcatatctgtctttaaaatataaacaacagtatgttagccaggcttgccggctaacatactgttgattatgggcttttggtattattcacagcaggggtccccaatccccgggctgtagactggtaccggtctgtggcctgttaggaactgggccacactgcaggaggcgagcattactgcctgagctccacctcctatcagatyggcagtggcattagattctcataggagtgcgaaccctattgtgaactgcacatgtgggagatctaggttgcacgctccttatgagaatccaactaatgcctgatgatctgaagtggaacagtttcatcttgaaaccatcccccgctgatcctgtggaaaaattgtcttccaaaaaggttggggactacaaatctagagtaatactgaaatccagaaagactgctgactgaggatgaagaagaatgaattgcactttgaaataggttctagtcaatgtcctcagaatgtgcaggactggaactcaggagagagaacagggatggaacaagaaggttaagtcattctgctgagggtgaatgttaatgccctaagtgtgctgagagatgtatcagttgggaaaacaataaaataattgcttaagaa

SEQ ID NO: 564893 - DNA, 643 bp, Homo sapiens
tttccagcatcttaggcatatctgtctttaaaatataaacaacagtatgttagccaggcttgccggctaacatactgttgattatgggcttttggtattattcacagcaggggtccccaatccccgggctgtagactggtaccggtctgtggcctgttaggaactgggccacactgcaggaggcgagcattactgcctgagctccacctcctatcagattggcagtggcattagattctcataggagtgcgaaccctattgtgaactgcacatgtgggagatctaggttgcacgctccttatgagaatccarctaatgcctgatgatctgaagtggaacagtttcatcttgaaaccatcccccgctgatcctgtggaaaaattgtcttccaaaaaggttggggactacaaatctagagtaatactgaaatccagaaagactgctgactgaggatgaagaagaatgaattgcactttgaaataggttctagtcaatgtcctcagaatgtgcaggactggaactcaggagagagaacagggatggaacaagaaggttaagtcattctgctgagggtgaatgttaatgccctaagtgtgctgagagatgtatcagttgggaaaacaataaaataattgcttaagaa

SEQ ID NO: 564894 - DNA, 633 bp, Homo sapiens
ctggtgggtgtgcttttcctctcaacagccagcacctgtgtgtcttttgttggccagcagccctccggctgtcataacctgctctgcctgtgkgcatggaaatccagagatgcctgagaatttatatccttcgtccacagccttctaactcatgtctgactagtggagagaacaaatatactccagttcccttgctcactggatagaagactctgaagtgtacctacactgtttccagaaccttgcctgtggtatattacttgatagcatacacttacttgaccttcccttccttgtcctgctttggtggttattcctagaaacagtttctactaaatcacttttacctgaagccttgcctcaggctctgcttcttgggaacccaacctaagatggtcactttcttggcctcccctattgtatactatggtttgtaatttcagatgaaatttatcatttctatatacgtatcaaatatcctttctgtaacaggcactgagctaggggtggaaatacggtagtgatcaggaggaatatggttcctgccttcagggagcttacacctaggcagagaaaagactctgaagtctgatgaaggttatgatcaactatatgatgttattatgaataaga

SEQ ID NO: 564895 - DNA, 633 bp, Homo sapiens
ctggtgggtgtgcttttcctctcaacagccagcacctgtgtgtcttttgttggccagcagccctccggctgtcataacctgctctgcctgtgtgcatggaaatccagagatgcctgagaatttatatccttcrtccacagccttctaactcatgtctgactagtggagagaacaaatatactccagttcccttgctcactggatagaagactctgaagtgtacctacactgtttccagaaccttgcctgtggtatattacttgatagcatacacttacttgaccttcccttccttgtcctgctttggtggttattcctagaaacagtttctactaaatcacttttacctgaagccttgcctcaggctctgcttcttgggaacccaacctaagatggtcactttcttggcctcccctattgtatactatggtttgtaatttcagatgaaatttatcatttctatatacgtatcaaatatcctttctgtaacaggcactgagctaggggtggaaatacggtagtgatcaggaggaatatggttcctgccttcagggagcttacacctaggcagagaaaagactctgaagtctgatgaaggttatgatcaactatatgatgttattatgaataaga

SEQ ID NO: 564896 - DNA, 633 bp, Homo sapiens
ctggtgggtgtgcttttcctctcaacagccagcacctgtgtgtcttttgttggccagcagccctccggctgtcataacctgctctgcctgtgtgcatggaaatccagagatgcctgagaatttatatccttcgtccacagccttctaactcatgtctgactagtggagagaacaaatatactccagttcccttgctcactggatagaagactctgaagtgtacctrcactgtttccagaaccttgcctgtggtatattacttgatagcatacacttacttgaccttcccttccttgtcctgctttggtggttattcctagaaacagtttctactaaatcacttttacctgaagccttgcctcaggctctgcttcttgggaacccaacctaagatggtcactttcttggcctcccctattgtatactatggtttgtaatttcagatgaaatttatcatttctatatacgtatcaaatatcctttctgtaacaggcactgagctaggggtggaaatacggtagtgatcaggaggaatatggttcctgccttcagggagcttacacctaggcagagaaaagactctgaagtctgatgaaggttatgatcaactatatgatgttattatgaataaga

SEQ ID NO: 564897 - DNA, 633 bp, Homo sapiens
ctggtgggtgtgcttttcctctcaacagccagcacctgtgtgtcttttgttggccagcagccctccggctgtcataacctgctctgcctgtgtgcatggaaatccagagatgcctgagaatttatatccttcgtccacagccttctaactcatgtctgactagtggagagaacaaatatactccagttcccttgctcactggatagaagactctgaagtgtacctacactgtttccagaaccttgcctgtggtatattacttgatagcatacacttacttgaccttcccttccttgtcctgctttggtggttattcctagaaacagtttctactaaatcacttttacmtgaagccttgcctcaggctctgcttcttgggaacccaacctaagatggtcactttcttggcctcccctattgtatactatggtttgtaatttcagatgaaatttatcatttctatatacgtatcaaatatcctttctgtaacaggcactgagctaggggtggaaatacggtagtgatcaggaggaatatggttcctgccttcagggagcttacacctaggcagagaaaagactctgaagtctgatgaaggttatgatcaactatatgatgttattatgaataaga

SEQ ID NO: 564898 - DNA, 568 bp, Homo sapiens
aatttcactgattgtcttgtacataaaacttcttagcctgtatgtggcatctgtagccaatgatgataaattttgtattctaccctccaatggaaatggacaactctgatatagagtcccctcccttctcctaaactttttaataaaagcattccaacttgtaacagacctgggaacacacctggctttgttggtgggtcttcctgggttgatcctcaaatgcgatttctaataagcatttaagaaaatgaaataaaagaagttatttctgcctccacatcttaattttggtctacatcttaaagcaactgtaagaaaacaaatagcccatttaaaaaaattggccaaagaccttaacagacaccttgccaaagaagataaagatggcaaatgatcatatgaaaagatacrctatatcatatgtcatcaaggaaatacaaattaagacaatgaactaccaccatacatttattagaatggccaaaatccaggacatggacaacaccaaatgctggtgaggatatgaagcaaagggaattctcattaatttctggtgggaatgcaaaat

SEQ ID NO: 564899 - DNA, 619 bp, Homo sapiens
cacactggcttcactgtcctcagaccctccaaaaccaacctattcactcttcaatgaggagcccagggcatgcacacacaggactcaggaggggacccaaatcacactggttatgaatttctaatccccttccaaggctccagcgtcctcggcaaacacagagccacagatcagagcctcctgcatcccccatgggctcctttctaaatcaacagatgagaaatcaggggagccaaccaggtgggccagagcgctgggcgggcctkcaagaggcagatggagggtggatggtcttggggatgaggctgctcgctgtggaactcaggtcaataagtgctctttgctgggcaaattttaccaccatgagcaccatgtggccatgggtgactcagatatggggaagaagcatctttgccagctgttaagagacccactgggtgggcacccattgccagggctggccaggacccaggaatggatcccaacaggcctgggtttgagtctggctctgccatccccagatggagtggactcgggtgagtctcatcacctctcagagcctcagtttccatacctggattggtgtgcgtggggtaggagggagcagggcaggagctgg

SEQ ID NO: 564900 - DNA, 435 bp, Homo sapiens
ctttactgatatgtatttcataacarccactgagcaattcacagttgaattgatgagctatcagggttatgtgtttctgtaaaacagagacatctaccttggaaaagctttctccagggaaacagacctatttgagctaaagtaaaacaagattaaagtgtgattaaagtgctgcaaatacgacctacgtggaaaggttggaagaactgggattatttaacctgggacagaaaagctgcaaagagatttcaggaaaacttcaagtgtccaaaaccctgactccactcagtgctttccttggcctccatagattatagagcagcaagcatgatcttaagctgtattattagggttttaggtcagtcaatggccttcaagccccagctgctgcacgttaaaatcacttagcagccatttaaaacatgctaatgcctg

SEQ ID NO: 564901 - DNA, 518 bp, Homo sapiens
tgctctggtggggccttggagaacctttatgtctagctcaaggattgtaaatacaccaatcggcactctgtgtctagcttagggtttgtgagtgcaccaatcgacactctgtgactagctgctctggtggggccttggagaacctttatgtctagctcagggattgtaaatacaccaatcgacactctgtatccagctcaaggtttgtaaacacaccaatcagcaccctgtgtttagctcaaggtttgcgaatgmaccaatcgacactctgtatctagctgctctggtggggccttggagaacctttgtgtccatactctgtatctaactaatctgatggggacgtggagaacctttatatctagctcagggattgtaaacccaccaatcagcaccctgtcaaaacagaccacttggctttaccaatcagtgggatgtgggtggggctagataagagaataaaagcaggctgcccgagccagtagtggcaacccactcgggtccccttccacactgtg

SEQ ID NO: 564902 - DNA, 538 bp, Homo sapiens
ggtgcagcacaccaacatggcacatgtatacatatgtaactaacctgcacattgtgcacatgtaccctaaaacttaaagtataataaaaaaaaaaagaattgcctgttgaaggaattagcttgctcaaagtcactcacatcagtcaatacaggggtatgaaggcctacctcctttgccccaactccagacaactctgtagaaccatcctagcttcagagctccctattcaaatgtatgaagctttcactgacaatgcgtcaaaggacgacctccccttctgtcaagccttgcttcctccccttccttctgacagatgttggtgccaaggtaactccataggcactttctacacactacttttcatgttatattctgattcttgyagaacatcacctttgatagttgggaacagatgtgcttagagaaagcagatactaagatagtatgttcaacttgtcagctggcaacaaggattccatcactaatggtagataaggcacacatataccctggagcaagataggagtgaaatatata

SEQ ID NO: 564903 - DNA, 538 bp, Homo sapiens
ggtgcagcacaccaacatggcacatgtatacatatgtaactaacctgcacattgtgcacatgtaccctaaaacttaaagtataataaaaaaaaaaagaattgcctgttgaaggaattagcttgctcaaagtcactcacatcagtcaatacaggggtatgaaggcctacctcctttgccccaactccagacaactctgtagaaccatcctagcttcagagctccctattcaaatgtatgaagctttcactgacaatgcgtcaaaggacgacctccccttctgtcaagccttgcttcctccccttccttctgacagatgttggtgccaaggtaactccataggcactttctacacactacttttcatgttatattctgattcttgtagaacatcacctttgatagttgggaacagatgtgcttagagaaagcagatactaagatagtatgttcaacttgtcagctggcaacaaggattccatcactaatggtagataargcacacatataccctggagcaagataggagtgaaatatata

SEQ ID NO: 564904 - DNA, 520 bp, Homo sapiens
ttatttaatatgttaaattataagtgtagcagtcaaataataagtgatgctaagccatctttaagtatatttatggatatattattaagtgtacaaaaattgtatgagattcctagaaatctagtatgttatcagtcataattttggttattctgttaaaatgctgtatgccatgctaaccaaattttcttataaattgcatcattgtaatgaactctcattagattttttaaccatggacattttaagtccttgtcatctgtagacagttattgttttaatttaattgttctctaaaagcatttgaaattagcyacagtccaaaatggcttcttcttcaaggagatttatggaaaatagtcttatgagtattctggaatacaggtttctgaacaactttgacatcataccattggactggtaagaatttccagaactctaataaaactgatgggttcatgtaactactaacccaagatcaagcaaaacaagatttaattacatggtactgaatgaactg

SEQ ID NO: 564905 - DNA, 421 bp, Homo sapiens
catccaggctgtgatattctggtatagcaatctgaaaggactaagacattaggtctcagttttattctatggcttaaaatatcatgtcatgagtagacaacttccaatcctagtaccttgtgcttcctctgctgcatttggaaagaaggcatttcccccttcaatcgtggaatgaaaaagktgtacttcattctgatttgattagcagaaggcatatgctctttcatgcaccaattacaatgaccaagaattgggcatgggactcatgtcacttaaacattgtgaagctgagaaattcattatttggttaggagtgtgtgagatcagggaacactgaatgcttgaggtaccaccacgatgtccactgcaggtatttccatttcagtaaacatttccattaagataatgctagaacaaaatc

SEQ ID NO: 564906 - DNA, 595 bp, Homo sapiens
tatattaatgtttaatttatatcccaaatacttaaaaactatgtttcattgttatacatatttattttattataaagataatgaatgcagtagggttagatttaaataactcattggktttaaaatgagaaacgaaggtctggctttttactacctacagtcttaccatcaaagttagctattgttaataatttcttgtccattcttgtatgtgttatggtttctttcttagaaagaagtacactatactagtatacatactatttattcgtgaactttgcatttgtcatgtaatcatatgtcttagtggtcatttcataatagatgtctctctttcccatgctgtcagtggtgactgcatgaggcattgtacagacgtaccagtaattacttactctgtgtcatattgatggttattcagattgttttcactttgcccttgcagacaacactgcaatgaacatccttattcatgtattatcccaaatacatcacagtgattgctgtctgagagaaatatacattgttgattttatttttttactttttataatttcaacttttgattttagatacagtgggtacatgtgcaggt

SEQ ID NO: 564907 - DNA, 576 bp, Homo sapiens
gaacgggcgtggtggctcatgcctgtaatcctaggactttgggaggccgaggcgggcgggtggatcacctgagatcaggagtttgagaccagcctggccaacatggcaaaaccccatctctactaaaaatacaaaaactagctgggtgtggtagcaggtgcctgtaatcccagctacttgggaggctgaggcaggagaattgcttgaacccgggaagtggaggttgcagtgaatcaggatcactctactccactccagcctgggcgacagagtgagactctgtctcaatacataaataaataaataaatwaattaattacataaaaatgctatagattattgagtttctatatttaagtggtctgctatggtgtactaatagtcattatatgcctttttgaaaaggtgaatgttgacaaattatgttacacgcagtcagtaaaaataaaagatggagtgtaaatgttcagtaggaagcaaattgtaaggtacagtgactatgaatagcctataagagggtgccagtgaaagcaggaatgggaaaccaaactgacattaataaagaagggactatta

SEQ ID NO: 564908 - DNA, 459 bp, Homo sapiens
tcactgcagccttgaccttctgggctcaagtgatccttccacctcagcctctcaagtagctgggagtacaggcacatgccaccatgcccaattaatatgtttatttttttttttttttttgagacagagtttcactcttgttgcccaggttggagtgcagtggtaccrtctcaccccaccgcaacctctgcctcctgggttcaagcaattctcctgccccagcttcccgagtagctgggattataggcacgcaccaccatgcccagctaatttttgtatttttagtagagatggagtttcaccatgttggccaggttcatctagaactcctgacctcaagtgatctgcccgcttaggcctcccaaagtgctgggattacaggcatgagccaccacacctagctatgtttaattttttgtagaggtgtggtctcactatgttgcccaggctggagaattc

SEQ ID NO: 564909 - DNA, 575 bp, Homo sapiens
tggccaacacggtgaaaccctgtctctactgaaaatacaaaaaaattagtcgtgcgtggtggtgggtgcctgtaatcccagctactcgggaggctgacgcacgagaatcacttgaacccaggaagtggaggttgcagtgagctgagttcgcaccattgcactccagcctgggtgacagagcatactccatctcaaaaataaataaataaataaataaataaataaacaaacaaaacaactaaagaaacctccccacaaaaaaagaattctcagggccttcaaataccagctttacagttgatcttcttaattaagctatttaattaagctattttaaaaataacttattttactatttaagcaatgacttattttgggaaaatagcatttgagaattctcattatatgctgaaggcaggttgagaggtaaggttagcagtgactgacagtaatgagaaactgatgcttacttctgccattatggtagtttatgaacagtggcatgggagtaatcagyataggtgatgttctaaaacagaacattccacttgggtaataaaattgaggctttagta

SEQ ID NO: 564910 - DNA, 454 bp, Homo sapiens
ttggccaggctggtcttgaactcctgacctcaggtgatctgcctgcctcggcctcccaaagtgctgggatgacaggcatgagccactatgcccrgaccaagttcttgacttagaaataaaggcaaggaagagaaaagcctacgtgggaagtaaataagcttggagatgatacgcgagttgccaggaatctagaaaataatttctaacttggtactaagcactaaactgggcatcttacataactgtatgcttaaaattcttatgaccaccctgtaaggaagtgtaatgatctttaacacatgaggacatcgagactcagcagttagatgacctaatactcacatgccatgtatataaaaacctatatgttgaaatattaactcctgcaaaactgggcaataactgccaagaagtttccaaaccaaagcaaatagatgaatataaaagtaagaaa

SEQ ID NO: 564911 - DNA, 336 bp, Homo sapiens
tttctagccattcatgatgaatactaaaagggtgttgtgctcctccagaagcaaggaagaggaaaactcagcaaagcatggaaattaggcccttttgccaccaaattatttaaaaatacattgactacttactgtgttcattgcgtgggcaaaaagaagaagcttctgctgtcatattctttttcttttttcttttttgagatggagtctygctctgtcaccaggctggagttcagtggcgtgatcttggctcactgcagcctccacctcttaggttcaagctattctcctgcctcagcttcccgagtagctgggattacaggcacgcactaccat

SEQ ID NO: 564912 - DNA, 570 bp, Homo sapiens
ttctccccgtctgtgggttgtctgtttactctgctgaatatttcttttgctgtgcagaagatttttagcttaattacgtcccatttacttatttttggttttgttggggtcttagtcattaattctttgcctaagccaatgtctagaagagtttttttatgttatcttctagaatttttatggtttcaggttttagatttacatctttgatccatcttgagttgattttttcataaggtgagagatgaggatcgagtttcattcttctacatgtatgtgccctgccggktttcctagtatcatttattgaataaagtgcccttttcccaatttatgcttttgtaagctttgttgaagattagttggctgtaagtatttggctttatttatgggttctctatcctgtttcattggtctgcatgcctatttctatagcagtgccatgctgtttgggtaactatagccttgtagtataatttgaagttgagtaatgtgatgcctccagatttgttctttttgcttagtattgctttggttatgtgggctcttttttggctccatataaatttt

SEQ ID NO: 564913 - DNA, 530 bp, Homo sapiens
ggctcatgcctgtaatcccagcactttgggaggctgaggcaggaggatcacaaggtcacaagttcgagaccagcctgaccaacatggcgaaaccccagctctactaaaaatacaaaacttagctgggcatggtggcttgcgcctgtaatcccagctcctcaggaggctgaggcaggagaatcgcttgaatccaggaggcagaggttgcagtgagccgagattgagccactgcrctccagcctgggtgacagagcaagctccgtctcaaaaaataataataataatagtaataatttgtagaaactgtcatcccaaggttcgcgtccttcaaccattctacccatggtttgtcttgagtaaatctctagttaagtctaaacatctaagcacttctctttctttctaatttcctgtcccttgtgagaagtaaaatttcggtaatggcatatttatgtatagctgggattaattcaagtagcatctttatatataagttcatggctttggtttctcacaagctattcatcaga

SEQ ID NO: 564914 - DNA, 530 bp, Homo sapiens
ggctcatgcctgtaatcccagcactttgggaggctgaggcaggaggatcacaaggtcacaagttcgagaccagcctgaccaacatggcgaaaccccagctctactaaaaatacaaaacttagctgggcatggtggcttgcgcctgtaatcccagctcctcaggaggctgaggcaggagaatcgcttgaatccaggaggcagaggttgcagtgagccgagattgagccactgcgctccagcctgggtgacagagcaagctccgtctcaaaaaataataataataatagtaataatttgtagaaactgtcatcccaaggttygcgtccttcaaccattctacccatggtttgtcttgagtaaatctctagttaagtctaaacatctaagcacttctctttctttctaatttcctgtcccttgtgagaagtaaaatttcggtaatggcatatttatgtatagctgggattaattcaagtagcatctttatatataagttcatggctttggtttctcacaagctattcatcaga

SEQ ID NO: 564915 - DNA, 524 bp, Homo sapiens
ctaaaaacacaaaaattagccgggcatggtggcatgaacctatagtagtaatcccagctactcgggactgaggcagaagaattacttgaacccaggaggcagaggttgcagtgagccgagatcgcgccacttcactccagcctgggcgacagagcaagactccatcacaaaaaaaaaaaaagcaaatyggttaaaaggctgaaccatacaagtactggatataaacaaactcatcagtcatttccatctgtaacttctatcaaggagggttatagctggtcaaagagttattttatgaagttgtgtcaaaagcaagaaggacatccctgatttctcaaagattccatgggaacttgatgacctgtgctcaataatgttttttttctgtatcctttcacctgaaaaaagcatactgtatagtaggaaaggaaaagagaaaaagggggaaagattcaagatagctactaataaattactaatagttaccatttattgatagcctaagatgaacccagtgtaataag

SEQ ID NO: 564916 - DNA, 524 bp, Homo sapiens
ctaaaaacacaaaaattagccgggcatggtggcatgaacctatagtagtaatcccagctactcgggactgaggcagaagaattacttgaacccaggaggcagaggttgcagtgagccgagatcgcgccacttcactccagcctgggcgacagagcaagactccatcacaaaaaaaaaaaaagcaaatcggttaaaaggctgaaccatacaagtactggatataaacaaactcatcagtcatttccatctgtaacttctatcaaggagggttatagctggtcaaagagttattttatgaagttgtgtcaaaagcaagaaggacatccctgatttctcaaagattccatgggaacttgatgacctgtgctcaataatgttttttttctgtatcctttcacctgaaaaaagcatactgtatagtaggaaaggaaaagagaaaaagggggaaagattcaagatagctactaataaattacwaatagttaccatttattgatagcctaagatgaacccagtgtaataag

SEQ ID NO: 564917 - DNA, 510 bp, Homo sapiens
tcccgggttcattccattctcctgtctcagcctcccgagtagctgggactacaggtgcccacaaccacgcccagctaattttttgtatttttagtatagacggcatttcaccatgttggccaggatggtctcatctcctgacctcgtgatctgcctgcctcggcctcccaaagtgctaggattacaggcatgagccgccgtgcctggccctttggagtctttaaaagagaggaacgtagagtcttgttaaacaaattcagtgtctgaggtcttaaaataactacagtcattccagtggacatcagcgagaaagcattttgctgaaatacgttgactctatcagatgcaagtyggagaaccctcaggcggaagctgagcatagtaagaaattggagaggaagagttttggattttatctaaatatttttgacacttaatcctttaaattttaatttataaaggtaagggaattcaatttctggacttaataatttttctctgggatagtca

SEQ ID NO: 564918 - DNA, 510 bp, Homo sapiens
tcccgggttcattccattctcctgtctcagcctcccgagtagctgggactacaggtgcccacaaccacgcccagctaattttttgtatttttagtatagacggcatttcaccatgttggccaggatggtctcatctcctgacctcgtgatctgcctgcctcggcctcccaaagtgctaggattacaggcatgagccgccgtgcctggccctttggagtctttaaaagagaggaacgtagagtcttgttaaacaaattcagtgtctgaggtcttaaaataactacagtcattccagtggacatcagcgagaaagcattttgctgaaatacgttgactctatcagatgcaagttggagaaccctcaggcrgaagctgagcatagtaagaaattggagaggaagagttttggattttatctaaatatttttgacacttaatcctttaaattttaatttataaaggtaagggaattcaatttctggacttaataatttttctctgggatagtca

SEQ ID NO: 564919 - DNA, 561 bp, Homo sapiens
tattagcatttttcattgtggtaaaatatgttacatatgtaatataaaatgtatcattttaagcatacaagtttagcagcattaagtacattcatgttgctgtgtgtattagtgagtattctctatagaaacagagccaataggacatgtatcattgtgatgcttaatttgaggtgtcaacttgactggattaaggaatactaagaactgggtgcggtggctcaatcctgtaatcccagcgctttgggaggctgaggggtttggatcacttgaggccaggagttcgakaccagcctggccaacatggggaaacctgtttctattaaaaacacaaaaattagccaggcatggtggtgtgtgcctgtaatcccagctacttggaaggttgaggcatgagaattgcttgaacccaagaggcagaggtttcagtgagccaagatcgctccattgcactccagcctgggtgacagagcaacactctatctcaaaaaaaaaaaaaaagcctggtaaagtattatattttggggtgtgtctgtgatggtgtttcaagaggagattagc

SEQ ID NO: 564920 - DNA, 465 bp, Homo sapiens
gttaaagaatcagagagaacagatgtctctccttaagcattttatttcaccatttttttcgcatacaattttttagaaaacatgatatgagattctttatactgaacattatgtttctgcttcaaaaagatgagccttcctgttcttcttcctaatatgacacttactgtacacatcattaagcagataagagccacagtctgcagatcctgcctcacctcaccygcgttttaactctataacatttgctcttggcacagctggaagcacaaatatgataaaagggtagataactgtcttcaaagatacagatatgatatagaaaatcaccatttttgttcctatcaaagtgttctgatagaaccaacaagcaacaatagaatgaatacattttttcaatctcaataaactacttgttaagtgtttaccatgtccctaggaagtaggaacgaggaggggaaaagg

SEQ ID NO: 564921 - DNA, 565 bp, Homo sapiens
ggtttttcattaataaatatttaatttattgatgaatattgatgaatatttattgataatacatattgcattgtgctctttatgtcaacaaaaacacatttaaaaattattaaaaatttgcccctgttttatcacatcctaaaataatttcgtctgagaaacatcttccacctccttcaaaatacctatcacatgccaaggtagactgcaatccaagataaaaggggagatgaataaaacctacagaatgaacagctcagmagcctcatttatcagaaatattgattggtttgataataattccgtgtgaggcaataattattctggaaggagccttcatgaagtacaagacaaaattcagagtaaaattgcttgaaagtaaatgggagcatagacgcttgtgtgacagactttgtcctttgcctacacaaatgtcttcacctccttcccagattctatgctaagaaaactctgggagataacttaatctcagagaggacaaatgctgtgttattccaaggggataaattatgattgttttaaatgaatcattataatctcattc

SEQ ID NO: 564922 - DNA, 565 bp, Homo sapiens
ggtttttcattaataaatatttaatttattgatgaatattgatgaatatttattgataatacatattgcattgtgctctttatgtcaacaaaaacacatttaaaaattattaaaaatttgcccctgttttatcacatcctaaaataatttcgtctgagaaacatcttccacctccttcaaaatacctatcacatgccaaggtagactgcaatccaagataaaaggggagatgaataaaacctacagaatgaacagctcagcagcctcatttatcagaaatattgattggtttgataataattccgtgtgaggcaataattattctggaaggagccttcatgaagtacaagacaaaattcagagtaaaattgcttgaaagtaaatgggagcatagacgcttgtgtgacagactttgtcctytgcctacacaaatgtcttcacctccttcccagattctatgctaagaaaactctgggagataacttaatctcagagaggacaaatgctgtgttattccaaggggataaattatgattgttttaaatgaatcattataatctcattc

SEQ ID NO: 564923 - DNA, 614 bp, Homo sapiens
agagaaagagcctcctgtgctggggaccccttcagacatcaccccatatatctcttcatctagctgttcatttgtaccctctacaataaactgctactcataagaatagctcttgtccgagctctttgagtcattctaagaaattctccagcctgaaaaggggtaatgagaaccctcacatttgtagccaggttggacataattcagtaccattgggacsagggactggcagctggcatctgaggtgaggacagaccaggggaattgagctccttaactgtgggtgtacgctaattcctggtaattagtctccgtattgaattgaattgtagagcactcaattggtatcagagaatcatttttggaatgacataggttattaattcctgagccagatatgcaagagaatggaatggtcagcgagacatcaccatatggcaatgctaaggtatgggggtttacacctatcttgtacaatctacatataaggcattttagaagaagataacaacattcactggcaacaattcatgtcaagaattttgttttttagtttttaaaagatccatttaaataaccatgaaaataacaacattagcagctaccactgatca

SEQ ID NO: 564924 - DNA, 637 bp, Homo sapiens
agagcagaaaatatatttaaaaagcaacaatataaagaggaaattaattttctttttgtttcctaagtattacttaatacttacaatatatttttcctattacttatataggtattgccatcgacactttgtaagttgtagtaatacacactcataaattcagcagttaactcctctagctttgcacrtaatgctgttatttcttttaaaacacacggttatcctattacgcatgtgaagcttggaataaaatatatattaaaatatgactaaaaataaaaacagattttataggctttggaagtactatactttaaaagatctatatttttcacactgaggaaggagaactactgaaataaagtgtactgtgtcaaagtattacacacagaatatgagaatggcaatattgaatatccttgcccaactgtggaaaattaaggattaagatttgaggaaagtctaaatgcgttaaaatggaaaatgtaggccaggcatggtcgtcacgcctgtaatcccagtactttgggaggccaaggcaggtgtatcacctgaggtcaggagttcatgaacagcctggccaacatggtgaaaccctggctctactaaaaatacaaaaattagccaggggtggtgg

SEQ ID NO: 564925 - DNA, 542 bp, Homo sapiens
agcactctcttttaccttgttataaaaggttaaattttcccttcagaaatttggaaggcgtggggaaaatttaagggagcaataaagaagaaaagcagaaatctgaacatagatgacaataaaaagaaatgataaatacatgcatgtacactcatgcatgtttgcacacacacatgcacatgtgtacacatgcccaacaaccacaaacacatccacaaataaaacaagagacactggccaggggcagtggctcacgtctgtaatcccagcactttgggaggctgaggcggacagatcatgaggtcaggagttcgagaccagcctggtcaagagaccagcctggccaatatggtgaaaccccatctctactaaaaatacraaaattagctgggtgtggtggtgggcacttgtaatcccagctactcaggaggctgaggcaggagaattgctttaacccgggaggcagaggttgcagtgagccgagatcacaccattgcactccagcctaggtgccaaaacgagactctgactcaaagaaaaaa

SEQ ID NO: 564926 - DNA, 237 bp, Homo sapiens
cccaaaaagaaacaaaacccaactctagtcttcatgacagtggcagtgaccaggaaaataggacagatctgttttctcagctttctctgcactccccagtgtctagagaggaaggtaagcaagggtgtaagctcaggccctggtgtaacgtttgkgcataacagagctgggctggaacttggcctctccactactgtgtgttttcgttgttgttgtttttttttgtttttttttttt

SEQ ID NO: 564927 - DNA, 627 bp, Homo sapiens
aaaatacaaaaattagcctggcggtctggacgcagtggctcatgcctataatcccagaactttgggaggctgaggcaggtggatcacgaggtcaggagatcgagaccatcctggaccacatggtgaaactccttctctagtaaaatacaaaaaattagccaggcgtagtggtgcgcrcctgtagtcccaggtacttgggaggctgaggcaggggaatcacttgaacccagtaggcagaggttgcagtgagccaagatcgcgccattgtactccagcctgggtgacagagatagactccatctcaaaaaaaaaaaaaaactagttgggcgtggtggtgcatgcctgaggtatggagctatatgtgaccaaagtcttcgtatactattaaatgttaatttaaactagactattataaattaagatattaatggtaatctccaggtaaaccattaagaaaataacttaaaagtgtatactaaaacaaatgaaaaagaaatcaagtgacactagaaaatatctaacacaaaagaaaaaaattatagagaaattaataattaaaagatattgcctatagaaaacaaagagaaaattggcaaaagtaagtctttttatatctttaatttcatt

SEQ ID NO: 564928 - DNA, 627 bp, Homo sapiens
aaaatacaaaaattagcctggcggtctggacgcagtggctcatgcctataatcccagaactttgggaggctgaggcaggtggatcacgaggtcaggagatcgagaccatcctggaccacatggtgaaactccttctctagtaaaatacaaaaaattagccaggcgtagtggtgcgcacctgtagtcccaggtacttgggaggctgaggcaggggaatcacttgaacccagtaggcagaggttgcagtgagccaagatcgcgccattgtactccagcctgggtgacagagmtagactccatctcaaaaaaaaaaaaaaactagttgggcgtggtggtgcatgcctgaggtatggagctatatgtgaccaaagtcttcgtatactattaaatgttaatttaaactagactattataaattaagatattaatggtaatctccaggtaaaccattaagaaaataacttaaaagtgtatactaaaacaaatgaaaaagaaatcaagtgacactagaaaatatctaacacaaaagaaaaaaattatagagaaattaataattaaaagatattgcctatagaaaacaaagagaaaattggcaaaagtaagtctttttatatctttaatttcatt

SEQ ID NO: 564929 - DNA, 523 bp, Homo sapiens
acttaaatatgcactatatacaatttcacgatcaatagattaatacatagtacagcragtagaaaatacctacaatacgcaatgaggaagaaaattatgaaatctaagtggtttttgaagcataaattttatttatgaggcatacacagggaaggataattctcaagaagtctaaaaaagcactttgggaatagcgtgaagactaacaggacctaaaaacagattgggataacgttatttatttatttattttatttattttttgtttttttgagacggattcttgctctgttgccaggctggagtgcatcggcgtgatctcggctcactgcaacctctgcctccttgggtttaaccgattcccctgcctcagcctactgactagctggaactacaggcacacacaaccagatgcagctaatttttttttttgtattttagtagcgacagggtttcaccatgttggccattatggtttctttctcctgaccttgtgatctgcccgccttggccacccaaagcg

SEQ ID NO: 564930 - DNA, 523 bp, Homo sapiens
acttaaatatgcactatatacaatttcacgatcaatagattaatacatagtacagcaagtagaaaatacctacaatacgcaatgaggaagaaaattatgaaatctaagtggtttttgaagcataaattttatttatgagscatacacagggaaggataattctcaagaagtctaaaaaagcactttgggaatagcgtgaagactaacaggacctaaaaacagattgggataacgttatttatttatttattttatttattttttgtttttttgagacggattcttgctctgttgccaggctggagtgcatcggcgtgatctcggctcactgcaacctctgcctccttgggtttaaccgattcccctgcctcagcctactgactagctggaactacaggcacacacaaccagatgcagctaatttttttttttgtattttagtagcgacagggtttcaccatgttggccattatggtttctttctcctgaccttgtgatctgcccgccttggccacccaaagcg

SEQ ID NO: 564931 - DNA, 576 bp, Homo sapiens
tgggtggagcccaccacagctcaacaaggcctactgcctgtagactacacctctgtgggcagggcacagttgaactaaaggcagcagacaactttggcagacttaaatgtccctgtctgacagctctgaagagagcagtggttctcctagcatgccatttgaagtctgagaatggacaggctgcctcctctcatctgtccctgacccctgtgtaacctatctgggagacagctcccagtaggggctgacagacacctcatataggcagctgcccctctgggatgaagyttccagaggaaggatcaggcagcaatatttgctgttctgaaatatttgctgttctgcatcctctgctggtgacacccaggcaaacacaatctgcagtggactacaccaaatcccaaaagtcctgcagctgagggacctaagtgttagaaggaaaactaacaaatagaaaggaagagcatcaacataagcaaaaagttcatctacaccaaaactccatctgtaggtcaacaacatcaaagacacaaggtagataaaaccacaaagatggagagaaactacagcagaaaa

SEQ ID NO: 564932 - DNA, 575 bp, Homo sapiens
gtcaaaacctatgggacgcaatcaagcaaaccaacatgtctgtaataggaatcccagaaaaggaagagaataattttttttaaaaaaagagagaataatatatgtgaaaaatagtaaccaaaaactatccaaatacccaaaattaatttcaaaattaatctaaagatcttraaagttaaaactttcaaaaaacatacatgtaagtaggagaaacacaaaaagatccacacctagatgcataatagtcacactattgaaagacaaagtaaagcctcaaaagcagtaacagaaaaatgactcaatgtgcatataggggaaacaatgattaacagctaatttctcataagaagcaatggagacccgaagtcagaatgacagatttggactggtgaaagaaaaaaaaactatcagggattctatataagtgaaacaaaactgtattttaaaaagacaaaataaaggcattcacacataaacaaagagagaatttgtttccaaaagatttgctttacaagatctactaaaggaaattcttcaggctgacatcatgtggcaacttaaatccatacaaagaa

SEQ ID NO: 564933 - DNA, 575 bp, Homo sapiens
gtcaaaacctatgggacgcaatcaagcaaaccaacatgtctgtaataggaatcccagaaaaggaagagaataattttttttaaaaaaagagagaataatatatgtgaaaaatagtaaccaaaaactatccaaatacccaaaattaatttcaaaattaatctaaagatcttaaaagttaaaactttcaaaaaacatacaygtaagtaggagaaacacaaaaagatccacacctagatgcataatagtcacactattgaaagacaaagtaaagcctcaaaagcagtaacagaaaaatgactcaatgtgcatataggggaaacaatgattaacagctaatttctcataagaagcaatggagacccgaagtcagaatgacagatttggactggtgaaagaaaaaaaaactatcagggattctatataagtgaaacaaaactgtattttaaaaagacaaaataaaggcattcacacataaacaaagagagaatttgtttccaaaagatttgctttacaagatctactaaaggaaattcttcaggctgacatcatgtggcaacttaaatccatacaaagaa

SEQ ID NO: 564934 - DNA, 575 bp, Homo sapiens
gtcaaaacctatgggacgcaatcaagcaaaccaacatgtctgtaataggaatcccagaaaaggaagagaataattttttttaaaaaaagagagaataatatatgtgaaaaatagtaaccaaaaactatccaaatacccaaaattaatttcaaaattaatctaaagatcttaaaagttaaaactttcaaaaaacatacatgtaagtaggagaaacacaaaaagatccacacctagatgcataatagtcacactattgaaagacaaagtaaagcctcaaaagcagtaacagaaaaatgactcaatgygcatataggggaaacaatgattaacagctaatttctcataagaagcaatggagacccgaagtcagaatgacagatttggactggtgaaagaaaaaaaaactatcagggattctatataagtgaaacaaaactgtattttaaaaagacaaaataaaggcattcacacataaacaaagagagaatttgtttccaaaagatttgctttacaagatctactaaaggaaattcttcaggctgacatcatgtggcaacttaaatccatacaaagaa

SEQ ID NO: 564935 - DNA, 606 bp, Homo sapiens
taggggacttcaatatcccatttaagacaatggatagaacatccagacaggaaacagcagacgtgaacagcactgtacaccaagtggacctaacagacatagaccgaactttccacccaacagcagaaaaagacattcttctctagcacacacaaaaaagtcttcaggatatatcacatattaggtcacaaacaagtcttaacaaattttatttcttttaaaaaaaattttgtcttagagacagagtcttgctctgtcacccaggctggagtgcagtggtgyaatcaaagctccctttagtcttgaactcctggacttaagcaatccccttgccccagcctcctgagtaactaggactacaagtgtacaccaccatgtccagctaatttttttttttcagagatggaggtcttgctatgttgcccaagctggtcttgaactcctggtctcaagtgatcctcctgcctcaacctcctaaagcactaagattataagcatgagccaccatgcttgaacttaacaaattttagaagatgtaaataatatcaagtatattttccgaacacaatggtataaaactagaaattcataacagaaggaaaatag

SEQ ID NO: 564936 - DNA, 502 bp, Homo sapiens
ggtgtgggccatgatcatcatgctctgtctcatcgcggccgtcctctctgccttcttggacaacgtcaccaccatgctcctcttcacgcctgtgaccataaggtacgcaaagcacctctgccgtgggagttgcggccaggttctggcaggcaggggctctgcctgcactgcctggctccaggttccattctcaggtgcatgaaaaggtgggggcrgttgagcccacagctcactgcattccagtccagctcgtgtctgctttgtgtgactgcagtacatgctacaagcagtggggcctcagaagctggtggcagaaatgcctgcaggaggtggaagacataggccttgctttcctggagattgtggtctcatggggagacatgtggacaagaatggctcacccctggtgaaaccccgtctctactaaaaatacagaaattagccaggcgtggtggcacgtgcctgtaatcccagctactggggaggctgaggcaggagaatc

SEQ ID NO: 564937 - DNA, 615 bp, Homo sapiens
tacttgagagattaagtgaacaaatggcaaaattattttcaataacatagaggttgcaaatacttatgtatagatcaaagaaataatgtgcaattctggagtgaaggatcagaacagatcattgacataaataatttgtctttctcatgtaaataccataaatcaatttaaacagagaaacctccattggagatttgcatgataaaacgttttactatagagggccaaatactcttgaaatatttaacattccaaaagctttgaccacttgaccatttctaagaatgctatagtagtcaaatcttccaggctgagtttcaacagaatatgtcaatgtttttaataaactcttaagtgtctctgatggaagggcattatccattctctttttgtattagataaaccascagtggatactgtttacaaaatatggctggacaaagtatttgataactcttggcaagcttatcatgcaatcttcaatgggagagtaaaaattacagttaatattgccataatctgaaatatgaatatgccatgttttcatgtgtaatttgcatccaaagagagaaatatggacagaataaaacaacaactatgaccaacgaacaaaac

SEQ ID NO: 564938 - DNA, 615 bp, Homo sapiens
tacttgagagattaagtgaacaaatggcaaaattattttcaataacatagaggttgcaaatacttatgtatagatcaaagaaataatgtgcaattctggagtgaaggatcagaacagatcattgacataaataatttgtctttctcatgtaaataccataaatcaatttaaacagagaaacctccattggagatttgcatgataaaacgttttactatagagggccaaatactcttgaaatatttaacattccaaaagctttgaccacttgaccatttctaagaatgctatagtagtcaaatcttccaggctgagtttcaacagaatatgtcaatgtttttaataaactcttaagtgtctctgatggaagggcattatccattctctttttgtattagataaaccaccagtggatactgtttacaaaatatggctggacaaagtatttgataactcttggcaagcttatcatgcaatcttcaatgggagagtaaaaattacagttaatattgccatartctgaaatatgaatatgccatgttttcatgtgtaatttgcatccaaagagagaaatatggacagaataaaacaacaactatgaccaacgaacaaaac

SEQ ID NO: 564939 - DNA, 576 bp, Homo sapiens
tggctcatgcctgtaatcccagcactttagaaggccaagcccaggagttcgagaccagtgtgagcaacatagtgagacctcatctctacaaaaaatatttcaaaattaaccgggtgtggttgtgcacagctatagtcccagctacttgggaggtggaggtggaggattgctagagcccaggaagtagaggctgcagtgagctgacattgtaccactgcactccagcctgggtgacagagtgagaccatgtcccaaaaaaggaaaaagaaaggaaaaagaaaccaattttctcttaaggtgattcatataaacaagagttaagttcctaaggtatatttctggtccccaaaacatcgtcaaacttctagataaggactttttacacttgtaatattaaacattgaaatacatgtgagataaacatatatttaagaaagattaataaaacaagataattatttacccaatttttagtgagccaatgagtgacggtggtcatagtgctggtgggttaattcaaggaataaatgtttgycaagtgaaaattgtcaggcgattcttcctccaccaccaagc

SEQ ID NO: 564940 - DNA, 714 bp, Homo sapiens
atatatatttttctttaccttccttatttgtgtttttatgtacttctggatctatctatattttctaagatgaaaattaaatattcctttggaaaatgatgattatctcaatttaaccatcatgtattcatatttatatctgccatgaattatgtgttttttcrgagtaggtcacatgactaatgtgttgtgtgtattggtgtgtgtgtatatgtgtgtgcatacatgttcatgggaatcaatgaggtgatgcatgtgaaaacattccacttgcagaataaaaaacatttattccataaatccataaaccaccaaatatacccatatataaagaatataaggctggcatgtataaagtaactctcccctttgagtcacaaatgagacctgtgtctattaacctttagtctccttttcttcctgtgtaagcataaaaatgttatttttagcacactgccttgggtttacatgtgtatagcaatcatcgccctcagacgtgatgtccagcatgaataatgaacatggctgtgatgtgcaggcaccctcctggtgaccaaaagcattcgtttttcttgaaaatacctacccttaatttcaatcacttcagtaaattactgccatcacttcacagctattacttaaaagatcaacatggtgagtaccaaattcaataatcatttgataaagtgagatattagcatataagatgcatta

SEQ ID NO: 564941 - DNA, 714 bp, Homo sapiens
atatatatttttctttaccttccttatttgtgtttttatgtacttctggatctatctatattttctaagatgaaaattaaatattcctttggaaaatgatgattatctcaatttaaccatcatgtattcatatttatatctgccatgaattatgtgttttttcggagtaggtcacatgactaatgtgttgtgtgtattggtgtgtgtgtatatgtgtgtgcatacatgttcatgggaatcaatgaggtgatgcatgtgaaaacattccacttgcagaataaaaaacatttattccataaatccataaaccrccaaatatacccatatataaagaatataaggctggcatgtataaagtaactctcccctttgagtcacaaatgagacctgtgtctattaacctttagtctccttttcttcctgtgtaagcataaaaatgttatttttagcacactgccttgggtttacatgtgtatagcaatcatcgccctcagacgtgatgtccagcatgaataatgaacatggctgtgatgtgcaggcaccctcctggtgaccaaaagcattcgtttttcttgaaaatacctacccttaatttcaatcacttcagtaaattactgccatcacttcacagctattacttaaaagatcaacatggtgagtaccaaattcaataatcatttgataaagtgagatattagcatataagatgcatta

SEQ ID NO: 564942 - DNA, 714 bp, Homo sapiens
atatatatttttctttaccttccttatttgtgtttttatgtacttctggatctatctatattttctaagatgaaaattaaatattcctttggaaaatgatgattatctcaatttaaccatcatgtattcatatttatatctgccatgaattatgtgttttttcggagtaggtcacatgactaatgtgttgtgtgtattggtgtgtgtgtatatgtgtgtgcatacatgttcatgggaatcaatgaggtgatgcatgtgaaaacattccacttgcagaataaaaaacatttattccataaatccataaaccaccaaatatacmcatatataaagaatataaggctggcatgtataaagtaactctcccctttgagtcacaaatgagacctgtgtctattaacctttagtctccttttcttcctgtgtaagcataaaaatgttatttttagcacactgccttgggtttacatgtgtatagcaatcatcgccctcagacgtgatgtccagcatgaataatgaacatggctgtgatgtgcaggcaccctcctggtgaccaaaagcattcgtttttcttgaaaatacctacccttaatttcaatcacttcagtaaattactgccatcacttcacagctattacttaaaagatcaacatggtgagtaccaaattcaataatcatttgataaagtgagatattagcatataagatgcatta

SEQ ID NO: 564943 - DNA, 625 bp, Homo sapiens
tataagttggttgagaaaagtcaatcctctaaaaaagtggtccccaacctttttggcaccagggtccagtttcttggaaggctattcttccatggactgggagttgggagagatgtttttgggatgattcaagggcattacatttattctgtactttatttttattattattctattgtgacacaatgaaataattacacaactctccagaatgtagaatccatgggagccttgcgtttgttttctgccaactaaacagtcccatctcggggtgatgggagatggtgacagatcattaggcattagattcttataaggagcacactgcacaatagggtttgcactcctatgagaatcaaatgcctctgctgatcttgcaggaggcggaagttagttggtaatgagagcaatgggagtggctggaaatacagatgaagccttgtttgctggtccgcctttcacctcctgctgtgctgcctggttttttttgttttgttttgttttgttttgtttgttttgacacagagtctcactctgttgcccaggttggagtgcagtggcgtgatcttggctcactgcarcctctacctcctgggttcaaggaattctcctacctcaggctccc

SEQ ID NO: 564944 - DNA, 603 bp, Homo sapiens
cctctcttctaaatttttgaaaatatacaatacattattttaactatattcactctactgcgctatcaagcattagaacatattcctatcttgctataattttgtatccattaaccaacctctccccatccttcctcactcctaccctttccagccactaatatccacaattctactctctactaacatgaggcatttcttttttcagattctatagatgaatgtgaacatgtgatatttatctttctgtgcctggcttatttcacttagcataatatcctccaggctcatccatgttgctgtgaatggcaggattttattctttgtggctgaagaatattttattgtgtatctatatgacattttctttacctattcatctgttattgggcatttaarttgattccatatcttggctgttgtgaatagtgctgcaataaacatgggggtacaaaggtctttctgacatattgcattcctttcctttggataccaggtagtgggactgctggatcatatggtagctctatttttagtattttgagaaaacttcatattattttccattgtaataatttacatttctgccaacagtgctaaaaa

SEQ ID NO: 564945 - DNA, 494 bp, Homo sapiens
aggcagactgatctgaggtccccagatctcaccaggaggggcacagctgggcattcagagatcagacaatggaatcatgaggtggagagatttgttctgaacatgacaggatgtactgagcctggggggtcatggcaggctgggtcmtataccctcaaaacacccaccccaaccccaacaccaaacattggttatcatcagtgttaataagggatcgagtctttgtgaatcagccttgatccttgaaatccaggggatttcagtgcacagagacatgaatcctaatagaacagtaagtgatgtatcagccaagcagaattcttttgtgacttctctaagccatttggggtaaaaagtgtttcatcattttaagtcaattcatgattataactcaacacgtaatctttttttctgaaagttctcatggatccctgttcaatccatgcatttctgatcaagtaatttaatgagtattgttctcaatgcagatgtgc

SEQ ID NO: 564946 - DNA, 396 bp, Homo sapiens
ctgaggtgaaaggatggcttgatcccaggaggttgaggctgcagtgagctgagatcacaccactgaactccagtctgagtgacacagcaagacactgacccccaaaaaagatatatagattacagatatagataaagatggatattgataggcatagatatagaaatatgagagggaacttataaggggaattggctcatgcaattacaaagaatgagaagtcccaccacaggtcatatgcaagytggagaaccaggaagtccaggagtatggccaattccaattgtgaaaatctcagaaccaggggagctgatggtgtaactcccattctgaggccaaaggcctgagaacttgcaaggccacttgtacagtcctggagttcaaaagccagagaac

SEQ ID NO: 564947 - DNA, 550 bp, Homo sapiens
cggctccattcatgggttctgtgaagggctgggarccaagtgttgagagaaggaaagctggtgtgcgtgatctgtgctgatgaattgagggtggctgggggagcccatcagccgtgctgagtgacattccacagagttagcctcagcagatgtcctgtacagagggctttgtggtacccacacaagttatgaactctggagtctgtagctatgaagaggtatttcaagaaagaaattccttctgcattcatcctctttctggtgcatctaatactttccctgtggatggaggaattttgtatggtgctaagtatcacctgatgaaatagttactttaggccggcgtggtggctcatgcctgtaatcccagcacttccggaggccaaggtggacggatcacttgaggtcaggagttcgagactagcctggccaacatggtgaaatcctgtttctactaagaatacaaaaattagctgtgtgtggtggtgcatacctgtaatcccagctactcgggaggctgagacaggagaatcacttgaacctgggaggc

SEQ ID NO: 564948 - DNA, 486 bp, Homo sapiens
taacaaaggaaggaaaatattacaaaaacagatttctctcttaattttgtcagtgcttggacttggtccccaaatcttaaaagtgaatttgtttccagaacacctgaaacagagaccacatttttatgtttgcctttttgcagtgaagtttacattagggagctatattttccttatatttatttttaaatcatttgggctttccaataaaatagcattctcattttcttccctcttcccagattaatgcatttattattttaatgcatgaaggggtccacgtggcgctatggttggtggctgggatgctctggagtggtgcgcttggaaaacaatgtgttatttgcacttgagaaaakactttgttggctaagtgtctaggcactgaaacagtaacagttcatcaaaagacagttatcccagatacgcttccaagagtggcaatcagttttcctaaagagtcaaagaaaagagtgagaattgtgg

SEQ ID NO: 564949 - DNA, 562 bp, Homo sapiens
acttccaggaagctcttggtaggcagacttccttgggctgcctctaccattccatcaaatttcctctgaccctggtttgatatgattgacaagtattcaacatttcaaagagaaatagagggagagagagggaactgctttcctttgatcaatcagatatagttttataacaacatattaagaaaactatcaaataaagcataagaagaattttagtgtagtaaatacatatgtgtatgcaaatgaacaaaggtctatataggaagaactggatgtcaggataagtgcatcaatgggtggcctttgtagagaayctaaaacacaactctctctctctctttcttttctttttttttttttttttttttcctgtcacccaggctggagtacagtggtgtgatcatggctcactgcagcctcaaactcctgggctcaagcaatcctcccatctcagcctacaaagtagctgggactataggcgcccaccaccatgcccagctaatttattttcattttattttttgtagagatgaggtctctcagtgttgcccaggctggtctc

SEQ ID NO: 564950 - DNA, 562 bp, Homo sapiens
acttccaggaagctcttggtaggcagacttccttgggctgcctctaccattccatcaaatttcctctgaccctggtttgatatgattgacaagtattcaacatttcaaagagaaatagagggagagagagggaactgctttcctttgatcaatcagatatagttttataacaacatattaagaaaactatcaaataaagcataagaagaattttagtgtagtaaatacatatgtgtatgcaaatgaacaaaggtctatataggaagaactggatgtcaggataagtgcatcaatgggtggcctttgtagagaacytaaaacacaactctctctctctctttcttttctttttttttttttttttttttcctgtcacccaggctggagtacagtggtgtgatcatggctcactgcagcctcaaactcctgggctcaagcaatcctcccatctcagcctacaaagtagctgggactataggcgcccaccaccatgcccagctaatttattttcattttattttttgtagagatgaggtctctcagtgttgcccaggctggtctc

SEQ ID NO: 564951 - DNA, 630 bp, Homo sapiens
catcttggcagaagtgtctgatctttaggccctgatatcagtgtaaatctgcttatagcaatcccttgatcatcccagcttcaagtaattctttttgtttacactctgatatcacttagtttgacacttcaaatatactgttctttattgagagcctaagttcccatttctctcttctaattcactrtctttataacaaactgtgtcttttttttcctagtatagagagatttttattggacttatgcaaataaccatatcgccataagaacactcacagtttttgaattctggaggaattaagtaatgtaataaaacatttttatctttgtttataaaattatactttaccaaattgctgtaaattacatatagctgaagagagaaaattttcttaaatctagaagacaaaacatttgaataaaggaccaacaatattttaaataaaagtataaaaacctgatcttgatcagttattcaatctcatataatcaacttttgttctgcttaatctctgagtcatttcatgactccatcaaattctttatgagagttctagaaattttatgtagcctatggatcttaaaattatctgaaatttgtattgaagagaacttggagtctttctca

SEQ ID NO: 564952 - DNA, 630 bp, Homo sapiens
catcttggcagaagtgtctgatctttaggccctgatatcagtgtaaatctgcttatagcaatcccttgatcatcccagcttcaagtaattctttttgtttacactctgatatcacttagtttgacacttcaaatatactgttctttattgagagcctaagttcccatttctctcttctaattcactatctttataacaaactgtgtcttttttttcctagtatagagagatttttattggacttatgcaaataaccatatcgccataagaacactcacagtttttgaattctggaggaattaagtaatrtaataaaacatttttatctttgtttataaaattatactttaccaaattgctgtaaattacatatagctgaagagagaaaattttcttaaatctagaagacaaaacatttgaataaaggaccaacaatattttaaataaaagtataaaaacctgatcttgatcagttattcaatctcatataatcaacttttgttctgcttaatctctgagtcatttcatgactccatcaaattctttatgagagttctagaaattttatgtagcctatggatcttaaaattatctgaaatttgtattgaagagaacttggagtctttctca

SEQ ID NO: 564953 - DNA, 557 bp, Homo sapiens
ccctgggcaacatagacccatcctaaaaagtaaaaaaaaaaaaaaggtaaaaatacaaaattggtgttactgggcyaaatcaaggtgttaacagggccatgcttgctctagcgactctagaggagaatccttctgctgcatcttccagcttatggtggctgccagcattttcctttttctcttgtgactgcatcattcaaatctctgcctccatggtcatattaccttttctcttctgtctgtttaccccgctcttttatgaagacacttatgattgcatttaaggccatgcaaataatccaggatcatctctccatgtcaagatggttgacttaataacacctcaaagactgccatgtgaggtaatatttacaggttccaggaatttagatgtgaatttttttgaggagctattttttcacaaattttggaagaatttgtgaagtagtactcattctcttttttcaacatttggtaaaattcaccactgaagcaatctggagagagctccagcaagcttttctttatggcaagttttaaaatgacatatccaatct

SEQ ID NO: 564954 - DNA, 581 bp, Homo sapiens
gcgtggtggtgggtgcctgtagtcccagctcttgggaggctgaggcaggagaatgatgtgaacccaggaggcagagcttgcagtgaggcgagatggtgccactgcactccagcctgggtgacagagcaagactctgtctcaaaaaaaaaacccaaaaaaacaaaaaaacaatttttcaatmataaattaaccttagcttactgtaactttttaactttataaaatttttaatttttataacttttgactcctttgtaataacagcttaatatacaaacatattgtacagcagtattctataagtatttttgtattcaagaaaaaaaatttacttttaaaattttttcttaaaaaattagccgagcatggtggctcacacctgtaatcccagcactttgggaggctgaagcgggaggatcacccgatgtctggagtttgagaccagcctggcaaacatggtgaaaccccatctctactaaaaatacaaaaattagctgggtgtggtggtgggcacgtgtaatcccacctactcgggaggctgaggcatgagaatcgcttggcagaggttgcagtgagccaag

SEQ ID NO: 564955 - DNA, 581 bp, Homo sapiens
gcgtggtggtgggtgcctgtagtcccagctcttgggaggctgaggcaggagaatgatgtgaacccaggaggcagagcttgcagtgaggcgagatggtgccactgcactccagcctgggtgacagagcaagactctgtctcaaaaaaaaaacccaaaaaaacaaaaaaacaatttttcaatcataaattaaccttagcttactgtaactttttaactttataaaatttttaatttttataacttttgactcctttgtaataacagcttaatatacaaacatattgtacagcagtattctataagtatttttgtattcaagaaaaaaaatttacttttaaaattttttcttaaaaaattagccgagcatggtggctcacacctgtaatcccagcactttgggaggctgaagcgggaggatcacccgatgtctggagtttgagaccagcctggcraacatggtgaaaccccatctctactaaaaatacaaaaattagctgggtgtggtggtgggcacgtgtaatcccacctactcgggaggctgaggcatgagaatcgcttggcagaggttgcagtgagccaag

SEQ ID NO: 564956 - DNA, 524 bp, Homo sapiens
aaaattaaaacataaaaataaataaatwtttttcttaaaaaataaaatataagctcacacattagtctaggcctgtcatcactaagcaataggaatgcttcagctccacgataatcttatgagaccaccatcatatatgtggtccgttgatgactgaaacatctttatgcagggcgtgactgtattttactgaacaaacttttgactctattcctggtagaaattttttttgatgtttcttagcttcttgaagttacctggacctgtaagttaatggagaggttaacttcagtctagcccctcaaactttgaattgctttaggggaagtgaatactaagaaataagattcctgcctttttagttcaattctcaatctcatttgctacacaaagttgaaagtcaactgctctgcatttaaaaagctttattttgctgataaatttagaaatcctgaatattgtcttatttgaaataatcaccttctaaattcactcctgtagctaaatgggagaatcatcacaga

SEQ ID NO: 564957 - DNA, 524 bp, Homo sapiens
aaaattaaaacataaaaataaataaatatttttcttaaaaaataaaatataagctcacacattagtctaggcctgtcatcactaagcaataggaatgcttcagctccacgataatcttatgagaccaccatcatatatgtggtccgttgatgactgaaacatctttatgcagggcgtgactgtattttactgaacaaacttttgactctattcctggtagaaattttttttgatgtttcttagcttcttgaagttacctgkacctgtaagttaatggagaggttaacttcagtctagcccctcaaactttgaattgctttaggggaagtgaatactaagaaataagattcctgcctttttagttcaattctcaatctcatttgctacacaaagttgaaagtcaactgctctgcatttaaaaagctttattttgctgataaatttagaaatcctgaatattgtcttatttgaaataatcaccttctaaattcactcctgtagctaaatgggagaatcatcacaga

SEQ ID NO: 564958 - DNA, 524 bp, Homo sapiens
aaaattaaaacataaaaataaataaatatttttcttaaaaaataaaatataagctcacacattagtctaggcctgtcatcactaagcaataggaatgcttcagctccacgataatcttatgagaccaccatcatatatgtggtccgttgatgactgaaacatctttatgcagggcgtgactgtattttactgaacaaacttttgactctattcctggtagaaattttttttgatgtttcttagcttcttgaagttacctggacctgtaagttaatggagaggttaacttcagtctagcccctcaaactttgaattgctttaggggaagtgaatactaagaaataagattcctgcctttttagttcaattctcaawctcatttgctacacaaagttgaaagtcaactgctctgcatttaaaaagctttattttgctgataaatttagaaatcctgaatattgtcttatttgaaataatcaccttctaaattcactcctgtagctaaatgggagaatcatcacaga

SEQ ID NO: 564959 - DNA, 438 bp, Homo sapiens
attatttttcatatgggctttttaaactggctttgatggaactctgttccataaggaatttcagataagactgttttaagctgagcccagccatgtgtttgtacacttaaatacctacaagttgggtaaattcttctgaaagtcccaagataatctggggctcctgggcctgttagaaagtgacattctttacttaccacaagtcaggacgaaaccacctttgcaaaattacgactgagacagtgaaagagatctaacttaaccaactgcatcttgcttctaactccaagctatccttgtttattcctgcacttargctgaactaactttgggaaaaacttatagtttatagtttaaacaaagatggtaatagccctttctcaaagcaaacctccttcttgcctggggactacatgcctttggtaggacctaccattg

SEQ ID NO: 564960 - DNA, 549 bp, Homo sapiens
cattcgcttccagaaaacacagcagccgtatgtgaatttgggagtggtcccacgaaccggttatgagacgaggttttggagctggatcacacctgacacaactggcattgaaaaccttattaccaagagcctctggcacaaggtagaagtccagttgtaaaaacattcattgctgrtgaattgggacagtagaagttgatggaaaaacagaattaagaagtgtggtatatctggcacttcaaactttttgggaaaaaaagataactgcaaatgcaaagacaatggaattggatgctttttgctaaactgcgctaatactcaacaaaaaataatgaaaaactgaggaaaatttaaaagtaattaaaaaccaacagtgaatgccagagggtttctttgtaaggcaaataaagaccttactgccttcttcagaaaggcaaaaaatctgaggcccatggtgaagacacaataatggctaagtggttgaactttaccaaagggcactggtagggaacactagtaactgtgacacatgagatgaagttatatggg

SEQ ID NO: 564961 - DNA, 549 bp, Homo sapiens
cattcgcttccagaaaacacagcagccgtatgtgaatttgggagtggtcccacgaaccggttatgagacgaggttttggagctggatcacacctgacacaactggcattgaaaaccttattaccaagagcctctggcacaaggtagaagtccagttgtaaaaacattcattgctgatgaattgggacagtagaagttgatggaaaaacagaattaagaagtgtggtatatctggcacttcaaactttttgggaaaaaaagataactgcaaatgcaaagacaatggaattggatgctttttgctaaactgcgctaatactcaacaaaaaataatgaaaaactgaggaaaatttaaaagtaattaaaaaccaacagtgaatgccagagggtttctttgtaaggcaaataaagaccttactgccttcttcagaaaggcaaaaaatctgaggcccayggtgaagacacaataatggctaagtggttgaactttaccaaagggcactggtagggaacactagtaactgtgacacatgagatgaagttatatggg

SEQ ID NO: 564962 - DNA, 561 bp, Homo sapiens
aaattaacttaaatgtgtaacataattttatatagtaatatagtaatatttattgttatataattattatattgatatacacacacatatatgaggttgaattgtgtcccccaaaaattcatacattgaaatgctcatctccagtaccccagaaggctcagaatgtgaccttatgtgaaaataaggtcattacaggtgaaattggtgtagattaggtcatactggaatagggggacccccctaatccaatgtgacaggtgcccttataaatagaatactgtgagatcaaagcagaaatctgggtaatatagttgcaaccaagttgcatcaaagagtgccagaaaaccatcagaagctaasagagagcacagagcatattcttcctcacagccctcagaggaaactaaccttcccaatagcttgatctcagacttttaacctctagaactttagggcaataaactcttattctttaatgaagccagtttctggtattttgttactacaggtttgttgtaccatatatatatatatacacatcatatatatatacacacacac

SEQ ID NO: 564963 - DNA, 561 bp, Homo sapiens
aaattaacttaaatgtgtaacataattttatatagtaatatagtaatatttattgttatataattattatattgatatacacacacatatatgaggttgaattgtgtcccccaaaaattcatacattgaaatgctcatctccagtaccccagaaggctcagaatgtgaccttatgtgaaaataaggtcattacaggtgaaattggtgtagattaggtcatactggaatagggggacccccctaatccaatgtgacaggtgcccttataaatagaatactgtgagatcaaagcagaaatctgggtaatatagttgcaaccaagttgcatcaaagagtgccagaaaaccatcagaagctaagagagagcacagagcatattcttcctcacagccctcagaggaaactaaccttcccaatagcttgatctcagacttttaacctctagaactttagggcaataaactcttattctttaatgaagccagtttctggtattytgttactacaggtttgttgtaccatatatatatatatacacatcatatatatatacacacacac

SEQ ID NO: 564964 - DNA, 545 bp, Homo sapiens
aggtcacgtggacttgaaggacggtgaatgcagagattttgttgggtgatggtgatggttgtcagtggtatggggagctaaaaaggggatggaacaggaagaataatcttcccctggagggggaagataatcataagcctttcaattatgcctggcagaacttctttgcaactgtccctcgccagactcctctcaatgttcagatgcttcttctcttctctccttctctggcatgctactccacttctctgtcagtggagtttggggttgtaatgggtataggatgtaggggcatggtgggcctgggtagttttggaaaaagcaacatttaggaaaacagggataactgtttttatttaaggtcatggtttccaggcttgaggatgggacctttgctgggaaaccaccctgttcgagccagtatttccctgccttcagtccatatggtttgcccactctggaaaggtacagctaactgccattagaatagggacaatgaccaatctcagctatttctagctgamaggaggcattgttttggggaa

SEQ ID NO: 564965 - DNA, 583 bp, Homo sapiens
gcccataacccctcaaatagcagataataaatatttattttgtttctatcattttttctgcatgttattttccttttttttatgtaagttaactttgttttaaatcctatttttcccaccactagactctgagctccttataatgacagtaaatgttcctctgaaacacggttattaatatctgcatgttattttagacatacaaatataccataatttttgtttgtttgtttgtttgtttgtttggagatggaatctcgctcttgttgcccaggctggagtgcagcggcgcaatctcmgcttactgcaacctctgtctcctgggttccagcaattctcctgcctcagcctcccaaatagctgggattagaggcacctgccaacacgtttggctcatttttttttttgtatttttagtagagacggggtttcaccatgtgggccaggctggtttcaaactcctaacctcaagtgatctgcccgccttggcctcccaaagtgccaggattacaggtgagccactgcgcctggcctaccataattttttaacccaatacatatttttaaaaaataatcttaaaat

SEQ ID NO: 564966 - DNA, 583 bp, Homo sapiens
gcccataacccctcaaatagcagataataaatatttattttgtttctatcattttttctgcatgttattttccttttttttatgtaagttaactttgttttaaatcctatttttcccaccactagactctgagctccttataatgacagtaaatgttcctctgaaacacggttattaatatctgcatgttattttagacatacaaatataccataatttttgtttgtttgtttgtttgtttgtttggagatggaatctcgctcttgttgcccaggctggagtgcagcggcgcaatctccgcttactgcaacctctgtctcctgggttccagcaattctcctgcctcagcctcccaaatagctgggattagaggcacctgccaacacgtttggctcatttttttttttgtatttttagtagagayggggtttcaccatgtgggccaggctggtttcaaactcctaacctcaagtgatctgcccgccttggcctcccaaagtgccaggattacaggtgagccactgcgcctggcctaccataattttttaacccaatacatatttttaaaaaataatcttaaaat

SEQ ID NO: 564967 - DNA, 540 bp, Homo sapiens
tgcttcctgaacaaggtaatttccaaatattgacaactcttctctacctaatatcccaaacatatgaaatttgccatgcaactctcaatcagacaaccaacaaatattttggataattacattatagaattaagcccctgtctttatactgggactcaagatgcttacagattttgacataaatttaaaattctttttggagatccatttattttcttcctaatgtgactgtgctccatgaagcatgcccatgtggataggctccttatcaaccacttaaccttcactctcattatgattattgcatacttttgccttctgttggttaagcactgtcagctgacccctactgttttggggttttatcatatcttctgctatcttcaagtcaagttctgtggtaactttccaayggaatcagccctttcctacaaaggagaacatctctgatctttttagtgttatgggtgcatctctccatgaaaaccgtacgcttttaggaataatttgtcctctgagcattctgatggaacataatat

SEQ ID NO: 564968 - DNA, 578 bp, Homo sapiens
cagaaaccactgataaaactatcagatctcgcgagacttattcactaccatgagaaaaatatgggggaaaccagccccatgattcctgttatctcccaccaggtccctcccactacacrtgggaattatgggagtacaattcaagatgagatttggctggggacacagagccaagccatatcactggtatttttaaagattaatagaacagaaactactatattgactgaggtgaatgaaattatgtgagtaaatgacataaatagggaaatccaatagagttaatgtcaatgtgggaaaatcctggacactaaactagcatagagaataaagttcatttttaataatttatttaatgtgtaaattgaacaaaaaatatatatgatacatttttttttctttttgagacggcatttcactcttgttacctggttggagtgcggtggcacgatcttggctcactgcaacctctgcctcccgggttcaagcaattctcctgcctcaggctcccgagtagctggaattttataggccaccatgcccagctaactttttgtgtttttagtagagacagggtt

SEQ ID NO: 564969 - DNA, 542 bp, Homo sapiens
attcactaagttctagtacataaaataatcagaataaaatttaaattattatatcttgcagaaatcccttatgtttacacaaaagagagttcaattttatcttgatatatatcacatgtagtttgtaaagctaattaaattggtccctaggaaacaataaaggagttgaagctctaatctactggggtaccttctcgttttggtatttgtcatcttaagagcaagagcagagtatagcctaaggtcaaaaatgtaatgtcatacaagcttttggggcataaaactaattgagtctgtttgcttatctctgtaagagaaataaaatcaacaatttkaagttgtattaaatgaggtaacataagaagataaaacctaaaaatataaatgtggactttatcactgccatcatgattgaaataaatttcaatttgaagccatcactacagccctaaagtagaatgtttgccagagcagtgcaaaatgcataatatgattttttggtagagctgtctattttaaaatatactttgcaatcttcaaca

SEQ ID NO: 564970 - DNA, 331 bp, Homo sapiens
caggctgaagtgcagtagcacaatctcggctcactgcaacctctgcctcctgggttcaagtgattctcgtgcctcaggctcctgagtagctgggattaccrgcatgcaccatcatgctcagctaatttttttgtatttttattagagacagggtttccccatgttggtcagtctggtctcgaactcctgacctcaggtgatctgctcgcctcagcctcccaaagtgctgggattacaggcgtgaggccaccatacccagcccactacagagtaaatctttaatgtatcacaattcattccagcttacttttatcaatatgaataacacagt

SEQ ID NO: 564971 - DNA, 552 bp, Homo sapiens
tttgttatctcaaaacatcatataaatggattccgtctttatttatagagtttttgagtgtattctttgtgtgcgtttcttagtggttgctctgggtatcgcaattaacagatataattgacacagtctactagtagcaacattttactatttcaagtatggaaaccttacttccactaggtatctttgccctatccactttttttcttgtcttaagtattccttctatatatggtggacattatcaaagttatactttttgttttaataatcttatatttgaaaaaactcaggagaagggtagtccattgtattttctcttattttgttattttttcattctttcttcttgatgcgtcaagatttcctcttattactaattcttttatgtttgaaaaatattttttctttaagacagtccygctagaggcaaattatctgtttctctttcttctaagaacatatttatttcctcttgattcctaaaggatagttttactggttaagaaatcatagttgatagttctttttcagaagttgaaaaatgcacca

SEQ ID NO: 564972 - DNA, 638 bp, Homo sapiens
ggctggttccatatttttgcaattgtgaattgtgctgctataaacgtgtgtggaagtatctgtttcgtataatgacttattttcccctgggtagatacccagtagtgggattgcaggatcaaatggtagttctacttttagttctgtaaggaacctccacactgttttccatagtggttgtagtagtttacattcccaccagcagtgtagaagtattccctgttcgccataccccagccaatatttattattttttaattttttttattatggccattcttgcaacagtaaggtggtattgckttgtggttttgattgatagaccattactgagattatgaagtttgtttctacgcagcactagagtactgtgaccacgctgaacccttgcctgcacctcttcactctgctcttcatgtggaactaaggcccctgttcacaagtgctcctcagattcagagaggctgggcagagggaatgggttttgaaataagacaaatcttgtgtcaatgaaaagatgtaccactttctagctctgtgatttggggaattatttcatctctgtgaaactcagattgcttgtctctaagacagatatagtatcagtaacatgatggcctgttattaagattaaatgt

SEQ ID NO: 564973 - DNA, 480 bp, Homo sapiens
acatatataaagtatttacatatacacatatataaagtatttacatatacacatatataaagtatttatatatatacatatataaagtatttatatatatacatatatatgtatatatgccacattttctttatccatttattagttgatggacatttagattgtttccatattttgcctactgtaaataattctgtagtaaacacgggagtgtagatacatcattggtatattgatttaatctcctttgaacatacacagtgtagtgaaattataaccacaatgaaatatcacctcacacctgttagactggctactacraaaaagacaaacaacagcaagtgctggtgaggatgtgcagaaaataacttttgtatattgttgatgagaatgtaattagaacagtcattatgaaaaacagtaagtttactcaattaaaaataaaactaccatattatccagcaatttcactactggtta

SEQ ID NO: 564974 - DNA, 533 bp, Homo sapiens
tgtgtgtgtatatgtatatataccacgttttctttatccactcattgatgggcatttgggctggttccatatttttgcaataacagtcaacgttttggaattaaaattaaaaacatcacttccataatgtcataaagaataaaatactcaagcataagtttatcaaaagtagggcatgaattatataccaagcactataagacaagcatcaaaagataaatataaatacatttgttgccactaaaatgaaaccaaaaatttgtgctaaaagtgatttcatcaagacagaagaaaggccactcacagaatggaagaatctatttscaaatcatatatctgataagaggcttttattcagtattatataaagaacttttaaaactcaataatataaagacaaggacctaaaaataaaggcagagaattgaacagactttttttccagagaagatatacaatggccaataaccacattaaaggtgctcaatatcattcataatcagaaaatccatatcttaagcccagttaattac

SEQ ID NO: 564975 - DNA, 533 bp, Homo sapiens
tgtgtgtgtatatgtatatataccacgttttctttatccactcattgatgggcatttgggctggttccatatttttgcaataacagtcaacgttttggaattaaaattaaaaacatcacttccataatgtcataaagaataaaatactcaagcataagtttatcaaaagtagggcatgaattatataccaagcactataagacaagcatcaaaagataaatataaatacatttgttgccactaaaatgaaaccaaaaatttgtgctaaaagtgatttcatcaagacagaagaaaggccactcacagaatggaagaatctatttgcaaatcatatatctgataagaggcttttattcagtattatataaagaacttttaaaactcaataatawaaagacaaggacctaaaaataaaggcagagaattgaacagactttttttccagagaagatatacaatggccaataaccacattaaaggtgctcaatatcattcataatcagaaaatccatatcttaagcccagttaattac

SEQ ID NO: 564976 - DNA, 603 bp, Homo sapiens
ctgttgactgcggtggtctgaggttgatatggtttggctctgtgtccccacacaaatctcaccttggattgtaataatcccctcgtgtcagagtgggaccaggtggaggtaattcaatcatggtgatggttcccccatgctgttttcgtgatagtgagtgagttctcacgagatctgatggttttataagcgtctggcattttccctgctggctcttatcctctctcctgctgtcctgtgaagaggtgccttcctccatgattataagtttcctgaggtctcccagccatgtggaactgtgagtcaattaaacctcttttctttacaaattaccattctgtggtatttcttcatagcagtgtagaaacacactaacrtagagacgttttcatctggaagcagaaccagaccgggtttgactggctgctgagctcagcctctgtctcaggtggggctctgctgtcccccaggccctgaatgtactggactcccagagcctgctgtaggtggaaggaatgcgggaattaactgccctgctgcttttccctggcatcctagagctcagtctggaaaggttagagacagagaggcagaggatggtct

SEQ ID NO: 564977 - DNA, 568 bp, Homo sapiens
actggctaatgccagcaaaactatcatgccgtaacttccacaagcattatatacaaaacagcagatatgacttaggcctcctttgttctttgtcctcatatttttccccgcccttctgaattaaataaggatatgctgaacttgaattattccttgaaatatgagaatgaagaccayaccctagcagtgatagaatgaatctgggtccccggataggcaatggattagacccactttgccaccctttactgcctttcttcagtgttcttgaaaagagggagaaacaaaattattttaatcaaaaccaaacctaattctaatggacatagttgtgatagtaatggtcatcctctgtcctgaatataatgtaatgccacttgtattttactacttattatatttaccattggtttttatgtatactgtttctcatatcaagaaagtttccttctaaccctaatttactataagtttgtttgttttttgttggttgttgttgttgttgttgtttgtttgtttgtttgtttgagatggagccttgctctttcacccaggctggagtgcagcg

SEQ ID NO: 564978 - DNA, 568 bp, Homo sapiens
actggctaatgccagcaaaactatcatgccgtaacttccacaagcattatatacaaaacagcagatatgacttaggcctcctttgttctttgtcctcatatttttccccgcccttctgaattaaataaggatatgctgaacttgaattattccttgaaatatgagaatgaagaccacaccctagcagtgatagaatgaatctgggtcccyggataggcaatggattagacccactttgccaccctttactgcctttcttcagtgttcttgaaaagagggagaaacaaaattattttaatcaaaaccaaacctaattctaatggacatagttgtgatagtaatggtcatcctctgtcctgaatataatgtaatgccacttgtattttactacttattatatttaccattggtttttatgtatactgtttctcatatcaagaaagtttccttctaaccctaatttactataagtttgtttgttttttgttggttgttgttgttgttgttgtttgtttgtttgtttgtttgagatggagccttgctctttcacccaggctggagtgcagcg

SEQ ID NO: 564979 - DNA, 389 bp, Homo sapiens
gaatctattatgtacaatcatagtttaacatcattttctcarcaactgatgaaacaactatacaaactcaacaaaggagctgaataacactatgagatactttgacttgaatacttatggaacattaaaaacatacagaatacacattcctttcaagggtacatagtatatttaccaatagaccatatgatagatcataaaacaagtctcaataccttagaaaagacggaaaacatactctgtactgaaaacatactctgcaacaaactgagatttacactagaaaatgataatcatagtaatcagaaaaaacaccaaatatatgaaaattaaggaacataattctagtaatttattaaaaaggagaaattacatgataatctataatc

SEQ ID NO: 564980 - DNA, 437 bp, Homo sapiens
taattctagtaatttattaaaaaggagaaattacatgataatctataatctagagaaaaagttttaagagaaatcagaaaatattttgaatgattatacagtatataaaaatttgagagatgcagataatgcagtacttagaggaaattttayagctttaaatatttgtcttaataaagaagaaacacacaaatctgatcatctgagattccaccttaagaaattactacaagaaacactaattaaccacaatgtatataaaaaataaattataggagcagaagtcaatggaatacaaaatgaagaaataatagaaaagttatgaagccaaaaactggttatttacagagattaaagcaattatatatttagaaaaatgatctagggggaaaaaggagaaataaaattatcaatactagaataaaagaagggacatc

SEQ ID NO: 564981 - DNA, 437 bp, Homo sapiens
taattctagtaatttattaaaaaggagaaattacatgataatctataatctagagaaaaagttttaagagaaatcagaaaatattttgaatgattatacagtatataaaaatttgagagatgcagataatgcagtacttagaggaaattttatagctttaaatatttgtcttaataaagaagaaacacacaaatctgatcatctgagattccaccttaagaaattactacaagaaacactaattaaccacaatgtatataaaaaataaattataggagcagaagtcaatggaatasaaaatgaagaaataatagaaaagttatgaagccaaaaactggttatttacagagattaaagcaattatatatttagaaaaatgatctagggggaaaaaggagaaataaaattatcaatactagaataaaagaagggacatc

SEQ ID NO: 564982 - DNA, 552 bp, Homo sapiens
ctatatatagcctatatttgagaaatggggaattatgctccactttcttgagaatggagctcctacagaaattatttggaattcctctttatgggggaattttctcttcccagcccctatttattgttttattaaattacttatatcgatatggactcaggtatttattttatactttgggttagaatgcagtagtactttgcttattgtgctcaaattgctcttttggtggttgttgttgtcgttgaaacagcgtttcactcttgttgcccaggctggagtgcaatggtgcgatctcggctcaccacaaccttctcttctcaggtttaagcgattctcctgccccagactccagagtagctgggattacaggcaactgccaccatgccygtctaaaattttgtatttttagtagaggtgggatttcaccatgttggccaggctggccttaaactcctcatctcaggtgatccacccgcttcagcctcccaaagtgctgggattacaggcatgagccattgcaccggatcagaattgctcattttgatcact

SEQ ID NO: 564983 - DNA, 562 bp, Homo sapiens
gaagagatttggagtttttagctgwttttatttagacaagattttggacttgagttgattttgtaatgacttgagacttttgaagatcttgggatagggtgaatgtattttgtgtgagggatggaggagaatcttttggggtcagagggaagactctggaaggccaaaatgccgttaccccaaagatgtcatatcctcatccctgaaacctggaaatgtgaccttatatgaaaatgtaaggtcacatttgtagatgtaattgatcttgagataagtagattaatctaaattattaggttagaccctaaatgcaatcacatatatccttataagagggtgttagaaagagattgacacagacaaaaaaaggagaaggcaatgtgaaaatggaagagtgatgtggccaaaagccagggaatgttggcagccacaagaagctggaagagaccaggagtgaattttcctttggagtctccagaggaagcatgaagccaccaacgttttgattttgtcctagtgatacagattttggacttctggcccccagaatggtgagagaata

SEQ ID NO: 564984 - DNA, 597 bp, Homo sapiens
aagtgtgtgccaccacacccagctaatttttgtatttttttcgtagagacagagttttgccacrttgcccaggctagtctcgaactcctaggctcaagtgatctgcccacctcagccttgcaaaatactgggattacaggtgtggaccactgtgcctggccaaatgtgttatttttaatataaatccactgtttattttaggattcctcaccccctgaatttaatgtgattcatttaccttaggcaatgacttatttgtattcactgacaggctgcacagtggaaaaaggtcttcagagtgactaacaaaagaccacatccatctgtctaccccagtataatacatgtctcctagacatttttctctatccctacaagtaagacagaggtacaatcctatgactaccctttcactctttaattgatcaaatgagaaactttctcttcatggaagcattaatgaaggaaattcaaactgaattcatcatgtccaacaaacaatccatctttttaaattgagatataattcacataccataaaatttgcccctttgaaggacacaactcagtagtttttaagtatattcacaacgctgt

SEQ ID NO: 564985 - DNA, 655 bp, Homo sapiens
caagaaaaaaaacaagcaatctcatcaaaaagtgggccaagaacatgaatagacaattctcaaaagaagatatacaaatggccaataagcatatagaaaaatgctcaatatcactaagtactagggaaatgcaaatcaaaagcacaaggaggtactacctcactcctgcaagaatggccataatttaaaaatcaaaaactaatagatgctggtggggatgtagtgaaaggggaacatttttacactgtaggtgggaatgtaaacttgtacaatcactatgagaaacagtgtgatttaagattccttaaagatctaaaagtagatataccatttgatgcaggaatctcactackaggtatcttctcagaggaaaagtcactatacaaaaaagatacttgcacacatgtttatagcagcacaatttgcaattgcaaaaatatggaaccagcccaaatgcccatcaacgatgagtggataaagaaaatgtggtatatatacaccatggaataccactcagccataaaacggcatgaaataatgacattcacagcaagctggatgaaattggagactattattttagcttaagtaattcagaaatggaaaaccaaacatcgtatgttctcactcataattaggagctaagctatgagga

SEQ ID NO: 564986 - DNA, 655 bp, Homo sapiens
caagaaaaaaaacaagcaatctcatcaaaaagtgggccaagaacatgaatagacaattctcaaaagaagatatacaaatggccaataagcatatagaaaaatgctcaatatcactaagtactagggaaatgcaaatcaaaagcacaaggaggtactacctcactcctgcaagaatggccataatttaaaaatcaaaaactaatagatgctggtggggatgtagtgaaaggggaacatttttacactgtaggtgggaatgtaaacttgtacaatcactatgagaaacagtgtgatttaagattccttaaagatctaaaagtagatataccatttgatgcaggaatctcactactaggtatcttctcagaggaaaagtcactatacaaaaaagatacttgcacacatgyttatagcagcacaatttgcaattgcaaaaatatggaaccagcccaaatgcccatcaacgatgagtggataaagaaaatgtggtatatatacaccatggaataccactcagccataaaacggcatgaaataatgacattcacagcaagctggatgaaattggagactattattttagcttaagtaattcagaaatggaaaaccaaacatcgtatgttctcactcataattaggagctaagctatgagga

SEQ ID NO: 564987 - DNA, 403 bp, Homo sapiens
cttttgttttttgtttttttttttttttttttggttggttggtaggctatttattattgattcaattttggagctcattattggtctgttccaggaaaccaatttcttcctggctcagtcttgggagggtgtatatgtccaggaatctgtcyatctcttctaggttttctagtttgtgtgtggagaggtctctatagtagtttctgatggttgttttcatttctgtggggtcagtgatatctctttcatcatttctaattgtcttaatttttttattagtctatttagtggcctatgtactttaatttttttttaaaaaacaactcctagatttgttgattttttaaatggtttgtctctgaatttccttcagttcagctctgatttttgttatttcttgtct

SEQ ID NO: 564988 - DNA, 403 bp, Homo sapiens
cttttgttttttgtttttttttttttttttttggttggttggtaggctatttattattgattcaattttggagctcattattggtctgttccaggaaaccaatttcttcctggctcagtcttgggagggtgtatatgtccaggaatctgtccatctcttctaggttttctagtttgtgtgtggagaggtctctatagtagtttctgatggttgttttcatttctgtggggtcagtgatatctctktcatcatttctaattgtcttaatttttttattagtctatttagtggcctatgtactttaatttttttttaaaaaacaactcctagatttgttgattttttaaatggtttgtctctgaatttccttcagttcagctctgatttttgttatttcttgtct

SEQ ID NO: 564989 - DNA, 403 bp, Homo sapiens
cttttgttttttgtttttttttttttttttttggttggttggtaggctatttattattgattcaattttggagctcattattggtctgttccaggaaaccaatttcttcctggctcagtcttgggagggtgtatatgtccaggaatctgtccatctcttctaggttttctagtttgtgtgtggagaggtctctatagtagtttctgatggttgttttcatttctgtggggtcagtgatatctctttcatcatttctaattgtcttaatttttttattagtctatttagtggcctatstactttaatttttttttaaaaaacaactcctagatttgttgattttttaaatggtttgtctctgaatttccttcagttcagctctgatttttgttatttcttgtct

SEQ ID NO: 564990 - DNA, 553 bp, Homo sapiens
tctttgggggataatatctacaatttcggtagctgccaccagtggaatggtgatggcttgtggttatgatgggaggtacatattagcatctctggagacttaacatataatacacattcctgggccatgcttaccctaggagtttctgatccagatggttcgaattgggaacaaagtgggtgtggggtgtgtgtgtrtgtgtgtgtgtgtgtgtgtgtgtatgtgtgtgtgtcttgaaagctcacagatgattctgatgtacatttacagttaaaagccattggtttggagtttggaatatcttggtgcccaagaatagattttctttttttaaaagttatgtttttaaatgttagattcagtggggtacatgtgcaggtttgttacatagatacattgtataatggtgagatttgggcttctagcgtacccatcacccaaatagtgaacgttgcacccaataggtaatttttcttagccctcactccttcccaccttccctgccttttggagtccccagtgtcttattttcatctttatgtccatgtgtacc

SEQ ID NO: 564991 - DNA, 510 bp, Homo sapiens
atgtttgaccttagaacttagaagctgttgcccctaaaagctcttaccagattattgcatagaattttcaggattctggcatttctgcaaaaatctatacttgattgagctctgaggataagtttgttggcttctagtgtcctccttgattatcatccaaatttcacagtatttggcaagtctatatcatattttgtagtgagaagttttgaccatgttctggcttcattgatgctgattttttcccttctatgttcacattttatattgttttgggtggattttaatagaggagggttgagtaaaaatgcctttaatatactctctaaatctgatatccaaatctatacttagaacattaattctactatttaacaaatggtgctgggaaaactggctagmcataggtagaaagctgaaactaatcccttccttacaccgtatacaaaaactaattcaagatggattaaagacttaaatgttagacctaaaaccatgaaaaccctagaa

SEQ ID NO: 564992 - DNA, 500 bp, Homo sapiens
ctgcctaaagggcatatttgtaaaacttacagcataaaatgtgaggggaggggtgcatgacttcctgaaaagtatggtcaagaaatcaatacaactatttgtctttaaaagtgtgcagccctgcytgaagttatacttacctcaaagaatttgcctgaaactaggaagaaagtataatacattaatatcaaacactcaatcttggtaatttgggataatctgatgtggcagaaaaggtaggatcaatgtaagagtaaagtcaaccaaaagaacaacattaaagccctttttaaaatcaaaggctatgtttcagttaagtgccaataacactttgttcaacaacttagaatgttgttgatagttatgtaagcatctaaatcgactagcacaaaaaagatagggtgagattttaaagaaccctaaattaggtgctgaaatataataaccagccaaatgcaatccatcctctacatgaatgtttgatataaggaaactcacct

SEQ ID NO: 564993 - DNA, 365 bp, Homo sapiens
aactaggaatttttgtaatttttattgtgccttttgggggaaaacatcctttctgataaaaagatacttcatcattcctcaatttaaaaattttttttgtaaataagaattaaactttttcttcttatctgtgtgaggaaccaacttactggtcaaatatttgaatttaaaggaagccaagaatagaacaatttaayttctgagccaggatcccaagacacaagtgacccttataacattattgtttcttcttattttaaaatatattgcaacactgtttataatttattaaatgggtttataactgctgagggagatttgagttgaactgttgaaaacctttataaataaaaataaactaaaaa

SEQ ID NO: 564994 - DNA, 548 bp, Homo sapiens
aatgtgaatacacaggctaggaagtcccacaatcagcagcctacaagctggaggcctagaaaagccactggtgtagttccaatacaarcatgaaagcttgaggactaggagactcgatcatgtaagtgccagtctgagtcaagacctgagaaacgagggatgggggtacaaagtccaagggcaggagaagatgaatgttcgttgaaaaggagagagtgaatttgcccttttctccactgttttgtgctacctgggtcctcaacggattagataatgcttatttgccctggtgacagtgatcttccttactcccctactgattcaaatgcttatctcttccagcaacacccttgcagacatactcagaactaatgttttaccagctatctggacatctcttagcccagcggagatgacacataaaattagcctcagaggctagttctttaccctatttgagtcttgattttcgtatatgtctagggaaatcaccatcattagtatttttgaatgaaccataatattgcatttcacataaattattaacc

SEQ ID NO: 564995 - DNA, 548 bp, Homo sapiens
aatgtgaatacacaggctaggaagtcccacaatcagcagcctacaagctggaggcctagaaaagccactggtgtagttccaatacaaacatgaaagcttgaggactaggagactcgatcatgtaagtgccagtctgagtcaagacctgagaaacgagggatgggggtacaaagtccaagggcaggagaagatgaatgttcgttgaaaaggagagagtgaatttgcccttttctccactgttttgtgctacctgggtcctcaacggattagataatgcttatttgccctggtgacagtgatcttccttactcccmtactgattcaaatgcttatctcttccagcaacacccttgcagacatactcagaactaatgttttaccagctatctggacatctcttagcccagcggagatgacacataaaattagcctcagaggctagttctttaccctatttgagtcttgattttcgtatatgtctagggaaatcaccatcattagtatttttgaatgaaccataatattgcatttcacataaattattaacc

SEQ ID NO: 564996 - DNA, 548 bp, Homo sapiens
aatgtgaatacacaggctaggaagtcccacaatcagcagcctacaagctggaggcctagaaaagccactggtgtagttccaatacaaacatgaaagcttgaggactaggagactcgatcatgtaagtgccagtctgagtcaagacctgagaaacgagggatgggggtacaaagtccaagggcaggagaagatgaatgttcgttgaaaaggagagagtgaatttgcccttttctccactgttttgtgctacctgggtcctcaacggattagataatgcttatttgccctggtgacagtgatcttccttactcccctactgattcaaatgcttatctcttccagcaacacccttgcagacatactcagaactaatgttttaccagctatctggacatctcttagcccagcggagatgacacataaaattagccycagaggctagttctttaccctatttgagtcttgattttcgtatatgtctagggaaatcaccatcattagtatttttgaatgaaccataatattgcatttcacataaattattaacc

SEQ ID NO: 564997 - DNA, 599 bp, Homo sapiens
atgagtttgttaagtgtagggaattttctttttcatttcaataataaaataaatgaatacttaaatatgatatattaaataattattttctatgaaaagtagagtttgttaattttcctgtaataatttttatggcttcactgcttcatgggttagtgtcacgaatttgggtgagtataaaacattcatgtaattatattgactgaaatgatgtggggcattgactaaggtctagaaaacttttggtaatatttaaaaactatatgacagtgagatgcaatatgttttcaacatgccagaagaaagattagaaggaaaagtgccccagttggtcctactgaactgatttacgctctgggtttcgccatacacatgtatccttgtccaacacaggagaccatcttctttgatcagttcctgattcagtttctcctctgcgcactctgccatgttttgtacctccgtcataaccattcactgcatcctgacttactgtattcaagcaaaataggatgcttcctagacaattacagttttcttagggaacataaaggcaataaacatgaaatagkggcaaaacatgtagccaagatgaaatg

SEQ ID NO: 564998 - DNA, 597 bp, Homo sapiens
tgcccagtccatgaattaatttttctatcaaagccaccttctctaataaactcattgacaaaatcattaaggaacttacttctatcaggctctgtctaaacttatacccaatggaaactactggaaagacaggatttacatttacagatttaggttctacatgccttaatttttattgttagcatacacaattatttctgtaattaccatcctttttatcctatytatctctgtggaaataaaggctctgtccactgttaaatatttttaaatatcatcaaataaactggggaacttgtagaatatgggcagaatactttcaagagtcctgataattacgacatgcaggggttgttcacatgacaatacaaaatgccaaccccactctgagcaaatggatttcctttctgtacagctctctgtaccagttcttggcctgaggctgagaaattcttaggatgataatgagtatagcaataatagtgcttcagatatcccattccaatgaaaggaatacgttttctattttaaacgaggaaaatgacacctcccatacttctcttacaaattgatattgaataatgaatgtaatagcat

SEQ ID NO: 564999 - DNA, 616 bp, Homo sapiens
taacataacaataagtgtgggtgtgtatgtgtgtgtgtgtgagagagagagagagagagaaacattccagtgtcataatcatccaagcatttcatgcaatgttgtgytgaatgcaaaacgagttgaataattcagggttctataaaacagaaaattctcattgtaatttctggtttgtgattgaaagtgccatgttagaggtgtgacttgcattaatagatggatgatgggggcagattagtgtccctggattcttatggacttggccatgagatacctaggaccctacccaggcttgtgaggcagtgagagatcaaataaaacaagaggggtatttaagattcactttcaaggaaggtctgtcctcacagggacattctgtgattcagatacaatgattctggctggatctgcaacacttactgctgatatttttgttgaggaagtgtgggcagaaggtccatggaaagaaaattatggtgagtttggttgggggcaggaggagcatcaatttcttatatagtctttaaaggtacataaatgttctaacctttctcaataacacactgtgtaaactactataggtttgtattaatagtaggtgttgaaattgggt

SEQ ID NO: 565000 - DNA, 616 bp, Homo sapiens
taacataacaataagtgtgggtgtgtatgtgtgtgtgtgtgagagagagagagagagagaaacattccagtgtcataatcatccaagcatttcatgcaatgttgtgctgaatgsaaaacgagttgaataattcagggttctataaaacagaaaattctcattgtaatttctggtttgtgattgaaagtgccatgttagaggtgtgacttgcattaatagatggatgatgggggcagattagtgtccctggattcttatggacttggccatgagatacctaggaccctacccaggcttgtgaggcagtgagagatcaaataaaacaagaggggtatttaagattcactttcaaggaaggtctgtcctcacagggacattctgtgattcagatacaatgattctggctggatctgcaacacttactgctgatatttttgttgaggaagtgtgggcagaaggtccatggaaagaaaattatggtgagtttggttgggggcaggaggagcatcaatttcttatatagtctttaaaggtacataaatgttctaacctttctcaataacacactgtgtaaactactataggtttgtattaatagtaggtgttgaaattgggt

SEQ ID NO: 565001 - DNA, 585 bp, Homo sapiens
aggtatactatgatggttgatttggtccaatcaacagattagttttgtttgtttttgcttttgttataacctaacagctgcaacttcattggctgcatatgtatctctttggaatgcttttgtctgacagtaatagaaaacccaacttagagtggctctgagcaataaggaagacattaaattatctcatggaaccagaagaccacagctttagttctggggcttaactggcactctttctaatcttcctggtcagctacactcaggacttgaccccttttttttcatcctttttcattgctttggggtcacaggagagcttctacaactccacattcrtgttctttcaatagtgtccctctcagggtgaagggaagttgtgctaaatgctttctctcaataggctctgtgtttttatttagaaatgaagcttcttgtgggtcttcgtcctgtgtcttattgggaagaattgggttatgtagtaaaccaaacactagaaaagaatatgagatttccatagcagctttaggtcaaagaaagttaatttttttaggggatgaggtggggctttctttcataaaaaca

SEQ ID NO: 565002 - DNA, 540 bp, Homo sapiens
gtccatctaaagtcattggctctgtgtcactgaaggcactgtctttctccacattctaggggtctgtaccatggctgtatatataccataaacctaggggtctataccatgataagagtattgggagactctgcagaaycttgaaccaccatagctatctctgacatcttaggatcacctgtgttctgtgcaccaagtggctgggaggcttgcacagcagtctggatcttcagccatgtggacatttcaagaacttggaaagaggattctagatcccattctgtcactgaagtactgaagattcaaggaaaatcttcacactgctctaggtcttcatgtcttctaaataaggaattcctatccaagagtcatattttgtacctggaaccagtgttgtccatttgagagaggcatatggcaagggtgggggcatgggtttggagactgtggaccacttgaaagaactgttgccatgccattaattagtaagtttattgttccaggagggagagcccctcctcaaagatcaggaaactgtgc

SEQ ID NO: 565003 - DNA, 540 bp, Homo sapiens
gtccatctaaagtcattggctctgtgtcactgaaggcactgtctttctccacattctaggggtctgtaccatggctgtatatataccataaacctaggggtctataccatgataagagtattgggagactctgcagaaccttgaaccaccatagctatctctgacatcttaggatcacctgtgttctgtgcaccaagtggctgggaggcttgcacagcagtctggatcttcagccatgtggacatttcaagaacttggaaagaggattctagatcccattctgtcactgaagtactgaagattcaaggaaaatcttcacactgctctaggtcttcatgtcttctaaataaggaattcctatccaagagtcatattttgtacctggaaccagtgttgtccatttgagagaggcatatggcaagggtgggggcatgggtttggagactgtggaccacttgaaagaactgttgccatgccattaattagtaagtktattgttccaggagggagagcccctcctcaaagatcaggaaactgtgc

SEQ ID NO: 565004 - DNA, 417 bp, Homo sapiens
gtatcttttgtaacacaaataaaataaacaaacaacgtcctcagaggaaataataggtcaaaatctaaaatctaaggcctggacagaattcttagttctattaggcatagttagacaggcaatgtctctgtttctctgagtcatctacaaaaaaaaaaaaaagaacagtatatctaaccacctatttaaaaactactttgacaatgacctaaagcatgaccatgacaaaataaataggacaatatgtccccaaacactgtggaatatcagtagaacttgaacttttgggtcrgaaagacctaagtcctaactctacaatttacaacccatatgtccttagaaaagttgtctgattttttcagccctgagtttcagtgttctgtaaaacaaaaaatagagacattagtaagtatgtta

SEQ ID NO: 565005 - DNA, 417 bp, Homo sapiens
gtatcttttgtaacacaaataaaataaacaaacaacgtcctcagaggaaataataggtcaaaatctaaaatctaaggcctggacagaattcttagttctattaggcatagttagacaggcaatgtctctgtttctctgagtcatctacaaaaaaaaaaaaaagaacagtatatctaaccacctatttaaaaactactttgacaatgacctaaagcatgaccatgacaaaataaataggacaatatgtccccaaacactgtggaatatcagtagaacttgaacttttgggtcagaaagacctaagtcctaactctacaatttacaacccatatgtccttagaaaagttgtctgattttttcagccctgagtttcagtgttctgtaaaamaaaaaatagagacattagtaagtatgtta

SEQ ID NO: 565006 - DNA, 638 bp, Homo sapiens
ttctgttctttgttcacacttaattttttcttaacaaaaatttacatttcttaaaaaacctttattgtgagataattgtaaattcacatgagaatgtaaaataatacagaaatccagtataccctttacccgtttcgatacaaaacatctctatcaycatcacaagcattcctcatactgccctataacagccatcaccgcttccttcccacaccaactcccgcattcatccctggcagccgctaatctttcctacatttctataattttgtcatttcaagaatgtcataaaaataggatgaaacatacatctctacaatatactaaaattaattaatgtcatgttaataaaacaaaggtgaaaaaaaccacgtgatcatctcagctgcacaaaaagcatttgacaaaatccaacactcttttgtgataaaagcacaaagaaacctacaaatagaagagagcttcctcaacataatagaggatatttatgaaaaatccacagctcacatcatattcaatagagaaagactggatattttctctctgagattggtagcaagacaagaatgtcctgtttcatcactaatgtttaatattatactggacattttcaccagagcaattaggcaagaaaatga

SEQ ID NO: 565007 - DNA, 572 bp, Homo sapiens
aactctcctagatctgtaacggttcccacatcacagacatttttgtatctggacatcttattagacaaatgtggagtcagcaccaaccacccctggggccagtgcatccaggactgcaggtgcaacctctcaggcagctcctctctgcagagcatcaagcagaataaygtgcattccttcatttttacatatatccaatgaattcaggtcggtaaagtgtattaaatcatacctaaaaaacaaatttagttatattgtcttcatacaatgtccttcatataatatgcaaaataagtaaaatgctatattgcttattgataacaaagaactagtctccactttttacacatagccacattaacttcttaaaatataatttccacatacataaatagacattcaactaatagctaatcactcactaaaacattactaagaataatgtgaaaaatagcattggaacagtaatggtaaaatgtaaattatatataagatatagacatattaaaatattacatataaaatataaattatataaacaaaagaaagttatatttaaaaaattttcaaac

SEQ ID NO: 565008 - DNA, 574 bp, Homo sapiens
cagtatccccccataactactattagcartccctaaaagtatatttcctacctaataattatacaccaaaattccttcataatgcgaagtaatttcttgtacccacaaaagtcaaaactgtcagctaacacaatacaaaacagaacagagccttagattttgagaaagatctattttctttcaattcatgggcttctgtgaggaaaacagaggtttttcccagaaaggggtctgtggtgcatctctgcttttccccaggagtctgttagaatttatgttaggttctctcatgtgtgcatcaagaatggcaaggagacaaaaaggttgtatgattatgagttaatttatttattctattgagttgtttgattttttttgtcatggcaaatgatgcatctctgaacatttttgtatcaatttcctgttgccacatgcaagagttactcaagggaaatggttccccaacttctccatgcattaaagcacatatattcgtgtattttttagcataagtagttggagctgctcacagtaggtggtgtcaaacccgtgagctgtgactgccccagaccct

SEQ ID NO: 565009 - DNA, 574 bp, Homo sapiens
cagtatccccccataactactattagcaatccctwaaagtatatttcctacctaataattatacaccaaaattccttcataatgcgaagtaatttcttgtacccacaaaagtcaaaactgtcagctaacacaatacaaaacagaacagagccttagattttgagaaagatctattttctttcaattcatgggcttctgtgaggaaaacagaggtttttcccagaaaggggtctgtggtgcatctctgcttttccccaggagtctgttagaatttatgttaggttctctcatgtgtgcatcaagaatggcaaggagacaaaaaggttgtatgattatgagttaatttatttattctattgagttgtttgattttttttgtcatggcaaatgatgcatctctgaacatttttgtatcaatttcctgttgccacatgcaagagttactcaagggaaatggttccccaacttctccatgcattaaagcacatatattcgtgtattttttagcataagtagttggagctgctcacagtaggtggtgtcaaacccgtgagctgtgactgccccagaccct

SEQ ID NO: 565010 - DNA, 504 bp, Homo sapiens
tgaacctggtagttcagtaccgtaaagctcatggagagcccggtgaaggctgagtatagatgaaggtcttggtgctcagcatggcttgagggccctggattgcaaccctttatagcacgtgaatgtcaagagatgagtcggggaggtgtgctgtgctgtggatgctcctccgagcttgagtcagctgtccatcttgctggcagtctcttgcaggctgtcaccatttcctctcactttctttcttgctgctttttctcctaaaattctgacctggatctatttacccatgtaaataggcaggggcaaatctggaagtgggagagaggctcatctgaggtgttatgctgttctttctctgtggaaacgaagtttctcccttttcaaagttaagggcctaaggctttggttatcttccctggagttaaggctcctcagtgctgagccttccacactcaagtgcccctttccccgggcrgctcacactgtgtatttctgaatctaccc

SEQ ID NO: 565011 - DNA, 570 bp, Homo sapiens
tccgcctcccgggttcacgccattttcctggctcagcctcccgagtagctgggactacaggcgcctgccaccatgcccggctaattttttgtgtttttagtagagactggggtttcactgtgttagccaggatggtctcgatctcctgaccttgtgatctgccagccttggcctcccaaagtgctgggattacaggcgtgagccaccgcgcccggccgtgttaattattttctaaagtgtttcatccatattcgcttgggtcttcagtcaaattttaaggctatcttaggttaggaaatatagactttgtttctccctgctgcagagcacagaacaatgtatgtacttggctttcatatrttaggtattagctggttggttgtttaaatcctctggggaaacacgccaaaccatgtctacttcttgcaataattttcatttggtcaaatcctggtgtacagattttgctctgttcatctttataagacctgtatgcacctagcaaattcctgaagtatgaatgaataaaagaagaatgagttaacaatatacaatgagtatgaatcatta

SEQ ID NO: 565012 - DNA, 507 bp, Homo sapiens
cccctcccttgacacatggggattattacaattcagggtgagagttgggtggggacacagctagttgtgacagtgcagtgacagcagctgatatgaggtattaaatataaaawcatagaattctaggaagatggcagatatggtggaagtttaggttttgatccattactcctatgacctcttcaaaaacagtatttcaaaaatgaaattttctttcttttaatttcttaagagttatattatctgcaagcctattcataatattaataacaaaagggaaaaataggttctatggtaggctagttacttgtcgcagtaactactactaggaaatattgatacaaatactaggaaatattgatttcctagtaaacttgaaaaaatattttaattatccctggtgagtagaatgtttatacagaataaaaaacaagataatagaatatatttgagtaattattgaaaattgtggacaccgtttgtttattaagttaaattgtacagttg

SEQ ID NO: 565013 - DNA, 586 bp, Homo sapiens
acaggctcacttggagttacacacttttgaagaactcaatttctttcatcggtgttttgtagtttctattatagagatatgttacttctttggttaattcctaagtatttaattttattgttgctattgtaaatgggattgcttttaaaatttcttattcacattgttcactgttggcatatagaaatgctactgatttttgtatgttgatttgcatcctgtaacattactgaatttatcagttctaatagttttttatggagtctttaggtttttctaaatataagattatatcacctgcaaacaaggataatttgacttctttcrttccagtttggatgccctttatatctttatcttatcagattgctctagctaggacttctagtactatgttgaataacagtggtgaaagcgggcatccttgtcattttccagatcttagagaaaaggctttttcccccatttagtatgatattagctgtggatctgtcatatgtggcttttattatgttaaggtatattccttctatgtccagtcttttgaggtcttttttatcatgaagggatgttgaattttatcaaa

SEQ ID NO: 565014 - DNA, 312 bp, Homo sapiens
taaaatggatacaatcttcagagtatggttaggaaggaccagtgaagccagttgtcagtgaattttgtatccatattgtctctatacatgattactgagctcctttaaatgtagatacacgaatctttatatcactctttcttaaatgagaagaggaactattttattcttagaatagaatatagtcagtagtcaataaaatatatgttgaataaagtaataaataagttaaataatttatttcaatttgcttgaaataccaytactgcattgaagatgagacctatgaaatttaatgactgttagcaatta

SEQ ID NO: 565015 - DNA, 554 bp, Homo sapiens
aatatctacaaagtaggctgggtgtggtggctcatgcctgtaattccaacactttgggaggctgaggcaggcagatcacgaggtcaggagatcgagaccatcttggccaatatggtgaaaccctgtctgtactaaaaagacaaraattagctgggcgtggtggcgtgcacctgtagtcccagctactcaggaggctgaggcaggagaatcacttgaacctgggaggcagaggctgcagtgagacaagatcatgccatggcactacagcctgggtgagagagtgagaccctgtctcaaaaaaaaaaaaaaaaaaaaaaaaagaaaatatccggaaagtgaaaatggagaggaaatagaaatgtatttttaatgaacattttgatacaaatttcatcatttaatgattcaccaatttcttacattaatttgaattaagcattgaattcaaagagacaggagcattcattgatatatatggacttttaaaaattccatcctttataaatagacaaggtttgggctacaaaaattatatttttatcatggaaaaattt

SEQ ID NO: 565016 - DNA, 554 bp, Homo sapiens
aatatctacaaagtaggctgggtgtggtggctcatgcctgtaattccaacactttgggaggctgaggcaggcagatcacgaggtcaggagatcgagaccatcttggccaatatggtgaaaccctgtctgtactaaaaagacaaaaattagctgggcgtggtggcgtgcacctgtagtcccagctactcaggaggctgaggcaggagaatcacttgaacctgggaggcagaggctgcagtgagacaagatcatgccatggcactacagcctgggtgagagagtgagaccctgtctcaaaaaaaaaaaaaaaaaaaaaaaaagaaaatatccggaaagtgaaaatggagaggaaatagaaatgtatttttaatgaacattttgatacaaatttcatcatttaatgattcaccaatttcttacattaatttgaattaagcattgaattcaaagagacaggagcattcattgatatatatggrcttttaaaaattccatcctttataaatagacaaggtttgggctacaaaaattatatttttatcatggaaaaattt

SEQ ID NO: 565017 - DNA, 581 bp, Homo sapiens
gtaattacatgtcaagccatttcttcacttcatattggtttcacttagtaaactcaatactaagaaaaggaattagtggttgatggccatgtctgctttttaatgcaaagtaagtaatataatataatataataagaagcaaagtaaatacagagttgagaaggaagtagctaatgtacagggccagattgcgtaagtggttctgtactgaagtaaaaatctcatactattttattagcaaacattgaatttgggtaaaagaaaaaagaacacaaacatggaatacattgggcgtttaatagttatgaatttycagctaatctattggcttttaattcccaaatctccattttttctagagggattaaataaacctattaaggttctaggaaagacttttgagaccattatttgagtccataattgtcactgtgataatttatggatcagtagatcagaacagaatctcacttgctagaatggaatttcctttgcaatgtgctttcattttagaagccatagaaagactttcattttagaagccgttgaaagactttcattttagaaaacatagaaaaaag

SEQ ID NO: 565018 - DNA, 558 bp, Homo sapiens
tgtgcacctgccaagcaaagcaatgatttgtgtaagtattccagttaatgaaaatatatctgattcatttagggagtaaatgattaggatttaggttagattcatttagggagtaaatcgttaggctttaggttagaatcccaatgtatttcttgaatttgttacaaggtatgtaagtagccaacaaatcactgacaaattattcaaccttctaaaagattcctcttcataaccaatattctctttaaagtaagaattggtttacatgctttttgctaggtttaacatatgctcagagtggatcaaaagtcaattttgatggctatattttgtgttattttttaaagaactttttactgtactccacctcaaaaaaggcaaggcataagaagttttaatgatgctagaggataaaatatcatttccagctattataattttgtaccatttaaataatattttaaaagactattcagttgggtttaaaaaaaaaaaaaccttccatttataaacytcaagaacttaataaatatgttactattttaggtgtagtcaaag

SEQ ID NO: 565019 - DNA, 511 bp, Homo sapiens
tctcactctgtcgcccgggctggagtgcagtagtgtgatctcggctcactgcaacctctccctcccaggttcaagcaattctcctgtctcagcctcccgggtatctggaactacaggcacatgccaccacacctggctaatttttgtatttttggtagagatagggtttcaccttattggtcaggctgttctcgaactcctgacctcaggtgatccacccgcctcggcctcccaaaatgctgggattacaggcatgagcacctcgcccagtcacaaatagattttttttaaagactaagatacatgtattagtgtcctatggtcactgtaagaaatttctacagacatggtggcttaacacagtggaaatttattatctcacagttctggaagccagaagtctgaatctgcttcactgggccaaaatcarcgtgtcagcagggccgtacattctctggagcctccagtggagaatctgctccttgcctgtcttcctgctccaggtggctgc

SEQ ID NO: 565020 - DNA, 607 bp, Homo sapiens
aaaatgctcaacatcactaatcattaaagagatgcaaattaaaaccacaatgagatagcacctcacaactgttagaatggctactatgaaagcaacaaaagacaggtgttagcaaggatttggaggaaagggaatccttgtacactgttggtgggaatgcaaattagtacaaacatggaacatggtatggaggttcctcaaaaaactaaaaatagaattaccacatcatttagtaatacaatttctgatacccgaaagatttaaaaatcagtgtgttgaagagatgcctgcctgtatccccatgttcattgcagcactattcacaatagccaaattatggaatcaacctaagtgtccataaaggaataaatggataaagaaagtgtggtatayatacaaaatgaaatactattcaacctttaaaaagaaagaaattctgttgtttggaacaacatgggtagaattagagaatattatgctaagtgaaataagccaaacattgaaagataaatactgcatgttctcacttatatgtgaaatctaaaacaactgaactcatagaagcagagggtagaatggtggttaccagaggcagggggttgggggg

SEQ ID NO: 565021 - DNA, 579 bp, Homo sapiens
cagcactttgggaggctgaggcaggtagatcacctgaggtctggagttcaagaccagcctggccaacattgtgaaaccccatccttactaaaaatacaaaaaaatatccagctgaggtggcaggcacctgtaatcccagctacatgggaggctgaggcaggagaatcacttgaacccagggggcggacgttgcaatgagctgagatcgctccactgcactccggcctgggcaacaagaacaaaactctgtcccaaaaaaaaaaaaaaaaaaaagaaasaacgaaaagagagaacatatgaagcttaataacaatgattttgtttaaaatataaagtaataatactaggaataagggctgatgaaagtgacaggataaaatatactatattttatgacaggagatgatgacaggagagattattcagggtaactggagtagccagaaaatgttttataatagaggttctcttctttcattagaaattatgagtttagttgttgttttaacgcctaaaatagcacatacaatagaaatgtaaataaaagaccttggggagagtcccactattgcctgaaga

SEQ ID NO: 565022 - DNA, 625 bp, Homo sapiens
tctctactagtcagaaatattgtgcaactaatcatacagatgtaagatatttgaaattattggacttgtatttaaattgctgttacaacacctgaatataaatcaaaaatagtggggctgctgtaaaaggacaagtattatttaattctcaatttgttaatgcagatctggccttacttcattttaaatcacaggaaagagaaatcaaaatggaaaagttatccaggtgattacatttatacaagtgattaacttaaatgtgacaataataataaagaagaacaaaacaaaatcagtgaggagattcacttttccttccaagtaggaccgcattttctggggaatttgaattacctggataattatttctgtactccaccactttgtctgaaaaggcaaagcatttttacaataatagcccggttaccagtcccatcaagttactgttttyctgtatcaataataatagagtaattccaccaaattttatgtagttttcgccttccaagtgcttagcaaatattaattcatcaatgtagcattcctatgaggaggtaagaatttttaataaaaaaatataatctagattaatttacttgaaagcacacatgtaagagaagcagag

SEQ ID NO: 565023 - DNA, 551 bp, Homo sapiens
catgatcttgttcttttttatggctgtgtagtattccatagtgtatatgtaccacattttctttatccagtgtactgtcattttgggtttgattttgtttgagatagggtcttgctctgttacccaggctggagtacagtggtgtgactatggcttactgcaatttcaacctcctgggctccatcaatcctcccaactcagcctcctgtgtaactggaagcacaggcacacaccaccatgcccagctaaattttttttttgtagagacagaatcttgccatgttgcacaggctggtgttaaactcctgggttctagcaatcctcccatctcagcctctctaagtgctgggattamaagtgtgagccaccacactcagccaacaaggtgtttttatacacaagatttctatcattctatctatcaataaaattcctcattaatagcctatgaatgtagagccatgacataaagtataaatgtttccttgaaaaaagattaatgattcaatacagtaaatatattcactttatcttttaatgtttaatgtaat

SEQ ID NO: 565024 - DNA, 551 bp, Homo sapiens
catgatcttgttcttttttatggctgtgtagtattccatagtgtatatgtaccacattttctttatccagtgtactgtcattttgggtttgattttgtttgagatagggtcttgctctgttacccaggctggagtacagtggtgtgactatggcttactgcaatttcaacctcctgggctccatcaatcctcccaactcagcctcctgtgtaactggaagcacaggcacacaccaccatgcccagctaaattttttttttgtagagacagaatcttgccatgttgcacaggctggtgttaaactcctgggttctagcaatcctcccatctcagcctctctaagtgctgggattacaagtgtgagccaccacactcagccaacaaggtgtttttatacacaagatttctatcattctatctatyaataaaattcctcattaatagcctatgaatgtagagccatgacataaagtataaatgtttccttgaaaaaagattaatgattcaatacagtaaatatattcactttatcttttaatgtttaatgtaat

SEQ ID NO: 565025 - DNA, 401 bp, Homo sapiens
tatcaaagccagatttttaagctatcaaactgtagacaaatatgtatagtgtgattatattacaatatgtatagtgtgattatattttataagaaaaaaattcacagctagctatgaatttctagcatagaaaaaagttaagaacagacctcaaaaatattagctgggatttttaatgaatataaaatttggacgatttctatttttgactctyggtaccttaaactatctgcaataatttcaatttaatcgcctatcgtatgattttgaataaggctctgactagtttgtatatttgtttaaatttatttaaagttgtgcttttggggttttgtttctcatatgaatagtcaaaaattgtgtgttctaaaagcaattcatttaaatggtgaaaaacatga

SEQ ID NO: 565026 - DNA, 502 bp, Homo sapiens
tgaggaaaaacaaggagaggaattctgccgtaggatggaatgtacccagcctctcaaatataccttattttcaatgattttgatgataattctaaatcatcttggacttcttaggtgctgatatttagatgagatttggatgaattttaaattgatgcagtaatgggttgagattttgaggtatgctggaatgtggtgaatgggttttgcacgtggaatgaacatgaatctttgggaatcagaagatggactgyggtaggctaaacagtgcccgacaccccaaaggtctattttctttctaatcctaggagccaatgcgtattatcttatatgtgattaaattcaggtctttagaagaagcgattatctaactagttggctggccaagttagttattaatgcagagtgagttagttctctgagccttggaactttgaaattagaacgactgaagattaaaacactagaaaatgagctataagagtgtgaacaaaagctgatg

SEQ ID NO: 565027 - DNA, 511 bp, Homo sapiens
aatctatatataataagtatatgtttaaaagtgtgacagggacaactttttattccaatgtccattctttcattctttaggaatagaatcctcaaaatgtggtagggcacatggatgccagttaaaggctatttttccttgttgcaacgtgtggccatgtgcttgcattctagccagtgaaatatgacctaagggatgtgtataacttcttaaaaaagaaaatacacaacagacagtatacaactgtcacttcccctgcctcctttccctctggttggaatgcagacatgacggtgggagcaacggtagccatcrtaggtcatgagatgaaagctgctggttgagaataggaagatgtgaagtttctaacaccatgggctggtagtattagccctagaatcattatgtgttgattattatttaagaaagaaatagcttcccaacttaagtcactgtcatttcagactttaatttggattctgacctgtatctgaaagaattcatcaagtgg

SEQ ID NO: 565028 - DNA, 468 bp, Homo sapiens
gtggaagaaatttctaagcagcaaagcattcaagaggtgacctggataattctgaaagcgttcagttatatgtgctcacaaagaggtggtttgatattggaacttatgtttaaaagggaagcagagcataaaagttcagaaaatttgcagcctgactatgtagtggaaaaggaaaaccatttttctggggaggaattcaagctagctacacaaatttgcatgagtaatgaactgactattgaaagccaagacaatggggaaaatgtccccagggcatgttagagaccttcacagcagcccctcccatcacagtcccagaggcctaggaggaaaaatgtttctgtgggctgggtccagggccttggtgctctatgcagtcttgagactgctycccaggcactccagctccagccatgactaaaagacaccaaggtacatcttgggccatgacttccgagggggcaagcc

SEQ ID NO: 565029 - DNA, 579 bp, Homo sapiens
aaaatgagacacacttggagctcacttgaaccagctgcacctgcagcttgaaatgaagcttagctcttttgctgactgttagccctccctgccccaacctaaaagacacatgagcaagcccagaataagaggtaaagaaatggaggatgagttaggcacatgcaattattaaacactcactccatgcaaggcactatatcttagggtcctaagcatgagaacagtaagaataggatgctagatcagagtatggcttattaataatagtaytcactatagctaccattattgagtgcttcctttggatcagtctctgatacagtttggatgcttttttcctccaaatctcatgttgcaatgtgactttcaatgttggaggtaggcctagtgggaggcgtttgggtcatgggggcaaatccctcatgaatggcttggtgctgttcccttggtaatcagtgagttttcattctatgagttcatgcaagatctggttatttatttatttatttatttatttatttatttatgtatttttgagacggagtcttgttctgttgcccagactggagtgcagtggcg

SEQ ID NO: 565030 - DNA, 563 bp, Homo sapiens
tcttttttacttacacagaaattgtcaaaaaaaagcagagatttcccatgtagccgcaacctagtttcctctcttattaacatcttctatcagtgtgtctcacatggcttattaatatcttacataatttgtcacagttaatgaaccaatactgatagactattattaaytgaagttcatatttcatttggattcccttagttctatcttactctgacccaggatcccatccaggatcccgcatgacatgtagacatcacgtgggctcttcctggctgtgacagtgtgtcaggctttccatctcatgatgaccttcatagcactgaggaggattggtcaggaatgttgtagaatgtcccccattgtcacttcatgttctcaaggtgaactgtcacctttgatgttcacttggatcatttggaagagctaatgtttgtcaggtttctccactgtgaggttatttctcctccttgtccatactgcatgtgttcttttggagcaagtcactatgcagagcctcactccgtaaggagttggctccaccttcttgatggctgagtgtc

SEQ ID NO: 565031 - DNA, 563 bp, Homo sapiens
tcttttttacttacacagaaattgtcaaaaaaaagcagagatttcccatgtagccgcaacctagtttcctctcttattaacatcttctatcagtgtgtctcacatggcttattaatatcttacataatttgtcacagttaatgaaccaatactgatagactattattaactgaagttcatatttcatttggattcccttagttctatcttactctgacccaggatcccatccaggatcccgcatgacatgtagacatcacgtgggctcttcctggctgtgacagtgtgtcaggctttccatctcatgatgaccttcatagcactgaggaggattggtcaggaatgttgtagaatgtcccccattgtcacttcatgttctcaaggtgaactgtcacctttgatgttcacttggatcatttggmagagctaatgtttgtcaggtttctccactgtgaggttatttctcctccttgtccatactgcatgtgttcttttggagcaagtcactatgcagagcctcactccgtaaggagttggctccaccttcttgatggctgagtgtc

SEQ ID NO: 565032 - DNA, 563 bp, Homo sapiens
tcttttttacttacacagaaattgtcaaaaaaaagcagagatttcccatgtagccgcaacctagtttcctctcttattaacatcttctatcagtgtgtctcacatggcttattaatatcttacataatttgtcacagttaatgaaccaatactgatagactattattaactgaagttcatatttcatttggattcccttagttctatcttactctgacccaggatcccatccaggatcccgcatgacatgtagacatcacgtgggctcttcctggctgtgacagtgtgtcaggctttccatctcatgatgaccttcatagcactgaggaggattggtcaggaatgttgtagaatgtcccccattgtcacttcatgttctcaaggtgaactgtcacctttgatgttcacttggatcatttggaagagctaatgtttgtcaggtttctccactgtgaggttatttctcctccttgtccrtactgcatgtgttcttttggagcaagtcactatgcagagcctcactccgtaaggagttggctccaccttcttgatggctgagtgtc

SEQ ID NO: 565033 - DNA, 563 bp, Homo sapiens
tcttttttacttacacagaaattgtcaaaaaaaagcagagatttcccatgtagccgcaacctagtttcctctcttattaacatcttctatcagtgtgtctcacatggcttattaatatcttacataatttgtcacagttaatgaaccaatactgatagactattattaactgaagttcatatttcatttggattcccttagttctatcttactctgacccaggatcccatccaggatcccgcatgacatgtagacatcacgtgggctcttcctggctgtgacagtgtgtcaggctttccatctcatgatgaccttcatagcactgaggaggattggtcaggaatgttgtagaatgtcccccattgtcacttcatgttctcaaggtgaactgtcacctttgatgttcacttggatcatttggaagagctaatgtttgtcaggtttctccactgtgaggttatttctcctccttgtccatactgcatgtgttcttttggagcaagtcactatgcagagcctcactccgtmaggagttggctccaccttcttgatggctgagtgtc

SEQ ID NO: 565034 - DNA, 473 bp, Homo sapiens
actggtttgagatgtgtgcattcatctcacagggttgracctttcttttgattgagcagttttgaaactatctttttgtaaaatctgcaagtggatatttggagtgctttgaggcctatgctgtaaaaggaaatgtcatcacataaaaactacacagaagcattctcagaaagttcactgtgatgtgtgcattcatctcatagagttaaacctttcttttgattgagcagtttggaaacactctttttatactgtctgcaaatgggtatttacagctctttgaggagtatagctgaaaaggcaatatcctcacataaaaagtagacagaagcattctgagaaacctctttgtgatgtgtgcattcatctcacagagttgaacctttcttttgattgagcagtttggaaacactctttttgtagtatctgcaagtggacatttggagtgctttgcggcctgtggtagaaaagga

SEQ ID NO: 565035 - DNA, 473 bp, Homo sapiens
actggtttgagatgtgtgcattcatctcacagggttgaacctttcttttgattgagcagttttgaaactatctttttgtaaaatctgcaagtggatatttggagtgctttgaggcctatgctgtaaaaggaaatgtcatcacataaaaactacacagaagcattctcagaaagttcactgtgatgtgtgcattcatctcatagagttraacctttcttttgattgagcagtttggaaacactctttttatactgtctgcaaatgggtatttacagctctttgaggagtatagctgaaaaggcaatatcctcacataaaaagtagacagaagcattctgagaaacctctttgtgatgtgtgcattcatctcacagagttgaacctttcttttgattgagcagtttggaaacactctttttgtagtatctgcaagtggacatttggagtgctttgcggcctgtggtagaaaagga

SEQ ID NO: 565036 - DNA, 473 bp, Homo sapiens
actggtttgagatgtgtgcattcatctcacagggttgaacctttcttttgattgagcagttttgaaactatctttttgtaaaatctgcaagtggatatttggagtgctttgaggcctatgctgtaaaaggaaatgtcatcacataaaaactacacagaagcattctcagaaagttcactgtgatgtgtgcattcatctcatagagttaaacctttcttttgattgagcagtttggaaacactctttttatactrtctgcaaatgggtatttacagctctttgaggagtatagctgaaaaggcaatatcctcacataaaaagtagacagaagcattctgagaaacctctttgtgatgtgtgcattcatctcacagagttgaacctttcttttgattgagcagtttggaaacactctttttgtagtatctgcaagtggacatttggagtgctttgcggcctgtggtagaaaagga

SEQ ID NO: 565037 - DNA, 386 bp, Homo sapiens
tttggagcgctttgaaggttatgatggaaaagggaatatcttcgcattaaaactagacagaagcattctcagaaacttctttgtgatgtgtgcattcaactcccaggttgaacctttcttttgttagagcagttttgawacactccttttgtagaatctgcaggcggatatttaagtactctttgaagcattctttggaaacgagaatatcttcacctaaaacctagacagaagcattcacagaaacatctttgtgatgtgtccattcatctcacagagttgatagaacagttttgatagagcagttttgaaacactctttttaaagaatctgccagttcatatgtgcagtgctttgaggcttatggtagaaaaggaaatatcttc

SEQ ID NO: 565038 - DNA, 416 bp, Homo sapiens
atatttatggaatgtgtgattacaaattcacataaacttccttgtctaattttttttcttttctttttctttttctttctttttttttttttttgagactgagtttcgctcttgttgccaggctgcagtgcagtggtgcgatctcggctcaccgcaacctctgcctctggggttcaagygattctcctgccttagcctcccgagtagctgggattataggcatgtgccaccacgcctggctaattttgtatttttaacagagacaggggtttctccatgttggtcaggctggtcttgaactcccaacctcaggtgatctgcctgcctcggcctcccaaagtgctgggattacaggcatgagccaccacacccagccccttgtctaattttttaaaaaaaattcaagtgtgggtctt

SEQ ID NO: 565039 - DNA, 425 bp, Homo sapiens
tatatttatggaatgtgtgattacaaattcacataaacttccttgtctaattttttttcttttctttttctttttctttctttttttttttttttgagactgagtttcgctcttgttgccaggctgcagtgcagtggtgcgatctcggctcaccgcaacctctgcctctggggttcaagcgattctcctgccttagcctcccgagtagctgggattataggcatgtgccaccacgcctggctaattttgtatttttaacagagacaggggtttctccatgttggtcaggctggtcttgaactcccaacctcaggtgatctgcctgcctcggcctcccaaagtgctgggattacaggcatgagccaccacacccagccccttgtctaattttttwaaaaaaattcaagtgtgggtcttgagcttcc

SEQ ID NO: 565040 - DNA, 422 bp, Homo sapiens
ttttccctttcttttgagacagcatcttgctgtctcccaagctgtggtatagtggcatgatcatggctcactgcagcctcgacctcccggcctccaacctcagcttcctgagtagctgagactacacgcacacaccacctaactaatttttaattgagacaggttcttggtttgtcacccaggttggaatgcaggtggcaggatcacggctcactgcaacctaagacctcctgggcttaagcagtcctcccacctyagcttcctgagcagctgggactacaggcatgtgccaccacacttggctaaatttttaaaaatttttttttagagacagggtcttaatatattgcccaggctgttcttgaacacatgggttcaagagattctcccacctcagcctcccaaagtgctgggattatagg

SEQ ID NO: 565041 - DNA, 608 bp, Homo sapiens
cagtgcgtcaatcagagcgtcctgtgcgatgagtccccagcagcaccatgccacccaccccgagtatcccctgggcaccctggcatagccagatgacttccgtgcccctgttgcaataaccactgcttccaagtctctgtagaccaccccttgggtatatctcatgtaagtgatatttattttatttattttttgagtcagagtctcactctgtcacccaggctagagtgtgctgacgtgatcttggctcactacaacctctgcctcctgggttcaagcgattctcatgcctcagcctcccaagtggctaggactacagacatgcaccatcacgcccagctaatttttgtatttttttcagtagaggtggggtttcmccaagttggccgggctggtctcaaactccccacctcaagtgctctgcccgcctcggcctcccaaagtgctgggattacaggcatgagccatggtgtctggccctaatgtgagtgatctttaacactgagcacttgaaaaagaaaaccctgaagaaacctaattattcgatgtctggacgacaaggaagaagatagaaatggcatcagataataaacagtgtaaatgtttgt

SEQ ID NO: 565042 - DNA, 454 bp, Homo sapiens
ttggtttcagctaacaatcacgacaggcaacaaaacaaaacagcaatttgattctagcttgcatgtctcgttagtgaagctgagtgctgttttcaggtgcacagtagtcatctgtagttttttttctaaacaagaaaactccaaatttgccttctacctcaacggacggcaaatttagacagaagccactttcttagacttartgaatacaattctttcctacatgagtaaaataaagacatcacatttattttaagaggcaagctgaccaacttgtacttaagtatattttcttaggagtttctttgatgcatatttcaataaaaattacctaaatgggatgtcactgcttacaaaaacaagatatttaattcagattcctggcattaatttatacaaagaaaagcagagcttgtatttacttaccttgtgataaaacctcatcctactagtt

SEQ ID NO: 565043 - DNA, 517 bp, Homo sapiens
gccttggttgtatgcttcccaggtgtactgagtgcccacctggttttaaaggctgccctggcggtggcccagaagcaaatgtagcatcgtttgccagagactcaagaatgtgtctgtataaataaaagtgaaagtggcatatgcttgagcaaaattggcctaatgggatatggatttacccgacacacactgatagcaaatagattgtccttacagcctgcaccagtatagaactttgatatgtacccttctgtttgcagaaagagcgaccagaaatgtgcagcagtcagtaatgtaccccccggggttgctgttgattgatgacttctcaagggcagcatctccacggggctcagggaattcaccgtgaaagtcagcctgggcctcctgcccactttcccattgcctcattccgctgcacagagaagtgttgaaaggggctctccaagatgggctgactgtttgcgaccctcacagaacccygcaggccatattcacagcaaagttcacatgcaga

SEQ ID NO: 565044 - DNA, 497 bp, Homo sapiens
tttcaatgaattggttcatttcatctgtgttatcaaatttgtggacagagttcttcatagtattcctttattaatcttataatgtccatagtatctttcatttctgatgttagtaatttacattctctctttttttcttagcctggcaagagacttaytgatattattaatctcttcaaagaactgcttttgcttttgtggatttcctctactgatttcctgtgttcaatttcattgcttcctgctcgaattattttatttcttttcttctgattactttggaattaatttgctcttctttctctagttttctaatgtggaaatttagattattgattttagatttttcttctttcctgatgtatgcatccaatgctataaattccctttatgtactacttttgctgcatcccgcgatcttggataaattgtgctatggtttgaatatacccctcaaaggtcatgtgttggaaacaatccccaatgtgacagttttg

SEQ ID NO: 565045 - DNA, 545 bp, Homo sapiens
tgttttatattttattgatttctactatgatcttatttcctttctttcttagagtttattttgttcttccaggtttttagggtaaatgctgaaacctttttctattttaatacaggtgtttagtgctgcaratttttttcctgtgtgctgctttattacatcttacatcctgttgtattttcatttagttcaaaatagtttctaatttatttctcttttgatttcttctttgagccataggttatttagaagtgtgttatttgattttcatctcttgtggtgtttcaaccatttacatttaatatgatttttagtaaggttaggtttgactctgtcatcttactagtagtttcttctggttttgttcccctctccctctttttctgccaccttttggattgaatatttttaatgagtctcttttaatatccattgaatattatactgttgggtgctggatatttttgtattcctataaatgtccttgagctttgttctgggatgcggttaagttacttgtaaaggctgggcacagtggttcacac

SEQ ID NO: 565046 - DNA, 264 bp, Homo sapiens
gcactcttcttgccttagtctccaaagtggctgggaccacaggcgtgtgcaccatgcctggctaatttttttactttttgtagagatgggggttctcacttttttgcccaggctggtctcgaactcctggcttcaagggatcctcccacattcacctcccaaagtgctgagattacagatatgagctgtaactgtgcccagstggagcattcttaaagttagatgcatcaccaacacttttggtggaaagctacagccatggac

SEQ ID NO: 565047 - DNA, 602 bp, Homo sapiens
aggatcatctgtgaaccaggccctggtcttctcttcctctgtcaactgatcatagggaactccccatgaggccatcagtgcaggctggggaagagaaggcagggtggcaggagtggagaccatgggcatttcagccacttcctcatgtaacttacttgtgccttcgggactgcttgagcccaatcacatatatatgtgattgggagcccaaccacttccatttgatggaagcccaaccacttccatttgatgatttaatgctgctgtgcatgacccactttatggctagatgggtcagaaagckcccagttcatgataggcagttcaggttgcatggtgacttgatgacccacagtcaaacattcagtttccaccaaagcccagtaacaggccaagagctgcctttcaaaaggagagcagttatctgcagaagatggcagggccttgctccaatatcctagaggcctccactgtgattcaccaatgggggcctgccagggctccaaacagcatccctatctgccactgatacctccagcaccattggatatgctgagtcatatggcccaagtggcagagaagcttgcacagcaggctggacc

SEQ ID NO: 565048 - DNA, 638 bp, Homo sapiens
aaaacgtattttatataacagtttgttggcttgttttataacttaacaatttaaacatatgaaatgtggatgtgtatttgaattccctctccaaatcacaratattaagggatgagcctggcttttgatgtttgtcttagaaatgggaagagctggccaggtgcagtggcttacacctataattgcagcactttggggggccgaggctggtggatcacctgaggtcaggagttcaagaccagcctggacaacacagcaaaaccctgcctctattaaaaatataaaacattagccaggcgtggtggcaagtgcctgtaatcccagctacttgggaggctgagagaggagaatcacttgaacctgggaggcagaggttgcagtgagctgagattgtgccattgcactccagcctgagtgatgaagtgagactctgtctcaaaaaagaaaaaaaaaaaaaaaaaaaagtaaagaaaaataaagaaataggaagggctggtggaagagggagggaagacagtcattatactggtatactctgtctaaagactatagacattctcagattcagctgaagagtgccagacattctgatttttaaaggaatattgggaatccaaattttaatgcagaaaattcta

SEQ ID NO: 565049 - DNA, 589 bp, Homo sapiens
tattgaggtcataatttcaaataaattcttttttgaatcctatatgggttgtagaagattttggctaacagactggtattgcaccagtgaaccacttcaaagttagggatttactcttaggaaaacaacatcaattcactatgtaatatgaccttattttcttgtgaagtgtctctttcccatacggtgcaacagagggaaaaacaaacaaaacagtcctttcaactaaattggatgttttggatttcagataaaaagcagggcatttttcttttaatagtgagagcagaggcatgtggaatatctatgctatcatcccatgtaggatatatctaagtgatcaaacagtaattgtgatttttgtgaactaggcctaatgtaacatttggtgcttaattcacctgaggtagctactttctttacttaatgcttatagaggcaatggaatgaataacaaaactaagatcagcacgaagtgggagatgctatgtatctacatatttattttggtgatttattttgtggattgttcactttagtaaacatttaactrtatattagatactctgctgggtctggtgttattaat

SEQ ID NO: 565050 - DNA, 645 bp, Homo sapiens
atgaatactataaaattaggcacataggcattagaaggacaaatgtaatggataaatcttaaagttcaaatcttgttattttcagggaatgtacatctaagcactccatcaagaatgtggataattaatttctgactatacataaaactttggtaagtttttcttagattttctgtggtcaaaatcttttgaggaagttcataaactaaaaacacattccaktttttagtagagatctcctgataaatataataatttgaatctaattttaaggtaaaatagcacttattcaatgtgtatttttgccttacacacgtcagtgttcttgcccttaattcttattttattttaaaaaacaccatttctacatattttaataaacacagaagcatatttcccttcaggtgacttttgatttattattcttagctgcataagaataataatcattttcatttttaattgaaaaatgtcttacattttgcttctctattttagaacataacacattctatttattattcaatttcatgacatacgaactcctaatcttatataaaaataagattcctacagtgattatttacctttactatatgaaagagtctagggaaaacaaaaaacaaacaacaacaacaacaacaa

SEQ ID NO: 565051 - DNA, 463 bp, Homo sapiens
agagcttgtgtctgtttttccacaatttcagctctttctcttcaggagataagaatcactcagggcaatcctagcagatttgaggctcactatctgctcctgatgctgggagacagaatccttgagttcatcattttctttcatcactttgtccactgaatttaggagcaaccaaccagtttcaatatgctccttggttcttcccatatggtcaaatatattatgtatagagttactaacctccttgcctctgataagtggtgaatcaggagtgtcaactcatttattttgcataactttctaaacagtttatgccaaggactatcagtgttctccatactattagaagtagagtccttagcatttttgagtcaatcatattaagcagccaacttcagaaacaccaaaatcaatgaaaaaattccatacttmatattctgttcctctagaaccactcctggta

SEQ ID NO: 565052 - DNA, 463 bp, Homo sapiens
agagcttgtgtctgtttttccacaatttcagctctttctcttcaggagataagaatcactcagggcaatcctagcagatttgaggctcactatctgctcctgatgctgggagacagaatccttgagttcatcattttctttcatcactttgtccactgaatttaggagcaaccaaccagtttcaatatgctccttggttcttcccatatggtcaaatatattatgtatagagttactaacctccttgcctctgataagtggtgaatcaggagtgtcaactcatttattttgcataactttctaaacagtttatgccaaggactatcagtgttctccatactattagaagtagagtccttagcatttttgagtcaatcatattaagcagccaacttcagaaacaccaaaatcaatgaaaaaattccatacttcatattctkttcctctagaaccactcctggta

SEQ ID NO: 565053 - DNA, 504 bp, Homo sapiens
ggaggctcagctagtctcaccttttcatgtttttctgcctgctttatattcacagggagcttattcaattgtgcccaccagattaaaggtgggtttgccattcccagcccactgactcaaatgttaatctcctttggcaacacgctcacagacacacccaggatcaatacttgcatycttcaatccaatcaagttgaaactcagtattaaccatcacaccccaacatgacagtgctgtccaaagttctgaggctaatactccagtataattatatgtatctgtgtgattcctgtaatcataccagtatatgtgtattactttagtagaaactttagctatagataaatcaaaagaagagatacaaagaattaaaattatattagaaatatgtgtcaacctttatcacaacaagctaaaatatttaactattgagtcaggtgcagtagagagagtttaaaacttagaatttccttgatttccaaggacaggggattttgcatgga

SEQ ID NO: 565054 - DNA, 504 bp, Homo sapiens
ggaggctcagctagtctcaccttttcatgtttttctgcctgctttatattcacagggagcttattcaattgtgcccaccagattaaaggtgggtttgccattcccagcccactgactcaaatgttaatctcctttggcaacacgctcacagacacacccaggatcaatacttgcatccttcaatccaatcaagttgaaactcagtattaaccatcacaccccaacatgacagtgctgtccaargttctgaggctaatactccagtataattatatgtatctgtgtgattcctgtaatcataccagtatatgtgtattactttagtagaaactttagctatagataaatcaaaagaagagatacaaagaattaaaattatattagaaatatgtgtcaacctttatcacaacaagctaaaatatttaactattgagtcaggtgcagtagagagagtttaaaacttagaatttccttgatttccaaggacaggggattttgcatgga

SEQ ID NO: 565055 - DNA, 504 bp, Homo sapiens
ggaggctcagctagtctcaccttttcatgtttttctgcctgctttatattcacagggagcttattcaattgtgcccaccagattaaaggtgggtttgccattcccagcccactgactcaaatgttaatctcctttggcaacacgctcacagacacacccaggatcaatacttgcatccttcaatccaatcaagttgaaactcagtattaaccatcacaccccaacatgacagtgctgtccaaagttctgaggctaatactccagtataattatatgtatctgtgtgattcctgtaatcataccagtatatgtgtattactttagtagaaactttagctatagataaatcaaaagaagagatacaaagaattaaaattatattagaaatatgtgtcaacctttatcacaacaagctaaaatatttaactattgagtcaggtgcagtagagagagtttaaaacttagaatttccttgatttycaaggacaggggattttgcatgga

SEQ ID NO: 565056 - DNA, 504 bp, Homo sapiens
ggaggctcagctagtctcaccttttcatgtttttctgcctgctttatattcacagggagcttattcaattgtgcccaccagattaaaggtgggtttgccattcccagcccactgactcaaatgttaatctcctttggcaacacgctcacagacacacccaggatcaatacttgcatccttcaatccaatcaagttgaaactcagtattaaccatcacaccccaacatgacagtgctgtccaaagttctgaggctaatactccagtataattatatgtatctgtgtgattcctgtaatcataccagtatatgtgtattactttagtagaaactttagctatagataaatcaaaagaagagatacaaagaattaaaattatattagaaatatgtgtcaacctttatcacaacaagctaaaatatttaactattgagtcaggtgcagtagagagagtttaaaacttagaatttccttgatttcyaaggacaggggattttgcatgga

SEQ ID NO: 565057 - DNA, 587 bp, Homo sapiens
accacctgcacctgctaaaactaatgtctacatatgctgcccaggcgtgaaatgacaggcatgctcgggccactactgtaatcaccaaggcttgaggactgcccacctgacattctctccccagcaaagtgtcaccacagcctgtactgagaactgcagccaagccaccgaggaaattacagacatcactgattcagtacacagtcagttaaatcatatgaagactaccctactgcaagaatccagaaccaaagctgaggtacacttcccaaccatcaacataggcacatcttgagaaaaaatgtcttcctctataaaagttaactcaaatattagaaaatgctttgttctttttgcttagaattgctttgccaattcaggctcattttttacttcatataaattctacaacaattttttctaattatctgaagaatgatgttgggagtctgataggaacagcattgcatctgtaaattgctttgggcagtattgctattttrattatattgcttctcccaatccatgatcatggactatatttccattggtttgtgttggctctgatttctttctgcagtgttctg

SEQ ID NO: 565058 - DNA, 613 bp, Homo sapiens
ggggttggcttggcatgtctttgaagttaaagcctctgggcatctgtgtgcttaggcaaaggccagaggccacagagctgagcgaggtcaccactatacccagcgtggagacagcatgcccttcaagcccaggggccaacctgcagccctgaattagatcactcagaaatcacagacctcaggaatcaagtaaggcctaaatgattttcactgtgatatggtagagtgagcacagagattggagccagaagaccctggcaagtgtgacctgaactagttatttaaactctcagagtctgggtctttctttcctcacttgtaaagtagacataacaattaactcagccctcccctcgaaaaacactgtctatcccagaaagtgactatgagggtcaaatgagctcatgggaatgaaagtccttttgaaaayggaaggccatgcaattcctgaatgtgttgcactctcgccttcccacctttacctgtaacacctgtaatatcttttttactatcttgctactagtaatcactatgcacttttccttacttctcttccttccttccttctttccttccttccttcctctcctagacctcctcctcctctttcttc

SEQ ID NO: 565059 - DNA, 544 bp, Homo sapiens
ttgtggggaactaataaaagacgtatttttccaagatcttgccctctccaagaaaagtattgtggggaactaataaaagacgtatttttccaagatcttgccctctctcatcctcttcaaaatgtaacagaaagaggggargatgaagagagagagagaaataaagaaaaaaaaggaaggaagatggaaaggcagaaagagggaaagagagaaaaaagggataaaggaaaaaacttttcgatgaaaaagcctggcaatttcttttttgttctacatttcctcaacatatctgcccaacagtaaacattcttcacttaaaatgtgtgtagatgtttgtgtgtatgtgtgtgtgtgtttgtgtaatgcagtaagtcagtgtttccccaaatgtggaatgcctgtgagtgctatgaaaaatgttttaggtgagcaatggataaatttatttgagtactcatgatttattttgacatagattggaaaaatactggttttctacttatcgcagtgatgaaaaaatatatttttaaaaataaatggctgg

SEQ ID NO: 565060 - DNA, 360 bp, Homo sapiens
taacagccagacactgttaacacccctagggctgatgtagtaagtaaggaaataacatagcttttgcacatagaaagggggacactgagtaggaccttagtcttggtgtgatgctatcaacagaggcgaagtggctcatgcctgtaatcccagcactttgggaggccgaggtgggtgatcacctgaggtcwagagttcaagaccagcctggccaatatggtgaaagcccatctgtactgaaaaaaaaaaaaaattagctgggaatggtggtgcacacctgtagtgccagctacttaggaggctgagtcaggagaaccacttgaacccaggaggcggaggttgcagtgagccaagatagca

SEQ ID NO: 565061 - DNA, 272 bp, Homo sapiens
ccctttatcattttcaccacacaatgttttcttatattgtaatgcatgtcagtcttatggcatggctaacaagacaatctatgaaggatattagtatctgtatactcaggktctagtttagttagggcaaacctatgcaccaggctgccagggactgtcctagtttacgcttccatccttcctcccaaaggtttatgttaagcgctatggtgaaactaaaatatcgattcattccttcattaaattttcaaaaatgtgctaaacacttactc

SEQ ID NO: 565062 - DNA, 496 bp, Homo sapiens
gggaggccaaggcaggtagatcaccacctaaggtcaggagtttgagaccagcctggccaacatggtgaaaccccatctctactaaaaatacaaaaattagctgggcatggtggtgtgtacctgtagtctgcctactcgggaggtcgaggtatgagaattgcttgaacctgggaggcagaggttgcagtgagccgagattgcaccactgtactccagcctgggtgacagagtgagactccatctcaagaaaacaacaacaacaaagaagaaaatagtaaacaacaaaagaatcggtattggataaattatatttccaaaaacaaatatgaccttgtttctgtgtaaaactcaaacgtatccacctccaaaactcagccttctctcctcttctccgtgttgctctgcacttctccttgttcctttacatacttttcctrttgacttctccatattcccttatgtgctttttagtgtacttctccatattcccctatct

SEQ ID NO: 565063 - DNA, 670 bp, Homo sapiens
ggacaaattacagagcatttgcagtctcttttcgtttgtagaagtttgaggttcaccttctakacggtcttcagtcatttgactttgttttatttgatctatattacataccctaggaaagagaatagagccaacttgctaaatatttttatttagtactctcaacaaaccatttgtaagtatttactgtgtacctacaatgtccaggtcacaattgtaggcttttgtatgctggatctgagatccagttgtaaaatttttaggaattttgtgatctggttgtttaatacaaccattatttaaacgtaagttatataaacttacagttaaataaattacattaaaaataaaatgaggccagatgcggtggctcacgcctgtaatcccaacactttgggaggccaaagcgagtggatcatgagggcgggagtttgagaccagcctggccaacatggtgaaaccctgtctgtactaaaaatacaaaaattagctgggcgtggtggcgggtgcctgtaattccagctacttggaaggttgaggcaggagaatcgcttgaaactggaaggcggaggttgcagtgagccaagattgcaccactgcactccagcctgggcaagaatagtgaaactctgcctcaaaatataaataaataaataaaatgaacagatac

SEQ ID NO: 565064 - DNA, 405 bp, Homo sapiens
ttttttaaattaggtgtcaaaaaattggacaaattacagagcatttgcagtctcttttcgtttgtagaagtttgaggttcaccttctatacggtcttcagtcatttgactttgttttatttgatctatattacataccctaggaaagagaatagagccaacttgctaaatatttttatttagtactctcaacaaaccatttgtaagtatttactgtgtacctacaatgtccaggtcacaattgtaggcttttgtatgctggatctgagatccagttgtaaaatttttaggaattttgtgatctggttgtttaatacaaccattatttaaacgtaagttatataaacttacagttaaataaattacattaaaaataaaatgaggccrgatgcggtggctcacgcct

SEQ ID NO: 565065 - DNA, 610 bp, Homo sapiens
atgtattgtcccagctacttaggaagctgaggcaggagaatcacttgagcccaggagtttgaggtttagcactctttgatggtgccactgcactcccacccctccaccatcgaaaagaaaagaaaagaaaagaaaagaaaaaaggaaatgaaatgaaaaagaaagaagaaaagaaaaagaaagagaaagaaagaaaaacactcttcaactcattttaagaggccaaccycactctgataataaaacctgacacagacattataaaacaaaaggaagtaaaagaaaacaaataaaaggcaaacacttctcatgaacacatatttaaaaatccaagaaaatagtaaatcaaagtaatgaatatatataaagcagataaattaagatcagaaagggtttattacagaaatacggcctgatttaaatttggagagataaatgagtttagttcataatattagcagaatagaaggaaaaccagtatgagtatctcaatagatgcagaaaaaactatttaaaaaagctcaacattcattcctgataaaacttcttagcaaaataggaataaaggggaaattcctcagtctaataaagaacatctatgaaaaagctt

SEQ ID NO: 565066 - DNA, 629 bp, Homo sapiens
gtttttaccaaggacaggatcagagagcatttatctgcatctccctctgtggtttgataacaacttgacgtgttcgccaggcacagaatagagaaagatttgactagacgctgaatgggcctcattagtagaaactcactactttctacattcagcaggcaggctttgatccagaactccccacaccgcagctctgtttggggcttgctgagagttttaggaagctttcaccaagaaatgctttttgtgcagcctgtaccgaaaaacatgtyctatgtttttcttaatatcaacatcaaatttggaagaatacacttacatgtgttctattcttttctgggataccgccttcagctcttagaaaacatgctgtggtcgctaaaggttgcactgattacctctttgagccgaggtgcggattcagagagacaagctctatcctactgctgatcattcatgatgcttgtctccaagggagggcttcatggcaggtaacctgtgaagtcacaaaggcccccctctgagaaaagctcacatttggtttaatgctgtgtggtagctgtcttgaaactcttttttttccttttttaaattatattttaagttctagggtacacgtgcacaaggtg

SEQ ID NO: 565067 - DNA, 574 bp, Homo sapiens
attggcacctcatttctgctataagaccttggacaagttacttattctcctaggtatgttttcttatccaagaaatgggaataataatggcatattttgctatttttataaggcttctgtgataatttttaagagataattcatgcaacatgcctggagcctagtaaaattcaattaatgttagtagtaataaaaatagttcaaagaaatgacatagaattagttgcagaaggaaatactaaaatatataaaatcacatttcaaatgaattttgaagaatttcagaaggtataagagaagcaatcctgtggctagggagttaggaatgtttttaatcccgaagattgtttttgtttaagttagcagtagtgtttatgagcagaagagttaaattattggagatggrcccggcacggtgattcatgcctgtaatcccagcactttgggaggccaaggcaaaaacattgcttgagaccaggagatagagaccagcctgtataaccctgtctctacaataataaaaataatgttttaaattgttgaatatgtacttaaagaaaagcaattaggcagc

SEQ ID NO: 565068 - DNA, 574 bp, Homo sapiens
attggcacctcatttctgctataagaccttggacaagttacttattctcctaggtatgttttcttatccaagaaatgggaataataatggcatattttgctatttttataaggcttctgtgataatttttaagagataattcatgcaacatgcctggagcctagtaaaattcaattaatgttagtagtaataaaaatagttcaaagaaatgacatagaattagttgcagaaggaaatactaaaatatataaaatcacatttcaaatgaattttgaagaatttcagaaggtataagagaagcaatcctgtggctagggagttaggaatgtttttaatcccgaagattgtttttgtttaagttagcagtagtgtttatgagcagaagagttaaattattggagatgggccmggcacggtgattcatgcctgtaatcccagcactttgggaggccaaggcaaaaacattgcttgagaccaggagatagagaccagcctgtataaccctgtctctacaataataaaaataatgttttaaattgttgaatatgtacttaaagaaaagcaattaggcagc

SEQ ID NO: 565069 - DNA, 479 bp, Homo sapiens
atttaatttaataatcccagcactttgggaggctgaggtggacagatcatgaggtcaggagttcgagaccagcctggccaatatggtgaaattctatctctactaaaaaaaaaaaaaaaaaaaaaaamaactagccaggcatggtggtgtgcgcctgtagtcccagctactcaggaggctgaggcaggagaatcacctgaacccgggaggtggaggttgcagtgagccgagatcacgccattgcactccagcctgggtgacagagcgagactccatctcacaaaagtcaatcaatcaatcaatcaatcaataataagatttgcccatcttaaaatattattctcagcactctctactctcttgcttccctcacattcttcctcaggctccttcattttttctttctgcctccagcagcatcctctctcatccctgcttacatatccacctatagagtccttcctcccatcaagcatggc

SEQ ID NO: 565070 - DNA, 646 bp, Homo sapiens
gtatgcaaacattttaaatttcaaaataattttagattcacaagagttgcaatcctagtacagagagtttctgtataccctgcatccagtttctcctcatgttaacatctaatgtagccaggtacagttatcaaagtaagaaattcaaactggcataatataactgaccaaaccacagacttcatttagatcattatttttcccactaattttttttttctgttctggcatctaatccaggatcccacattaaattctgttggcatgtctccttaatctcctctaatctgcaactggtcctcattattgccttgttttctatcaccttaactcctttgaagaatactatcaggtattttgtagaatgtcccacaattttggtttgcctgatgttttctcagggttagacttaggttatgartttgggagaataccacagaggtaaagtgcgtgctttgctgtgtcatataaggagccacatgatattaccctgacttatcactagtgatattatctttgttcacttgtataaagtgatatctgtcaggtttctttatggtaaaggtactatttttctttttgtaattaatagatattcagggagatagtttgggtcagtgcttgcattttatctttcactgcagac

SEQ ID NO: 565071 - DNA, 631 bp, Homo sapiens
ttaatttcatagttaacattctataattttcttcttgcttcaaaaccctagtggccacagcattcaactgtatatagtcatgaaaaactgtagaaaaaggctttattgttttactttctgccagctttttttcctattaataaaatatgaaagttaagagctatagcatttcaaaatgaagagctatggggaaattcaagataccataaaatgatcaaagcaaaaaataaatgtccaatatactgttttgaaaaaaaaaatagatgactttgaaactcacttgtctgttgttgccttgatgggtttcaaaactattgcagctctggtgtcgtgggggtaagcaggcctaatggagtcatattctcgtagaagttgtaaataagatttctgatcattcatcaaaagctgataaaaagggaagttcagtgtttagggaatacagcaaaacaaggctagaaagttgttttaagaagacctttttgaaaacatttgtggtagttcttagaaatctagctccatctggttggtgttgggaggggtaataacgaactttatctcaaacctttggggcacttagaaattaygctgatttttccagtttgcattcccagctgaacaagctgaaaaacaa

SEQ ID NO: 565072 - DNA, 552 bp, Homo sapiens
ttaattccatgtcgtttctattgtgaatagcatggcaatgaacatacaagtgcatgtgtcttttttgatatttttaatgaatatctattggatattcctcttaacacttaagttattgctgtatgcacttaagaattatgctggatgctaaaatttatgatacttgatgtatccaggagattataatacaagctcagaaaacccagcatctactgggtctgataagcaatcaagtgtagaagtaagctttcccttccctaaacagtgatgcctgcttcatacaatctcacacagaaagaaggcattagacatagatggatttcaccttcctccctgacaagygatgaggaaatataataaaggcctatggcatttaaaagaagaatgctaccttcacaagtacttttttaaaaactttatccattgtaaatagaactcatactattacatactttctagccatattaatttaaaaattacacgatattcactttctgtcttatccagggtagtgtttgtcaacttctccacccagaaatctcaaaggcagaa

SEQ ID NO: 565073 - DNA, 549 bp, Homo sapiens
aaattacaattcaaagtgagattttggtagagatgaatattcaaactatatcagtgtatgataaaartaaggctaaagaaaatgaatagcttactctacctatcttcatttttaacaggcagaacctgtccaccaggcagatttttctggtcgcaaattttatgctattacattggcaaagccttaataaacacaaatataactggactagatattaatagcccctattttattccagtgtaatttttaaaatctccaagataaagatttatattaaggatttgatttgtgtacttgttgttaaagccattgtcatactaaagctgttttttttttttttttcagtgaaaataggtaacctgaacagaacccgctattacttggcaaacattcacagttattatagcacatgtagtgagcctgaatcaattgcatggctctgcaaaactgtttcttatcggttttatgaataaggctccatgtttttataataaggaaataaagcataaaaatagaatggttggagtgaaaaataaaaatagttgttat

SEQ ID NO: 565074 - DNA, 549 bp, Homo sapiens
aaattacaattcaaagtgagattttggtagagatgaatattcaaactatatcagtgtatgataaaaataaggctaaagaaaatgaatagcttactctacctatcttcatttttaacaggcagaacctgtccaccaggcagatttttctggtcrcaaattttatgctattacattggcaaagccttaataaacacaaatataactggactagatattaatagcccctattttattccagtgtaatttttaaaatctccaagataaagatttatattaaggatttgatttgtgtacttgttgttaaagccattgtcatactaaagctgttttttttttttttttcagtgaaaataggtaacctgaacagaacccgctattacttggcaaacattcacagttattatagcacatgtagtgagcctgaatcaattgcatggctctgcaaaactgtttcttatcggttttatgaataaggctccatgtttttataataaggaaataaagcataaaaatagaatggttggagtgaaaaataaaaatagttgttat

SEQ ID NO: 565075 - DNA, 549 bp, Homo sapiens
aaattacaattcaaagtgagattttggtagagatgaatattcaaactatatcagtgtatgataaaaataaggctaaagaaaatgaatagcttactctacctatcttcatttttaacaggcagaacctgtccaccaggcagatttttctggtcgcaaattttatgctattacattggcaaagccttaataaacacaaatataactggactagatattaatagcccctattttattccagtgtaatttttaaaatctccaagataaagatttatattaaggatttgatttgtgtacttgttgttaaagccattgtcatactaaagctgttttttttttttttttcagtgaaaataggtaasctgaacagaacccgctattacttggcaaacattcacagttattatagcacatgtagtgagcctgaatcaattgcatggctctgcaaaactgtttcttatcggttttatgaataaggctccatgtttttataataaggaaataaagcataaaaatagaatggttggagtgaaaaataaaaatagttgttat

SEQ ID NO: 565076 - DNA, 579 bp, Homo sapiens
atattaagtttgggatgagggcaagatgagagctgagatatgaatttggatgttatctgtacattataaatggtatttgtagcccaggatcaaatgttatcaactagtgagagagcacaaaccaaaagagagtcaaggtttaatctctgggttacaccaacatcaagagatctgcaaagaaaaagaatctcccaagaggagcttaagtggtcagggagatcagagaaaaataatgatcatagtttattctagaaatcaaatgaataaatggtactatgtacagtatgttcaagaatatcaaaatctgatagaagtcaagtcatgactcaatgacgtgttttaattgaccattgaatttggawagaaatcgttggaaaagtgtataagaatgtttttgacagtatattgtgagctatattcttattgaaagagtaaaaaagggaataatatataagggaaatcagatattgaaaactttcttaagacatgtcttataaaatggatgatgtgaataggatggtagtatcatgcatgtaaagagttttttaattttaatatttggtgagcaaattaaaacag

SEQ ID NO: 565077 - DNA, 553 bp, Homo sapiens
ggttattacctgattgcctctactgtaaatttcaataacaatttttaagaatatctaccaactckttgtctgccatatctttttcttgaaaactgtggcggaaatgaaaagatttataatatcattatcatgtttgtcatgttttcatcataagaaacatctttgaaaacatgtctcacaatgtcagctcagaggagagtaaatgacaaagtattttaatttagaaaatatctcagaaaatataggtaaactcacccacaggttaaagggtttttctaaagttttacaattaattagttagtgggttctgaaagaaattctgttcttgtgactttaatttaggtttttaaaattgtccagcaatctgctcatctattagttatcattttaaaaaatttgggacaaccatgaaaagaaaagagaaaaataggttaataacaaggatttttaactttaagataaaaaacaggtaggaaagaaatccatgttggtaaaaattctctaaaatgaatttcatactgtaacttatggatggcagaagattgattctaat

SEQ ID NO: 565078 - DNA, 476 bp, Homo sapiens
catttctttttttaaaaataaatgtgacatttatgttttaagtaaatgtgtttcttattgagtgtagtttccacgagaggatttgggaagctattttctattactgaaataacaactgattttccagkcttgcaatggtaaacaacagaccctggagtttgaggacaacaccaaggtactgccatacttgaggtggagatggcgtttctcaggtgagatactcctccatttcaacatttctgttccatctaggataccatttcctcctcaggttgtaaggttaaggtaggaatcataaaaaattaattattaatatctgttaaattttaaaatggtgattattgagatacacattaacaccatagtagacattttacatctcatcaaggaaggcatgttaaaaaggtaaaaaatggaaaaaatgacagaggaaatattattttttcaaaaaacagaataattttttgtacaaaact

SEQ ID NO: 565079 - DNA, 568 bp, Homo sapiens
acagagactaatccagggtccttcattccagtaggctgaggtctgtcagccagttttaagcttgaccttgtagagtgactttaaacttcacctaatgcttcttcctcataatcctcctgcctgtactgctaacgctctaaagggaaatttaggccatccttttctaccttcctcaaaagccttattcttagtcttctcctttgagtgatctcaagstttggggacaagtattcagagtataagaaagtttggaactcattttatggcctcactggattttaagaaatatctgtgaccttggatgtgatgcagtgccttcgtggtatcggaatgtacagcactaatgatctcactgattgcagtgaataatgcaatccatgcattacaggaatccatacattacaaaaataatgatctcatgtgttgcaatgaattttttatcccaaacacttcttataggactgagttgctatacctacaatgaaatccctctcactttggacttattacattttaaatgacctcattattttttttttgttactttaagttccgggatacatgtgca

SEQ ID NO: 565080 - DNA, 575 bp, Homo sapiens
gtttttgtatatgctaagcaactgtaaattgttaggagatgattactgagcaaaataataataaagaaatatactctctatttacattaagacaacatgacacttcagtttccataaaagaacagatgaaatggaagtgatatttatactgaggagaaaaacaccgtgtgagttgaaggtgaaagtggtgctgggaatcatctactttggagtagccagggtaactgaattggaagtagaagctgtaagaagagggaaaaaaggtataatttaagtaacctagaaagaagattttgacttgcaataggatattactaatgaaaacaatatatttttaagatcaatcctacgttagaccaagtaaaaataactctgaaaaaagagatttttactaaacttgacacctataggtaataaagatagaccatgagtaatttttaaaaattactctttaagcctgtctgtgtttaatttccttattttatatatatacatatatataagcatatatatataarcatatatatatatataagcagaaagaattttgttctttctgcttataactttttaac

SEQ ID NO: 565081 - DNA, 597 bp, Homo sapiens
tgtaataatgttaacccccaaaattgtatgaactgtcttatttgaatcaaaagatgaagtgcctgaactgatcttacgttccctttcccagtgtcccttccctttctcaaagtctgctcttctaaaagaaactgatgtcagctagggtaccagtgactgataccttggaggcattttatctaagatacacacaaagcaaatgcctctaaggtatcagtttaccaggccaggagacagaattttatattktcctctaggttgtctaggggacaatataagattctgtcccctggcctggcaaattaattgcattcacctccccagttcttcatacttctctctatccaggccctttggggggtgccctcccacactgagtttaggcttcttgttaaaatttgctttggcccatgagacactaataaactaaacacagcaaggcttaaaaggttcttgactgcctcttcttcctctcttgatcctctgccattgccataggaaaatgcctggcttggttgctggcagatgagatttaaggaaaagagctgaatctacctggttattctagccaaggccccacacaccctcagaactgcc

SEQ ID NO: 565082 - DNA, 576 bp, Homo sapiens
actcttatcaggaatccctggcagcccttttgcccaagctccactggctccctgtacagcttataaacatttcccaaatatgcatmcaaatctgaaattatgtaaccatctattttggttcacaaaatatccaatgaatatttctctgctaacaaagggggcactgaatgatgcaaactttaaatgctgcaagtatactatatatcactgatcttcttttcttcatctgttgaattcataggagggacagagaccactgtaggtgttttttgaagtgttggttgcattttctttgaagaactctctcttaagtcctgctgctgtgtataatcattcagagaaacggtaaggagcagaaaggctttagagttttactacacaaaatagtttactattttttttaatttttaaattattattatacttaaagttttagggtacatgtcacaatgtgcaggtttgttacatatgtatacatgtgccatgttggtgtgctgcacccattaactcgtcatttaacattaggtatatctccctaatgctatctctcccctctcccacccaccccacaacagt

SEQ ID NO: 565083 - DNA, 301 bp, Homo sapiens
caacatattactggaagtcctagccagagcaattaggccagagaaagaaataaaggtattcaaattggaaagaaggtagtcaaattatcctggtttgcatctgacatgatcttatatagaaaaccccaacatctctaccaaaaaaaamctattcaaagtaataagtaaattcagtagaactgtaggatacgaaaatcagtagcatttctatacatagcaaactatctgaaggaggaatcacgaaaacagtttgtttatgatagctacaaaaaagatacatacgtgagagtaaatttaatta

SEQ ID NO: 565084 - DNA, 437 bp, Homo sapiens
tggaaagtaatccaatggaatagaatctaatgcaataaaaccgactcagatagagtagaatgtaatggaatggagtgcagtgcaatggaatggaatggaatkgaatgcaatggaatggaatggaatggaatggaatggaatggaatggaatggaatgggatggaatggtatggtatggaatggatagtaatggattggagtgaaatggactggaaaggaatggactcaaattgaaagggctcgaaaggaatggagtcaaatggaatggtctggaatggaatgaacacgaatgtaatgcaatccaatagaatggaatcgaatggcatggaatataaagaaatggaatcgaagagaatggaaacaaatggaatggaattgaatggaatggaattgaatggaatgggaacgaatggagtgaaattgtatgcagtagaaga

SEQ ID NO: 565085 - DNA, 437 bp, Homo sapiens
tggaaagtaatccaatggaatagaatctaatgcaataaaaccgactcagatagagtagaatgtaatggaatggagtgcagtgcaatggaatggaatggaattgaatgcaatggaatggaatggaatggaatggaatggaatggaatggaatggaatgggatggaatggtatggtatggaatggatagtaatggaytggagtgaaatggactggaaaggaatggactcaaattgaaagggctcgaaaggaatggagtcaaatggaatggtctggaatggaatgaacacgaatgtaatgcaatccaatagaatggaatcgaatggcatggaatataaagaaatggaatcgaagagaatggaaacaaatggaatggaattgaatggaatggaattgaatggaatgggaacgaatggagtgaaattgtatgcagtagaaga

SEQ ID NO: 565086 - DNA, 474 bp, Homo sapiens
gaactcgaatgtaattgactggaatggaatgtacatgaatgaaatgtaatygaatggaaagtaatccaatggaatagaatctaatgcaataaaatcgactcagatagagtagaatgtaatggaatggagtgcagtgcaatggaatggaatggaatggaatgcaatggaatggaatggaatggaatggaatggaatggaatggaatgggatggaatggtatggaatggatagtaatggactggagtgaaatggactggaaaggaatggactcaaattgaaagggctcgaaaggaatggagtcaaatggaatggtctggaatggaatgaacaagaatgtaatgcaatccaatagaatggaatcgaatggcatggaatataaagaaatggaatcgaagagaatggaaacaaatggaatggaattgaatggaatggaattgaatggaatgggaacgaatggagtgaaattgtatgcag

SEQ ID NO: 565087 - DNA, 474 bp, Homo sapiens
gaactcgaatgtaattgactggaatggaatgtacatgaatgaaatgtaatcgaatggaaagtaatccaatggaatagaatctaatgcaayaaaatcgactcagatagagtagaatgtaatggaatggagtgcagtgcaatggaatggaatggaatggaatgcaatggaatggaatggaatggaatggaatggaatggaatggaatgggatggaatggtatggaatggatagtaatggactggagtgaaatggactggaaaggaatggactcaaattgaaagggctcgaaaggaatggagtcaaatggaatggtctggaatggaatgaacaagaatgtaatgcaatccaatagaatggaatcgaatggcatggaatataaagaaatggaatcgaagagaatggaaacaaatggaatggaattgaatggaatggaattgaatggaatgggaacgaatggagtgaaattgtatgcag

SEQ ID NO: 565088 - DNA, 474 bp, Homo sapiens
gaactcgaatgtaattgactggaatggaatgtacatgaatgaaatgtaatcgaatggaaagtaatccaatggaatagaatctaatgcaataaaatcgactcagatagagtagaatgtaatggaatggagtgcagtgcaatggaatggaatggaatggaatgcaatggaatggaatggaatggaatggaatggaatggaatggaatgggatggaatggtrtggaatggatagtaatggactggagtgaaatggactggaaaggaatggactcaaattgaaagggctcgaaaggaatggagtcaaatggaatggtctggaatggaatgaacaagaatgtaatgcaatccaatagaatggaatcgaatggcatggaatataaagaaatggaatcgaagagaatggaaacaaatggaatggaattgaatggaatggaattgaatggaatgggaacgaatggagtgaaattgtatgcag

SEQ ID NO: 565089 - DNA, 460 bp, Homo sapiens
ggaagggaatgtagtttaatggacaggcctggaataaagcagaatgctactgtctcgaatggaataaaaatgtatggaatggaatgcaatgaaacagaatcgaatgtcatagagtgtaatggaatgcaaaaaaatggamtccaaaatcattgactggaaaggctgggtgtcaaaaggaattcactccaatggaatggaatcgaacagaatggaagtgaatagaatcgaactaaatcgaatggaatggaattgataggaacggaatggaaaggaatgcaatgatttggcatggaatggaatcgaatggcatcgaatggaatggaatggaatgcaatggaatggaatgtattagaatgtaatgaactttaatggaatgtcctcgaatggattcgactctaatggaatgttctggaagtgaatggactccaatggaatggattcaaaaggaatggaatcgtac

SEQ ID NO: 565090 - DNA, 460 bp, Homo sapiens
ggaagggaatgtagtttaatggacaggcctggaataaagcagaatgctactgtctcgaatggaataaaaatgtatggaatggaatgcaatgaaacagaatcgaatgtcatagagtgtaatggaatgcaaaaaaatggactccaaaatcattgactggaaaggctgggtgtcraaaggaattcactccaatggaatggaatcgaacagaatggaagtgaatagaatcgaactaaatcgaatggaatggaattgataggaacggaatggaaaggaatgcaatgatttggcatggaatggaatcgaatggcatcgaatggaatggaatggaatgcaatggaatggaatgtattagaatgtaatgaactttaatggaatgtcctcgaatggattcgactctaatggaatgttctggaagtgaatggactccaatggaatggattcaaaaggaatggaatcgtac

SEQ ID NO: 565091 - DNA, 460 bp, Homo sapiens
ggaagggaatgtagtttaatggacaggcctggaataaagcagaatgctactgtctcgaatggaataaaaatgtatggaatggaatgcaatgaaacagaatcgaatgtcatagagtgtaatggaatgcaaaaaaatggactccaaaatcattgactggaaaggctgggtgtcaaaaggaattcactccaatggaatggaatcgaayagaatggaagtgaatagaatcgaactaaatcgaatggaatggaattgataggaacggaatggaaaggaatgcaatgatttggcatggaatggaatcgaatggcatcgaatggaatggaatggaatgcaatggaatggaatgtattagaatgtaatgaactttaatggaatgtcctcgaatggattcgactctaatggaatgttctggaagtgaatggactccaatggaatggattcaaaaggaatggaatcgtac

SEQ ID NO: 565092 - DNA, 460 bp, Homo sapiens
ggaagggaatgtagtttaatggacaggcctggaataaagcagaatgctactgtctcgaatggaataaaaatgtatggaatggaatgcaatgaaacagaatcgaatgtcatagagtgtaatggaatgcaaaaaaatggactccaaaatcattgactggaaaggctgggtgtcaaaaggaattcactccaatggaatggaatcgaacrgaatggaagtgaatagaatcgaactaaatcgaatggaatggaattgataggaacggaatggaaaggaatgcaatgatttggcatggaatggaatcgaatggcatcgaatggaatggaatggaatgcaatggaatggaatgtattagaatgtaatgaactttaatggaatgtcctcgaatggattcgactctaatggaatgttctggaagtgaatggactccaatggaatggattcaaaaggaatggaatcgtac

SEQ ID NO: 565093 - DNA, 251 bp, Homo sapiens
gaattccattccattccaatccattcctttcctttcgcttgcattccattctattctcttctactgcatacaatttcactccattcgttcccattccattcaattccattccattcaattccattccatttgtttccattctcttcgattccatttctttatattmcatgccattcgattccattctattggattgcattacattcgtgttcattccattccagaccattccatttgactccattcctttc

SEQ ID NO: 565094 - DNA, 437 bp, Homo sapiens
tggaaagtaatccaatggaatacaatctaatgcaataaaaccgactcagatagagtagaatgtaatggaawggagtgcagtgaaatggaatggaatggaattgaatgcaatggaatggaatggaatggaatggaatggaatggaatggaatgggatgcaatggtatggaatggatagtaatggactggagtgaaatggactggaaaggaatggactcaaattgaaagggctcgaaaggaatggagtcaaatggaatggtctggaatggaatgaacacgaacgtaatgcaatccaatagaatggaatcgaatggcatggaatataaagaaatggaatcgaagagaatggaaacaaatggaatggaattgaatggaatggaattgaatggaatgggaacgaatggagtgaaattgtatgcagtagaagggaatagaatg

SEQ ID NO: 565095 - DNA, 439 bp, Homo sapiens
tcaattccatttgattctctttcattctattttattccatgccatttgattgcattgcattccattccgtttgattccagtccattcaagaaagttccattccagtccattgctttccagtccattccattccactctagtctattccactccattcctttccattccattccatactattccattccattcctttgcattccgtttccaatctattcgagtccattgcattccwgtccaatccattcgattacattccttttgattccctgccagtcgattgcattgcatactacaccattccaaaggagtccattccattctatctcaacactttccattccactctgttcgagtccattccattccagtccatttaattcaagggcattccattccattccattccatttcattttattccattccattcaattcc

SEQ ID NO: 565096 - DNA, 439 bp, Homo sapiens
tcaattccatttgattctctttcattctattttattccatgccatttgattgcattgcattccattccgtttgattccagtccattcaagaaagttccattccagtccattgctttccagtccattccattccactctagtctattccactccattcctttccattccattccatactattccattccattcctttgcattccgtttccaatctattcgagtccattgcattccagtccaatccattcsattacattccttttgattccctgccagtcgattgcattgcatactacaccattccaaaggagtccattccattctatctcaacactttccattccactctgttcgagtccattccattccagtccatttaattcaagggcattccattccattccattccatttcattttattccattccattcaattcc

SEQ ID NO: 565097 - DNA, 439 bp, Homo sapiens
tcaattccatttgattctctttcattctattttattccatgccatttgattgcattgcattccattccgtttgattccagtccattcaagaaagttccattccagtccattgctttccagtccattccattccactctagtctattccactccattcctttccattccattccatactattccattccattcctttgcattccgtttccaatctattcgagtccattgcattccagtccaatccattcgattacattccttttgattccctgccagtcgattgcattgcatactasaccattccaaaggagtccattccattctatctcaacactttccattccactctgttcgagtccattccattccagtccatttaattcaagggcattccattccattccattccatttcattttattccattccattcaattcc

SEQ ID NO: 565098 - DNA, 383 bp, Homo sapiens
gggaggtgagaggcactgcccgcctaaccacccaccacscgtcacttctgccttttgaaatcactttcgtgggcagaggcagggatgctgatcacaccatgtgggagggacttggagggtggggcggtgactcacaggacagtgggggataggaagcagctccagagcctccctggtagtgaaagggaagggcgctagtgactcagggacagctggggaggggcgcatggggagggagctcattccccccagctctgtgccctgcatgcctggggggtgacctcctgtggtgggccccgatcttgcccctgtggggcagtctttgccctcagcttgcttcccagcagtagccaggcagccagtagctgcatggtgagtgaatt

SEQ ID NO: 565099 - DNA, 604 bp, Homo sapiens
tcctctcctacttttctctagccactgctcattctccttcaccaactctttttttcctgggggtggggagggaaagttsacattcccagggttttgtcacaggatagcttctcattctacatctgcatcatggacagctcattgagatcgatgactttgcctaataattataataacatcattctacgtctgcatctccaacctcagatttggagggaagggaagttattcttccctgttgaccagctgtacttctccattcagtgaacacgtcctactcctttcttgtgtgcagtataaaggccagtacacaacctggaaacctatgaatgatccaagatttctctctccccactaatgttttacattcaatgttcactaaatcatattaactgtacctcttttctgcttctgctttatatttctactgccaccaaataaatatgtttatatttcctagatcaacatggcctcttcactgatggttttcacaggaaaagatccctatcaactattattgtttttttataaataaaaaattaagtaaaacaaataaagaaggcatacaggcaagaaaaagaccaacattttaaaatgagtaaat

SEQ ID NO: 565100 - DNA, 604 bp, Homo sapiens
tcctctcctacttttctctagccactgctcattctccttcaccaactctttttttcctgggggtggggagggaaagttgacattcccagggttttgtcacaggatagcttctcattctacatctgcatcatggacagctcattgagatcgatgactttgcctaataattataataacatcattctacgtctgcatctccaacctcagatttggagggaagggaagttattcttccctgttgaccagctgtacttctccaktcagtgaacacgtcctactcctttcttgtgtgcagtataaaggccagtacacaacctggaaacctatgaatgatccaagatttctctctccccactaatgttttacattcaatgttcactaaatcatattaactgtacctcttttctgcttctgctttatatttctactgccaccaaataaatatgtttatatttcctagatcaacatggcctcttcactgatggttttcacaggaaaagatccctatcaactattattgtttttttataaataaaaaattaagtaaaacaaataaagaaggcatacaggcaagaaaaagaccaacattttaaaatgagtaaat

SEQ ID NO: 565101 - DNA, 604 bp, Homo sapiens
tcctctcctacttttctctagccactgctcattctccttcaccaactctttttttcctgggggtggggagggaaagttgacattcccagggttttgtcacaggatagcttctcattctacatctgcatcatggacagctcattgagatcgatgactttgcctaataattataataacatcattctacgtctgcatctccaacctcagatttggagggaagggaagttattcttccctgttgaccagctgtacttctccattcagtgaacaygtcctactcctttcttgtgtgcagtataaaggccagtacacaacctggaaacctatgaatgatccaagatttctctctccccactaatgttttacattcaatgttcactaaatcatattaactgtacctcttttctgcttctgctttatatttctactgccaccaaataaatatgtttatatttcctagatcaacatggcctcttcactgatggttttcacaggaaaagatccctatcaactattattgtttttttataaataaaaaattaagtaaaacaaataaagaaggcatacaggcaagaaaaagaccaacattttaaaatgagtaaat

SEQ ID NO: 565102 - DNA, 604 bp, Homo sapiens
tcctctcctacttttctctagccactgctcattctccttcaccaactctttttttcctgggggtggggagggaaagttgacattcccagggttttgtcacaggatagcttctcattctacatctgcatcatggacagctcattgagatcgatgactttgcctaataattataataacatcattctacgtctgcatctccaacctcagatttggagggaagggaagttattcttccctgttgaccagctgtacttctccattcagtgaacacgtcctactcctttcttgtgtgcagtataaaggccagtacacaacctggaaacctatgaatgatccaagatttctctctccccactaatgttttacattcaatgttcactaaatcatattaactgtacctcttttctgcttctgctttatatttctactgccaccaaataaatatgtttatatttcctagatcaacatggcctcttcactgatggttttcacaggaaaagatccctatcaactattattgtttttttataaataaaaaattaagtaaaacaaataaagaaggcatacrggcaagaaaaagaccaacattttaaaatgagtaaat

SEQ ID NO: 565103 - DNA, 547 bp, Homo sapiens
tactgctaccctttaccctcacaaacttgtggatagaaaacagtatttcattctttttttaacttaaataccttctcctcccaggaacactaaatattttttccyatgtgcataggttgcttgaatatctgaaaaataaatgctttgctctattttaaatgagagttcttgtttatttgaagaattctctgtaaaatgaaaatcacttttttatctcataggtatacacacatattgtcttttgttaattttttcttataaactggattttttttattttgctaaatcgcccttcagaatgtgcgcttgtgatatttgtaggaatataaacatgcatcaatataagtaggcatttgtgtttttttctgttatctttcttattttgtgcatttaaaatttttaatctacattccataacgaacttatttctgtgacatgaaaatctagccagatttctccaaatagttagcaggcacttaatttatgagtaattcatcttttcctactaatgtgaaatgtcaccattatccaattctattagattggt

SEQ ID NO: 565104 - DNA, 547 bp, Homo sapiens
tactgctaccctttaccctcacaaacttgtggatagaaaacagtatttcattctttttttaacttaaataccttctcctcccaggaacactaaatattttttcccatgtgcataggttgcttgaatatctgaaaaawaaatgctttgctctattttaaatgagagttcttgtttatttgaagaattctctgtaaaatgaaaatcacttttttatctcataggtatacacacatattgtcttttgttaattttttcttataaactggattttttttattttgctaaatcgcccttcagaatgtgcgcttgtgatatttgtaggaatataaacatgcatcaatataagtaggcatttgtgtttttttctgttatctttcttattttgtgcatttaaaatttttaatctacattccataacgaacttatttctgtgacatgaaaatctagccagatttctccaaatagttagcaggcacttaatttatgagtaattcatcttttcctactaatgtgaaatgtcaccattatccaattctattagattggt

SEQ ID NO: 565105 - DNA, 547 bp, Homo sapiens
tactgctaccctttaccctcacaaacttgtggatagaaaacagtatttcattctttttttaacttaaataccttctcctcccaggaacactaaatattttttcccatgtgcataggttgcttgaatatctgaaaaataaatgctttgctctattttaaatgagagttcttgtttatttgaagaattctctgtaaaatgaaaatcacttttttatctcataggtatacacacatattgtcttttgttaattttttcttataaactgrattttttttattttgctaaatcgcccttcagaatgtgcgcttgtgatatttgtaggaatataaacatgcatcaatataagtaggcatttgtgtttttttctgttatctttcttattttgtgcatttaaaatttttaatctacattccataacgaacttatttctgtgacatgaaaatctagccagatttctccaaatagttagcaggcacttaatttatgagtaattcatcttttcctactaatgtgaaatgtcaccattatccaattctattagattggt

SEQ ID NO: 565106 - DNA, 547 bp, Homo sapiens
tactgctaccctttaccctcacaaacttgtggatagaaaacagtatttcattctttttttaacttaaataccttctcctcccaggaacactaaatattttttcccatgtgcataggttgcttgaatatctgaaaaataaatgctttgctctattttaaatgagagttcttgtttatttgaagaattctctgtaaaatgaaaatcacttttttatctcataggtatacacacatattgtcttttgttaattttttcttataaactggattttttttattttgctaaatcgcccttcagaatgtgcgcttgtgatatttgtaggaatataaacatgcatcaatataagtaggcatttgtgtttttttctgttatctttcttattttgtgcatttaaaatttttaatctacattccataacgaacttatttctgtgacatraaaatctagccagatttctccaaatagttagcaggcacttaatttatgagtaattcatcttttcctactaatgtgaaatgtcaccattatccaattctattagattggt

SEQ ID NO: 565107 - DNA, 592 bp, Homo sapiens
ctgcttaaatccttccaatagatgtctatctcagaagaaaagtaaaattccagtggccttagatgctctaagtaacccgccctccacctcccgccctgactcagctgctatatctctcctccgtactcactccattcctactctacgtgaatcctgccactcctcgttagtctgaaatcctccttagtctgaaaatggggatccagtgtcaaactaataaatcacagatagctatgcctctctttgtcctggacaaagttatatccaaatgatagtaattgagccttgaaataaaaattatgaacaaattttttatttaaaaactgaaagtaaattataaatgccagtgggaagattaaatcaaacatgatttggctaaaatttactgcatttkccccatattataatagaagtaaaattagatgccttgaaagaatagaatggtcatatctatacataatttgagattgaaatagtttcagatttaagtcaaattgacatgaagaaaaacaaaattttaccaactaagacatatttaaagctactgaagaaaagtaattatgaaatagggaatacacttcagttcatctag

SEQ ID NO: 565108 - DNA, 592 bp, Homo sapiens
ctgcttaaatccttccaatagatgtctatctcagaagaaaagtaaaattccagtggccttagatgctctaagtaacccgccctccacctcccgccctgactcagctgctatatctctcctccgtactcactccattcctactctacgtgaatcctgccactcctcgttagtctgaaatcctccttagtctgaaaatggggatccagtgtcaaactaataaatcacagatagctatgcctctctttgtcctggacaaagttatatccaaatgatagtaattgagccttgaaataaaaattatgaacaaattttttatttaaaaactgaaagtaaattataaatgccagtgggaagattaaatcaaacatgatttggctaaaatttactgcatttgccccatattataatagaagtaaaattagatgccttgaaagaatagaatgrtcatatctatacataatttgagattgaaatagtttcagatttaagtcaaattgacatgaagaaaaacaaaattttaccaactaagacatatttaaagctactgaagaaaagtaattatgaaatagggaatacacttcagttcatctag

SEQ ID NO: 565109 - DNA, 535 bp, Homo sapiens
gcttatgttttcatggggtaaagtagatgtttaaagaaatgatggcagcagagtgttattgtgtaaagttctgacattctttgtttttgaaactttgcattttgatatctgtccattcragattaccctatttttccatttcaaaattttagctatatttttgttacaaaatttaattcttcattccactgatggggttggggtgggggggtggggtgcaggaataatagaatgggcctgccatctagtggcaaaatgagacaaaaagaacaccaaactgtaccagcatccttgtatctataaggaggagaacaaggaatatatttcctggattcaaggtatcaaaaattgtaagatgcaccattggtttagtaagggaacaaaaagaccaaaaatggaaacaaatacaacaaatatatacatcacctggattttagaaatgctaggagaagtgaggggcatcttaaggaaatatgctcatttttcactactttctctctaacagttggcagctgatgatgagtagtgagtgcag

SEQ ID NO: 565110 - DNA, 562 bp, Homo sapiens
tctctctctctctctctaatacacacacacacacacatactcacacattatttgttctgtttctctggagaacactgacttatacaggtactgtactatcatccaccctttgaaggtccctttgtatggtaatagggaagacttgtaggttctggagcaggggaacaacatgatggaagttgagtttaagaaaacatttaatcactgatcatcagagaaatgcaaatcaaaactacaataagatatcwtctcagtccagttaacatggtttacattacaaaaaaacaggcaataacaaatgctggcaagaatgtggagaaaaagaagggaactaccatttgatccagcaatcccactactcagtatctatccacacagaggaaaagaagtcattatatgaacaagacacttgcacacgcatgtttatagcagcacaacttgcaattgcaaaaatatggaacagccgaaatgcccatcaatcaatgagtggatatatatatatatataccacaatttttttatccactcattgattaataaagctactttttatggctgtgta

SEQ ID NO: 565111 - DNA, 488 bp, Homo sapiens
tctggcaggcaggagtggggtcacaaggtgctcagtaggggagcttttgagccaggatgagccaggagaaggaatttcacaagacaatgtcatcagttaaggcaggaacaggccattttcacttcttttgtggtggaatgtcatcagttaaggcaggaaccggccatctggatgtgtaygtgcaggtcacaggggatgtgatggcttagcttgggctcagaggcctgacagttactttggtcatttctagctgattctccaggaacaatttaaaaaaggattagttttgctagtatttattgctgatttttttattctccctaaaacaaacctgctttggcttacacataatcataaaatgtcttttatacttttattataaccaatttactaccccatttagcaaaatctaaatttggcctaaaattttaaaacttctcaaattataaataaagcaaatttgaaactgagttttcaattttttaaat

SEQ ID NO: 565112 - DNA, 488 bp, Homo sapiens
tctggcaggcaggagtggggtcacaaggtgctcagtaggggagcttttgagccaggatgagccaggagaaggaatttcacaagacaatgtcatcagttaaggcaggaacaggccattttcacttcttttgtggtggaatgtcatcagttaaggcaggaaccggccatctggatgtgtacgtgcaggtcacaggggatrtgatggcttagcttgggctcagaggcctgacagttactttggtcatttctagctgattctccaggaacaatttaaaaaaggattagttttgctagtatttattgctgatttttttattctccctaaaacaaacctgctttggcttacacataatcataaaatgtcttttatacttttattataaccaatttactaccccatttagcaaaatctaaatttggcctaaaattttaaaacttctcaaattataaataaagcaaatttgaaactgagttttcaattttttaaat

SEQ ID NO: 565113 - DNA, 609 bp, Homo sapiens
ctctttgtttgtttgtttaatgatttctgccttgatttctactttgtatgaaattattcttaccacgacccttaccttgcttgcttttgcctcttatgactttgaccattctttttattatttattttaaatttttgtgggtacaaagtagattaatatatttatagggtacatgagatatttttaaacaggcatacaatgcataataatcacatcaaggtaaatggggtatccatcacttcaagcatttatcccttctttgtgttacaaacaatccaattatactcttagtttttttaaaagaaacaacaaatttttgttgactgtagttatcctgttgtgctaccaaatactgtatcttgttcattctgtttaactrtattttttagctctttaaccattcccactccccactcctcattacacctcccagcctctgcagaagttcagttgttttaatgttttagctcccataaatgcgaacatgtgaagtttgcctttctgtgcctgtcttattacacttaacataatgtcttcctgttccgtccatgttgttgcaaatgacaggatcttattcttttttgtggctgaatagtactccattgtgta

SEQ ID NO: 565114 - DNA, 573 bp, Homo sapiens
catttacagaacattcaaccccagaactgcaggagtatatatttttctcatctgtacatggagcatcctccacaataggccatatgcttggccgtaatgaataaattcaaaatattcacaactatcctgtcataccaccgtggaataaaattaaaaattgataccaagaggaactctcaaaatgacacaaatatatgaaaaccaaacaacttgctcttgaatggcctttgggtaaacaacaaaacaaaggcagaaataaacaattttttgaaatgaattaaaataaagtsatgacataccaaaacctctgggatatagcaaaagtggtgttaagaggaaagtttatagcattaaatacctgcatcaaaaagatagaaagatctcaaattaacaacctaatttcactcctcaaaaacctataaaagcaagaacaaaccaaacccaaagcgagcagaagaagaaataacaaagatccagagcaaaactaaatgaggttgcaactaaaaaaaaaataatgagaagaagaatcaatggaatgagaagttgaatttctgaaaagataaacaaaatgat

SEQ ID NO: 565115 - DNA, 546 bp, Homo sapiens
tagtaagtctctttccaaacaccctcaagcccaataccctttccattagtaaccatagatcacaggttggtatacatctttccagatgtctattaattcaaattaatacacacacacaacacacaaacacaaatgcatatgtgtatgtacatgagtatgcacacttttgtagttaacatatgatttaatgacttaattttcccaacaatcgctattatcttggagacacttcttgaccaatatatatagctatacctatgtcttgctattgatttcattatattccacactacagtttaactacagttaaactacagttaaaccaaaacttagttaactattctcttattgatgaacattaatattggggccaatttatgctaccacaaacaattatgttatgaacattcctatacatatattgtttttcactgttaccaatatayctgttaaggtaaactacaaacattcgaattgctaggtacgagctttatccaagatggaatatataagggtaggcatatctttacttttgatagatgctgc

SEQ ID NO: 565116 - DNA, 546 bp, Homo sapiens
tagtaagtctctttccaaacaccctcaagcccaataccctttccattagtaaccatagatcacaggttggtatacatctttccagatgtctattaattcaaattaatacacacacacaacacacaaacacaaatgcatatgtgtatgtacatgagtatgcacacttttgtagttaacatatgatttaatgacttaattttcccaacaatcgctattatcttggagacacttcttgaccaatatatatagctatacctatgtcttgctattgatttcattatattccacactacagtttaactacagttaaactacagttaaaccaaaacttagttaactattctcttattgatgaacattaatattggggccaatttatgctaccacaaacaattatgttatgaacattcctatacatatattgtttttcactgttaccaatatatctgttaaggtaaactacaaacattcgaattgctagrtacgagctttatccaagatggaatatataagggtaggcatatctttacttttgatagatgctgc

SEQ ID NO: 565117 - DNA, 572 bp, Homo sapiens
ttaagaactgaactttactaagggtgtgattgtcgccatatgggaaggatattgacattcctttagggcattttctaatgctatcccaacaccaacgtgctatcccaataccaaccattgtttctttgagtaccttcctgggaatactggtgatgaggttttgtgggttttgatgttgttgttgttgttgtygttgttgttcccagagagctctaactattggacccatgtttgaaaatgaaatattagtagatttaaattcaattttccctctgcaaatacaactacagaattttcttgcactttttttttctgcaacaatatgtgatttcacaatggaaggcatccctcacattgtactgagaagctcacagtcgggtaactctccagtgtgacatgtatgtctgcccagtatatcaactccagcctcacttaggtttataggttttcgatatttctgcagctgttgtaacagtttcccatgagtgggggaaaaaaaaaaaaaagctctgaattctcttgttcttcatggaaccaacacttgtacgatgtccagacagcactagggaaac

SEQ ID NO: 565118 - DNA, 191 bp, Homo sapiens
tcccatttttctaattatatgagagtgaaatcatatttaaaaattaayactttttaaaggtgaaatccagaaatatagtctgaaatcaaattatcttgcacttgttcatctaaaagtctaaagaagtagtatttccttctttttttatttcttcatctctctctccctcctgccctccccagtccttgcca

SEQ ID NO: 565119 - DNA, 535 bp, Homo sapiens
taggcaaagaaaaaaagtaaaaggaatccaaattgtaaaggaagaaataaaatcatttttctgcataaatcgtttctcttcataaatgacatgaccttctgtgtagaacactctaaagatctctctcacacacacacaaatacattgttagaactaataacagactttagcaaagttatagtatacaaattcaatacacaaaaattagttgtttctgttcactgatwatgatcaacaccaaatggaaattaggaaagcaatactatttacaatagaacacaaaaggataaagtatgaataaactgaactaatgagacaaaagacttatgcactaaaaactataaaacattgctgaaggaaattaaagaagacacacataaacggaaagacatccaatgttcatgagatgattgaaagacttaatattgttaaaatacatactactcaaagtgatctatacattcaatgtaatccatcaaaatcccaatgacagtttttgcagaaatagaaaaaaactctaaaaattcatataaaa

SEQ ID NO: 565120 - DNA, 567 bp, Homo sapiens
tattcagcatagtactgaaagtcctagccagagcaatcagacaagagaaagaaagaaagggcactcgaatcrgtaaagaggaagtcaaactggtgctgtttgctgatggtatgactgtatacctagaaaacactaaagactcatccaaaaagcttctagaactggtaagtgaattcagcaaagtttcaggatacaaaataaatatacaaaaattagtagttctgctatataccaacagtgaccaggctgagaatcaaatcaagtcaacccctttcacaatggctgcaaataaataaataaataaataaaatacttaggaatatacctaacctaggatgtgaaagacttctacaaggaaaactataaaacactgcggaaagaaatcatagatgacacaaacaaatgaaaacacataccatactcctgaatgggtagaatcaatattgtgaaaatgaccatactgccaaaagcaatctacaaattcaatacaattcccatcaaaatatgaccatcattcttcacaaaactagaaaaaaaaatcctaaaattcacatggaaccacaaaag

SEQ ID NO: 565121 - DNA, 567 bp, Homo sapiens
tattcagcatagtactgaaagtcctagccagagcaatcagacaagagaaagaaagaaagggcactcgaatcggtaaagaggaagtcaaactggtgctgtttgctgatggtatgactgtatacctagaaaacactaaagactcatccaaaaagcttctagaactggtaagtgaattcagcaaagtttcaggatacaaaataaatwtacaaaaattagtagttctgctatataccaacagtgaccaggctgagaatcaaatcaagtcaacccctttcacaatggctgcaaataaataaataaataaataaaatacttaggaatatacctaacctaggatgtgaaagacttctacaaggaaaactataaaacactgcggaaagaaatcatagatgacacaaacaaatgaaaacacataccatactcctgaatgggtagaatcaatattgtgaaaatgaccatactgccaaaagcaatctacaaattcaatacaattcccatcaaaatatgaccatcattcttcacaaaactagaaaaaaaaatcctaaaattcacatggaaccacaaaag

SEQ ID NO: 565122 - DNA, 567 bp, Homo sapiens
tattcagcatagtactgaaagtcctagccagagcaatcagacaagagaaagaaagaaagggcactcgaatcggtaaagaggaagtcaaactggtgctgtttgctgatggtatgactgtatacctagaaaacactaaagactcatccaaaaagcttctagaactggtaagtgaattcagcaaagtttcaggatacaaaataaatatacaaaaattagtagttctgctatataccaacagtgaccaggctgagaatcaaatcaagtcaacccctttcacaatggctgcaaataaataaataaataaataaaatacttaggaatatacctaacctaggatgtgaaagacttctacaaggaaaactataaaacactgcggaaagaaatcatagatgacacaaacaaatgaaaacacataccatactcctgaatgggtagaatcaatattgtgaaaatgaccatactgccaaaagcaatctacaaattcaatrcaattcccatcaaaatatgaccatcattcttcacaaaactagaaaaaaaaatcctaaaattcacatggaaccacaaaag

SEQ ID NO: 565123 - DNA, 589 bp, Homo sapiens
gcctgggtgacagagtaagactctgtctcaaaaaaataataaaataaaataacgtaggacaggtgtgagaaattataaaagtattgattctgggaactaataaatggccatgaaatcttaacaatttatgttcttctgccatggcttcakctggtccctccgttcggggtccctgacttcccgcaacatgcaatataaaaagatgaaaaaagaacaaaaagtcagaaggtggtacggatggaattaaagtgaagggtttttagtattttcattacttgttattttgcttttcattgtgatcaaagttatcctcggtttaaaataattgcttataacgtgttatttgcaagcctcatggtattcacaaagcaaaaattataataaattcacagaaaacaaaaagcaagaaattaaaacatactaccagagaaaatcacttatacataaaggaggacaagaaggaaggaagagagtgctaacaaagctacactaaaacaaataacaaaatagtggtagtaagtccttacatatcaatattaacattgaatgtaaatggactaaattatccaacaaaaagacatagagtggc

SEQ ID NO: 565124 - DNA, 480 bp, Homo sapiens
ccttgaacccacatttaaactattattaccttttcaacttatcataagatgaagggctgcaaatcaaacctcttttcatctcagcactggtaacaatgcatttagggagtcctttccctaaagcagtatcatcttgcataaatatacccaagtagaagcaaatattttagaacttttatagatttttcttaggagattttccttaggaaaagagatcatacaagcctgggcaacatggtgaaaccctgtctctacaaaaaaaaaaaaaaaaaaaaaaaaaaaacccccccccaaaaatagggggagcatggtaccgcacgcctacagtcccaactaattgaaaggctgaggtgggaggacagcttaagcccaagaggttgagctgcactgagccgtgatcatgccaccacattccagcctaggcaacagaacaagaccctgtctcgagaaawttaaaaaaaaaaaaaaaagttaagaaaa

SEQ ID NO: 565125 - DNA, 606 bp, Homo sapiens
accttccgtgaattacaagttcaagcaagagatgctttaatttcagctctttacctggatgccaagaaattgccagaattttctcaagtctaatttgatattattaatcccattttacagatgaagaaactaaggcacaaataggcacaacacaaggctcaaatttatgtaaatattaaagctagtatttgaacttatagaactcactggtggaaactatgttcttaaccactgtgcaaaactgcttctcactaaaaccctaccttgccaagggcmctgaggccttccacaatctgacccctcacatttctctggtctcattttcttctaagctcactcttttccagttgaactggactccttgcagttacttgaatatttccaatacacccccactccaggcctctgaaactactgtcctctccttatcaccagatatcctcacgacatcttcctcacctcttctgatgtctaatcaaatgtcacccccacaaagtgggcttccctgacctctccatccataaacgaatccttttttcccctgcttcctcacccgctactcttttaacctgcattatttaccttcatagcacttattaaatatta

SEQ ID NO: 565126 - DNA, 560 bp, Homo sapiens
ccagctacaagggaggctgaggcaagagaattgcttgaatctggaaggtggaggttgcagtgagatcacgccactgcactctagcctgggcgatagagcaagactctatctcaatataaataagtaaataaataaaataaattttttgaaaaaccagacaattactttgtcttttatttacaatctgggctatacatttgagtgccctcttagcaataagctgkgaacaaaataaatttcatgtgttaggttagatttaggagtgtctttgttctgaaccatagacagcattgatcattatcattttgcaaggagtctctgggataatccttttcttgggaaaggtaggacttctagagaaaatcccacttgggagaaacacttcctatttacttattgtcactagacgatccttagtgtcaagggagccggagatataaaactgaaagatatgacttgattgtaacacagcagtggaatcccaggtatcagtgttgtgtttgaaatgttgagagtatctattcattttcttttgctgcataaaaaatgaccacaagctt

SEQ ID NO: 565127 - DNA, 583 bp, Homo sapiens
atagagagcgcccctgagggctgctggttgcccatttttatggttgtttctggatgatctgctaaacaggggtggattgttcatgtctcccctttttagaccatatatggtaacttcctgatactgccatggcatctgtaacctgtcatggtgctggtgggagtgtagcagtggggacgaccagaggtcactctcatcaccatcttggtttgggtgggttttagccagcttctatattgcaagctgatttttttgtttgttttgttttttgagacggagtctcgctccaggctggagtgcagtgacatgatctcagctcactgcaacctccacctcctgggttcaagcgattctcctgcctcagcctcccaagtagctgggattacaggcacacaccaccatgcctggctagtttttgtatttttagtagagatgaggtttcaccttgttggccaggctggtctcgaacttctgacctcaggtgatccgcccacctcagcctcccaaagtgctgggattacaggcgtgasgtaccgcgcctggcctactgcaaactattttatcagcaaggtctttatgacct

SEQ ID NO: 565128 - DNA, 583 bp, Homo sapiens
atagagagcgcccctgagggctgctggttgcccatttttatggttgtttctggatgatctgctaaacaggggtggattgttcatgtctcccctttttagaccatatatggtaacttcctgatactgccatggcatctgtaacctgtcatggtgctggtgggagtgtagcagtggggacgaccagaggtcactctcatcaccatcttggtttgggtgggttttagccagcttctatattgcaagctgatttttttgtttgttttgttttttgagacggagtctcgctccaggctggagtgcagtgacatgatctcagctcactgcaacctccacctcctgggttcaagcgattctcctgcctcagcctcccaagtagctgggattacaggcacacaccaccatgcctggctagtttttgtatttttagtagagatgaggtttcaccttgttggccaggctggtctcgaacttctgacctcaggtgatccgcccacctcagcctcccaaagtgctgggattacaggcgtgacstaccgcgcctggcctactgcaaactattttatcagcaaggtctttatgacct

SEQ ID NO: 565129 - DNA, 583 bp, Homo sapiens
tattacttttaatgagataattaagtatatttagagatatttataaaataaatttatctaaggggaaaaatcttggatagaccctattattccatccttgctatgaccccatgaatagagaggaagtcaaaacctttccctagtaaattaggagtctattaatatcccactaggttaaatttctacttccggtctcatgagcttatgtaaagactrctaacattcatgtcttctgattatagattcagtatctgctttatcttaccatttgttaatatatactttcaaatggataatttaaatgagatgcttctgattggtaattatgtttactcaatgtgttataacttacaatatatttcttgtgtattatttgattcgagtttcataacacccctatgagttaaaacattcgaatgttttgagtccctttacttaaagaacttaagatgcagaagagacatcagtagatgatccagcaatgatctataatgaggcagaacaaagacttgaatggttcctcgaactcctgctccagtgctctacccacttgcctatatttgttatgctacttggatcaaat

SEQ ID NO: 565130 - DNA, 583 bp, Homo sapiens
tattacttttaatgagataattaagtatatttagagatatttataaaataaatttatctaaggggaaaaatcttggatagaccctattattccatccttgctatgaccccatgaatagagaggaagtcaaaacctttccctagtaaattaggagtctattaatatcccactaggttaaatttctacttccggtctcatgagcttatgtaaagactgctaacattcatgtcttctgattatagattcagtatctgctttatcttaccatttgttaatatatactttcaaatggataatttaaatgagatgcttctgattggtaattatgtttactcaatgtgttataacttacaatatatttcttgtgtattatttgattcgagtttcataacacccctatgagttaaaacattcgaatgttttgagtccctttacttaaagaacttaagatgcagaagagacatcagtagatgatccagcaatgatctataatgaggcagaacaaagacttgaatggttcctcgaactcctgctccagtgctctacccacttgcctatatytgttatgctacttggatcaaat

SEQ ID NO: 565131 - DNA, 530 bp, Homo sapiens
aaatgcttaaccatttaccctaacatcagttattgaataatccatcactttcaaattaattttagtgtctcatttatcatatataaatttttatgtatacttggcctagcaatctggcattttcaaaagcaatgaattgacttattttaggaaaaagagtgtagaaacgctctaattcctcaatttaaaaaagtatggcaatgtgaaaaagcatgtaagaggtggggttataggtacatgttttccttttacaaatttcttttgagcttgtttttatatacaaaacatattacttgtgaataacgttcaagtctaagttgttaacttactgggtggattatagtgccattcatggatgctgagactataggaaaargagattagatggaggtgagatgtcatgtaaagtgttaacagactgagcacccaagtagaggcactacatggatgagtatagaacgcaggagacataccctggattaaaatcaaggctgtaaatgtgaacttggatgtctactggggctggagga

SEQ ID NO: 565132 - DNA, 569 bp, Homo sapiens
aattaatgctaaatttaataaacaatattaataacatcttctagaagttacaatatacaaagaatttatatacacgagaagtcaatggtgttcaagtgttccagggtccttaggtcaaaggtaaaattagtaatttatataatgatttgaagaaatttaggagtatacatgtggcaatctctagaataaacagaaaaggaataggaaaagctaatagggttagagtataattgaaaaattaaaaaaatagcgaataattccaaaagaaaatggggaagaaaagaaaaagtacatagaaaatgcaggacataaaaagcagatgatcaacttaaaycaaaatatagtagggattacattagtgtaaatgggataagccatattgtaaaggaaattctagctagttaaatgtgccaagaaaataaataaaccccatttgacccagccatcccattactgggtatatacccaaaggactataaatcatgctgctataaagacacatgcacacgtatgtttattgtggcattattcacaatagcaaagacttggaaccaacccaaatgtccaac

SEQ ID NO: 565133 - DNA, 549 bp, Homo sapiens
cttatctctccaacaccaatgaaccctgtctgtcctctcttattctacacatgcttcctattgtaatgtccagacttcttcccctattcctttcttctaagccagttccaattgttctttccctatgtctgaattcctgttgaaattcttttattctgagccccaatttgttttatttgtttgtttttaggacttgggagtagtatcttgacacttggattccacccaagctcaaatctcagacccttatacagtccttgtcacatattgtcacacctgaaactaatgactctcttgttgggaccagtgatgacaacagagatgattagtaatatcttcatgtataattataattatacatgaagttaattataattctcttcattttatggacaaagaaactgagtctcagaagggttaaatacactgtccaagattcactgtgaggaggtcgtgcagctagattcaaacccatgtctgttaatctctaagtcttcttttcttttcttttytttttttttctttcgagatggagtttcactcttgttg

SEQ ID NO: 565134 - DNA, 548 bp, Homo sapiens
tttcccagccccttttcttttcgtttctggttaggaaagagtaasaaatgggtcctacgccttggacccagaggtggaagccacacattgagggatgtaccttgccaactattgttaacatctaaacttttatgtttaagagaaataagtgtctgaaattttcattttataatcaccatgtattttggtttgtttgtctatagcctaactactatagtattcaagctgactggaatgtccaactccctaagcaaaactaaccaaaaagacttgtagcacatggtgattcctaggcaaataaagcttttgatgggggagaggatgcttacgggaggaatacagaatttcctgataataacagcatatgtttggccattcacggcaaggcaagttattacttcggatagagtagattatgctgtattaacaaacaacaacaaaattctgtggcttgacatgtaaatacttatttcttactcatgcaaaacccaccacggatccagctgactcttgaaggcaaccatcctccacatgtggtaacccagtga

SEQ ID NO: 565135 - DNA, 601 bp, Homo sapiens
tagggtttctttctttctttctttcttttttttttttgagatggagtttcactcttgttgcccagactggagggcaatggcacaaccttggctcactgcaaactccgcctcccaggttcaagctattctcctgcctcagcctcccaagtagctgggattatgggcacctgccaccatgcctggctaattttttgtacttttagtagagactgggtttcaccatgttggccaggctggtctcaaactcctgacctcaggtgatccatccacctaggcctcctaaaatgctgagattacaggtgtgagccaccatgcccrgcctaggggatcattttgagctcattttgtgatctactgagtttgagtaggatctccagacatagcattctaggaagcaaagaggaatactgggcatcaatttgagagagaggaagatcacagttatagctacagacatcatctacatagagagaacacttaaacataaaacagaatgaaagctgcaaaggaaaaattatcaggctgtcccctctgcctggaatgccctttcttctcatacctgctgctgcaggtatgcattgttggatgacaaccctaaaac

SEQ ID NO: 565136 - DNA, 601 bp, Homo sapiens
tagggtttctttctttctttctttcttttttttttttgagatggagtttcactcttgttgcccagactggagggcaatggcacaaccttggctcactgcaaactccgcctcccaggttcaagctattctcctgcctcagcctcccaagtagctgggattatgggcacctgccaccatgcctggctaattttttgtacttttagtagagactgggtttcaccatgttggccaggctggtctcaaactcctgacctcaggtgatccatccacctaggcctcctaaaatgctgagattacaggtgtgagccaccatgcccagcctaggggatcattttgagctcattttgtgatctactgagtttgagtaggatctccagacatagcrttctaggaagcaaagaggaatactgggcatcaatttgagagagaggaagatcacagttatagctacagacatcatctacatagagagaacacttaaacataaaacagaatgaaagctgcaaaggaaaaattatcaggctgtcccctctgcctggaatgccctttcttctcatacctgctgctgcaggtatgcattgttggatgacaaccctaaaac

SEQ ID NO: 565137 - DNA, 717 bp, Homo sapiens
ccatggtggcaggtgcctgtaatcccaactactggggaggctgagccaggagaatcgcttgaacctgggaggcagaggttgcagtgagcctgagccaagatcatgccattgcactccagcctgggcaacaagagtgaaactccgtctcaaaaaacaaaaacaaagcacaaacaaaaaaaacatttttttgtggatgcagaggtctcactatgttgcccaggctggtcttgaactgctggactcaagtgatcttcttgccttgcctcccaaagtgctgagaktacaggagtgagccaccacactaggctcatttgttgtttaaatgagttgagttctatctcttgtaattgaataatctctcattgatggactgaaaaaaacacttgcaactaaatagtccttagtatctcagtatgtaagtattaaaatataccttagcataaaaaagtatttcttagtatataattttcatggtatacaaagaatttttaaaattaagaaaaataataataacctaatagaaagcaaagaacaaaaacacttaaaaaatggctaataaatatgtgaaaactgttctatcttgtttgtgattaaagaattgtacattaaaatggaaataggctaccattgttaataattggaatgatgaagatcaaaaagtgagaaaccatacaggttggtgaacaaagggcaaacacgtactcagtactggcagga

SEQ ID NO: 565138 - DNA, 573 bp, Homo sapiens
ctgggaaaagttaacgttaatgcattaaatgggttgtttttttttttttaacttagggacttcaaagtccctaagatgtgtttctaccataaattaataaatatcagggagctcattaagtctgaatgctattagaatacatattccattccaggcaaaatttcacctgtgcttcacagtgaaatactagttagccagacttagtttaataaaacatttgtttttaaagagactggtcagcattgctaatttaaatktttcttttcttaataggtgaatatgtttacaaaccaaggaacagtgatccactttaacaaccctaaagttcaggcatctctggcagcgaacactttcaccattacaggccatgctgagacaaagcagctgacagaaatgctacccagcatcttaaaccagcttggtgcggatagtctgactagtttaaggagactggccgaagctctgcccaaacaatgtgagtttcctagtaatggttttaccagggaattactcatttagcagctgatttctgatctcagggctcagaatggatatgagtatttttaagtttgg

SEQ ID NO: 565139 - DNA, 493 bp, Homo sapiens
aatattcagacgtcttctgggaaccctgtttgccttatcatttggaagaaggctggcctgagtactgcatccgatgtgtgcttgaaacttctgtaagttgaaaatgtgtttggaggtatacaaagtgattgctgtacaaatgaataaagcatttcttatcacatgacaaggtttgacaagaatctcaggcagatatatggctactaaaacagttcatggcatagcaaagtcytaatttaaaaaaccttaacctacatttgtggcagtacacattggctgtaatatgtacagaacatcttgcagcatttaactgagcataaataattcttccatagaatggaaatcatgtcgtgaactccaatgttaaacttccttgggtggggtgtggctctcagaagccctgggattttcatactaaataatgagaaggtcaagctggcagtggtcagactgagatactgtcaaagaaaagcagaggaagtgtatgaatgga

SEQ ID NO: 565140 - DNA, 558 bp, Homo sapiens
tagaaaaataagaggaaaaaatatagtaacccatctgtgtaagaaatttataatcttaagatcaattctgtaatcaagtgtacaagtttaatgacaaaataattaagtgtcctattgcatattcagtcaacaaaatccctttgaccgtagagtcctcaaaatctcaaattttcaactctccctcaataatgcaatatatttaaaagccactttkctctattaggattctaaagaagctactgaaaaacaccaaaagctactgataaacttgtttctgtagttttaggcacaaacgtctaaaggattaaaataaagcattattgagaatcctaattatctatgtacctgctttggtaagaaatacttcaatatgacatatttactttatattctcattcaaaatgacactattatattaataggtacttaaccaataattgaaaccattattcacagttgaataggcgtagtacataattaggattcttttaaagggatttccatggctaaaactaatttggctttagtgtctattaatattataactttaaaaaaaaa

SEQ ID NO: 565141 - DNA, 329 bp, Homo sapiens
caaaagactgacatatacatataatacaaatgtgtgtttatatgaggttattcagagttacatttaaagactgaacactgttgagatttgtggtattaattagtaaggaagagaatatggtggatgcatgggtcaaaactgactcaggaaatttcagcytaggtggctaggtagaaagtggggtccttaaactgaattaggatgtgtaagagaaggcataagttgaggatcagggatatatagttccttttgggcatgttgacttttcaaggccagataaagattttcaatatgtacctccaaatacaggtttgccacccaagaagggt

SEQ ID NO: 565142 - DNA, 571 bp, Homo sapiens
aggaactggcaaagctgtgatactctgctttactaatgatgaagtaatgaagaaattctaaatactatccaaggacacactggagatcatgtatgattgaaatttttcttcttagcagctgtcaattgtgtcatgtccagaatgctgtgcctgctgttytaaaaagtgatacattatgtcttgagctagtctttcattttaaaggttgttagtaaaataacagaaaaccacatgcagaaaggtaggccacatgcacacataccacacacatgccccgcatactcccacagtaacagagctagaatacttcagttgggacaatttttacgttactgggtatagaaacagtggccatctattaatagatgcatccctatgtactctggagatgtgttggtgcctagcacttggcagcttccaaccaccattatctgagaatttaaaaaatgtattaaagcatattttttgtatttcaaaagattctagactcaccactgcccctagacactcctgtgcttaggaggcagggatctcagacagcaggaagccttcaggaactctacttggaaga

SEQ ID NO: 565143 - DNA, 571 bp, Homo sapiens
aggaactggcaaagctgtgatactctgctttactaatgatgaagtaatgaagaaattctaaatactatccaaggacacactggagatcatgtatgattgaaatttttcttcttagcagctgtcaattgtgtcatgtccagaatgctgtgcctgctgttctaaaaagtgatacattatgtcttgagctagtctttcattttaaaggttgttagtaaaataacagaaaaccacatgcagaaagrtaggccacatgcacacataccacacacatgccccgcatactcccacagtaacagagctagaatacttcagttgggacaatttttacgttactgggtatagaaacagtggccatctattaatagatgcatccctatgtactctggagatgtgttggtgcctagcacttggcagcttccaaccaccattatctgagaatttaaaaaatgtattaaagcatattttttgtatttcaaaagattctagactcaccactgcccctagacactcctgtgcttaggaggcagggatctcagacagcaggaagccttcaggaactctacttggaaga

SEQ ID NO: 565144 - DNA, 571 bp, Homo sapiens
aggaactggcaaagctgtgatactctgctttactaatgatgaagtaatgaagaaattctaaatactatccaaggacacactggagatcatgtatgattgaaatttttcttcttagcagctgtcaattgtgtcatgtccagaatgctgtgcctgctgttctaaaaagtgatacattatgtcttgagctagtctttcattttaaaggttgttagtaaaataacagaaaaccacatgcagaaaggtaggccacatgcacacataccacacacatgccccrcatactcccacagtaacagagctagaatacttcagttgggacaatttttacgttactgggtatagaaacagtggccatctattaatagatgcatccctatgtactctggagatgtgttggtgcctagcacttggcagcttccaaccaccattatctgagaatttaaaaaatgtattaaagcatattttttgtatttcaaaagattctagactcaccactgcccctagacactcctgtgcttaggaggcagggatctcagacagcaggaagccttcaggaactctacttggaaga

SEQ ID NO: 565145 - DNA, 567 bp, Homo sapiens
agttgatatttcacacgataatgtgaacagcaataaaaaagactaagtaaactttctcaactctratcaaataattaaagaaaaataaaaaacaagcactcttagatctttttctaccaagagttttgctccttgatcacaataaaactgtgatttaaataaatcaattatgagccacaagcattcagagttaattgtacctactaatggaatatttaacagtaacatatcatttgagaagagtctgggggttttctcagtcttaatacctacagaagacttttattttactttttattcattgcatagggatgatataggtgcaactttgttactgcaaacttctggacaatcccagtgctttaattatcgtgttgcaatcactagacacaaatctcttgacacaatttttctttatttataatgggaaagaaaaaaaaacatagttgtcgaaaatggccacaaaacttttgttgtttatttaaaaaatatttgtagttttggtaatttggaaaaaaacatcaaattataataatgataaaagaaatggcaggtcttgtttttaat

SEQ ID NO: 565146 - DNA, 559 bp, Homo sapiens
tcactgctcttgagattctttcctttgtcttgactttagataacctgatgactatatgcctatgtgatgatcttttcatgattaatttcccaggtgctctttcagcttcttgtatctggatgtctagatcactagcaaggccaggaaagtttctttgattattccctgagacatgttttccagagttttacatttctattttttctcggaaacaatttttcttaggtttggttgttcaatacaaggccaaacttcttagaggctttgttcattttgttttgattcttttttctttgtctttgttggactgggttaatttgaaagccttatctttgagctctgaggttccctctctacttgtttgattttrttgctgagattttccagtgtattttgcctttctataagtgtgttcttcatttccagaagttgtaattgttttttatttatggtacctatttctctgaagatttttctgtccatattatgtgacatttaaaaaatttctttaagttggtattcacctttctctggtgcttccttagtaacttagtaaaca

SEQ ID NO: 565147 - DNA, 601 bp, Homo sapiens
taacaaaatttgaaatctaaaatcctgtttcaaaatttagggctattaatgtattaactctacttatttcatccaactttaatatcagcttcttataatttttctcacatttagtgtacatttaagaaatttgttctgaagaacagatggaagtaatcacagctaaaactcccaccccttcttctcttctgctggcccaattttttccaagggcacatctgggcctgggatgggtcctttttataggtgtctcaagagcatgtgattaaaacatttcatgtgtttaattaaaggcttttgtgtgcactatgtgcagtgaggacctcatgtctttccaagatcacatatctgaactgtgacactgtgaaccattaatatctcaatctgaaatcaagttcactaaatctgaatgaatgggtggttagagaaaaggaggaagaggaggaaawgaattgctataaattaagaatgtattatagaacatgagcattggcaaatctattcatgtctatatacaagcctctccccctagatcagtcttcttttggaattgaatgagcctgagaaaacatctagtccaaactcctcacctgacagatga

SEQ ID NO: 565148 - DNA, 527 bp, Homo sapiens
ccgtcaaactggctagggtgttgttaaagatacagatgaagtagagaaaattggggtaaacagttttctccacaattttgctccagctatgtttgtaaacaattttttaataatttaataatttttttctatagtaataacacttaacatgagatctaccctcttagtgaatttttaggtgtaccatacagtattgttaactacatgcacaattttgtacaaaacatctctaaaataaagaaattaatcttgtgtaactaaaactttatacccactgaacatcagttccttctgatatggtttggatatctgcccttctccagatctcatattgaaatgtgacttccagtgttggaagtaagcttaatgggaggtatttaggcctagtgggagggcgggttccctcataaatggtttaatgtcctccgtgtggtaatgaatgagttcttgctctgttggttcacaagagagctrgtttttcaaaaagcctggaacctcttccctcacagcctcatactccctcatac

SEQ ID NO: 565149 - DNA, 534 bp, Homo sapiens
catctgcgactatttaaaattattaagaatgctatctacaggctatatattgttagatgtagtgtgtgtgtgtttctgtgtctgtgtgtttatttgcaagaaataaacacatgctaaaagtagttatttcttgtaaatccttttgaagtataacatacacaccaaaagatgccaaaatcacacgtacacagcttaatraagtttcataaagtatgcacacacattgtaactgttgtccagatcaagaaataggacattactagcactcccagaaaatcccttgtaaccctttccatcgtatctcctctaaggataaccatgatccttacttctaacatatcaattaaatacatctacttctatatgtaaataagtagaaataaatagaagcatattgatgtaatttgcatggctgctgccttattgatttgttgtttttgttggttttgctgttgttgctgttgtttttctcaacattatctctgtgatgtgttggtggtagtttaatttgtattgtttcttgtgttgtatttt

SEQ ID NO: 565150 - DNA, 534 bp, Homo sapiens
catctgcgactatttaaaattattaagaatgctatctacaggctatatattgttagatgtagtgtgtgtgtgtttctgtgtctgtgtgtttatttgcaagaaataaacacatgctaaaagtagttatttcttgtaaatccttttgaagtataacatacacaccaaaagatgccaaaatcacacgtacacagcttaataaagtttcataaagtatgcacacacattgtaactgttgtccagatcaagaaataggacattactagcactcccagaaaatcccttgtaaccctttccatcgtatctcctctaaggataaccatgatccttacttctaacatatcaattaaatacatctacttctayatgtaaataagtagaaataaatagaagcatattgatgtaatttgcatggctgctgccttattgatttgttgtttttgttggttttgctgttgttgctgttgtttttctcaacattatctctgtgatgtgttggtggtagtttaatttgtattgtttcttgtgttgtatttt

SEQ ID NO: 565151 - DNA, 552 bp, Homo sapiens
tttagtatgtatgaagtcccatgcagggtacagatggcatcttaaccccatccatatgtttaaagcatctcgttcatttggaagtcttacaggcaccaaaacaatcatggagagaagtggtctttaaattttaattttatcaaaataaaccagatctcttgtgtataaaccattgccaaaaacggattttcttcaaacagacagcaagccaaacccatttgtaaaggccaaggaaaagactgattacgtatgcmtttgattatatgagagttagattgaattatctttgttttggctatgttatttttgttattcatacactttctagattatttttaaatacctctcaagtggcttgaggctcttttctaagtatttttgtgttttactctccatttatttaattatctgttatcttgtgatatactataaattcatgaacatatctgggattaatatacattaaatataagcatatttatgtatacatgtaccaatgttttatccaaatcctaactagtaatattttcatcttaatatacaataggaatt

SEQ ID NO: 565152 - DNA, 552 bp, Homo sapiens
tttagtatgtatgaagtcccatgcagggtacagatggcatcttaaccccatccatatgtttaaagcatctcgttcatttggaagtcttacaggcaccaaaacaatcatggagagaagtggtctttaaattttaattttatcaaaataaaccagatctcttgtgtataaaccattgccaaaaacggattttcttcaaacagacagcaagccaaacccatttgtaaaggccaaggaaaagactgattacgtatgcatttgattatatgagagttagattgaattatctttgttttggctatgttatttttgttatkcatacactttctagattatttttaaatacctctcaagtggcttgaggctcttttctaagtatttttgtgttttactctccatttatttaattatctgttatcttgtgatatactataaattcatgaacatatctgggattaatatacattaaatataagcatatttatgtatacatgtaccaatgttttatccaaatcctaactagtaatattttcatcttaatatacaataggaatt

SEQ ID NO: 565153 - DNA, 340 bp, Homo sapiens
gcttcttaggtgtccatttgataagacagtagtctgtattttggggtgacatgaataatagtcttattaagctcctaaattaagatatagtaacaaacataagctacagcttattgccttgactaagtttggtgaaaaattatatagtaaatatatttttacctgaatttaatgctccactttaaaaaagaaacacatatacaactttttaaaaatctattttattgcttaagccatgatttaaaagaaacacacacacacacacacacacacamacacacatatatatatatcactttttaaaaatatctttttattgcttaagccatgattcttcaat

SEQ ID NO: 565154 - DNA, 340 bp, Homo sapiens
gcttcttaggtgtccatttgataagacagtagtctgtattttggggtgacatgaataatagtcttattaagctcctaaattaagatatagtaacaaacataagctacagcttattgccttgactaagtttggtgaaaaattatatagtaaatatatttttacctgaatttaatgctccactttaaaaaagaaacacatatacaactttttaaaaatctattttattgcttaagccatgatttaaaagaaacacacacacacacacacacacacacacayacatatatatatatcactttttaaaaatatctttttattgcttaagccatgattcttcaat

SEQ ID NO: 565155 - DNA, 559 bp, Homo sapiens
actccagcctgggcaacaagagagaaactccatctcaaaaaaaaaaaaaaaaaaaaaaaaaggacctagttctaatgagaagacatacatgaagtatttagcataattctgacacatggtagaatctgaaacattgctacttccctttctattaatttccttggaaaatacacttctttctacattatatagcccaatrtaaaatatacatgcaatcatctctttctctattcacctttttctttggagatggggggagctaaaggggaaagcaatgtagaagacagcaacaacatgtgttgctatacttcattcttgttacactgcataatccttgccttattgcacttacctgacccattttagagatttgtccacttgtaaatatgccacagtctccgttttattcttctttgggaagtaatctggtatgcataaatacctaatttatgagttaatagcatctgttccaggaaagttattgtacaagaagggaaatcatggccttacatttttaaataagttttcttgaaatgtgatcacagcaccatactgtaac

SEQ ID NO: 565156 - DNA, 559 bp, Homo sapiens
actccagcctgggcaacaagagagaaactccatctcaaaaaaaaaaaaaaaaaaaaaaaaaggacctagttctaatgagaagacatacatgaagtatttagcataattctgacacatggtagaatctgaaacattgctacttccctttctattaatttccttggaaaatacacttctttctacattatatagcccaatgtaaaatatacatgcaatcatctctttctctattcacctttttctttggagatggggggagctaaaggggaaagcaatgtagaagacagcaacaacatgtgttgctatacttyattcttgttacactgcataatccttgccttattgcacttacctgacccattttagagatttgtccacttgtaaatatgccacagtctccgttttattcttctttgggaagtaatctggtatgcataaatacctaatttatgagttaatagcatctgttccaggaaagttattgtacaagaagggaaatcatggccttacatttttaaataagttttcttgaaatgtgatcacagcaccatactgtaac

SEQ ID NO: 565157 - DNA, 322 bp, Homo sapiens
tacacgtaacataaaatttgctatttaaactattttaagtgtacaattttstggcattaagtaacattgaacattgttatacaatgcatcatctcataaaacagctggactttattgataactgcagagtcagatatcttagcaatgaaatatgcctcaaggatataagtcttagagtaagagtctagcacgggtatttatatggctcatcatatcaaaacggtgaacaacatagctaacatccttaatacttcacaattcttttacttgatactcctaggatctattgcctgattttaaaggctaataaaatctctctttt

SEQ ID NO: 565158 - DNA, 546 bp, Homo sapiens
ttatttatttatacatcacttttcacattttattttaaaacaggtgctcaactaacccaagataaattgaaaatttcgtgatatgctgagatatgttattaataaattattggcaatgttctagaaggttgccaaaataataattttaccattaatggaggcatattgctaacattagcaccagcatcatcagagataaaaatgtatgctttcacagaaaaaaaaaaacatttgcagtatrcatgactaatgattaaacactttaatatttaactaaaggaaatgattttcactttattcaaaacacaaaattcatgttgaaaagcattgtgcatgagacttttcttaatccctgatattatcttttttggttactcataaatttgtttcttcttttctttgtattctattagtttcatatggcaacaaatgaattttcagatatacatgatcagtagtgtctgacaattccaaagcaagttatggtttcagtcaattaatctgtcctccactgatgttacatcctgacatccagagaacggagta

SEQ ID NO: 565159 - DNA, 540 bp, Homo sapiens
gaatctatctagacaagcacataaaggcagttatcttgcattattgcacagcatgactgtagtgctaagaagacttagatgaatttaagattgtatctaamcttcaaagtaccatatagatttgagagttgtataagcttcttacgtgtacttacttattgtatacagcatttttttaatcttgacaatcttgtgcactttcattaagtgtcatatttttcttttctcccctctccataaaacattacaatatcacatatactactgaaatccttagcaatagaaggccttagttaatctacaaagaaaactttcagaacttctggtttattcctatttatatatcaagaatatattcaaggccggctgccatggctcacacctgtaatcccagcattttgggaggccaaagtgggtgaattacttgaggtcaggagtttgagaccagcctggccaacatggcgaaagcctgtctctactaaaaatgcaaaaattagctgggcgtggtggggcatgcctgtagttccggctagtagggag

SEQ ID NO: 565160 - DNA, 540 bp, Homo sapiens
gaatctatctagacaagcacataaaggcagttatcttgcattattgcacagcatgactgtagtgctaagaagacttagatgaatttaagattgtatctaaacttcaaagtaccatatagatttgagagttgtataagcttcttacgtgtacttacttattgtatacagcatttttttaatcttgacaatcttgtgcactttcattaagtgtcatatttttcttttctcccctctccataaaacattacaatatcacatatactactgaaatccttagcaatagaaggccttagttaatctacaaagaaaactttcagaacttctggtttattcctatttatatatcaagaatatattcaaggccggctgccatggctcacacctgtaatcccagcattttgggaggccaaagtgggtgaattacttgaggtcaggagtttgagaccagcctggccaacatggcgaaascctgtctctactaaaaatgcaaaaattagctgggcgtggtggggcatgcctgtagttccggctagtagggag

SEQ ID NO: 565161 - DNA, 500 bp, Homo sapiens
tttctccataagctgtgttacttcctcagaaaattcattcttttgaaaggcagtagatgtcctggttttctcccttggcaaaaataaggcagattcccaaatgtacaaaacaacaggtacmttgcctcctacacccatatctaaagttccacaactctttttatttatttatttatttattttttatttttattttttttggagacagagtcttgccccgtcgcccaggctggtgtgtaatggcgcaatctctgtttaccgcaacctccgcctcccaggctcaagcgattctcctgcctcagcctcccaagtagctgggattacaggcaccgccaccatgccaagctaatgtgtgtgtgtgtgtgtgtgtgtgtgtgtgtgtgtgtatttttagtagaaacggggttttaccatgttggttaggctggtctcaatctcctgacctcaggcaatccacctgccttggcctcccaaagtgctgtgattacaggcctgagcca

SEQ ID NO: 565162 - DNA, 500 bp, Homo sapiens
tttctccataagctgtgttacttcctcagaaaattcattcttttgaaaggcagtagatgtcctggttttctcccttggcaaaaataaggcagattcccaaatgtacaaaacaacaggtaccttgcctcctacacccatatctaaagttccacaactctttttwtttatttatttatttattttttatttttattttttttggagacagagtcttgccccgtcgcccaggctggtgtgtaatggcgcaatctctgtttaccgcaacctccgcctcccaggctcaagcgattctcctgcctcagcctcccaagtagctgggattacaggcaccgccaccatgccaagctaatgtgtgtgtgtgtgtgtgtgtgtgtgtgtgtgtgtgtatttttagtagaaacggggttttaccatgttggttaggctggtctcaatctcctgacctcaggcaatccacctgccttggcctcccaaagtgctgtgattacaggcctgagcca

SEQ ID NO: 565163 - DNA, 174 bp, Homo sapiens
tatcccttttgaatgccaaaaatctactacacttggtattaattctaaaaggttgttctacgccataagacaacatttgcttwtgacggattactgcaaaacaaactgacaggcaccatcatcactcagatccacccacattcacaaacttatggaagagagccgttcccatac

SEQ ID NO: 565164 - DNA, 488 bp, Homo sapiens
ttgctagtaggataagagtgatcgtaatatctcgaacattacatagacacttaaaacctttagttgtatttcatcaaaaatctgttcatrccccacgttggtttcaaaacatactatgctttttcttcgtgttatttcctatattcatttttgtgtgtatgtgtatgtcacaaatattgatatgcctggttgtttatttttgttttctattatgcctttttcaaaatataaaaataaacttgtaatttctaactaaaattttttagtcctagtctgaatttaaagtgatagaaaggactgatgcactgtttaacttatacagtataggcatataggctctcagaatcaaaagagcttgaggtaagttaagcctgaggtctacttcaaagagaaagctaatttaatactcttccagagtcaatcagtgctgattaatttttctttaattattcaacttttagatgtgtggatattaaaaaaaaattagc

SEQ ID NO: 565165 - DNA, 428 bp, Homo sapiens
tagcagttactgtggagtttttatatatttacttggttgaaaaccaagcactaaaatacaaactgtgcttttatttgacaaagccaacaacatcaacccctagyaaatggataaaaaaaataaagccatacaatataatagaaatactctatatcaaccttttaaccaaagtctccctctttttagttattttttcctttcacaagctcatttctaatctgcatgtattaagaatactcattttcattttcttaaaaaatcaaaatataactgccagcaaagtattcaatcgataaggaagatttagtatttaaaccctgaggtgacatgattccaggcaaagtaactttagtttatatattcttaaattgggtaaatacataaattccattaagctttctgaaatactgtaattagcccagtcttct

SEQ ID NO: 565166 - DNA, 581 bp, Homo sapiens
gattacaggcgtgagccactgtgcctggtgaagcactttcttttcttgatttccagcagtttattttattcttagaggtgcatggaggggttcctgcagcaaatagtttacaataatcctccatctgcttaaaactcttcaatagctttcagtgcccmtagtacaaagtggtctaaaattccaaggccttccaagatctagcgattgttggccttctaaagctttctttcctctacactcggggatgtacgattagcactaagcctctaacaaggatgaactactagaaatttccagaaggcgttatgctgttctcgacataagctgttccccagagcctggaaaactctagctctttctctgccggatttccgggggaactcctacttatccttcatgactcaagtcacttcctccgggaacccttccagacacccctaagaataaaacgctttgttcattatcagccaaaggcgcctcaaattttctatgtgctatgcactgtattctatccactataatttgtttacatatctatatcttagtctagacatattgaaaggcgatgaagagcagggaaa

SEQ ID NO: 565167 - DNA, 562 bp, Homo sapiens
attcagttatctccacctggccccacccttgacatatggagattgttacaattcaagatgagatttgtggggggcacagagccaaaccatatcacatatctaatatttcctctgttcctgctgcagaacgatttctgcattctatcctgctttatcgttgttatatgagcatattcctttttttttattcatagtctttaaactcagaggggtccatgtctctgccttgtgttctccacacatagcacaatgaagtgaatttcacaggttcaaaagaaatgtttgctaaaagaatagcaagagagtaatacttcacattttaccctcattccaccaagtgagaaagaaagtgtataaatagcatctctttttgataaaggagggaartgacttactcaagtatatttaattatttggttacgcatcagggactgaagacctgatgctgatgacttctccccgtctacaaggttctaatccattccatttctgagcatagccttttgtctagctaacacacacttaggtatggtgaggaattgggggagtagtgttattgtga

SEQ ID NO: 565168 - DNA, 562 bp, Homo sapiens
attcagttatctccacctggccccacccttgacatatggagattgttacaattcaagatgagatttgtggggggcacagagccaaaccatatcacatatctaatatttcctctgttcctgctgcagaacgatttctgcattctatcctgctttatcgttgttatatgagcatattcctttttttttattcatagtctttaaactcagaggggtccatgtctctgccttgtgttctccacacatagcacaatgaagtgaatttcacaggttcaaaagaaatgtttgctaaaagaatagcaagagagtaatacttcacattttaccctcattccaccaagtgagaaagaaagtgtataaatagcatctctttttgataaaggagggaagtgacttactcaagtatatttaattatttggttacgcatcagggactgaagacctgatgctgatgacttctccccgtctacaaggttctaatccattccatttctgagcatagccttttgtcyagctaacacacacttaggtatggtgaggaattgggggagtagtgttattgtga

SEQ ID NO: 565169 - DNA, 573 bp, Homo sapiens
tattttattttttattattattttcttttttgagacagaatctctctcgtttgcccaggttggagtgcaatagcacgatatcggctcactgcaacctttgcctcctgggttcaagcgattctctcacctcagcttccggagtagctgggattacaggtgccaccaatgcccagctaatttttgtatttttagtagagacggggtttcaccatgttagccaggctggtcttgaactcctgacctcaagtgatcagccgatcttggcctcccaaattgctaagattacaagcatgagtcactgtgcctggtcagagaaccatatttttaaaaatcagtttatttgtccaaagaaatttaggttatttttagtttaaggttattatgactaaaactgttatgaacatttttgtatatgtctttataaatttatttttwtttttttttttacttttttggggggtaatagcaaggattagaatggctgtgtcacaagtgtatgttaagatataaaaaacagttttgaaaaatggttgagccgctttacaccaaaaatatataagccttccacttgct

SEQ ID NO: 565170 - DNA, 573 bp, Homo sapiens
tattttattttttattattattttcttttttgagacagaatctctctcgtttgcccaggttggagtgcaatagcacgatatcggctcactgcaacctttgcctcctgggttcaagcgattctctcacctcagcttccggagtagctgggattacaggtgccaccaatgcccagctaatttttgtatttttagtagagacggggtttcaccatgttagccaggctggtcttgaactcctgacctcaagtgatcagccgatcttggcctcccaaattgctaagattacaagcatgagtcactgtgcctggtcagagaaccatatttttaaaaatcagtttatttgtccaaagaaatttaggttatttttagtttaaggttattatgactaaaactgttatgaacatttttgtatatgtctttataaatttatttttttttttttttttacttttttggggggtaatagcaaggattagaatggctgtgtcacaagtgtatgttaagatataaaaaacarttttgaaaaatggttgagccgctttacaccaaaaatatataagccttccacttgct

SEQ ID NO: 565171 - DNA, 476 bp, Homo sapiens
gaggttgcagtgagctgagatcatgccactgcactccagcctggtgacagagtgagacttggtctcaaaaaaaaaaaaaaacaaaactctagatgatggggtaataggtgcggcaaaccaccatggcacatgtatacctatgtaacaaacctgcacgttctgcacatatatcccagaacttgaagtaaaataataataaaatttaaaaattaaaaaaagttataaatgcacttttggaatgtgagtgaatattttttgtctttgaaaccctaatgatggatacagattatataaacagtatagctcaaactattaataaatgtcagttgtttgaaaaagagttatggcaacttttataatttagcgttttataagcctgtattatctttataacaaaacacaattattttaaagcaaaaagtyaagacaaaagttatcacataattgcctttgaagaaaaatttcacgttgctgaa

SEQ ID NO: 565172 - DNA, 426 bp, Homo sapiens
cttcattgagggtttacttttgttgacagttacatgtatagctagctgaatatacgtgggcttcccagatttcctacctaccaatagttaggtgggawtatggaactgcttttggccagtggccaatgaatggaagttatgtggattacttgcaaagccacacatttatgagcccgttttagagaccttgaagcatatgtattgagatgcctggatctctgaatcactatttggaagtaagttgtccttaatagctgctaggaccacaacagatttatacgagagagaaatgaagttttctatgttaagccactgaagtttcaaggcttgcaagaccgcttattttaacctgactaaaacaacaatcacatgtgtgagaaaaagatatacactttattaggagaagatgaatttaggtttatgttg

SEQ ID NO: 565173 - DNA, 487 bp, Homo sapiens
ccaataacatttgtctattaaagacacgaacggaatcatttttcttgtctgaatcttcctctgaattatggaaatgcagccaagctgctatgtttcattgacattcaatacttttaaaaaggaaccaatgttactcctgtgagttgaagaaaaatctattttttaactgtcaaaattaaaattttcttaaaagaattaaaaaaataggtccagggaaattactgttattggagaaaaaagaaaaaatgaaaacatgaccaaaaccaatcaatggttgctcattttttggttcttgccatataaatttttttttttttttttttttttttttttttggaaacagagtctcgctctgtcacccaggctggagtgcaaaggcacaatcttggctcactgcaacctatgcctcccgagttcccctccgccttccacctcctgcctyagcctttcaagtagttgggattacaggcacccatcaccatgcccg

SEQ ID NO: 565174 - DNA, 487 bp, Homo sapiens
ccaataacatttgtctattaaagacacgaacggaatcatttttcttgtctgaatcttcctctgaattatggaaatgcagccaagctgctatgtttcattgacattcaatacttttaaaaaggaaccaatgttactcctgtgagttgaagaaaaatctattttttaactgtcaaaattaaaattttcttaaaagaattaaaaaaataggtccagggaaattactgttattggagaaaaaagaaaaaatgaaaacatgaccaaaaccaatcaatggttgctcattttttggttcttgccatataaatttttttttttttttttttttttttttttttggaaacagagtctcgctctgtcacccaggctggagtgcaaaggcacaatcttggctcactgcaacctatgcctcccgagttcccctccgccttccacctcctgccttagcctytcaagtagttgggattacaggcacccatcaccatgcccg

SEQ ID NO: 565175 - DNA, 600 bp, Homo sapiens
agtcctgctctgttgcccaggctgtagtgcagtggcacaatctcagctcaccacaacttctgccttccaggttcaagccattcttctgcctcagcctcccaagtagctgggattacaggttcgcaccaccatgcctggctaatttttgtatttttagtagagatggggtttcaccatgttggttaggctggtgtcgaactcctgacctcaagtgatctgcctgcctcggcctcccaaattgttgggattacaggtgtgagccatcgtgcccggctagtcctttccttttgcttgcattcctgtaagagagcctaagcctcagcctgtgtaggagcacagaactttttaagatgactcatatacatgaggccctcccctcagctgttccatcattgagaaacttgtttctccatcctacattttctcagcttctgttattaaccctgatcccatggagatggagacagcttcatttcatttcaggctctaaaagtcttcctgagctagggggtctcatctaagcccgtggcagtaaataccacayttacactaacaattcctacatctatctctttttaggtataacctctctgctgacct

SEQ ID NO: 565176 - DNA, 509 bp, Homo sapiens
cacacatacacacacatatgtatatatgtgtatatatacacgtatatatatgtgtatatatacatatatacgtatatatagcatttcagacacagttttaaaattatacaaaaaatagctatattaacagactgtctttcctatttcctgaacattctaaacacagaaggaacctcttctttttctcataactgtgttttgttttgaagattagacttgtagaggcttacagaggcaacttcttttttcattcagtgtctgttggcctgcgcacgagcagtgataaacctgaccaacagtcctttccttctccttgttttcctttttttctgcctcatttttttctctttctagatrcctctgatctattttttatatttcacagcttacttctgtcttgtttctttccttccttcttcctaaaggaatcagaatatcttaacactttccttctttcttcccaccactgaagcccgcagggtctttgtttagctaatggaccctgttct

SEQ ID NO: 565177 - DNA, 575 bp, Homo sapiens
tactgtggtggcaagtcaaagaggaaggcaggaggtggcttctccagaattcctccagttttcctagattcatagctacctatcagatggacacatcattctcctgctcctattttattcggcagcaaattgaagcccactctcaattgtgcacatgcaccatctcctatccaccctgactgagggtgcagaagataagaacaggactccagtgcctgctctctgagggggcgagagatcctgggagacaaggccatccttctggagacctggagcaaaaagcaggtcactgattattgcaataggacaagggacttcccttgtgccaggatatggggcaaactaaaggattcttattcacatttttgcagtttctttcccagaagctgggcccagcaccaaacctcaactttgtgtatatttctggactcctccacttgcctcctttcccactgccaccaccgtggttttgatcaccaacatttcatgccagagttactgcaacagcttctaagtggtctctccasgtccacttttcccccctgtggtttgttttttactttattatttttaat

SEQ ID NO: 565178 - DNA, 545 bp, Homo sapiens
gtgttcctgaaactgtcatagcactaatgggtgtgtaatttagtatggtaatgggagtataatgaggttttaggtgaaatctaggtcaaatctagctccatgttgggtctagctggtctcagccagcttggcccccattctgtttttcagggttttatcattctctagtgtatgcaactatttcaactgttacctttttgctagtcatgtgagactgcggcctggaattttctattctcctgtgaccaccctgtattattcatatattaaagtgaaaagttatctataaatgaaaggttatctataaaagttayctataaatgaaaggttttctgcgtgtcatgtactacggcaatttctacaaatacagcagtgacaattagagactcccacaaataatgctcattgtgggacagtagttaacagataatgcgctaagaataaataaagtttgttaagcagttgttgtgtataggctgtgtgctaaccactttcttttatttattcctttaaaagtatttactgggaacatattcatagcaggc

SEQ ID NO: 565179 - DNA, 692 bp, Homo sapiens
atgcagcccctcactctaattcaaatttcagatattgtggccatttttttttctctgaaaccacttaagcaaaaagttatagtatgaattttaagctcaacttctctttaaaatttggaacattttacataatctcttttaagaaacactatgtttcacatcagtgaattttacaagtaactcaaatcttgtctttagagttagtgagccatagagaaaagctcactgtgtgagagaaaacatcattcattccgtctttgcctcaccaaatatacattatgctgcttgcgtatgtcggtaaccattctaagtgatagggatataatagtggacaagacagaatgtttttctcccattatggagctaagggtctmgaggcaaacagaggaggaggaataaacagacatattcataaatagctatacgtaatatgaaaaaaaggaatagagtgtggatatagagaagaacagacagagaaaactttggataaaggtaagaaaacatccctccatggtgggaccacttaaacagggacctgaacaattttgtaatttgaggataacagggtaatctaatggcatattgaatagtccaacatattatttactaacttcagaagactatttgcagagaagaggtaaagattaagagaaaagaaaaatgtaatgggaagaaataaaattaacagaatg

SEQ ID NO: 565180 - DNA, 692 bp, Homo sapiens
atgcagcccctcactctaattcaaatttcagatattgtggccatttttttttctctgaaaccacttaagcaaaaagttatagtatgaattttaagctcaacttctctttaaaatttggaacattttacataatctcttttaagaaacactatgtttcacatcagtgaattttacaagtaactcaaatcttgtctttagagttagtgagccatagagaaaagctcactgtgtgagagaaaacatcattcattccgtctttgcctcaccaaatatacattatgctgcttgcgtatgtcggtaaccattctaagtgatagggatataatagtggacaagacagaatgtttttctcccattatggagctaagggtctagaggcaaacagaggaggagkaataaacagacatattcataaatagctatacgtaatatgaaaaaaaggaatagagtgtggatatagagaagaacagacagagaaaactttggataaaggtaagaaaacatccctccatggtgggaccacttaaacagggacctgaacaattttgtaatttgaggataacagggtaatctaatggcatattgaatagtccaacatattatttactaacttcagaagactatttgcagagaagaggtaaagattaagagaaaagaaaaatgtaatgggaagaaataaaattaacagaatg

SEQ ID NO: 565181 - DNA, 469 bp, Homo sapiens
atttgacagaattctgttacatgtgaagatcarcttaaagagactaacaacaacaaaaagaacatgatgaccttataaacattatggacctcagtggactaggaaaaaggacatttagagtggactttgggaggggaacaacggtttcccaaagattgttatagcttaatgagttccgtgatcacacatccattatgtcaggtaaacatggctccctgctggctccccaaagcctgctgacaattggtggttatgatgttaactcacttgaacaccctagaaatgttttaatttctttttctcctatttttacaacattagaacaaggcttgaatttaccaagaaaatgtaagagcaaaaacaaaataacataacttgggtacttctgatagcagttctgtgttgttactgtaagcaatgcttattttaagaaatgatattcttccaattattaaaaataattttgaga

SEQ ID NO: 565182 - DNA, 595 bp, Homo sapiens
aagaaaaaaaaatcatataaaggaacccgaagtaggaatcctgccctttttcttcccttctgcaggcaaaagaaaatgattggcaacttttcttctatggtttcacagagagaaatagggttgactgtggcttctgagattcctagactcagaggaaaaggctgcttaaatttctatgctcatcatgtcaagcaatggcactcagacatatttgactgayctttatggattaaaagtcaagatatagggcaagctttgcaaacacaaaagcatatagcagccaggctggtcagaagatgatgtgggtgacttgtaaattggagaaaatccacactgtccaaaagggcagctgatattcaacttgagcagactctggccttgagtgattgtgggcccagggttacaggcctttaagactggctgggaatctgaatttttatggaaaatatcctaagttttaaatattgcctatcaagataaagcagaaaacacatacacagactctctctttctctctctctctcacacacacacaaacacacacacacacaaataaaaatccattgtgggaaccaataaagcaagttgctggatt

SEQ ID NO: 565183 - DNA, 558 bp, Homo sapiens
ttttgtatttttagtagagagggggtttcaccacattggccaggctggtctcgaactcttgaccttgtgatccatccccctcggcctcccaaagtgctgggatcacaggcatgagccaccgtgttatactttggaattccccaccatatagttctcaaaaatgcacgctggatttctggatttaggactttaaaattatgaaaataaaagtgcttgttaaaatcatgagtatatcacaaacatactggaagacagttcaaccataatagaactgtgaaaatcagtatatgtgttctttacattcttgcattgaaaagaaccaccaattgtgataaacttctcattgcctcccttacggtatttaaatattggacctatggaattttggaaccttagtttatgtgagtaatcctttccttcatttaaaaatatttgcagaaaattttgaaaaatcaaacaactaaaaatagtcaaaacgtctttcagagaaccagttttctgaaaatcctaacttctcatgattatggcaagttaaaraaaaaactcaaaaacgtctac

SEQ ID NO: 565184 - DNA, 459 bp, Homo sapiens
ccccctgccaaattgtctactgtcagtttgttttctggcattacttcttctacatcttcttcctcatcacctggtactggtttggaaccacttacctccatcaaatctccttccattaattcctcctgtgtgctgtctattaactccaagattctccaagattcatatcttgaacccccctccaacacatcatttttgccatatccgctatctctttcatgatttgtttgattgtctctgttgtaagtccttaaggtcatgcacaacatctggacacagtttttccagtaggaatttattgttttaggcttgatggctttcacagctttttctgtagcaacagtggcatcttcaatggtgtaattcttccagactttcatgatgttctactggggttctcttccatagcactgacaatcctttccayaaattaccatgcataatgagctttaaagattc

SEQ ID NO: 565185 - DNA, 546 bp, Homo sapiens
atgttctctgttattttatatatggtgccaatgtcccatatgatgtttctattamtatgactatataatgtgaattacttcttctattcttaattttatttctggttatcctcttccttattgcttcaaaactttgttgataaaattttctttcctgttctgaatataattcctttagctgtgtttagatcatccttacctggaaggacttgtgtatgcattatttcttcccattttgaagcttttactcttactttccagctgacacttttgctctatttccaaatttgtcagagccttccattcttaaagaacattgtgtttctaattcttgtcttattttttgatgttcttcttcttattagcaatttctcaaacaaatggccaaattcattgctcttatgtcctcatattttttctttttaactcattgaaattattaaagaaatgtcagtatttcagattattaaacatttactcttgcaaaatttgtgaccattggcttttattatattttcttatagttttgcttaatatttatcttaa

SEQ ID NO: 565186 - DNA, 546 bp, Homo sapiens
atgttctctgttattttatatatggtgccaatgtcccatatgatgtttctattaatatgactatataatgtgaattacttcttctattcttaattttatttctggttatcctcttccttattgcttcaaaactttgttgataaaattttctttcctgttctgaatataattcctttagctgtgtttagatcatccttacctggaaggacttgtgtatgcattatttcttcccattttgaagcttttactcttactttccagctgacacttttgctctatttccaaatttgtcagagccttccattcttaaagaacattgtgtttctaattcttgtcttattttttgatgttcttcttcttattagcaatttctcaaacaaatggccaaattcattgctcttatgtcctcatattttttctttttaactcattgaaattattaaagaaatgtcartatttcagattattaaacatttactcttgcaaaatttgtgaccattggcttttattatattttcttatagttttgcttaatatttatcttaa

SEQ ID NO: 565187 - DNA, 572 bp, Homo sapiens
aggtttatggtcttatttctgggttctcttttctgttccattagtttagatgtctgtttttatacaagtactatgctgttttggttactgtaacctggtagtatagtttgaagttgggtagtatgatgcctccagctttgttctttttgcttaggattgccttggctgtttgggctttttttgcttacatatgaattttaaatagttttttctagttctgtgaagaatctcaatggtagtttaaaggaatagtattgaatttataaattgctttgggcagaatttataaattgctttgggccatcttaacaatattctttctatccatgagcacggaatgtttctccatttgtttgtatcatctctttttctttgtgcagtggtttgtagttctctttgtagagatctttcactcctctagttagctgtattgctagatattttattcttttgtggcagttgtaaatgggtgttagttcctgatttggctcttgacttgactattgttggtgaataagaatgytagtgattttggtgattttagcacattggtttttgtatcctgagacttt

SEQ ID NO: 565188 - DNA, 314 bp, Homo sapiens
tccaggggctctgggagtggctgccaggtgagttggacagtccgatttccagtgggrtcccgcacagatgggatgcggcttaggaggaatcctgggctgcaggcattccttggcctgggggccagatttctggcacttgtagcaagctcctgggggagaaggttctggaggaacgcctggccactgcggttcaggcatttggaagttcttgtgtgctggagatatggctggggtttgtctcacagtggaggcaaggaattgcaacttttttctattattgtacaccttgaaggtgaggttaattaaatcctgtt

SEQ ID NO: 565189 - DNA, 314 bp, Homo sapiens
tccaggggctctgggagtggctgccaggtgagttggacagtccgatttccagtgggatcccgcacagatgggatgcggcttaggaggaatcctgggctgcaggcattccttggcctggkggccagatttctggcacttgtagcaagctcctgggggagaaggttctggaggaacgcctggccactgcggttcaggcatttggaagttcttgtgtgctggagatatggctggggtttgtctcacagtggaggcaaggaattgcaacttttttctattattgtacaccttgaaggtgaggttaattaaatcctgtt

SEQ ID NO: 565190 - DNA, 314 bp, Homo sapiens
tccaggggctctgggagtggctgccaggtgagttggacagtccgatttccagtgggatcccgcacagatgggatgcggcttaggaggaatcctgggctgcaggcattccttggcctgggggccagatttctggcacttgtagcaagctcctgggggagraggttctggaggaacgcctggccactgcggttcaggcatttggaagttcttgtgtgctggagatatggctggggtttgtctcacagtggaggcaaggaattgcaacttttttctattattgtacaccttgaaggtgaggttaattaaatcctgtt

SEQ ID NO: 565191 - DNA, 651 bp, Homo sapiens
gttttgtctgtttcaaaatgctatttactgtttattatttacttatttttaatttttttctgagtacataataggtatatttatggggtatatgagatattttgatacagacttggagtgcctaataatcacaccatggaaaatagggcatccatcccctcaagcattatccattgtgttacaaacaatccaattgtactcttttagttatttttaaatgtacagttaaatttttattgactagagtcaccccgatgggctatcaaatactaggccttattcattcatttgaactattttttcttacccattaatcatcccccaactcctccccaccctcgtataactatcacattttctttatccattaatctgttgatggacccttaggatgcttctaaatcttggccattgtgaacagtgctgcaacaaatatgggaactcgggtatctctttgatctgctgattttctttcttttgagtatgtactcagtggaatgctggatcatatggtagctctatttttagttttktgaggaacctccaaatagttctccatagtggttgtactaatttacattcccacaaaaggtgtacaatggttcccttttatccacatccttgccagcatttgctattgcctgtcttttg

SEQ ID NO: 565192 - DNA, 530 bp, Homo sapiens
accttttgtaaatgtgtgtgtgtgtgtgcacttgacacagaaggagagagacaaaatgagagctaccacagagaagacaggcttaggaaacagtttcctttcaaattggtcacagcaatgaataggcacaagttggttcacaaaaattattctattttatgattctatcataaatgatgcctataacaataaaacaacaagcccaatgaatcttctctttttgatctaaatatttattaagtgccaaaaaacatttacatacctctatttcccagagtgctttagaactagtagcagaagtagctgattggcgcaaggtcgtacgaaggaaaatgtgctgttttttctcataytcatcacaagtcaaaaacttctcttgttccgcatgaaataatctaacaacgtccccctagcaaaaaggtcaagagacatctgaacaaacagatgtgagaagcaggtgtctctttctggttttgctactctgggcccttctactagctatttgacttttaaagcttatttaaatttat

SEQ ID NO: 565193 - DNA, 605 bp, Homo sapiens
tgctattaatacaacgtttttcactccaaaacagcagggaaagaagcaaaggaaataaaaatgcatgctctctagtcagtcctagtccaccaccttccttagaatcatcttgagaggttaagataatctccagctgtgactgaagaagagtgactcgcacaggattccagccagcaatggtggagagaccataatctgaatttttatctgtccttttcttcaaggaatatcttaatgcttagcaagggagactttttaagtgaagccaagtaaattgctgtgcatatstaagagtgttagaaacaaagaaatagattcacaaaaggaaaagttagatcaataacaggcaaataaaaattcctatctgcacatcagaatccatttcctgccataatttagctctgatatttacttgtctatagcccataaaagtgggccagttgtttctgcttccggcctttattcatttcccctaacagggttggaggtgcgactgaatatacaatagttgttttgaaatgtaagtttgccagggaaaaaaatagaggtaagaatagagaggaagctgagaaacagctattccatttgtttgcatatttaggatt

SEQ ID NO: 565194 - DNA, 542 bp, Homo sapiens
catggtgctaccagtgaacaatttaccactattatcttacttaattatccctattccataggttaggtactggtkttatatccgcctgcagaggtttaaactaaataaattccctttttgcctggagactagactgcctttgtggggctaacaaattaacgaaaggattagaaattatggtctaggagtcatgcaactggaggctacaaggttctgacccatcccaaattgctcctggggataacatcactattgtaaagcctaaaatcagtgcttgagatattttgcacaccctgcacttgagggatctgctggcatcacccagattgataaactggctcatctgatcctgtgacgcccagccaggaaatgatttattgcaaaaagacagatttactccctaaaatttcatctctgctcatcacctcatcaattcctactcctatctaactggtctcccccaacacaccaaggtgtccttaaaaaccctggtccctgagtactaaggaaggctgatttgagtaataataaagctccattct

SEQ ID NO: 565195 - DNA, 568 bp, Homo sapiens
ttctgcaaatctaataattcaatatactttggttttatttacatttgaagaataaggtcttctgacatttgatagttgtaaaatactgttgtttctaaagtaggattttagttataaccattcattatttaagagattcatggaagtcaaaagttatttgaaaacatctttatgtgcataatttcttactctacaaagatataaaatatgaaatcataactttggtatgatttaaaataatgtgaatagaaataatggttcttaccacagacttcttaaattcttcatttcagatcagaaagcaacagtattggattaatacaaaaattgaagtgttatattctccctagatgttcaaatacagttttaataattgctccaaatkattacaaagagatttttaattcaaaagaacaaattaaaaatgattagtaatcatttcacttttcttcattaataaaatgtaagagtatatatataaaatatcttagtctatggtagactagttctacctaatttctaaaaataaaatgttcagtaatagcaataaggtaagaagaaatagttg

SEQ ID NO: 565196 - DNA, 568 bp, Homo sapiens
ttctgcaaatctaataattcaatatactttggttttatttacatttgaagaataaggtcttctgacatttgatagttgtaaaatactgttgtttctaaagtaggattttagttataaccattcattatttaagagattcatggaagtcaaaagttatttgaaaacatctttatgtgcataatttcttactctacaaagatataaaatatgaaatcataactttggtatgatttaaaataatgtgaatagaaataatggttcttaccacagacttcttaaattcttcatttcagatcagaaagcaacagtattggattaatacaaaaattgaagtgttatattctccctagatgttcaaatacagttttaataattgctccaaatgawtacaaagagatttttaattcaaaagaacaaattaaaaatgattagtaatcatttcacttttcttcattaataaaatgtaagagtatatatataaaatatcttagtctatggtagactagttctacctaatttctaaaaataaaatgttcagtaatagcaataaggtaagaagaaatagttg

SEQ ID NO: 565197 - DNA, 623 bp, Homo sapiens
tggtgccaaatatccacttgcagattctgcaaaaagagtgtttcgaaacaactgtatgaaaagaaaggttaaacactgtgagktgaacgcacacattgcaaagcggtttctgagaatgattccgtctaattattatacgaaggtatttccttttctatcattggcctcaaagcgcttgatacctccacctgaaaattccacaaaaagagtgtttccaatctactctgtctaaaggaacgttcaactctgtgagttgaatacacacacacagaaagaattcactgagaattcttctgtctggcattacatgaagaaatcccgtttccaacgaaggcctcaaagaggtccaaatatccacttgcagattctgcaaaaagagtgtttcaaaaccgctccattaaaaggaatgttgaactctgtgagttgaatgcaaacatcacaactcagtttctgagaatgcttctgactagattttatggtaagatatttccttttctaccgtaggcttcaatgccctctaaatacacccttgcaaattctacaaagagactgtttcataactgctctataggaagaaaggttcaactctgtgagttgaatgcagagatcacaacgtggtttct

SEQ ID NO: 565198 - DNA, 623 bp, Homo sapiens
tggtgccaaatatccacttgcagattctgcaaaaagagtgtttcgaaacaactgtatgaaaagaaaggttaaacactgtgagttgarcgcacacattgcaaagcggtttctgagaatgattccgtctaattattatacgaaggtatttccttttctatcattggcctcaaagcgcttgatacctccacctgaaaattccacaaaaagagtgtttccaatctactctgtctaaaggaacgttcaactctgtgagttgaatacacacacacagaaagaattcactgagaattcttctgtctggcattacatgaagaaatcccgtttccaacgaaggcctcaaagaggtccaaatatccacttgcagattctgcaaaaagagtgtttcaaaaccgctccattaaaaggaatgttgaactctgtgagttgaatgcaaacatcacaactcagtttctgagaatgcttctgactagattttatggtaagatatttccttttctaccgtaggcttcaatgccctctaaatacacccttgcaaattctacaaagagactgtttcataactgctctataggaagaaaggttcaactctgtgagttgaatgcagagatcacaacgtggtttct

SEQ ID NO: 565199 - DNA, 504 bp, Homo sapiens
tatccacttgcagattctgcaaaaagagtgtttcgaaacaactgtatgaaaagaaaggttaaacactgtgagttgaacgcacacattgcaaagcggtttctgagaatgattcygtctaattattatacgaaggtatttccttttctatcattggcctcaaagcgcttgatacctccacctgaaaattccacaaaaagagtgtttccaatctactctgtctaaaggaacgttcaactctgtgagttgaatacacacacacagaaagaattcactgagaattcttctgtctggcattacatgaagaaatcccgtttccaacgaaggcctcaaagaggtccaaatatccacttgcagattctgcaaaaagagtgtttcaaaaccgctccattaaaaggaatgttgaactctgtgagttgaatgcaaacatcacaactcagtttctgagaatgcttctgactagattttatggtaagatatttccttttctaccgtaggcttcaatgc

SEQ ID NO: 565200 - DNA, 504 bp, Homo sapiens
tatccacttgcagattctgcaaaaagagtgtttcgaaacaactgtatgaaaagaaaggttaaacactgtgagttgaacgcacacattgcaaagcggtttctgagaatgattccgtctaattattatacgaaggtatttccttttctatcattggyctcaaagcgcttgatacctccacctgaaaattccacaaaaagagtgtttccaatctactctgtctaaaggaacgttcaactctgtgagttgaatacacacacacagaaagaattcactgagaattcttctgtctggcattacatgaagaaatcccgtttccaacgaaggcctcaaagaggtccaaatatccacttgcagattctgcaaaaagagtgtttcaaaaccgctccattaaaaggaatgttgaactctgtgagttgaatgcaaacatcacaactcagtttctgagaatgcttctgactagattttatggtaagatatttccttttctaccgtaggcttcaatgc

SEQ ID NO: 565201 - DNA, 504 bp, Homo sapiens
tatccacttgcagattctgcaaaaagagtgtttcgaaacaactgtatgaaaagaaaggttaaacactgtgagttgaacgcacacattgcaaagcggtttctgagaatgattccgtctaattattatacgaaggtatttccttttctatcattggcctcaaagcgcttgatacctccacctgaaaattccacaaaaagagtgtttccaatctactctstctaaaggaacgttcaactctgtgagttgaatacacacacacagaaagaattcactgagaattcttctgtctggcattacatgaagaaatcccgtttccaacgaaggcctcaaagaggtccaaatatccacttgcagattctgcaaaaagagtgtttcaaaaccgctccattaaaaggaatgttgaactctgtgagttgaatgcaaacatcacaactcagtttctgagaatgcttctgactagattttatggtaagatatttccttttctaccgtaggcttcaatgc

SEQ ID NO: 565202 - DNA, 634 bp, Homo sapiens
caactctgtgagttgaatacacacacacagaaagaattcactgagaattcttctgtctggcattacatgaagaaatcccgtttccaacgaaggcctcaaagaggtccaaatatccacttgcagattctgcaaaaagagtgtttcaaaaccgctccattaaaaggaatgttgaactctgtgagttgaatgcaaacatcacaactcagtttctgagaatgcttctgactagattttatggtaagatatttccttttctaccgtaggcttcwatgccctctaaatacacccttgcaaattctacaaagagactgtttcataactgctctataggaagaaaggttcaactctgtgagttgaatgcagagatcacaacgtggtttctgcgaatgattctttgtagtttttacatgaagatatttcgttgtcaaccgtaggcttcaaagcactcaaagtattcacttggaacttttacaaaaagagtgttagaaaactgctctttccaaagtaaggttcaactctgtgagttgaatgcacacataacaatcaagaagtttctgagaattcttctgtcctggtttatatgaaaaaatcccgtttccaacgaaggcctcaaagacgtttaaatatccacttg

SEQ ID NO: 565203 - DNA, 553 bp, Homo sapiens
tccaaatatccacttgcagattctgcaaaaagagtgtttcaaaaccgctccattaaaaggaatgttgaactctgtgagttgaatgcaaacatcacaactcagtttctgagaatgcttctgactagattttatggtaagatatttccttttctaccgtaggcttcaatgccctctaaatacacccytgcaaattctacaaagagactgtttcataactgctctataggaagaaaggttcaactctgtgagttgaatgcagagatcacaacgtggtttctgcgaatgattctttgtagtttttacatgaagatatttcgttgtcaaccgtaggcttcaaagcactcaaagtattcacttggaacttttacaaaaagagtgttagaaaactgctctttccaaagtaaggttcaactctgtgagttgaatgcacacataacaatcaagaagtttctgagaattcttctgtcctggtttatatgaaaaaatcccgtttccaacgaaggcctcaaagacgtttaaatatccacttgcagacttcacaaacagagggttt

SEQ ID NO: 565204 - DNA, 553 bp, Homo sapiens
tccaaatatccacttgcagattctgcaaaaagagtgtttcaaaaccgctccattaaaaggaatgttgaactctgtgagttgaatgcaaacatcacaactcagtttctgagaatgcttctgactagattttatggtaagatatttccttttctaccgtaggcttcaatgccctctaaatacacccttgcaaattctacaaagagactgtttcataactgctctataggaagaaaggttcaactctgtgagttgaatgcagagatcacaacgtggtttctgcgaatgattctttgtagtttttacatgaagatatttcgttgtcaaccgtaggcttcaaagcactcaawgtattcacttggaacttttacaaaaagagtgttagaaaactgctctttccaaagtaaggttcaactctgtgagttgaatgcacacataacaatcaagaagtttctgagaattcttctgtcctggtttatatgaaaaaatcccgtttccaacgaaggcctcaaagacgtttaaatatccacttgcagacttcacaaacagagggttt

SEQ ID NO: 565205 - DNA, 494 bp, Homo sapiens
gaattcttctgtctggcattacatgaagaaatcccgtttccaacgaaggcctcaaagaggtccaaatatccacttgcagattctgcaaaaagagtgtttcaaaaccgctccattaaaaggaatgttgaactctgtgagttgaatgcaaacatcacaactcagtttctgagaatgcttctgactagattttatggtaagatatttccttttctaccgtaggcttcaatgccctctaaatacacccttgcaaattctacaaagagactgtttcataactgctctataggaagaaaggttcaactctgtgagttgaatgcagagatcacaacgtggtttctgcgaatgattctttgtagtttttacatgaagatatttcgttgtcaaccgtaggcttcaaagcactcaaagtattcacttggaacttttacaaaaagagtgttagaaaactgctcttyccaaagtaaggttcaactctgtgagttgaatgcacacat

SEQ ID NO: 565206 - DNA, 495 bp, Homo sapiens
agaattcttctgtctggcattacatgaagaaatcccgtttccaacgaaggcctcaaagaggtccaaatatccacttgcagattctgcaaaaagagtgtttcaaaaccgctccattaaaaggaatgttgaactctgtgagttgaatgcaaacatcacaactcagtttctgagaatgcttctgactagattttatggtaagatatttccttttctaccgtaggcttcaatgccctctaaatacacccttgcaaattctacaaagagactgtttcataactgctctataggaagaaaggttcaactctgtgagttgaatgcagagatcacaacgtggtttctgcgaatgattctttgtagtttttacatgaagatatttcgttgtcaaccgtaggcttcaaagcactcaaagtattcacttggaacttttacaaaaagagtgttagaaaactgctctttccaaagtarggttcaactctgtgagttgaatgcacacat

SEQ ID NO: 565207 - DNA, 544 bp, Homo sapiens
ggaacttttacaaaaagagtgttagaaaactgctctttccaaagtaaggttcaactctgtgagttgaatgcacacataacaatcaagaagtttctgagaattcttctgtcctggtttatatgaaaaaatcccgtttccaacgaaggcctcaaagacgtttaaatatccacttgcagacttcacaaacagagggtttccaaactgctctatgaaaagaaargttaaactctgtgagttgaacgcacacatcacaaagtagcttctgagaatgatactgtctagtttttatacgaagatatttcctttctaccattggcgtcaaagcgctagaattctccacttgcaaattccacaaaaagagtgtttccaatctgctctgtctaaaggaaggttcaactctgtgagttgaatacacacacacaaagaagctactgagaattcttttttcaagaaattataagaagaaatcccgtttccaacgaaggcctcaaagagttccaaatatccacttgcacactgcacaaactaagtctttccaaactgc

SEQ ID NO: 565208 - DNA, 544 bp, Homo sapiens
ggaacttttacaaaaagagtgttagaaaactgctctttccaaagtaaggttcaactctgtgagttgaatgcacacataacaatcaagaagtttctgagaattcttctgtcctggtttatatgaaaaaatcccgtttccaacgaaggcctcaaagacgtttaaatatccacttgcagacttcacaaacagagggtttccaaactgctctatgaaaagaaaggttaaactctgtgagttgaacgcacacatcacaaagtagcttctgagaatgatactgtctagtttttatacgaagatatttcctttctaccattggcgtcaaagcgctagaattctccmcttgcaaattccacaaaaagagtgtttccaatctgctctgtctaaaggaaggttcaactctgtgagttgaatacacacacacaaagaagctactgagaattcttttttcaagaaattataagaagaaatcccgtttccaacgaaggcctcaaagagttccaaatatccacttgcacactgcacaaactaagtctttccaaactgc

SEQ ID NO: 565209 - DNA, 613 bp, Homo sapiens
tccttctccctcaccaagaaatcttcctaacacctactaccacttactgctgctattctatcacctctatgctttatacacatttttattaaggtccaccctgctgcttgataaaattttgtaagggtttgtgtcaccgagatgatgaaatccttgagagaagttctaagtcttacttagaacttagccactggcaaaatatcaaatgtataataagccttcaggtgttgaatgaattaatgggaaaacaaggaaataaataaatgtatttgtcatctggaagaataactgaaattcaatccatgaacttggtttcctaaaagggcaataagaggtggagaagtgtaggggtagggaagcatttagggagagaatattttkcttggagggagagatgatattggtttatcaaattaacctaaggaagaaagtaataatagttattctgttgtcaagaggtaacactagtgggcattggggcggaagatatttggtttatctacttgctctggcagaaatcagttgggtttggatatggtatagatctatatttttacccaaatctcatgttcaattgtaatcctcagtgttggaggtggggcctggtgagagg

SEQ ID NO: 565210 - DNA, 549 bp, Homo sapiens
ctaaaaaataaaaaacattaaaaaaatagatctagcaattcaacttctgtgtatatactcaaaagaactgaaagtggagtcttgaagagatacttgtacatgcatatgcatagcagcattattcacagtagctaaaatgtggaagcaacagatgatggataagcaaaatgtggtttaaacatacaatggaatatagtcccaactcaaaaaggaaggaaatatgctacaacatgggtaaacctcaagggcattatgctaagtgaaataagccagtcacaaaaagacaatcactatgtgattccacttgtatgaggtagttggagtagtgaaaatcatagaggcagaaattaggatggtggttgctgggggatagtgagaggggaaaatgggtagttttgtttaatggatatagagttttagttttgcaagattaaaatatttctggagatgggtggtagtgatggtattataggttatacaatattaatatatttaattatggytaagataataaattttatgttatgtgtattttaccacaataaaaaa

SEQ ID NO: 565211 - DNA, 617 bp, Homo sapiens
ggaattggcatgtcctatggtaactctacatgtaatcttttgagaaactcaccaactgttttccaaagttattacagcattttacattctcatcagcaatttatttggattccaatatatccacatctttatcatatctttatcaaaactcrtctgtcatttttattatagtcatcttactagatgtgaagtggtacctcattttagttttgatttgtattttctcaaagactaatgaggctgtgtctctttttatgtgcatattagccatttctgtatttctttagggaaaatgtctattcaaatattttgcccagtttttaaattgggttatttgactttattcttgaattgtaatgattttttaatatactctggacaatagaccattataatatatatatattatttgcaaaggttttttttttccccatcctaggtgctgtctttactttctcaatagcatcttttgaagaacaaagtttttaaatttggataaaatgtaatttattttttctttggttttatcattgcatctaagaatatcattgcataatcaaaggccacaaagatttacacttgtttgtttgttttttctactagttaaatcattttag

SEQ ID NO: 565212 - DNA, 617 bp, Homo sapiens
ggaattggcatgtcctatggtaactctacatgtaatcttttgagaaactcaccaactgttttccaaagttattacagcattttacattctcatcagcaatttatttggattccaatatatccacatctttatcatatctttatcaaaactcgtctgtcatttttattatagtcatcttactagatgtgaagtggtacctcattttagttttgatttgtattttctcaaagactaatgaggctgtgtctctttttatgtgcatattagccatttctgtatttctttagggaaaatgtctattcaaatattttgcccagtttttaaattgggttatttgactttattcttgaattgtaatgattttttaatatactctggacaatagaccattataatatatatatattatttgcaaaggttttttttttccccatyctaggtgctgtctttactttctcaatagcatcttttgaagaacaaagtttttaaatttggataaaatgtaatttattttttctttggttttatcattgcatctaagaatatcattgcataatcaaaggccacaaagatttacacttgtttgtttgttttttctactagttaaatcattttag

SEQ ID NO: 565213 - DNA, 608 bp, Homo sapiens
tttccaacataataggttctctttcagttataaatatttataattttcaattttcccgattagtttttagtacatttasagccattgccacccataaaaatggtcttaacaaaatattatattaaaatattggggaatgacacactagatttaatacctgggtgattaagtaatctgcatggcaaacccccacgacacaaggtaacctatgtaacaaacctacacatgtaccccctaacataaaagttataaataaataagttaattaattaaataagtaagtaaaggaataggtgcgacatccgaagaaatttttaaaaacatttgatttcagaattttataatagtccttcatttggggaggggtgtagatatctgagattcagggtaaaagggttttaaatagtgagcagctgacccacagctagctagaatgaacgatttctggctcagttgagtttttactcctctattagggatattatttatttcttcttatcatacaagcaatttttatattgggcttatatagagattcaggataaccaagattgaagatatgtttttattcagtgaagacactatttcttggacttacattgttcatg

SEQ ID NO: 565214 - DNA, 636 bp, Homo sapiens
gcttaatttgcttttcgtagagagaactcaggaagattctacacaaaaaagaataaagtggcttttaatattaattcctttttggctaagttttcaaaatgcacctgtattgctatcataacatatgagaakttcatgggctgttctggaatttccagatctatttttttaatctgaattgactaattagtccaggaagacaatgatgttgatttttttcagaataactgactgtttatctgcactgaggcttagtaatctttccagaaatggcaaccaaatcctatccattccttgctattgtactttcttttaatgcccaaaataaagttcagaagatttgtagacatagctagataattattgcttgccgaggaatcattaaaagttttctcagagcaagaaaataaactgcattttaaatagtatgctttttaattatcctgatgttggtgggtgggtcctgtctttaaaagtatctcctttggaatgaactcccattcacaattgcttcaaagagaataaaatacctaggaatccaacttacaagggatgtgaaggacctcttcaaggagaactacaaaccactgctcaatgaaataaaagaggacacaaacaaatggaagaacattctat

SEQ ID NO: 565215 - DNA, 637 bp, Homo sapiens
cagtatatattataaagttacagattcttataatataaatattcagtataaagccaaaaattatcatatcagaattttaaatttaattatttaatcatctatttttgctggtactgtcakatctactttttccaaaagctgaaatttaccctatcacagtaaaagacaacattttccagtatccacatggaggattattttattttttaaattttaactgtagccctagaattgaagactgttatgttatttgttcactttttaaactttgtgcttttaaaaaggaaacaataataatgttcgatgtttaagcatgtagatgcaagacatagcatttaagaatatcaatgtgtgtgcctactatgccttactagctaaatattctactgttgtataacaggatgatttggttatgctgacttcttcagattcctgaacagtccagtaacaatgtctttcctttactgatatcatatatagtcactgtaccaaacatcatacattaagataatctgcattctagaatggtttagacatgcaaacatttgggttcaaatacgtatcaaccacttagtagttatatgaccttggcatgctactcaaacatccttgtgcctccttttcctcgtgtatgatt

SEQ ID NO: 565216 - DNA, 637 bp, Homo sapiens
cagtatatattataaagttacagattcttataatataaatattcagtataaagccaaaaattatcatatcagaattttaaatttaattatttaatcatctatttttgctggtactgtcagatctactttttccaaaagctgaaatttaccctatcacagtaaaagacaacattttccagtatccacatggaggattattttattttttaaattttaactgtagccctagaattgaagactgttatgttatttgttcactttttaaactttgtgcttttaaaaaggaaacaataataatgttcgatgtttaagcatgtagatgcaagacatagcatttaagaatatcaatgtgtgtgcctacyatgccttactagctaaatattctactgttgtataacaggatgatttggttatgctgacttcttcagattcctgaacagtccagtaacaatgtctttcctttactgatatcatatatagtcactgtaccaaacatcatacattaagataatctgcattctagaatggtttagacatgcaaacatttgggttcaaatacgtatcaaccacttagtagttatatgaccttggcatgctactcaaacatccttgtgcctccttttcctcgtgtatgatt

SEQ ID NO: 565217 - DNA, 637 bp, Homo sapiens
cagtatatattataaagttacagattcttataatataaatattcagtataaagccaaaaattatcatatcagaattttaaatttaattatttaatcatctatttttgctggtactgtcagatctactttttccaaaagctgaaatttaccctatcacagtaaaagacaacattttccagtatccacatggaggattattttattttttaaattttaactgtagccctagaattgaagactgttatgttatttgttcactttttaaactttgtgcttttaaaaaggaaacaataataatgttcgatgtttaagcatgtagatgcaagacatagcatttaagaatatcaatgtgtgtgcctactatgccttactagctaaatattctactgttgtataacaggatgatttggttatgytgacttcttcagattcctgaacagtccagtaacaatgtctttcctttactgatatcatatatagtcactgtaccaaacatcatacattaagataatctgcattctagaatggtttagacatgcaaacatttgggttcaaatacgtatcaaccacttagtagttatatgaccttggcatgctactcaaacatccttgtgcctccttttcctcgtgtatgatt

SEQ ID NO: 565218 - DNA, 553 bp, Homo sapiens
tattactatctttagacacagggtcttgcactgtcacccaggctggagtgcagtggcacaatcatggctcaccgtaatcttgaactaccaggctcacatgaacctcctcactcagcttccagagtagctaggactatgggtttgtgccaccatgcctgtctaatttttattttttttttatagaaatggggtctcactatgttkcccgggcttgtctcaaacttcctgccttaactgatcctcctgctccaatctcccaaaatgctgggatcacatgcatgagccactgaacccagctgacaataaaatattttaaatcaaggtattacattgtgttttgagaaataatactgttcatacttaatgtaatacagaataatgtaagcataactattttgtgcactgggaaactaaaaaatgtgtgtgacttattttattgcaaaattaattttattgctgtgttctggaaccaagcctgaaatatcttttaggtatgcctacgctggatttgagacatgtatttgtgagttcattagttacagtagctagtatt

SEQ ID NO: 565219 - DNA, 480 bp, Homo sapiens
tctgggtcctttaacctgttccattggtctatgtgtctgtttttatactgataccatgctgttttggttactgtagccttgtagtatagtttgaagtcaggtagtgtgatgcctccagcttcattctttttgttcaggatcactttggctatttgggatcttttttggttccatatgaattttaraatttttttctaattttgaaaaatgtgcacttttttctaattttgtaaaaatgttattggtaggttgataggaatagcactgaatctgtaaattgctttgggcagtatgccattttaattttgatttttttcctatccatgagcatggaatgtttttccatttgtttgtgtcatctctgatttatttcagcagtgtcttgtaattctcgttgcagagatcttttacgtccctgtttagttgtattcctaggtattttatgattttcatggctattgtgaatgggattgcattctt

SEQ ID NO: 565220 - DNA, 584 bp, Homo sapiens
tggaagaacttacagtaacaaaaggcctaatacaattaccagggacaaattgttctaagataatcagaacattagaaatgacacttttccttatttttataaaccataatatatctggctacaggacaactcactatggttggccagacatttaatacatgttattttgaatcctttctccttttctcttggattttaccctgggccctgtgtgagccaggacatagggcaagggctttactgctcagtgctttgcagtcacttctgctgctgattcttgcctctacctgaatgacatttgggggacaactatgatacagtccaaggtcacattactcagtgctcaggcttcacaaatgcccaaatagacaccatcatctgaagtcctgttacttgaaaagtgcgttgacttacatttatataattttttwaaaattattatactttaagttctggggtacacgtgcagaatgtgcaggtttgttacataggtatacacgtgccatggtggtttactgcacccatcaacccgtcataaacattaggtatttctcctaatgctatccctcttctaactcccaccc

SEQ ID NO: 565221 - DNA, 610 bp, Homo sapiens
atcagattacttacaaagataattccatcaggctggtagcagatctgtcaccagaaaccttataaktcagaagggattatggaactatttccagcatgctcaagaaaagaaattccaactaagaatttcacaacccaccaaattaagctcataagtgacagagatattaaatccttctcagacaagcaaacaccaagggaatttgttaacactacatcagccttacaagaggtccttaagggaatgctaaagattaaaataaatattgatacctgttaccacaaaaggcatttaaacacataacccacagaaaatataaagaaattacacaatcaggtctacaaaacaatcagctaataacatgacaatagaataaaaatcttacagtttaataataaacctgagtatatatggcctaaatgcccccacatgaaatgcacagggtggcaatctgcataaaaagacaagaccacactttccgctgtcttcaagagatccatctcatgtgtgacaacacctacaggctcaaagtaaagggactgacaaagatctacaatgcaaacagaaaacaaaaaagagcaggagtcactattcttatatcagataaaac

SEQ ID NO: 565222 - DNA, 443 bp, Homo sapiens
aaaatttaacaaattttgtattaaatataataaaatgatattttattatctacatggtaagactacctttagcttggtaagaaactgccaaactgtcttacaaaatggctatgccaccagcataaataagagttcctgttgttccacatcttcatcagcccttgatattatcaggttttaaaaaacatttagtccttctaattagtgagtattattatctcattgttgtgttaatttgtattttcctaaggacaaatggcaaaagccaaaagtctgtgacttgttttttctttctcttaacagtggcttttgctgagcagaagtttatcaatttaataacatctgatttattaatttttttcaatatcatgcagttrgtattatatctaaacacttattaatcccaagttacttagattttctcctagttttgtgttttgctt

SEQ ID NO: 565223 - DNA, 600 bp, Homo sapiens
tacaaacatgtaagccgtgccaagaaatattagttattaaaggccagtctccaaatgagaaactcaagaaacacaaaaatacttggaaatttaactatacagcaggtagagaacacagcatggaagggctggctaccaaaatagtaaaatataatggaagccaatggtccaggaagcaaaaatatcattatcttaaaattaaggcagtatctaccatggcctagagggtgcacaactagaattagaagtttaggagagtggtcacaggtagagatgagtggtcacaggtggagattagtagctacattcgagattggatgggactagatgggggagtcagacggatccaaaaaaatgaggaaatggtatggtttatctctaaatgtcatgccttgaaaggctcaagttccagacataagacatcacttggtcgctgacatatgcttcaaagcaactatctccctacctctgtctcctagtcttccttcagactggataaacttggttctcgtgtcagctctgagatccaccatcccttgtcttcttcccacttcatttgtatagttcatattcattaygctggctgagttttcccctcaa

SEQ ID NO: 565224 - DNA, 561 bp, Homo sapiens
cttctgcccctccacagggaactttccactattctttcaccacaacagtctcctacctcatactattttgctggcacctttctttaccccctatgctagttcattttatgtgtcaacttgaccaggccacggagcgcccagatatttggttaaacattattctgggtatgtctctcaagagggtatttccagatgagattaacattttaattgccaggctgagaaaagtaggttgctctccctaatgtgggtgggcctcactcaatccactggggacctgaatgtgacaraaatttgagtaaaagaaaattttctctctctctgcctaatgttcttcaaactggaacactgatcttctcctgccttttgactcagactggaacttataccatcagttgtgtttctaagtcgtctgaaatgcagatcttgggactcaaacaaatgaaccaatttcttataataaatacatatatatatcctagatagatatatatatatataggtattttatgcctatatatagatttataaatctatatataaatttatatatatatagga

SEQ ID NO: 565225 - DNA, 486 bp, Homo sapiens
ctcctcctctagctaaagtgactttcaggaaatttaaaaggtggtgtcttcctctccctcctttcattttctctttttttttattttttgagagccatacattgacaagtaggacattcaaaagcaaccacatatatgagggaaattagaaatcaccataaacacccaggggaaggcacaggctcagaaaatgcctgagaagaccttaaatttacactcaggctgatccttggcacaaagatatcctaaataataaaaaaaaaaaaaaaaaaaaaaaaaaaacccccccaacctctgggaggggggtagattctgatttttagagttatcacacttttagattcaaatctccagttttcaaaaaaatcaaagggcttacagagatmctttaaagtttacccaatttaaaggaaaaaaatttttccaacaaaaactttccctgaaaaaaagacctgagggtagatctacaaaataaaaactttaaaa

SEQ ID NO: 565226 - DNA, 486 bp, Homo sapiens
ctcctcctctagctaaagtgactttcaggaaatttaaaaggtggtgtcttcctctccctcctttcattttctctttttttttattttttgagagccatacattgacaagtaggacattcaaaagcaaccacatatatgagggaaattagaaatcaccataaacacccaggggaaggcacaggctcagaaaatgcctgagaagaccttaaatttacactcaggctgatccttggcacaaagatatcctaaataataaaaaaaaaaaaaaaaaaaaaaaaaaaacccccccaacctctgggaggggggtagattctgatttttagagttatcacacttttagattcaaatctccagttttcaaaaaaatcaaagggcttacagagatccwttaaagtttacccaatttaaaggaaaaaaatttttccaacaaaaactttccctgaaaaaaagacctgagggtagatctacaaaataaaaactttaaaa

SEQ ID NO: 565227 - DNA, 549 bp, Homo sapiens
ctgctcttctgaactctaataggctaattcagaggtacattcccacattatttttattaatttgtgtaatggaaatacatctaccttcctcttatgtcttcttgagtatgtttaggaatgtgcttccaaactaaaatacttgaagtggcccytaatggtgagtggtggcccagtgacagagcttctcctttgagctcagtgtaagagggaaggctactctaatctatctgtaccagctgcaagtgtgtaaaaactccttgttataacccatgcatcacttctggacctaattttagcgactagtttgaagtatactttccttttatcataagttttacagaaatattgaagttagcacaagtttcagggtataaatttctgaagtgaatggaatcaatgggatcagcttcagatcccatgaagtgtaatggggtcacctagtgttcttaatgggtcacagtttctttaaaaaatcttacaggaactatgggccatattctgtaagcgaaagcaaatagacatcaattttgtatacagttttagaaagtt

SEQ ID NO: 565228 - DNA, 243 bp, Homo sapiens
aattttgccttcccaggatccatttccctttctttctattgtaagtcaatttcccaatgggacattatcttcatctcatttcacaaaggaggaaactgagtcacaaagaagtgaaatggcttgcttagggccatgcatctggcagatggaggtaatgagattcagatctatctttacgtaacccctactaatggtaccaccacacgtgaawaacagtacaatcccaggaaatggtcatgatta

SEQ ID NO: 565229 - DNA, 585 bp, Homo sapiens
agcaaaaataaataaataaataaatacaaattacaaatacgatagaaaagatcagcaaggctggccatagtggctcatgcctataatcctaatgctttgggaggccaaagtgggtggattgcctcagccaaggagtttgggaccagcctgggcaacatagtgagatctgtasaaaaaaatttttttaattatccaggtgtggtgatgcatgcctgtagtcccagttacttggaaggatgaggtgggaagattgcttgaagttgagcgacagtgagttgtgatcatgccactgcactccagctgggtgacagagtgagaccctgtcaaaagaaaaaaagaaaaaaagaaaaaaaagaaaagaaaacatcagcaaaacttaagttagtttttttaaagctaaacaaaattgacaaacccttacacagactaagaaaaagagaagattcaaataaataaaataagaaatgaaagaggagacattacaatggataacacagaagtacaaaggatcataagaaactactatgaaaaattatatgtgaacaaattggataacccagaaaaaataaataatttcctagaaac

SEQ ID NO: 565230 - DNA, 634 bp, Homo sapiens
tgctgaatcattttttctttgaagattttgatacccgatttgccttagaataaaactatgtagaggttagccagtggacataattttgaattgcataccacattaccaccgttgtaaaaacaaccgttaactttttcttcctaactgtgagttgggttttcatttttgtaatcttactttaactctgtggttctcaaatggggacgattttgcctcccaggggacatttgacaatgcctggagacatttttggttgctgtaacctggaagggtgctactggcatctggcaggtagaggccggggatgctgctgaacatcctacaatacacattataataccctcarcaaaaacatttttgaccccaaatgtcactagtactcaggttgagaactctgctatctttataactagctaaggacaagacattaaaagggaaatgtagaataactcatccagacttgtggagactaccaatttttttaaaattttttatttctatagggttttagggaccaggtggtagttggttacatgagtaagttctttagtggtgatttgtgagggggtggtgcacccatcacccaagcagtatacactgaatccagtttgtagtcctgtccctccccagcttc

SEQ ID NO: 565231 - DNA, 515 bp, Homo sapiens
aaatgaaatgaaatgaaatgaaatgaaaaaggtcatccaagccccaccccactgctcttttaggttcccgactctgtctttattttcttctttgtttgttttgagagggagtctcgctctgtcacccaggctggagtgcagtggcacaatctcggctcactgcaacctctgccttcccgggttcacgccattctcctgcctcagcctcccgagtagctgggactacaggcgcccaccacatgcccggctaattttttatatttttcgtagagacagagtttcaccatgttagccaggatggtctcgatctcctgacctcgtgatccgcccacctcagcctcccaaagcgctgggattataggcgtgagccaccgcgcctggcctctctttagtttcatatgcccaagactgagaggtgaagccsgctgggcttctgggtcaggtggggacttggagaacttttctgtctagctaaaaaattgtaaacgcaccaatcagtgctctgtgtctagcta

SEQ ID NO: 565232 - DNA, 572 bp, Homo sapiens
cttttctgtctagctaaaaaattgtaaacgcaccaatcagtgctctgtgtctagctaaaggtttgtaaatgcaccaatcagcactctgtaaaatggactaatcagcactctgtaaaatggaccaatcagcaggacatgggtggggccaaataagggaataaaagctggccacctgagccagcagcagcaacccactcgggtcggcttccacgtcgtggaagctttgttcttttgctcttcacaataaatcttgctgctgctcagtctttgggtccacactacctttatgagttgtaacactcaccgtgagggtctgcrgcttcattcctgaagtcagcgagaccatgaacccaccaggaggaacaaacaactccggacgcaccacctttaagagctgtaacactcactgagaaggtctgcggcgtcactcctgaagtcagcgagaccatgaacccactggaaggaaccaattcccgacacaagactatggaaaaacctagcagaaaacaggatctgcgagaacaaagagctgagcaaaagtttaattagacagttgtgcaatgctgcaaaga

SEQ ID NO: 565233 - DNA, 548 bp, Homo sapiens
tgagacaaaacagtcatttttaccatccattcaaccagatttcacagagtaagtctaggagcctgatttataagttcttaacttttactggcttgttaggatcctgggatctcttcactgtggccttcataagatcagaatggctttggaggtaccctgcttgctgtgccgtaactgtgggagccaacagagagctttccttttggtcttctgaaggttcactgaaaaatcaacgacatgagtcagattgtttaatagaataaaaggcatacaaatttatataatgtttatacactgtagccttcggaatgaagattctaccttctattttttgatgtaggcatttaacactataaacctgcctttagcactacttytgctgcatcccaaaggttttggtatattgtgtttctattttcatttatttcaaaaattttaaaaattttcatcttaatttctttattgacctaatggttatttaagagcatattggtttatttctatatatttgtgtagtttctggagttcctgttggtattgatacttct

SEQ ID NO: 565234 - DNA, 548 bp, Homo sapiens
tgagacaaaacagtcatttttaccatccattcaaccagatttcacagagtaagtctaggagcctgatttataagttcttaacttttactggcttgttaggatcctgggatctcttcactgtggccttcataagatcagaatggctttggaggtaccctgcttgctgtgccgtaactgtgggagccaacagagagctttccttttggtcttctgaaggttcactgaaaaatcaacgacatgagtcagattgtttaatagaataaaaggcatacaaatttatataatgtttatacactgtagccttcggaatgaagattctaccttctattttttgatgtaggcatttaacactataaacctgcctttagcactacttttgctgcatcccaaaggttttggtatattgtgtttctattttcayttatttcaaaaattttaaaaattttcatcttaatttctttattgacctaatggttatttaagagcatattggtttatttctatatatttgtgtagtttctggagttcctgttggtattgatacttct

SEQ ID NO: 565235 - DNA, 584 bp, Homo sapiens
atgatacttgccatcataaaaggacatataagtacaaagctcataatcctagaaagcattgaaactccaacacaacaggctaaaaactttatgacaggtacaaaacctcacatatcaatattaatcttgaatccaaataacctaaatattctacacaaaagctacaaagtggcaaattgtatttaaagacagacacagactcaaaacaaaggggtgtgtgatggttaacactgagtgtcaacttgattggatcgaaggatgcaaagtattgatcctgggtgtgtctgtgagggtgttgccaaaggagattaacatttgagtcagtcgagtgggaagggcagatccacccttaatttgggtgggcacaatctactcagctgccagcatggccagaataaaaattgggcaaaaaaaaaaaacagaaaaggagcttgtgcaggaatcccacatttttagaaccatcagatctcgtgagactcattcactattataagaacaatgcaggaaagacacacccccataacatgatcgcctcccataacacgagagaatcgtgggagttrcaattcaagatgagatttggc

SEQ ID NO: 565236 - DNA, 638 bp, Homo sapiens
ggtggtaggtatgtgactttatttctgggttctctattatatttcattgatctacatgtctgtttttgtactagtatgctgatttggttactatagacttgtatataatttgaagaaaggcaatgtgttttcttgggattgcattgactaattgggctcttttttggttccacrtgaattttagaatagctttttataattctttgataaatgacattggtaacttgataaggatttcattgaatctgtagattgctttgggtagtatgaacattgtaacaatattaattcatcttagccatcagcatggcatgttttcccatttatgtcgtgtacaatttctttcacaatgtttgtggttttccttgtagagacctttcacctccttggttaaagttattcctaggtattttgtgtttttgtggctactgtcaatgagattgagttcttgattcggttttcagcttgaacattgttggtgtatagtgatgctactgattcttgtatattgattttgtatcctgaaactactgaagtcgtttatcaaatctaagaatattttaaaggagtctttagggttttcttggtatataatcatgtcaccagtaaacaaagataatttgacttcatcctttcca

SEQ ID NO: 565237 - DNA, 551 bp, Homo sapiens
caacaagtctctaggaagttccaaactctcccatgttttcctgtcttcttctgagccctccaaactgtttcaacccctgcctgttacccagctccaaagttgcttccatatttttgatatcttttcagcagcaccccactctactgataccaatttactgtattagtccatttttatgctgcctataaagacatacctgaaactggccaatttacaaatgaaagagttttaatggagaactcacagttccrtgtggctggggaggcctcataatcatggtggaagacaaggagaggcaagtaacatcttacatggatggcagaacttgtgcaggcaaattcccatttttttaagccatcaaatgttgcaagacttatccattatcataaaagcagcactggcaagacccgcccccatgattcagttatcttccatcggatccctcccacaacacatgggaattatgggagctgcaaggtgagatttgggtggggatacagagccaaactatgtcaacaagattaggtagttaatttgagatatgtcggtct

SEQ ID NO: 565238 - DNA, 530 bp, Homo sapiens
ctgaaaaaaaagagagagagagagaagatccaaataaataaaatcagaaatgaaaaaggagatattacaatggatactctagaaattcaaaggatcattagtggctactatgagcaactatatgccaataaattggaaaacccagaagaaatgtacaaattcctagacacatacaacctaccaagattgaaccatgaagaaatccaaaacctgaatagaccaataataagtaatgagatcaaagccataataaaaagtctcctggtaaagaaaagcccaggactcaatggcttcactgctaaattctatcatacatttaagaaagaacccataccagtctaactcaaactattccaaaaagtagagtaggaaggaatacttccaaactgatygtacaagggcagtattaccctgatacgaaaaccatacaaagactcatcaaaaaaatagaaaattacaggccagtatcaatgatgaataatgatgcaaaaatccccaacaaaatactagcaaaccaaaatccataactc

SEQ ID NO: 565239 - DNA, 530 bp, Homo sapiens
ctgaaaaaaaagagagagagagagaagatccaaataaataaaatcagaaatgaaaaaggagatattacaatggatactctagaaattcaaaggatcattagtggctactatgagcaactatatgccaataaattggaaaacccagaagaaatgtacaaattcctagacacatacaacctaccaagattgaaccatgaagaaatccaaaacctgaatagaccaataataagtaatgagatcaaagccataataaaaagtctcctggtaaagaaaagcccaggactcaatggcttcactgctaaattctatcatacatttaagaaagaacccataccagtctaactcaaactattccaaaaagtagagtaggaaggaatacttccaaactgattrtacaagggcagtattaccctgatacgaaaaccatacaaagactcatcaaaaaaatagaaaattacaggccagtatcaatgatgaataatgatgcaaaaatccccaacaaaatactagcaaaccaaaatccataactc

SEQ ID NO: 565240 - DNA, 504 bp, Homo sapiens
aatgagaagtgagatagtcagaagccagatgtgaagaaaaaagtgctttcaagtttccttaaaaggcagcytcaaaaacacttaatatggataagtaactaagaaagaacagtagcaagtaacaatcaacctggaaaaaaggtgtcagggacagatgacttttcatgagcatcttcagagcatgaatctaaaagacagagatgcaaacagtgttaggttgttgaaaaatattctgaaaatgcttacagtccaaggaaaatgcttcgtaggtgatggaagacatcatcatcttttctactgaaaccatatacatatataggtgacatacttgaataggattcattgctagatattaagggtcttaataattgtgtttgggaagttgaagaaaagcaaattatgaaactgttaaatcaagtttacaaaataaattccacttagaactgtgactttagcttacatcctgaactcttaggttttgtttgttttttgtttggttggttt

SEQ ID NO: 565241 - DNA, 590 bp, Homo sapiens
taccccaaattatcttggaaaggtagagctacttcattagcggtactgcagatgcacctggtgaacaaaatatacattttctcttttttttcataattggacctgctgagattgagtggagcacatgtctatccatctagagaggacacttgtcagactcccctatagttgtagccatatgactacattgtaaacagaagtttgttacaccctctcctagtctttccattaagataatttgagtgtgtactaccctggctttttctcccttcctgctgggtgggagattgtgtatatggaagtaacgactttggacttgaaaatataagcracattttggaaatggaaaaatccatctagtcaatccagagtaggtgaagaaacattctactactcacccacctcttaactctttctttctttctttctttcttttttttttttttttttttgagacagagtctcactctgttgcccagcctggagtgcagtggcacaatctcagctcactgcaacctctgcctcccgggttctagtgattctcctgcctcagcctctcaagtagctgggattatagacacatgccacca

SEQ ID NO: 565242 - DNA, 590 bp, Homo sapiens
taccccaaattatcttggaaaggtagagctacttcattagcggtactgcagatgcacctggtgaacaaaatatacattttctcttttttttcataattggacctgctgagattgagtggagcacatgtctatccatctagagaggacacttgtcagactcccctatagttgtagccatatgactacattgtaaacagaagtttgttacaccctctcctagtctttccattaagataatttgagtgtgtactaccctggctttttctcccttcctgctgggtgggagattgtgtatatggaagtaacgactttggacttgaaaatataagcgacattttggaratggaaaaatccatctagtcaatccagagtaggtgaagaaacattctactactcacccacctcttaactctttctttctttctttctttcttttttttttttttttttttgagacagagtctcactctgttgcccagcctggagtgcagtggcacaatctcagctcactgcaacctctgcctcccgggttctagtgattctcctgcctcagcctctcaagtagctgggattatagacacatgccacca

SEQ ID NO: 565243 - DNA, 575 bp, Homo sapiens
ttgtttttattttttctactcagggtcatccagtggcttcatttattcaaataagcatcctttaaagcaattattcattctgagtaactgaatggagctcagtgtagcaaagcagtctacaatctgcttcgtgattacctatgacatttcttgggcaaaataaacyacatttcttttttcatgaaagtggctacatcagcaaagacccagagcagtcaactcactgatgacagtcacgtgatttcctgaatttcacaaataagttgtcagttaaaaacaaaacaaaacaaaacaaaaaatgtctatggggaccttacaatttctaagcttttattcttccaggaaatgatatttagaatgcaactaccatctgatattgccattatttcattaaaaatattaaatttcaatccctaaaacttaggatgtatctacaaagggaaaaattacagcattaaatgcatttttattttttatatattcttctttatacatttattcattaatggagtaattgactgattcattgtttcatttcatttcataaaatcttttttgtgtgtgtgaataaggat

SEQ ID NO: 565244 - DNA, 575 bp, Homo sapiens
ttgtttttattttttctactcagggtcatccagtggcttcatttattcaaataagcatcctttaaagcaattattcattctgagtaactgaatggagctcagtgtagcaaagcagtctacaatctgcttcgtgattacctatgacatttcttgggcaaaataaactacatttcttttttcatgaaagtggctacatcagcaaagacccagagcagtcaactcactgatgacagtcacgtgatttcctgaatttcacaaataagttgtcagttaaaaacaaaacaaaacaaaacaaaaaatgtctatggggaccttacaatttctaagcttttattcttccaggaaatgatatttagaatgcaactaccatctgatattgccattatttcattaaaaatattaaatttcaatccctaaaacttargatgtatctacaaagggaaaaattacagcattaaatgcatttttattttttatatattcttctttatacatttattcattaatggagtaattgactgattcattgtttcatttcatttcataaaatcttttttgtgtgtgtgaataaggat

SEQ ID NO: 565245 - DNA, 574 bp, Homo sapiens
acagacacccaccaccacacccagctaatttttgtatttttagtagagacggggttccaccaggttggccaggctggtcttgaactcctgatctcrggtgatccgcccacctcggcctcccaaagtgctgagattataggtgtgagccaccatgcccagctacatatatatgtttttgcctttccaattagataacaaatctttgagggtgggagccaggcttgtgatttttctagtattgttccagagtatcctgcgctgggctcagcacaaaacagttgctccataaagtctagttggatttaattgaagtacttctgtagcaaaactttgcagcacttactttggggcagctttctcagctggtaagtatcaatgaaaacttaaatgactgtgaaataaattatcttaaatgtaaaagtcaaaaataaaaatcaattacttttctattttgttcaatggtttttatggaaaatataggcttgcctatcctcacctactaagttgtcatacaacaatatatctgaataaataagattttctggtaacacattgtatattttgaatgaaattc

SEQ ID NO: 565246 - DNA, 473 bp, Homo sapiens
agatctctttggagactatattacaactgagattgagatattacaactgagagtgagatatttaagaaagccctgggcaaactgggaatgtgtattgrtttcctttctaagtgaagaccagtggtttctgattgtctttgttgacggggaaagagaagtatgtactagataaataactagatgtaatgccatgtagctgcagccatatgtatctgctctagcaaggataccacctctatcatggcagctgatcagcctgctacctgaagtaatctataatcatccttcaagtctagtcacttctggcaggggccagactcacaaatataatggagctataatagacacaccaccaaccctctattatttagaaacattttttttttcagacagggtgttgctttgtcacccacactgagctcaagtgatccttctgcctcggcctccccaggtgctgagattataggcatgag

SEQ ID NO: 565247 - DNA, 614 bp, Homo sapiens
ttaatgggtacagcaaaacaaaaagaatgagtaagacctactatctgataacatgacggagtgactatagtcaataataaccatacactttaaaataatttaaagagtgtaactggatatttgcaagtccatggataaatacttgggggaatggataccccattcttaacaatgtatttatttcacattttaatgactttattgaaacatatcatgtaccccctaattatatatacctattatgtaccctcaaaaattaaaaaagtaaaaggcacttcaaattatattctaaacaccattgtgatacaattacaactagacattttgataagatctttgagtgccaggaaaaataagtgcctcttgtatattagtgaagctgaggcatcattgtttcataatcagtgggaacaattctcaaccatagtgggcttgtcctgactgtatttctgccaggcctttcttatatagcccttgtttcttcctagtgttttatggattcctaaaaagttaacaaaatcctaaaggaatctgtgaagaaggaagcaaagagagtaaagagaaaaaaagagagwttaacaaaccatattcattgataacagaaataatttgtg

SEQ ID NO: 565248 - DNA, 390 bp, Homo sapiens
ttttgacctgtagttgtaaatttaaagtgagaccagtcaactgtgtttttctgtggtgatattcagctgttttagtacaggtgagaagttagaagttagagtttggtttatctgaattcagattttgtgaagccaataaaataaaaagtcaagaaaattaggtatatatgcaaagtgcaaaatgcgatgggccttggaattaaacttgtaaagaagggaataaagacatcaaggagatgaaggacactcactaatggtattaaaatggtatggttaactactagaggtcctaatgcataaaaagtttgttagactctgtcttatggagaawtactccataagacatagttagagtctgtcttatggagaattactccataagacatagtt

SEQ ID NO: 565249 - DNA, 565 bp, Homo sapiens
ggtaaaatacatttagtgttacatcaagcctctaaattttgaaatcatttaatatgttcaaaaaacccaaaacactggtagggtcacaagtcccttctaatcccatgatgtatttattggaaaattcccatttacgtaataaacaattgtgatactgttgacatccactctctagaaaatgcagtgcactagtagctcccttcgtgcccccagtccccttgtagcttagacattcttgcttatgttgcaagaaaaagcctgtcagaaccaagtgaaatgatagtgctggatattgacaggttgcaaacgtatgcatatgcatgctctcattcttcattattccctttttaacccctttattcatccattcatccttttatttgcactcatccaacaataaatatttattcaacatcttttgtcaacagtmaccatcctagatctggtggacaaaagagatatctggattaaaacaaatcttctgttcttggatctaaaaagtctaaaagagaagaaattaaaataaattttaagaaactttaaaatactaaaaatcagttaaagc

SEQ ID NO: 565250 - DNA, 565 bp, Homo sapiens
ggtaaaatacatttagtgttacatcaagcctctaaattttgaaatcatttaatatgttcaaaaaacccaaaacactggtagggtcacaagtcccttctaatcccatgatgtatttattggaaaattcccatttacgtaataaacaattgtgatactgttgacatccactctctagaaaatgcagtgcactagtagctcccttcgtgcccccagtccccttgtagcttagacattcttgcttatgttgcaagaaaaagcctgtcagaaccaagtgaaatgatagtgctggatattgacaggttgcaaacgtatgcatatgcatgctctcattcttcattattccctttttaacccctttattcatccattcatccttttatttgcactcatccaacaataaatatttattcaacatcttttgtcaacagtcaccatcctagatctggtggacaamagagatatctggattaaaacaaatcttctgttcttggatctaaaaagtctaaaagagaagaaattaaaataaattttaagaaactttaaaatactaaaaatcagttaaagc

SEQ ID NO: 565251 - DNA, 466 bp, Homo sapiens
ttaaaaacatttatgacaccaagtaccttccaaccaccgaatactgcataagtaccttcgtaattcatcatgtgaacaattacatattaactaataatttagtaatattggaagcatacatgtaagtatgtacaatctgtagctttcggggcctatttagaaggacttcgtaatgcatggattggcatttagataagtgaaaaaatagggacagctatggggagtgactaactagtcactctgtaactccgccttttcttttgcttgctatgtcagttcacataagtagacggttacaaaagtaagcgaaatgtttgtttcactcagtatgccctggttaaagttctagtaatgaacaatgccaaaatctcagtgacttacatcaagaatggtagacccctttctccctctgcatgtgcactgcaggtcaatgggggaacaytgtacatcagagcagtcatcatct

SEQ ID NO: 565252 - DNA, 584 bp, Homo sapiens
gtaaacaaggaccaagtatacacccacccagtcatgctggcagcagacagcgtttacctataagcgccatctactggcttgtagtttaaactgcacaactcaatatgaaaccagctgacatgcgtgcttatggctgtacaagcaaagccaaaagatcctatccaacattctatatacacatacaccctaaggcgatgggaaagggaaagggaaggagcaaatgatgatactataggacaagaaagaaaaagaaaaaaaatcctacctgcataaaaataattacaaaaattagaagtgccaacatttccagttgagaagcaaccagagcaaaaattctgcaccatgaaaaatctgaatgtagtgccaccaccaaagaatcacactagctttccagcaatggtccctaaccaaaatataaactcagaaatgaaagataaggaattcaatacgtggattgcaaggaaactcaatgaaattcaaggttgaaaattaacacaaacaaacttmtaaagcaatccaggacaatgaaggaagagataaacatcttaaaaagaaatcaatcagatattctgaaatagaaaaac

SEQ ID NO: 565253 - DNA, 550 bp, Homo sapiens
ctattgattactgtacaaactgaaaacgctaaaactattaaaacgttatctaactttacttcagtggcagaatattccatgagccatgcatttgttaatgataactcattatctttagtgttaaagtaagatggcttcttagaaggaattttgtctgctgatccatagtgaaagcaaaataaatatttttctttgttttaaagttgattgcctctagagatttataatgacatgtctagaagccatcacttcctctcctgagccacagtttgcactgtacttgattcaacatttcactaattcctttacattaaaaaaatgtaatatttaattttttttcaaagttgtttttgtttgtttgtttgtttgttttgcgatggactctgtcatccgggctggggggcagtggtgcgatctcggctsattgcaacccccacctccagggatcaagtgattctcctgcatcagcctccagagtagctgggattacagacgtgcaccaccacccctggctaattttgtatttttagtagagatggggtttctacat

SEQ ID NO: 565254 - DNA, 550 bp, Homo sapiens
ctattgattactgtacaaactgaaaacgctaaaactattaaaacgttatctaactttacttcagtggcagaatattccatgagccatgcatttgttaatgataactcattatctttagtgttaaagtaagatggcttcttagaaggaattttgtctgctgatccatagtgaaagcaaaataaatatttttctttgttttaaagttgattgcctctagagatttataatgacatgtctagaagccatcacttcctctcctgagccacagtttgcactgtacttgattcaacatttcactaattcctttacattaaaaaaatgtaatatttaattttttttcaaagttgtttttgtttgtttgtttgtttgttttgcgatggactctgtcatccgggctggggggcagtggtgcgatctcggctcattgcaacccccacctccagggatcaagtgattctcctgcatcagcctccagagtagctgggattayagacgtgcaccaccacccctggctaattttgtatttttagtagagatggggtttctacat

SEQ ID NO: 565255 - DNA, 550 bp, Homo sapiens
ctattgattactgtacaaactgaaaacgctaaaactattaaaacgttatctaactttacttcagtggcagaatattccatgagccatgcatttgttaatgataactcattatctttagtgttaaagtaagatggcttcttagaaggaattttgtctgctgatccatagtgaaagcaaaataaatatttttctttgttttaaagttgattgcctctagagatttataatgacatgtctagaagccatcacttcctctcctgagccacagtttgcactgtacttgattcaacatttcactaattcctttacattaaaaaaatgtaatatttaattttttttcaaagttgtttttgtttgtttgtttgtttgttttgcgatggactctgtcatccgggctggggggcagtggtgcgatctcggctcattgcaacccccacctccagggatcaagtgattctcctgcatcagcctccagagtagctgggattacagaygtgcaccaccacccctggctaattttgtatttttagtagagatggggtttctacat

SEQ ID NO: 565256 - DNA, 444 bp, Homo sapiens
ataaactcctgaaaaaattcaacatcaattatgttggagtaaattgctgaataattaataaaaacattgctgaaaataaaaacattgctgggaaaaataaagattaaaaaatagaaatttacaaaaattctgaagtagacaaaaataaatttactayatttgtggattgaaataataaaagaaaatcaacctttgctatactttcagacataatgagcatattactttcaaaggaaaactcaaggagtcaacttctcagatgccatatgactaggtgtgaaacaataacacaatacctacaaaactagttatacaaaaagaacgcaatcctaaattttatagacagccgtattatctgtcatttgttatgaaggaaaaaaagtatgacttggtaagagttcagttaataggttacccaaatatctaatccaaagacattactaa

SEQ ID NO: 565257 - DNA, 437 bp, Homo sapiens
aagtcaagaagttgtctttaagtcttctctttctctgttacctcatacccaattcatgggcaatgcatattaactctaccttccaaatttatcccaaatcctgccacttcttactacctctgttattagtggacttggggaaggcacagttatctcttatatgaatctccacaaaagcttcctaactggctttcctcattccacacttcctttatgctcttttcttctcttagaggtcaagataatcttttcaaaaagtaaatcctagccaggcacattggtgtgtgcccgtagttccagttatctgggagtttgaggcaagaggatcacttgagcccagtagttcaaggccagcctggacaacgtagtgagacccacatctgaaaaaaaaaamaaaaccaaaagaaaacaagcaaaacaaaacaaaacaaaaaaac

SEQ ID NO: 565258 - DNA, 575 bp, Homo sapiens
acttcttttctggatatacataaacttaaaagttttctattttgtggtactgtaagctgtttaacaaaatacatatatataattaatattgaagagagttactatggcaatccatgaataatgggtctgtgcttctttagtaggagggtcattaacatatttttacaaataactttattgttaaatgaaataaaagagaactgtaagaaaaagatactttagaggaattctttttcattttttctaattatatttattttagttctttcactttttgtatcattatagtcatagacaaatgaaagcagatgttttaaaagtcagatttattttaaactgcaataaagatcgatggaaatgttcayagcactatctaactcaaagtaggccatcagactgttattgaaatgctatgtttgtggaataaataaatggagtaaataagcatctgacatatacatttatttattccacaagcattattatttttagagatccccatgtggcagatatcacaggtagtctgaaagttccaagccacagtctcatttcttaataaacttaagatatgtgtg

SEQ ID NO: 565259 - DNA, 560 bp, Homo sapiens
aaaataacagatttgtcacatagtctaacatatgagaaatatgaagaggcccaaaaacctggcaagctttctcttcaggacacttattgttttcttgggctacattagaggcaggagagctataatacagactttaaagmgccaaaaaatcccatctcgctcgatatttaggagttaaatgactactatacaaaagaggccttcttcaatctttcaatcactctctctattaagatatttgaaaggcttgaaatctatgcagccaaagggacagtatggaaagaaggcaaaaatgtatactcaaaacccatgcagggcaaaacagaatcctcataatcttcaatatctcaatctaaactccatattatttcagcaccacattctgcagactctcaaggacagagaagacatatgaagcatatttcttcttaatgccgtacaagaggctaaatattttttgggttttattattttgcttctcagctctgataagaaaatatagtattttttttttaaagttttcaatacacataagtcttccaaaggccaaaagaagaatt

SEQ ID NO: 565260 - DNA, 603 bp, Homo sapiens
ttgtaaattgcccagtctcaggtgtctttatcagcaacaggaaaacagactaatatatctctctcctggaaatagcaattggtgcttaatagctttactttcatgctaaatgttccaacattatcagttttccacattggagaaagaatggttctttcaaaatacaaattttgtcatgccatcttcagactaaaaactaattatttctcttctagttttcttggaatgaaaaccaacaacctctamggctcttggtgatgtgtttccaggctttaccccaagtccttttttaagattttgttgttaacttttcttcctgaatcagcgttttccctggtctcacagcaaatggtgggtttcctgccctatgctccctctgttccatgtaatttttcttcagagtattaccagggtttgaaataacatgtatatcttttaatattacttatgcttatttgtgtcactagtctaataagattcacaagggaaaagactatgcttttctaacacaccattatacctccaaagtgtaacacagtgcctggtttatggaagaaattcaatattttaaattgatttatgtattagtagatggatgaatga

SEQ ID NO: 565261 - DNA, 535 bp, Homo sapiens
tttcaaaaatttttatataaaatttgtgtgggtacatagtaggtgcatgtatttatgaggtacatgcataatgtacctttgatacaggcgtgctatgtgtaataatcactttaggctaaatgaggaacccatcacctcaagcatttatcctttgtgttacaaacaatcccattatgctctttaaattatttttgaatgcacaattaaattattattgaccgcagttaccctattgtattatcaaatactattctttattctttctwttttttttgtgtccattaagcatccccacttccccccaccccatactatgcaccccagcctctgataacctttcttctatttttatctctatgagttgaattgttttaatgtttagaacccacaaataagtggcaacatgtgatcttcatctttctgtgcctggcttatttctcttaacataatgatctccagttttatccatgttgctgcaaatgacaggatctcgttcttttttatggctgaatagtactccatcttcattgcatct

SEQ ID NO: 565262 - DNA, 535 bp, Homo sapiens
tttcaaaaatttttatataaaatttgtgtgggtacatagtaggtgcatgtatttatgaggtacatgcataatgtacctttgatacaggcgtgctatgtgtaataatcactttaggctaaatgaggaacccatcacctcaagcatttatcctttgtgttacaaacaatcccattatgctctttaaattatttttgaatgcacaattaaattattattgaccgcagttaccctattgtattatcaaatactattctttattctttctattttttktgtgtccattaagcatccccacttccccccaccccatactatgcaccccagcctctgataacctttcttctatttttatctctatgagttgaattgttttaatgtttagaacccacaaataagtggcaacatgtgatcttcatctttctgtgcctggcttatttctcttaacataatgatctccagttttatccatgttgctgcaaatgacaggatctcgttcttttttatggctgaatagtactccatcttcattgcatct

SEQ ID NO: 565263 - DNA, 582 bp, Homo sapiens
ttcagttttaatgttatcaataagtaaaatgggaaatttgtagttactgccagatgagataccatgaagtacttaatcaaatgatgttatgatatttgaaactttccattaagaaacastgtattcatgaaaaatacagaccatcagttctacccttcttaaattggagccaatctgaagtatgaaattctatatccattgcaactggggaaatatcattttgaaacagagatatagtgtcacgtttgcttaatattatcctatagattaaaccaattttattagctcaaaacatatttattttttacaaatgaatgtagttctttaggttaaaagaatattgataaacagagaaataaacaatttattctaatgaggaaaggaaaattaaaattaaaatgtttaagtaaaagcaaatgtagatgttagatattgaaatggtaataagaaaaatctaattcccttcacagtgtatctccaagaataggaaaaactgcaacgattaaaaaattggtcatctaactctgatttaattgattacaatacaatcttttctgtagtagaatgaaataatgaacggca

SEQ ID NO: 565264 - DNA, 569 bp, Homo sapiens
aatcacaaaaaccacgggaagcatcctaaactaaatatttataactcagctcagctggagcttttctaagcctttccccagcttcagctcttaaggaaaataattcccattcatatgtatagtggataaagggcacaacagcagagacttttaaaaacctgtccatcattttatcttctttttctagcactatgtcagagtctctgtaaataaccaataaatatttgctaaactaagtatttggttaattggttaaataaaatatgatatataatggatgaagtaactctagtgattagtcatgatgttcctggatattggctgatgacataaaaccatgtacatgatcgtggcaggcaaaatagtgggctcttaacgatgtccacattyttatccctgggacctgtgactttacatgtcagaagagactgtgcagatgtgattaggtaaagtatcttgaaaattaattctggattatccacatgggcccaatgtaatcacaaagatcctaataagggagaagggaagaggcaagagagtcagagaaggctacacgccaagtaagcagg

SEQ ID NO: 565265 - DNA, 576 bp, Homo sapiens
tattataatctctggggatcgtttttatttctgttggatcagttgtaatgtcacctttgtcatttctgattgtgcttatttagatctctctctttttctttgtcaatctagctagcagtctttcaattttttttatcttttcaaagaacaaacttttgagttagtgatttttygcatgaattttggggtctcaattccattcagttctgctccagttttagttatttctttccttctgctaactttggggttaatttgttcttgtttttctagttcctctaggtatgatgtcagattattaattagagctattttaaactttctgaggcacacatttagcgctaaaatttccttttaacaccacttttgattcttcccagaaattcaggtatgttgtgtttccactttcatttatttcaaggaattgctgtatttctgccttaattttaccaaaaacaaatactgacaagtaggacataattaaactaaagggtttctgctagcaaagaaaaactttcagtagagtaaacatatgacctatgaaatgggagaaaatattcacaaattatgcatttg

SEQ ID NO: 565266 - DNA, 615 bp, Homo sapiens
gcaaaaatcacaagcattcttatacacctataacagacaaacagagagccaaatcatgagtgaactcccattcataattgtttcaaagagaataaaatacctaggaatccaacttacaagggatgtgaaggacctcttcaaggagaactacaaaccactgctcaaggaaataaaagaggatacaaacaaatggaagaacattccatgctcatgggtaggaagaatcaatatcgtgaaaacggccatacttccccaggtaatttatagattcaatgccatccccatcaagctaccaatgactttcttcacagaattggaaaaaactactttaaagttcatatggaaccaaaaaagagcccgcatcgccaaktcaatcctaagccaaaagaacaaagctggaggcatcacactacctgacttcaaactatactacaaggctacagtaaccaaaacagcatggtactggtaccaaaacagagatatagaccaatggaacagaacagagccctcagaaataatgccgcatatctacaactatctgatatttgacaaacctgagaaaaacaagcaatggggaaaggattccctatttaataaatggtgctgggaaaactg

SEQ ID NO: 565267 - DNA, 562 bp, Homo sapiens
gtagattattgtatatataataacataaataatgtttatattataaaataacataaataatgtttatattataaaataacataaataatgtttatattataaaataacataaataatgtttatattataaaataacataaataatgtttatattataaaataacataaataatgtttatattataaaataacataaataatgtttatattataaaataacataaataatgtttatattataaaataacataaataatgtttatattataaaataacataaataatgtttatattataaaataacataaataatgtttatattataaaataacataaataatgtttatattataaaataacataaataatgtttatattataaaataayataaataatgtttatattataaaataacataaataatgtttatattataaaataacataatgtttatattataaaataacataaataatgtttatattataaaataacataaataatgtttatattataaaataatataaataatgtttatattataaaataatatgtttatat

SEQ ID NO: 565268 - DNA, 503 bp, Homo sapiens
ctgtccttccaaagggaaggacatctacagcaggcttggaaaagacacacagatagctctgttacttcttgtgcattttgaatgactctttcaacagaaccatgcttcttatgtagttctgtccttataatcgaaaaaaataagacccattcaagtcttcytctctagcctctcaagacataacatgataccatttggaagccagttgggagcatcatgtcttcacccaagcccctgatgtagaagtcaacttccctcatcccagcccatggagactcatcttcttattggctcctgctgcccaaactggtagtcctcagctccaatttccctttgtagattaaggtactgttgccagcataagaggtatggggcaggggaaaacttgtgactgacccagatcagcctacttgccaatagggtgtatgattcctcagtatttcttaaaaacaaatgagctgatgtttgccagacaccttctcagaactccttactgccccccc

SEQ ID NO: 565269 - DNA, 503 bp, Homo sapiens
ctgtccttccaaagggaaggacatctacagcaggcttggaaaagacacacagatagctctgttacttcttgtgcattttgaatgactctttcaacagaaccatgcttcttatgtagttctgtccttataatcgaaaaaaataagacccattcaagtcttcctctctagcctctcaagacataacatgataccatttggaagccagttgggagcatcatgtcttcacccaagcccctgatgtagaagtcaacttccctcatcccagcccatggagactcatcttcttattggctcctgctgcccaaactggtagtcctcagctccaatttccctttgtagattaaggtactgttgccagcataagaggyatggggcaggggaaaacttgtgactgacccagatcagcctacttgccaatagggtgtatgattcctcagtatttcttaaaaacaaatgagctgatgtttgccagacaccttctcagaactccttactgccccccc

SEQ ID NO: 565270 - DNA, 561 bp, Homo sapiens
ttttcttttcttttttttccttttttttttttttttctttgagacatggtcttgctctgtcacccaggctggagtgcagtggtgcactcacggtttactgcagccccaacctcccagggctcaagtgattctcccacctcagcctcccaaagtgcttggatttacagtaggccactgcacccggtgtatgtttacttcttacagtcattccaattaatataataaatggctctacatactttgtgaccacagaaagtgtatattttcagaagttggctgtttattccattcagcagtagagtcagaatggaatatgattaggtcatgtaaggtataagtcagttataaaactcttagcaagggtcaaaggagagrcagaatgaccttggaggaatacaaggttgcaatagcacaaattctttgtgcaatttatagagcgatggttgtacactcagtggtgccagggaataggctgataacaccagtgatgacaaaggttaggtaaaaggaaaaacaagtaaacaaagctggagaactctggttctctctaaaaggaagcca

SEQ ID NO: 565271 - DNA, 500 bp, Homo sapiens
caggttaaaaaaaaaaaatttcctactgagttaaccaggaagcagcaactctacaaagaattctcgatgtacttgtgaccgatattttatccacatattcagccatttatccaataagcatttcttgaattctattgcacactggcctaggtgctggatgtacagttagacacayctatgtcctcaaaaaaaagaagtccacagggacttacgtggacaagtgaagcaggtagttacagtgcagagtgacaagtgccaaacaaagcacatctacacttgggtgccctgaaaatgcagaggactctgaaaccacttctatttaaaattatcttccctgaaagggtttgatgtgtagtggcttacagacggctgcccattctgtgctatcctcccatctacagggggaccgttgagtcctggctggcactcagacttgtttgggccaatccagtgtggatgaagggatcctgtgtgatttgagactgggcctcatgggatct

SEQ ID NO: 565272 - DNA, 500 bp, Homo sapiens
caggttaaaaaaaaaaaatttcctactgagttaaccaggaagcagcaactctacaaagaattctcgatgtacttgtgaccgatattttatccacatattcagccatttatccaataagcatttcttgaattctattgcacactggcctaggtgctggatgtacagttagacacatctatgtcctcaaaaaaaagaagtccasagggacttacgtggacaagtgaagcaggtagttacagtgcagagtgacaagtgccaaacaaagcacatctacacttgggtgccctgaaaatgcagaggactctgaaaccacttctatttaaaattatcttccctgaaagggtttgatgtgtagtggcttacagacggctgcccattctgtgctatcctcccatctacagggggaccgttgagtcctggctggcactcagacttgtttgggccaatccagtgtggatgaagggatcctgtgtgatttgagactgggcctcatgggatct

SEQ ID NO: 565273 - DNA, 500 bp, Homo sapiens
caggttaaaaaaaaaaaatttcctactgagttaaccaggaagcagcaactctacaaagaattctcgatgtacttgtgaccgatattttatccacatattcagccatttatccaataagcatttcttgaattctattgcacactggcctaggtgctggatgtacagttagacacatctatgtcctcaaaaaaaagaagtccacagggacttacgtggacaagtgaagcaggtagttacagtgcagagtgacaagtgccaaacaaagcacatctacacttgggtgccctgaaaatgcagaggactctgaaaccacttctatttaaaattatcttccctgaaagggtttgatgtgtagtggcttacagacggctgcccattctgtgctatcctcccatctacagggggaccgttgagtcctggctggcactcagacttgtttgggccaatccagtgtggatgaagkgatcctgtgtgatttgagactgggcctcatgggatct

SEQ ID NO: 565274 - DNA, 510 bp, Homo sapiens
caggaacacgttgttcgatttccatttagttgtgtgttatgagtaaatttttcaatctaatttgattgtgctctaatctgagagactgttagtatttcagttcttttgcatttgctgmggagtgttttacttccaattatgtgatcaattttagaggaagtgctgtgtggtgataagaatgtatattctgttattttggggtggagagttctatagatatctatcagagccacttgatccagagctgagttcaggtcttagaaccattgctttttctcactgcagcctagagttattgctggtgatgattttccaaatctattttatgagacatataaatggtaaacagaatcctcccatgtggacatattcaaatgaaatcattctgcctatgccattgtgctgcatattatttcaagactcaggtattgagtgctgagatgcccaagtaaatacttatatggtggttgaaattgcactcatttgagagaattaattcagcaaaagttt

SEQ ID NO: 565275 - DNA, 527 bp, Homo sapiens
taataagtgacacacttaaattatctttgttaagaacatcacaaatagataaaacatttccaaattatccacatcatgaatttctttgaaaaagctcttactttcattattaaaatgttaccattaccttgaagagataaattgcttatgttttcaaaatattttgcacgataccatagtactgacagctatttgtcaccaccacaaaggtaagcaaacttgaagcacacatttttttacaaaagaaattatatttggcaattcttttaagttcgttagctggagatatctagtgaatccacaatagttgttcatgggtcctgacatctctcaggtattgtaaatatgcccatcatctaagataatgcaacccacttaactggggacatggggacaccaacaagacacaggcataaaaacaaatggagaagtaagggggcactttcaatscctttgtatgctgcagtcccctttcccttaagagacctcagaggtgatctctcatgactggctgacaaacatggcat

SEQ ID NO: 565276 - DNA, 555 bp, Homo sapiens
gtgcatacactctgacccactatggccttatccaaagaccatgaaaccatcctcmaaatagcataagggaacaagtaaaggcatatatactggtgggaatatgtggcctcctgcacttctcccactaaaaggggcaggacaaattaaaaagatctcagatttgtctccaaatcaaactccgtttgagtcccaggtctcccacttagtggttgtgttaacttgggaaagttacttaactgctgtgagcattggttttctcatctagaacatgtagttaatattacctgccttgcatgatggttttgaaaatcaaaaatcatgacatacactgtgtgtggtatatggaaatcttttgatatatgaaagctgcttatgtagttggtgtagccttttacttctccattaaattgcagtcagtctgggctgcagatgttcctttattgtgaggtggtactaacagggtccagcttgcctgggaagattgctttgaggagaaaagcagtatttctaggacagggtctacatgaggaaataaagctggcctcatctgtcctt

SEQ ID NO: 565277 - DNA, 659 bp, Homo sapiens
gaggaaactttatagctgtaaacactactcttaatggaaaaaaatctaaaatcaattatccaagtttgccttttaaaaaggtagaaaaaaagagaaaatcaaagccaaagtaagccaaagaaaataataaagatcaaagcgcaaatcaataaaatagaaaacagacagcaatgaaaaattgatacaattaaaatttagtttcctaaattttctttaaaaaggaaaattagtaaaagttcacctaaaatgaccaagaaaaagaataacatcaattaccaaaattaggaacaaagtagagtttttcactatagaacacagagctatcaaaatatttataagacaatgttacaaaaaactttataccaaatagattacatgaaatagacaaatttctagaaggacgccaattacccaaaactgggagttaggaatacatagcaaaatctgaatagacctatataaagtaaakaaattgtaatttaaaatcttcccacaaagaaaaatcaaagcccagatgacttctctgataaattctatcaaacaaacatttaagcaaaaagttgactgagttaaacccacatacacacgcacacacacacacacacacacacacacacactctctctctctctctctctctctttcagaaaatagaagcc

SEQ ID NO: 565278 - DNA, 659 bp, Homo sapiens
gaggaaactttatagctgtaaacactactcttaatggaaaaaaatctaaaatcaattatccaagtttgccttttaaaaaggtagaaaaaaagagaaaatcaaagccaaagtaagccaaagaaaataataaagatcaaagcgcaaatcaataaaatagaaaacagacagcaatgaaaaattgatacaattaaaatttagtttcctaaattttctttaaaaaggaaaattagtaaaagttcacctaaaatgaccaagaaaaagaataacatcaattaccaaaattaggaacaaagtagagtttttcactatagaacacagagctatcaaaatatttataagacaatgttacaaaaaactttataccaaatagattacatgaaatagacaaatttctagaaggacgccaattacccaaaactgggagttaggaatacatagcaaaatctgaatagacctatataaagtaaagaaattgtaatttaaaatcttcccacaaagaaaaatcaaagcccagatgacttctctgataaattctatcaaacaaacatttaagcaaaaagttgactgagttaaacccacatacacacrcacacacacacacacacacacacacacacactctctctctctctctctctctctttcagaaaatagaagcc

SEQ ID NO: 565279 - DNA, 636 bp, Homo sapiens
tattttctttttactgattataaactaatatctgctctttatataattacaagaagataacagagaaacagaaaaggtaagaaatagaaaagttttgwggggtataaagaaggccaggtgcagtggctcatacctgtaatcccagcaatttgggaggctgaggtttgaggattgcttgagctcatgggtttgagacaagcctgggcaacatagtgagactccatctctacaaaaaaagcttaacaaattagctgagtgtggtggcacacacctgtagtcccagttactcaggaggctaaggtgggaggatcacttgagcctgggaggttgaggctgcactgagccatgattgcaccattgcactccagtctgggtgacagagtgagatcctgtctcagaaaaaaagagaaacataaaaaataaaggcaactcattcatagtcctgttatagacaattcaaagtgtgttttagagtttctttgaagatacactgataggcctaaaaacatatagcaatatccgtttgtttagataaatgggcttatcctttattcatgtcaataaatatagttctgcatcatgatttttattgcttttcaggactcctttgtgtgatgtatcattatttaaataatc

SEQ ID NO: 565280 - DNA, 636 bp, Homo sapiens
tattttctttttactgattataaactaatatctgctctttatataattacaagaagataacagagaaacagaaaaggtaagaaatagaaaagttttgtggggtataaagaaggccaggtgcagtggctcatacctgtaatcccagcaatttgggaggctgaggtttgaggattgcttgagctcatgggtttgagacaagcctgggcaacatagtgagactccatctctacaaaaaaagyttaacaaattagctgagtgtggtggcacacacctgtagtcccagttactcaggaggctaaggtgggaggatcacttgagcctgggaggttgaggctgcactgagccatgattgcaccattgcactccagtctgggtgacagagtgagatcctgtctcagaaaaaaagagaaacataaaaaataaaggcaactcattcatagtcctgttatagacaattcaaagtgtgttttagagtttctttgaagatacactgataggcctaaaaacatatagcaatatccgtttgtttagataaatgggcttatcctttattcatgtcaataaatatagttctgcatcatgatttttattgcttttcaggactcctttgtgtgatgtatcattatttaaataatc

SEQ ID NO: 565281 - DNA, 636 bp, Homo sapiens
tattttctttttactgattataaactaatatctgctctttatataattacaagaagataacagagaaacagaaaaggtaagaaatagaaaagttttgtggggtataaagaaggccaggtgcagtggctcatacctgtaatcccagcaatttgggaggctgaggtttgaggattgcttgagctcatgggtttgagacaagcctgggcaacatagtgagactccatctctacaaaaaaagcttaacaaattagctgagtgtggtggcacacacctgtagtcccagttactcaggaggctaaggtgggaggatcacttgagcctgggaggttgaggctgcactgagccatgattgcaccattgcactccagtctgggtgacagagtgagatcctgtctcagaaaaaaagagaaacataaaaartaaaggcaactcattcatagtcctgttatagacaattcaaagtgtgttttagagtttctttgaagatacactgataggcctaaaaacatatagcaatatccgtttgtttagataaatgggcttatcctttattcatgtcaataaatatagttctgcatcatgatttttattgcttttcaggactcctttgtgtgatgtatcattatttaaataatc

SEQ ID NO: 565282 - DNA, 311 bp, Homo sapiens
atatttttaatgtttttgtcttttaacctttatactaaacaacatacaacattacagtatgaaggtattcttaatttgactgtrtatgtacttttatcagtgagttttatactttcatatgcttttgtgttactaatttttttccaactggaaggactccctttagcatttcttataagacagattgagtggcaaccaagtccctcaggttttatttgtgaaagtatctctcctttatttctgaaagacagcttttctgcatattcttagttggcagtttttttcccttcagcattttggatatgtaatct

SEQ ID NO: 565283 - DNA, 455 bp, Homo sapiens
ttaaaactagtcagccttttcattaaagttccaggaattcttactcagtccaaaacatatgattccacagttttcagaaacctctattcaagagtgcttttcacggtcctttccatcctttcatgaacctcctaaaatacaccatattctagaatttgtgtatgcttgtgcagttttcagaaactgcatcaacattaagcaattaacaatgaaaatgactttaaatagtcataaagccacaactgacatgtaaatttgattattttgtggtctaaaataacataacaaccacaactatgattaatagcatatactcagaaatattagaattatggaaatcccatacaagtttggaacatatattgayatcattcaccaagatataacctcttttttggatgcttcaggggccctctgtagcatcccaaatttagaggttggaaaagataattttg

SEQ ID NO: 565284 - DNA, 593 bp, Homo sapiens
tagaagctggtatgcagcatttgcattatcttttttctttacagaaattctatagtatccattttgtatktgaacatttatccaaaagtgtttttagttggaagaattattatttcttgaatttttatttctaattattacatgtatacataatagttgaacatatttatggagtacaggtaatatttgctacaactatacaatgtatggtggtcaaattggggtaatttggatattcatcacctgaaacattatttgtttttgttagaaacgttaattctattctttatttattttgaaatatgcaataaattattgttaactatagtcaccgtattgtgctaccaaacactaggttttattccttctatctaactgtatttttctgcccattaaacatcccttacccagccccattcccactacccttcccatcctctggtaaccatgattctactcttatctccatgatttcttttttttttcttatatttgagtaagaacatgcaatatctgtctttctgtgcttggtttatttcacttagcataatgaccttcagtaccattgcagttgctgcaaatgacagtatttc

SEQ ID NO: 565285 - DNA, 541 bp, Homo sapiens
tttgtcttgtgttatttaataattccaggatacagagccagaacacgagttataacagcagcacctgacaaacctgttgctgcacacatctgtactcttcaatcaataaaacctgatgcaaaaaacagaaaagggggagatgtaggacattggtcagkgtggtgggaaacgttataagaaaaagttatagggaaaggtgcaaaccttactggaaggccaggaggtttggcaaaagcttcgggagagaattatggctgaaggcagccaaattctcttatctggaggctaaaagcaaagggcagataacaagggaatgtaaaggaatttgtctagataaatttgtttactcctgtctccagaaaccaacttttgatcattcctgtgagctctttatttggggggtcgacaatgtttattacccacaaattgtgtttgcttcaagcctttgtaattaaatctgtactaaataaatgtgagcagggctgggttatgggggtggcactcttgctggcagttcgaagacattgtgggcccctagcca

SEQ ID NO: 565286 - DNA, 536 bp, Homo sapiens
gaaaatcaaagattttttttmtaaatcctgaaagaagccagagggggataaaacagctaattttattgcttttagtttgtgtgtgtgtgtgtgtgtgtagatatatagtaggtgtatatatttatggggtacatgaaatatcttgatacaggcatacaatgtgcaataatcacatcagggtaaatggggtattcattacctgaagcatttatcccttctttacgttacaaacaatccaattatactcttttagttatttttaaatgtaaaataaattattgttgacgggagtcactctgttgtgctataaaatactagatgttattaattctacctaattgtatttttgtgcacattaaccattgtctcttcccctagtcactatactttctagcatctggtaaccattgttctattctctatctccatgagttcaatcgttttaattttatttctcacaaataagtgagaacatgaaaagtttgtctttctgtgcctggcttattttgcttaaagtaatggcctccagttccatc

SEQ ID NO: 565287 - DNA, 622 bp, Homo sapiens
tctggtcaaactgagtatatattctcagttaaaggaagaaaatatttctattaacttctctgataattttaaagataatgatagtcttaaaagaatcttaggaaaaaagaatgtgtcttccatattaaaattatgctaaatgcactactaaccacaatctcatagcattttcagatatatccaacactttctgtctcggtaatgttcttacttaaactagaaaggtctccgttgaatgagaatactctacctcatgtttatagagcctcatactgtttagctgaatattttcagcagagtaagggcacaatgtagacaatggtttctatcctaaacagctgtgcctctctaagcctccagcttccttacyttcaaataagaagctgaacaaggtaattattcaggtctctttcagggtgttagcaaaaaatgaatcctgaatctacttgagagaaaaactgaagtaaaatattaaaggacgagaggtgaacaaatatttcacctcaaactcagctggacatattttctgagaaaattctaacaacaggaaacaagtctagagacagtactggcatcataatttgaatttttatcattttggtatgcattatttctaacaagc

SEQ ID NO: 565288 - DNA, 344 bp, Homo sapiens
ttagctttgtgtttctttgttaatttattcaggatgatggcccctaactgcatccatgttgctgcaaaagacattattccattctttttatgcgtgcatagtgttccatggkgtatatgtgtgtggtatgaatacactatagaactttgacattaaaataaacacttttccatcaaaagaccttataaaggaaataaaaagacaagccataagcagagctatttgaaacacttagaattgacaaaggatttagtacccagattatgtaagtaaatcctaaaaatataatagaaaaaaagacaaatgactcaacagaaaattagaaaatattattgaactggttt

SEQ ID NO: 565289 - DNA, 452 bp, Homo sapiens
agcctggccaacatggccaaaccccgtctctactaaaaacaaaaattagccaggcatggtgatttgtgcctataatcccagctactctggtggctgaggcaggagaatcacttgaatccaggaggcacaggttgcactgggccgagatcgtgccactgcactccagacagagtgggtgacagagcgagactccgtctaaaaccaaaccaaaccaaaccaaaaacaaaaacacttccatccccgaatgctctgctcagggagactgatttgagtaataattaagctccaatctcccgcacagctggctctgtgtgaattgctctttcccctgtcttgataaatggggtctgtctaggcagcgggcaaggtgagccctttaggtggttacaccttcaygtgggaacatggaattgagcagaaactgattccatgcctcccccaccctcaccccc

SEQ ID NO: 565290 - DNA, 391 bp, Homo sapiens
cactccagcccaggcgacagtgtgagactgtctcaacaacaacaacaacagaaacagaaataacccaactagtagactccactgccaytattagggccttcccattagccaggtgcagtggcatgcacctgtagtcccagctacttgggaggctgaggtaggaggactgcttgagtccaggagttctaggctgcagtgagctatgatcacactgcgctccagcatggacaacagagtgagaccccatctcttaaaaaaaaaacctttttttaattaaaaaaataaaaaagagcctacacagatcagcaagactcattcattccttggaaacaaaaagtatcataacaaggttttaaaaaaatgcttagtattaactaggcctttcaggtat

SEQ ID NO: 565291 - DNA, 391 bp, Homo sapiens
cactccagcccaggcgacagtgtgagactgtctcaacaacaacaacaacagaaacagaaataacccaactagtagactccactgccattattagggccttcccattagccaggtgcagtggcatgcrcctgtagtcccagctacttgggaggctgaggtaggaggactgcttgagtccaggagttctaggctgcagtgagctatgatcacactgcgctccagcatggacaacagagtgagaccccatctcttaaaaaaaaaacctttttttaattaaaaaaataaaaaagagcctacacagatcagcaagactcattcattccttggaaacaaaaagtatcataacaaggttttaaaaaaatgcttagtattaactaggcctttcaggtat

SEQ ID NO: 565292 - DNA, 391 bp, Homo sapiens
cactccagcccaggcgacagtgtgagactgtctcaacaacaacaacaacagaaacagaaataacccaactagtagactccactgccattattagggccttcccattagccaggtgcagtggcatgcacctgtagtcccagctacttgggaggctgaggtaggaggactgcttgagtccaggagttytaggctgcagtgagctatgatcacactgcgctccagcatggacaacagagtgagaccccatctcttaaaaaaaaaacctttttttaattaaaaaaataaaaaagagcctacacagatcagcaagactcattcattccttggaaacaaaaagtatcataacaaggttttaaaaaaatgcttagtattaactaggcctttcaggtat

SEQ ID NO: 565293 - DNA, 527 bp, Homo sapiens
taagggtccaattttgttcttctatatgtggatatccagctttccccaacatcatttattaaagagactatcctttgccattgtttattgttgacatctttgtcataaatcaattgaccatacatgcatgggctcatttctaagctctctattccagtccactggggatgtgttcatttttattttaattttttttgctagcactacagtatttttaattactataggtttgtagtacaatttgaattcaggtagtgtgatgcctccagctttgatttttttgctcatgattgctttggctatgcaagtttttgttgtggttccatataaattttaggatttcttaatctatttctatgaaaaatgatgttggaattttgatatgrattgtattgaatctgtagataattttgggtaatatgagcattttaagaatattagtttcttcaatgcataaacatgggatatctttccatttatttgtgtcttcttcaatttctttcatcaatgttttagttttcagtgaa

SEQ ID NO: 565294 - DNA, 512 bp, Homo sapiens
acctattgtttgccatactcttttggttggagcagtcttaagcctttgcccacattcaagggatgggagcatacaacttacttcccctctcaatgggaggagtgtcagtcacattgttagaagagaatgtgggataggattgattgattgattgattgattggcatctttgtaaagtacaacttgcacactcctcatttcagaatgtttacaaataacaaatctatattccactgcakgggtaggtcactaattatcatttttagttttagcttacctgttggttattcatccataatgtctttgaccttacttttaaggtatattgtaaatttttttgtggccccattctctcttaatatttgcaaaaacggaaagaaacctaaaactggtaataagaaaaattaggtcaggcacagtgacttctagtgctttgggaggctgaggcaggaggatcacttgaggccaggagttcaagaccagcctgggcaacacagtgagaccccatttcta

SEQ ID NO: 565295 - DNA, 404 bp, Homo sapiens
gtcttggcctcccaaagtgctggaattacaggtgtgagctgcctcacctggcctggaaaaacagcattcaaacatgagataggaccttcaccagaaaatgacttttatgtcttcagaatattaatgttctttcycatcatcctatatccagacagattttttttgtttcaataagtattctgattccttccattaagttgatataattgtttagctagtatttatcgttgagtaactgttacaaccacagtgttggagctgggaggttaaacacaaaagcaagtagctgtcttatgatagaatgtgtctgaaaaagcacagtgggagccatcaaaagaagttaacagttctatctgggagaacagaggagtctttatcaggaatataacatttgagatgaattc

SEQ ID NO: 565296 - DNA, 606 bp, Homo sapiens
cagtggctcacgcccgtaatcccagcactttgggaggctgaggcgggtggatcacctgaggtcaggagtttgagaccagcctggtcaacatggtgaaacyctgtctctattaaaaatgcaaaaattagctgggcgtagtggtgggtgcctgtagttccagctactcaggaggctgaggcaggagaatcacttgaacccatgaggtggaggttgcagtaagccaagattgtgccatttcatgccagcctgggtgacaagagtgaaactgcatctcaaaaaaaaaaaaaaaaacaaaaaaaagtcactctagtttccctgttcttcaaggaagaaattccttagaaagtatctctcactgtgggcctccaacttctgtttgaatactgctagcaatgggcaattcatgacctcttgtgtagcgtactgcttaggaactcctactctggaaccaaacacagttaggtttgcagtcagctctgccccttactaattggtttttcttcggcagtttttgccacctctttgtgtctaagtgtcttcatctcaaaaatggagttaataataatctctacttcatagggctgttggcctatccttggtttggac

SEQ ID NO: 565297 - DNA, 606 bp, Homo sapiens
cagtggctcacgcccgtaatcccagcactttgggaggctgaggcgggtggatcacctgaggtcaggagtttgagaccagcctggtcaacatggtgaaactctgtctctattaaaaatgcaaaaattagctgggcgtagtggtgggtgcctgtagttccagctactcaggaggctgaggcaggagaatcacttgaacccatgaggtggaggttgcagtaagccaagattgtgccatttcatgccagcctgggtgacaagagtgaaactgcatctcaaaaaaaaaaaaaaaaacaaaaaaaagtcactctagtttccctgttcttcaaggaagaaattccttaraaagtatctctcactgtgggcctccaacttctgtttgaatactgctagcaatgggcaattcatgacctcttgtgtagcgtactgcttaggaactcctactctggaaccaaacacagttaggtttgcagtcagctctgccccttactaattggtttttcttcggcagtttttgccacctctttgtgtctaagtgtcttcatctcaaaaatggagttaataataatctctacttcatagggctgttggcctatccttggtttggac

SEQ ID NO: 565298 - DNA, 496 bp, Homo sapiens
aacataggaacagaaaaccaaacacagcatgttctcacttataagtgggagctgaacaatgtgaacacatagacccagggaggggaacaatgcacactaaggcctgtcaaggggggcaagaggagggagagcatcaggaaaaatagctaatgcatactgggcttaattccttggtgatgtgttgatctgtgcagaaaatcaccatggcacacctttacctatrtaacaaacctgcacatcctacacatgtaccctggaacttaaaataaaaataaataagtaaattggtgttttcaatcatattaaatggaaatttattgtaaaaggaaaggggccatcaagataatctattaggaacattcaaaagagttggctcttctttcttaataggagtgcttatagaatagctttccaggttaataaaaaagttatttgctctttcctaaaatattacagatagatgatcatttatgagagtacaggttacttcacaaag

SEQ ID NO: 565299 - DNA, 496 bp, Homo sapiens
aacataggaacagaaaaccaaacacagcatgttctcacttataagtgggagctgaacaatgtgaacacatagacccagggaggggaacaatgcacactaaggcctgtcaaggggggcaagaggagggagagcatcaggaaaaatagctaatgcatactgggcttaattccttggtgatgtgttgatctgtgcagaaaatcaccatggcacacctttacctatataacaaacctgcacatcctacacatgtaccctggaacttaaaataaaaataaataagtaaattggtgttttcaatcatattaaatggaaatttattgtaaaaggaaaggggccatcaagataatctattaggaacattcaaaagagttggctcttctttcttaataggagtgcttatagaatagctttccaggttaayaaaaaagttatttgctctttcctaaaatattacagatagatgatcatttatgagagtacaggttacttcacaaag

SEQ ID NO: 565300 - DNA, 565 bp, Homo sapiens
ataactaatgggcatattcatactaagcagtatgccattggaaatccccttcccccagctgagaatatccacaaagatgcaacaaagatgctgagccaggaagcaactatatctaaagagaccaggcttytgcacttgagcccctaccttggatggagaaattttaccaaagaaatgtccccaccggacacctgtgtggacagctcctgtaccttcaggctgtggggacggggtgtcctatttgtgagctgccatttcttaaagcttgatgacaggggcagagcccccctttgcaggcctcttgcagcgaatgtgattttccaatgcacattattaatgagcttcatcctaaagttattctggctgcatgtggagtttagaggacttgggagcacaacttggcaggcaagataggctttaaaatgcagaacttctctagcttgtttaaaaaaaagaccacaatatcaaagagaaaatcagagtggggggcagtagcaaacaagggttgggaagagtaaatgaggaaacaaaaaactaaatatacaaatacacacactatatggat

SEQ ID NO: 565301 - DNA, 573 bp, Homo sapiens
actgcagccatttcagcactagagggtgtcctaagcccaggtacactgtgtgactcgcagactccaggatactcagccctgatggactttgggaagatacagaaaaattgcctgggttcccaggcaatttgtcttgtattggcctgatataatgggctttggtattctccatggtgctctgttttcctgtggtggggytggcaccaagttgcaagacaatgccccctgtaattgtccctgtatttcccctaagtaaaaatgagtctctctctactatactgcctgaagttgggggaggggtaatgtaggcactcctgtggctgctgtagctgaagctcagagtgagtcacatcccaagcccacagcctccaagactagcacagcaccagtgctcacccaaggactgcacttgcaacaacctggttgccactgaaatttattcagggtccgaggccactttagttagctgatggtgaagcaggccaagacttagatttctcttgacaaggcagtgtatttccgtctggttcatgactggtctaagcactctcaccatgggcactcatagaattc

SEQ ID NO: 565302 - DNA, 574 bp, Homo sapiens
aaggcaaaattcatagagaaaagaaataataaagactacagcagaaataattaaaattgagattaaaaatagtacaaaagtttagcagcacaaaaagttggtgttttgaaaagataaaatttataaacctttatctagaattagaaaaaaaacaaattaaatgatggaaaggaaacactacaacagatactacagaaatacgaaggatcattagagactrttgtgagcaactatacatcagcaaatttgaaaaccaagaagaaatagatacattcctgcacagaaaacctaccagttaaactatgaagttatagaaaatctgaacagaccagtgataagtaacaagatagaagcaataataaaaagtcttccatcagagaaaagcccagttcctgatggctttactgctaaattctaccaaacatttaaagaactaatgcccattctactcaaactattccaaaaaaattaaagagtaaggaatactactaaactcattgtatgaggtcagcattaccctgataccaaaacaagacaaagacacagtaaaaacagaaaactacaggccaatatc

SEQ ID NO: 565303 - DNA, 574 bp, Homo sapiens
aaggcaaaattcatagagaaaagaaataataaagactacagcagaaataattaaaattgagattaaaaatagtacaaaagtttagcagcacaaaaagttggtgttttgaaaagataaaatttataaacctttatctagaattagaaaaaaaacaaattaaatgatggaaaggaaacactacaacagatactacagaaatacgaaggatcattagagactgttgtgagcaactatacatcagcaaatttgaaaaccaagaagaaatagatacattcmtgcacagaaaacctaccagttaaactatgaagttatagaaaatctgaacagaccagtgataagtaacaagatagaagcaataataaaaagtcttccatcagagaaaagcccagttcctgatggctttactgctaaattctaccaaacatttaaagaactaatgcccattctactcaaactattccaaaaaaattaaagagtaaggaatactactaaactcattgtatgaggtcagcattaccctgataccaaaacaagacaaagacacagtaaaaacagaaaactacaggccaatatc

SEQ ID NO: 565304 - DNA, 590 bp, Homo sapiens
ctaccaaatttacccagcaatataaagcataaaacttctaaaggaagaaaagagaaccaaaagaacctagaaaaggcaasagcaataaaaatccataataaaatggtagatttaagtacaaacatattggtaattatattaaatatgagtagataaatactccagattattataagtaactatatgatgtttagaaaagaaactccttaaacataagttagagaaatattgatattaaaagaattcaaaatacctacctactcctatctctgcaacaacaaaaaagctgatctaaaacttaatgactattcttggatccattggagagatggagtcacagggctaactgacactgggtaatctagagagataggttaatccagaaagtcacagctgagattggctccagacactgctagaaccataaatgggtagaaacatttaaatggtagttttgacacaattttggaggctgagtgtggaccagaatgagactgagaaacttgtggacctgcagtcttatacacctttatacagagtattaaacacactttcatgggttttacctgcagaaaccacatcaggctcta

SEQ ID NO: 565305 - DNA, 590 bp, Homo sapiens
ctaccaaatttacccagcaatataaagcataaaacttctaaaggaagaaaagagaaccaaaagaacctagaaaaggcaagagcaataaaaatccataataaaatggtagatttaagtacaaacatattggtaattatattaaatatgagtagataaatactccagattattataagtaactatatgatgtttagaaaagaaactccttaaacataagttagagaaatattgatattaaaagaattcaaaatacctacctactcctatctctgcaacaacaaaaaagctgatctaaaacttaatgactattcttggatccattggagagatggagtcacagggctaactgacactgggtaatctrgagagataggttaatccagaaagtcacagctgagattggctccagacactgctagaaccataaatgggtagaaacatttaaatggtagttttgacacaattttggaggctgagtgtggaccagaatgagactgagaaacttgtggacctgcagtcttatacacctttatacagagtattaaacacactttcatgggttttacctgcagaaaccacatcaggctcta

SEQ ID NO: 565306 - DNA, 590 bp, Homo sapiens
ctaccaaatttacccagcaatataaagcataaaacttctaaaggaagaaaagagaaccaaaagaacctagaaaaggcaagagcaataaaaatccataataaaatggtagatttaagtacaaacatattggtaattatattaaatatgagtagataaatactccagattattataagtaactatatgatgtttagaaaagaaactccttaaacataagttagagaaatattgatattaaaagaattcaaaatacctacctactcctatctctgcaacaacaaaaaagctgatctaaaacttaatgactattcttggatccattggagagatggagtcacagggctaactgacactgggtaatctagagagataggtkaatccagaaagtcacagctgagattggctccagacactgctagaaccataaatgggtagaaacatttaaatggtagttttgacacaattttggaggctgagtgtggaccagaatgagactgagaaacttgtggacctgcagtcttatacacctttatacagagtattaaacacactttcatgggttttacctgcagaaaccacatcaggctcta

SEQ ID NO: 565307 - DNA, 588 bp, Homo sapiens
aggcaaatataacttcccactcctgaagggtaggctgtgaagaatatccctttagggagtacagtatggaaaaggcaggagatagggagacacagggcaacttcacagtggagaagtgaaggctgatgaacagaacctagccaagtgatcaaggtcaacatcaacagtgataagtcattttgatagtatatacacttgaaatgatgtgatgatatgatatgacttcatctgtgtggtcttctagaaaatatctaacaccaatccaatcataaggaaagcatcacacaaatcccmactgagggatattctacaaaatacctgacaagtactgctcaaactgccaaggtcatttaaaaaacaaaaacaaaaacgaacaaacgaacaaaccaggaaagtctgggaagctctcatgttgtcacagtcaagagaagcctaaggagacatgacaacaaaatgtattgtgttaccctgtacagtgtcctggaaccgaaaaaggacattaggtaaaaactaaggaaatatagactgtagatattaactatatgatatcaaaattgattcgttaatcgtaacaaatatgccacacta

SEQ ID NO: 565308 - DNA, 588 bp, Homo sapiens
aggcaaatataacttcccactcctgaagggtaggctgtgaagaatatccctttagggagtacagtatggaaaaggcaggagatagggagacacagggcaacttcacagtggagaagtgaaggctgatgaacagaacctagccaagtgatcaaggtcaacatcaacagtgataagtcattttgatagtatatacacttgaaatgatgtgatgatatgatatgacttcatctgtgtggtcttctagaaaatatctaacaccaatccaatcataaggaaagcatcacacaaatcccaactgaggratattctacaaaatacctgacaagtactgctcaaactgccaaggtcatttaaaaaacaaaaacaaaaacgaacaaacgaacaaaccaggaaagtctgggaagctctcatgttgtcacagtcaagagaagcctaaggagacatgacaacaaaatgtattgtgttaccctgtacagtgtcctggaaccgaaaaaggacattaggtaaaaactaaggaaatatagactgtagatattaactatatgatatcaaaattgattcgttaatcgtaacaaatatgccacacta

SEQ ID NO: 565309 - DNA, 588 bp, Homo sapiens
aggcaaatataacttcccactcctgaagggtaggctgtgaagaatatccctttagggagtacagtatggaaaaggcaggagatagggagacacagggcaacttcacagtggagaagtgaaggctgatgaacagaacctagccaagtgatcaaggtcaacatcaacagtgataagtcattttgatagtatatacacttgaaatgatgtgatgatatgatatgacttcatctgtgtggtcttctagaaaatatctaacaccaatccaatcataaggaaagcatcacacaaatcccaactgagggatattctacaaaatacctgacaagtactgctcaaactgccaaggtcatttaaaaaacaaaaacaaaaacraacaaacgaacaaaccaggaaagtctgggaagctctcatgttgtcacagtcaagagaagcctaaggagacatgacaacaaaatgtattgtgttaccctgtacagtgtcctggaaccgaaaaaggacattaggtaaaaactaaggaaatatagactgtagatattaactatatgatatcaaaattgattcgttaatcgtaacaaatatgccacacta

SEQ ID NO: 565310 - DNA, 588 bp, Homo sapiens
aggcaaatataacttcccactcctgaagggtaggctgtgaagaatatccctttagggagtacagtatggaaaaggcaggagatagggagacacagggcaacttcacagtggagaagtgaaggctgatgaacagaacctagccaagtgatcaaggtcaacatcaacagtgataagtcattttgatagtatatacacttgaaatgatgtgatgatatgatatgacttcatctgtgtggtcttctagaaaatatctaacaccaatccaatcataaggaaagcatcacacaaatcccaactgagggatattctacaaaatacctgacaagtactgctcaaactgccaaggtcatttaaaaaacaaaaacaaaaacgaacaaacgaacaaaccaggaaagtctsggaagctctcatgttgtcacagtcaagagaagcctaaggagacatgacaacaaaatgtattgtgttaccctgtacagtgtcctggaaccgaaaaaggacattaggtaaaaactaaggaaatatagactgtagatattaactatatgatatcaaaattgattcgttaatcgtaacaaatatgccacacta

SEQ ID NO: 565311 - DNA, 581 bp, Homo sapiens
agagagaagagattgtaaatgtttttattagacttaaagyctgtgttgatgttaacactgttcagctttccctgaattacaaaaaggaggagggtataatgaggcatatctgaccccccttcccatgatggtctgaactaagattttcaggttaactttggaatgtccttgcctgaaagaaggggtccattcagatggttgggggccttagagttttatttttggcttacctacccaagtcccagttgtaagatcaaagtagtaacagaagataagtaagtaaagcaggctgaaccacaaaaggagatcccagatgtaggtgatcgtgatgagacctagagagaactgatttgggaggactagtgatgagctaaaaaaacatgaggaatactcttcgaggatgggggagtatggtgggaggacatgtgcttttgaccaatgtaaaatccaagttcaggtatctgtggtcaaacaaaaaactcagtcctcatcactggagctgaccagagaaatgtgaattcccaacttttcaagaagtcccaaaggcaagccagggcaccagctataaccctgggcaaagc

SEQ ID NO: 565312 - DNA, 581 bp, Homo sapiens
agagagaagagattgtaaatgtttttattagacttaaagtctgtgttgatgttaacactgttcagctttccctgaattacaaaaaggaggagggtataatgaggcatatctgaccccccttcccatgatggtctgaactaagattttcaggttaactttggaatgtccttgcctgaaagaaggggtccattcagatggttgggggccttagagttttatttttggcttacctacccaagtcccagttgtaagatcaaagtagtaacagaagataagtaagtaaagcaggctgaaccacaaaaggagatcccagatrtaggtgatcgtgatgagacctagagagaactgatttgggaggactagtgatgagctaaaaaaacatgaggaatactcttcgaggatgggggagtatggtgggaggacatgtgcttttgaccaatgtaaaatccaagttcaggtatctgtggtcaaacaaaaaactcagtcctcatcactggagctgaccagagaaatgtgaattcccaacttttcaagaagtcccaaaggcaagccagggcaccagctataaccctgggcaaagc

SEQ ID NO: 565313 - DNA, 493 bp, Homo sapiens
atattctcatgaagatttttaagaggaattcaataaaatcaagttaaggtttcttcattctcttctggaaagaagagaaattaaactctaccctctatagcaatgcagaaasatagatagatagatagatagatagatagatagatagatacatacatacatacatacatacatacatacatacatacatgattgatagatagatagatagatagatagatagatagatagatagatacatttcatacactaggaaaagactctgttgctttaattcgcatgcccatttatgtcagagattcagatgacctaagcttaggggaacttgaagaatatattatcattgggagtcaggttattattctcacaagaatgattcatcccttcaacttgcaaactgctcttaaatcaacttgcaaactgctctctcagctatggggctgagagaaaactatattcctttgtaagtggtggtggaaaccacattataaat

SEQ ID NO: 565314 - DNA, 271 bp, Homo sapiens
gatgtctattgcacatacatcttggcaattaaaacaatggttttcctgttttataacacaattttgacacatttataaatggctgattcaaaaatgtcycccagatcagaataacctcaacaaatcagtcaaggtaaaatggcctttgacatcactcacatccccatacatgaaatttagcaagtaaaatctttacacagatttttaatcagattagcagatgaattaaaagatgatgtataaaacagattaaaacattagaattaaaatg

SEQ ID NO: 565315 - DNA, 563 bp, Homo sapiens
gttgtaaatccaaaagttatagaagaaggaagaaaactaatcaaaaatatagtaagacataaaacataaatacagtaaagggtaccaaaaaatgattggtaccctttactgtattggtgattctctgaaaagtttgatcatgggaaaagcaaagaagcacaaaaacgttaagaatgaaatgttaaagtaactagagatacaatagtttacaaaaatacattgccattaaaaatcaattccaataattttaaaacttaaagtgttcaagaaacataaagactataataatctataataataaatagtaattatataatataattctataaaaattaatcctattacaattaaatattgtacctgggtggtaaaatattcctatgacagttaaaatgtaaatyattagtttaaaactttaaaactataatctccttaggtccatgtagtttaattaaatatatccacaaaatattcaagaacagataatgatcaccttaatgcttttttaaggaaaaaaacagcaattacttttctgatcatttttgtaatattaatataatatt

SEQ ID NO: 565316 - DNA, 565 bp, Homo sapiens
aatattaatcaaatctcagccaggcatggtggctcactgtaatcccagcagtttgcgaggccaaggcaggtgaattgcttaagtccaggagttcgagaccaaccggggtaacatggcgaaacacaatctctaccaaaaatacaaaaaaagattagccaggcctggtggcatgtccctctagtcccagctactagcgaggctgaagtgggagaattgcttgagcccggaaggtcaaggctgcagtgagcagtgatcatgcaactgcatttcagcctgggcgacagaataagacccygtctcaaaaataaataaataaatagtctcatttaatgcacagaatgtgaagcattgtgaactggacagaaaattatcttcaacttttcattattttaaagttggtagaccaggtgatttgtaagccatgttttaactgtggtaatttgccaaaggactttataaattaaatggaaagaatttcgtcttttgtcagtaaactttgaaccatattttgattatacagttgattatcattatttgtggtagttgggttctgtaaagcaaacag

SEQ ID NO: 565317 - DNA, 603 bp, Homo sapiens
atgtgtttgtgtatatatatatatatatatatatgcatatataaatatatatatatatatgtaaaatcagtcaaacctagttgcacatggtagttatattctataaagtttctgtgaatactaaattagtaaatattaaatcattgctcctaggggaagtaaatgtgtgtgtgtgtggtatattaacatgactgacatagattatgatttaaatcttaaaaacctaaaactaactcttcctggtacattctgttttatttattttacaaaarggaaatgaggttcagaaatgttgtgtgacttacctcaggctgctcaactgacaggtaggtgccagagttaagattcagactctccaaccggcccctagagcctggtcttcttgcactgctttgcactgcctcctgccatctccattctctggtcatctctgtatgaaagctgaaacaaggcagagaatggacttgtgggacctcagcggggaatatgtgcattacacaactcaaatttttctagcactgaacatattagggaataatctgtaaacaaagtacatattgattttgggtttataagtaaattttagtgtgtcagcaaattcac

SEQ ID NO: 565318 - DNA, 737 bp, Homo sapiens
attcaggaggctgaggcaggaggattgcttgagcccaagaggttgaggatgcagtgagcagaggttgtgccgttgcactacaacctggggaacagagcgagactctgtctcttaaaaaataaaatacattatttttatatcacaggcatgagaaaagttcatgatatgttagtaragcaaggtgcagtacagtgtgcataatctaccattttttaaaggaagaaaaataagaatttatcaatatttgcttgtgtatgaaaagaaactggaaaaatacacagaaaattaatgaaagtgagtacctgttgatagggttgggaaacaaggcttctcatcctgtacctttttccactgatttttgagtcatgagaacattacctattcaaaagaaagaacattttcagatggtacataaaaaaaattttgccattacataactttgtttcctaatactgataacatttaaaaccataattaacactgtttgcattgtcatacctggcagctctaacatccggcctcatttccttttattttaaaaccataattatagtgatttaggtttaattttgtaatgtaatatattcagtgcccaatgccactcttcctactagttctcattcattaattttttgacttatatctcagggatatgtattcaaatagatatttcaggataaaatgtatttcctttgctaggtatagaattcttgtttcacagcctattccttaaaaat

SEQ ID NO: 565319 - DNA, 737 bp, Homo sapiens
attcaggaggctgaggcaggaggattgcttgagcccaagaggttgaggatgcagtgagcagaggttgtgccgttgcactacaacctggggaacagagcgagactctgtctcttaaaaaataaaatacattatttttatatcacaggcatgagaaaagttcatgatatgttagtaaagcaaggtgcagtacagtgtgcataatctaccattttttaaaggaagaaaaataagaatttatcaatatttgcttgtgtatgaaaagaaactggaaaaatacacagaaaattaatgaaagtgagtacctgttgatagggttgggaaacaaggcttctcatcctgtacctttttccactgatttttgagtcatgagaacattwcctattcaaaagaaagaacattttcagatggtacataaaaaaaattttgccattacataactttgtttcctaatactgataacatttaaaaccataattaacactgtttgcattgtcatacctggcagctctaacatccggcctcatttccttttattttaaaaccataattatagtgatttaggtttaattttgtaatgtaatatattcagtgcccaatgccactcttcctactagttctcattcattaattttttgacttatatctcagggatatgtattcaaatagatatttcaggataaaatgtatttcctttgctaggtatagaattcttgtttcacagcctattccttaaaaat

SEQ ID NO: 565320 - DNA, 517 bp, Homo sapiens
cctcttctctcacatcaactaggcttggatcctgggtaagtcacttctccactcaggatggcctccatttcctcatgcactaaacacagtggcaattactaaaggatcttcctttcargtctgacggcatagacttttgtgactcttctgtatattctagggaataaaagtcctgtcctagaaaattaaagaaagaggaaccaaacagaaacactctgaccctttaaagatttagcaactgcttatctgatgcttacctttctcttcctctccctcttctttaaaaaaatgaaaattacatgacatctagccaacccactctatataacatcaaagggtaaacttctaaattccctgttgtacacacaagaatgttttcctccaaaatctggaccaccttcctcacaaatacaatcagatgtcttgcacagagactgcccttctttataattagactacaattcctatgaaagtcaatattttctagttttcagaactttacgtttttgaagtattc

SEQ ID NO: 565321 - DNA, 468 bp, Homo sapiens
cagcttctgcttctggggaggcctcaggaagcttccaatcatggcagaaagcaaagggggagtgagctgtctcacatggccagagcagaagtaagtgggggcggtgytatacacttttaaacaaccagatctcacaaaaactcatcatcacgaacagcaccaaggggatagtgctaaactaattatgagaaactgctcctgtaatccaatcacctcccaccaggcccctcctctaacattggggattacaatttgacatgagatttgggcagggacacagatccaaaccatatcaccttgtcagtgcacagggaggcatgggaaggtcaccactgaaatgatgtcagttctctggtcaaattaccagtttatgttcggtgccttttctataattttaatatattagcatattgagttttttattaaaaataaattttactctcatgtcctttgaaagaaatgcatatg

SEQ ID NO: 565322 - DNA, 595 bp, Homo sapiens
tccagttaaaaggctattgtggtacaaatctttgctctcatagtttgaagtacattctaacttgttatttgtactattcattaaatgttatctgatgctactcatctcttcctatatactatacatgtackgtatctctaaattctgtgcttcctgaagatatattgtcacatagttccttgcattcgccacagtatctcagctactgcagagacataaaaggcaaatatttgtaaggttgtcttagttgatttgtaaaacacctacagaatcactattttctgaacaccaagcctgtactttgagtatctcaggagaaagaagttaactagaaaaattaagtgtaggcctgggcaacatagcaaaaccttatccctaccaaaaagaataaataaataaataaataaataaaagaaaaaataaaaacaagattgaaactggaccctcaccttacgtattatacaaaaataaactcaagatggattaaagacctaaatgtgaaacctaaagctataaaaactctgtaagattacctaggaaataatattttggatatagaatctggcaaaaatttcataacaaaaatgccaaaagc

SEQ ID NO: 565323 - DNA, 551 bp, Homo sapiens
tatctgctatatgcaggcactatatcaggtatttcacataacatcattagctgttgctgtccctgttattgcacaggtctcaaattcacttttgactgtagagtcactgccattttcaaaggatagaatcattgccatctgttctcatgtgtgagtttttcttgttgcctgtcttattcaactgatttcagtgggggtggggagttatttttaaagcaatacatgttattagtagaaaacttgagcaaaggatttgaacaggcagtttacatagcaggaaacttcacaggccatcargtattggaaaagatactccaagtctttagtaatgagagaaatgtaaatggatggtctgcctctatgggcttcatcttcaacatcatctcatctcttcttaaaatgagttatccatttgtaaattgctcatttctctggggcattgtcttcgtaaacattttgtgatgcatcagtaatttcagcatttctccacccaagatcacagtaaatttgatgtttgtccttcaattttagcagaattcttgttgcttgga

SEQ ID NO: 565324 - DNA, 602 bp, Homo sapiens
agactccaacagcatgcctgctaatggacaacatcagacgacctgctcagaatctctggacaggttgactgaaaaagggctttcccaaacaaagcaagtctgcaaatactggaataagtccctatttcttcaaacgcacagacaccaacacatggcaacaaggatgaggaacaatcaaagaaacatgacaccaccaaagaataaaattatgcaccagtgaccaaccctaaagaaayagagacttataaactgcctaacaaagaattcaaataattgtataaccagcctgggcaacaaggcaagaccccatttctacaaaaaaaatttaaaaattagctgggcatggtgatgtgtgcctatggtcccagcttcttgagaggctgaggtagaagtattgcttgcgtctgggaagttcaagctgtagtgagccataatcatgctccagcctgggtgacagagtgagaaaaaaaaagtacaaataattgtatgaaggaagttaagtgcagagaaacaattcaacaaaatcaggagaataataaatgaccaaaatgagaaatttaatagaaattgaaattatttaaaaacaagaaaacaaagtagac

SEQ ID NO: 565325 - DNA, 502 bp, Homo sapiens
taggactatgtgacagaatgggtgtctgaagttttctgtccagccttcatgtgtttatcatgcaaaaaaaagtattcattccctcagtttttagtgagggctcactgtggtccaaataatgtgcctggaacatggtttaccatgatgagtgagttggcaattccctactcctattgagcataagttctagtagtggaagagagacagcaaatgagtaaacaaaggcataaaagtattgctggttgcattatatttgagaaaggaaatawacagagtgacttgggaaagaatgaaaggctgggtcctacttagatttagagcttaaggaaggcctctaagttatggcagttaatttttaatttttgtttatttttttattgagacaaggtctcactctgtggcccactctggagtgcagtgatgcaatcatggctcactacagccgcgacttcctgggctcaagcaatcctctcacctcagcctcctgagtagctgggaccac

SEQ ID NO: 565326 - DNA, 620 bp, Homo sapiens
aatatacatacatgtttctatattttaacaatgaagtatctgaaaaggaaattcagaaaataattctacttagaatagcattaaaaataacaaaatagaaataaacttagccaaggaggtaaaagacttgtacactaaaaactgcaaaacactgatgaaagaaattaaagaagacacaaataaatgtaaagacatcctaggtttatgaattggaagacttaatattgttaaaatgtccattttccacaaagtgatctacagattcaatgctatttccatcagaatcccaaaaagtattacrtataaaaataggaaaaaaatcctaaaagtcacatgaaacaacaaaaggcccttaatggccatagcaatcttgagaaagaagaaaaaagctgtagggattacactacctgatttcaaaatacatcaaaaagctacagtaattaaaacatatggtactggcataaagacaacatagagaccagtgaaaaaaatagacagcccagaaataaacccatgcatagctggccaactgacatttgacaagggtgcaaagaatacacaatggggaaagaatacctccttaaacagagggtgttgaggaaacgggatatccacatgca

SEQ ID NO: 565327 - DNA, 620 bp, Homo sapiens
aatatacatacatgtttctatattttaacaatgaagtatctgaaaaggaaattcagaaaataattctacttagaatagcattaaaaataacaaaatagaaataaacttagccaaggaggtaaaagacttgtacactaaaaactgcaaaacactgatgaaagaaattaaagaagacacaaataaatgtaaagacatcctaggtttatgaattggaagacttaatattgttaaaatgtccattttccacaaagtgatctacagattcaatgctatttccatcagaatcccaaaaagtattacgtataaaaataggaaaaaaatcctaaaagtcacatgaaacaacaaaaggcccttaatggccatagcaatcttgagaaagaagaaaaaagctgtagggattacactacctgatttcaaaatacatcaaaaagctacagtaattaaaacatatggtactggcataaagacaacatagagaccagtgaaaaaaatagacagcccagaaataaacccatgcatagctggccaactgacatttgacaagggtgcawagaatacacaatggggaaagaatacctccttaaacagagggtgttgaggaaacgggatatccacatgca

SEQ ID NO: 565328 - DNA, 498 bp, Homo sapiens
agacatgcaaaccaacatcttcaggagagtactgcaattgctatgatggaaaatatactaaaggtggtgagagcaaaggaagaaggcttgaggattctrggggggattgggaaaggcacctccaaggagatagtctctatggtgagatgtgaaggtggcataagagtttgacatataagcaggagggaccatttatacacagagaacaacgagcataaaacatagagccttagacagcaaggagtattgtgcatctacaagatgtcatgtttgggagcttgatataagctcctcgtgatcttacctgcaccagctcaagccttacctcctgccacttttcatatataatattttcaatatataaatatataaaaatatttatataaatataataatgtataagtaattatatatttttaatatataaaaatatttatattgagaattttgtattttatcctcagggcaataagcaggcactgctggattctgagcaga

SEQ ID NO: 565329 - DNA, 615 bp, Homo sapiens
ttttgtactttatgctatagaaacaagttagaaattttcctgatataaatgtgacatagaaatattgttattttagatagatggaaactttcctgagtctttcgtaaagatctaggtgtttcctgttctgtgttcctattgtaattgtatatacctccactgtagcaaatagtgatcattttataattgttggatctgtattcttaccactagactgtaacttccttgggtaaggaaggatgcaattttgtttcatatccccagtgcatggcccatagtgggcatgcaatacatttgttgaatgacsaactgaagaaactggacaaaatcaggattacagttaatcattcgaataggtgctttgcaaacagaatgaaaaatattttataatgacttttatttggacccttatcaaaattttgcagcaaaataaagcaatattatggaatcattatgttatagaagagaatatatttaaaaatcttcatgttgtaatgttaaatgaaatctaccaggccggcatgctggctcatgtctgcaatcctaacacttgggaggccaaggtgggtggatctccttatctcaggagtttgagagcagcttgggcaacatggt

SEQ ID NO: 565330 - DNA, 600 bp, Homo sapiens
cacttcactgacagtattagayagaccatcaaggcagaaaaccagctctacaaagaagacctggtaccaatcttaggaaaatgtttccaaaaaattgacaacacattctatgaaaccaacatcagtcagataccaaaatcaagcaaagacacaatgaaaaaggaaaactataggccaatatctctgaagaacatagacacaaaaatcctcaacaaaatactttcaaactgaattcagcagcacattaaaaggttaattcaccacaatcaagtaagctttattcttgggatgcaaggttggttcaacacagacaaatcaataatgtgattcactacacaaacaccctcaacaaattaggtattgtaggaacatacctcaaaataataagaagcatctatgacagacccacagccaacatcatacaaaatgggcaaaagctggaagcatcctaagaactggaacaagacaaggatgctcactctcaccactcttattcaacatagtactgggaatcctagccagagcaatcagggaagagaaagaaataagtcatctaataaaaaagaagaagtcaaatgatctctgctgatgatatgattc

SEQ ID NO: 565331 - DNA, 635 bp, Homo sapiens
gcaaggtttttaaacaatgaaaataatatataataaaactaaattgggtataacaaagtgattagactaacatctgtcactatgatttaagagcagtaaatattaaaatataatcaaatctcttagattaaaataaataaaattagattggaatttagtcagcaacagattcaaaaattaatgtgtccctagataaataaagaaaataattacagctactgttcaattattactactttcaaaggcaatttatttaagcataactagttattgatcaaatgtactggaataagaaaagccaaaagaatgattaaaaaacttaaaaatattaaacartaattttcatacctagataatttgagaaatgttaccactactaatgatatggtttggctgtgttctcacccaaatctcatcttgaattgtagttcccataatccctacatgtggtgggaaggacccagtgggaggtaactaaatcatggggacgattacccccatgctactgttcttgtgatagtgagtgagttctcacaagatcttatggtttaagaggctttttcctctttgttcagcatgtctctctccagccgccatgtgaagaaggacgtgtttgcttctccttccactatgat

SEQ ID NO: 565332 - DNA, 429 bp, Homo sapiens
gaattcaacagagcaggagctacatagggaagccaacctgcaagttattaatataaagcccttaccactctttccgtctaaatctgtgccttattttcagaaccttgtcactttttattccagccccttcttctgggttttgtatctgtgaatttgcattccaggcaaatgttccatttatggtaaaaaaaaaaaaaaaaaaaaaaaaaaaaaaaaaaaaaaaaagcgcagacagcatgagttagcactaccatcccttcttcatgacacagagatggcagttctgtattgggcttctctctttggctttgtccaagactccttctctcactgctgccaccaatggttatctatactttccttaatgaattagggctcttgggacctcaagagagatgaaatcscaatgctgcgtatttagcaggagca

SEQ ID NO: 565333 - DNA, 571 bp, Homo sapiens
tgccttttatttcctctccaccatttattttctaaccatggtagtttcagaactcttcttcattgcttttgggaaggatggttataataaaacacagaagaacaatggaagtaaaaaagaaaataataataataaataaaggaytgacctttgtgttctaaaagccagtgttatatggtcagtacttggctctgtgcttcaaaaatactgaagtattaaggacatgaaacatatgccatatacaaaaaataatggaaggatatgaatggatctaaattagtctcctcgcccagcctgtaatcaagacattcaggagtgacagatgagaagggagaaactaacgggatatgtaaaagttaaatgctggtataagctcctgaagagctcctaggctctgcagagccggtcagtacagttgccactaggcacatgtggctgtttacgttttaaataattttaaaagtcagctccttagttgcattagtcatgtttcaaatgctcagtagtcagaaaataaaatatgtccgtcattgtaaaaggttccattggtcaacgctggtctaaagcaagg

SEQ ID NO: 565334 - DNA, 608 bp, Homo sapiens
tatagagcccctctttctaggaagttatccctgacatagaggaagtatatgcagaatacttatgtttacaacagtttacaccctggtctacacactggaattaagtatagaattttttaaattacgtttgcttggactccaaaccagaccagctgaatcaaagattctactgttgggcctgagcatccatgtttttagcttcccaggtgattcagatatgctgtcagggttaagaatatctactctatacgattgtgcaatttcatcactcatatatccattttacagccctggacgagctatccaaggagtaccagaaacatgagagacaaggtccccttaatttgagcatatctatctatctatctatctatctatccatccatccacacacacatattyttatatatatacatatattcacatatatacacatgtatattcttatatatacaaatatattcacatatatacacatatatacacagatattctcatctatacattcttttgtgtatatatacacatatatatgtgtgtatatatatgtaaaaatgtgtgtgtatgtacatatatatatatatatatatatatatcagaattactca

SEQ ID NO: 565335 - DNA, 611 bp, Homo sapiens
tattttgccctaaagcctatacattttgtgctataactttatttttaagtgacgtttaagtgccagatggctatgttaccccaaaggtaaaaaacactgggaaataaaatggttcagaaaaaagaaaaataataaatttgtattatattatctttcatgtataacttttgtatactaaattccaatgggcagtttatcagttatgtaaacttggattttaaaattyaattgatatcttttctgttataattgtataagtgttcgagaatttttagttaggatggatttcagcatatttttgtcagattttcacctgttaattttatagggtatataattttagagggtatatacatattttaattaataatatggagtatatagtgttatgctccatttaatattatatggtatataatatcataaattaatgaatctgttatatgtcatatatttattatttataatatgctgttttctgctgcctgtattttgtcctgaaggttgtgcattctttgctataactttaagtaaagcttaaatttaagaaagctgtgacctcattatatgaatatatgaagagcatatattcatactatatatacctaata

SEQ ID NO: 565336 - DNA, 563 bp, Homo sapiens
tgagaccccgggcccgaccggttggttgtatttctattggatagtgctggtctaacacaggttttctcagcckcagcactgttgacatttggggctgaatcattctttgtgttgagggtggtcttgtgtattctacagtgttcagaagcctccctggcctccagctactggatgtcagtagcacctagttaatcctcaaggcatagcaacccaaagtttctccagacatcgacagaatcaccccacttgagaacagagcaaatgttgtatagccacaagagcctgtggcttaccacatgccaagcactggtattaaggacagggtgttagggatacaaacagggaacgaaaagtcctgcctatgtggcacttactttagtgggaagtagagacaatgaataagtaaatatacattgtccctggcaacacgtgccgtggtaaacagtgaaacaggaaaggggaccaggagcacagggtggtatgtgttagcaggcttcctgttgtgtgtatttcatcagggaggcctcacagagaaatcgaagagtgaggaaacaagctggatt

SEQ ID NO: 565337 - DNA, 349 bp, Homo sapiens
tgggggccctgcttgaaggatggggaggatttgcacctacagacatcgagggcagcgtggcatggaagtttgaaagtttgcagygaccttaaggaacagcagggaaaggaggagatgcatatgagtagagggatagaatggggtatctgctgagtgtcatttgcttcatgcaaggagtgctggtttgggttgggagaggacctgatccagcaggtgttttgttttagcaagacaacgctggataatgtcttctagttgaaatataagaggagtgaggcagagagagagactcatgatcgtctggtggcagagataaggatctgagggagggaggcatgggggttgacag

SEQ ID NO: 565338 - DNA, 560 bp, Homo sapiens
taacattggaaaaacccatctagacgctggcttaggcaaagacttcatgaccaagaacacaaaagcaaatgcaacagaaacaaataggtgagacttaactaaagagcttctgcacaggaaaaggaacaatcagcagagtatacagacaaccacagagtgggaggaaatcttcacagtctatacatctgacaaagggctattatccagaatctatgaggaactcaaacaaattacaattacaaaaatatggaaccagcycaaatgcccgtcaatcaatgagtggataaagaaaccgtgatatacatacatatatatatatatgaggaataccacctcagccataataaggaatgaattcatggcattcccagcaacctggatggaagtaagactattattctaagtgaaataactcagcatggaaaaccaaatatcatgttctctttcatacgtgggagctgagctatgaggatgcaaagccataagaatgatacaatggactttggggacttcggggaaaggctgggaggagggtgagggataaaagactacaaattggg

SEQ ID NO: 565339 - DNA, 560 bp, Homo sapiens
taacattggaaaaacccatctagacgctggcttaggcaaagacttcatgaccaagaacacaaaagcaaatgcaacagaaacaaataggtgagacttaactaaagagcttctgcacaggaaaaggaacaatcagcagagtatacagacaaccacagagtgggaggaaatcttcacagtctatacatctgacaaagggctattatccagaatctatgaggaactcaaacaaattacaattacaaaaatatggaaccagcccaaatgcccgtcaatcaatgagtggataaagaaaccgtgatatacatacatatatatatatatgaggaataccacctcagccataataaggaatraattcatggcattcccagcaacctggatggaagtaagactattattctaagtgaaataactcagcatggaaaaccaaatatcatgttctctttcatacgtgggagctgagctatgaggatgcaaagccataagaatgatacaatggactttggggacttcggggaaaggctgggaggagggtgagggataaaagactacaaattggg

SEQ ID NO: 565340 - DNA, 560 bp, Homo sapiens
taacattggaaaaacccatctagacgctggcttaggcaaagacttcatgaccaagaacacaaaagcaaatgcaacagaaacaaataggtgagacttaactaaagagcttctgcacaggaaaaggaacaatcagcagagtatacagacaaccacagagtgggaggaaatcttcacagtctatacatctgacaaagggctattatccagaatctatgaggaactcaaacaaattacaattacaaaaatatggaaccagcccaaatgcccgtcaatcaatgagtggataaagaaaccgtgatatacatacatatatatatatatgaggaataccacctcagccataataaggaatgaattcatggcattcccagcaacctggatggaagtaagactattattctaagtgaaataactcagcatggaaaaccaaatatcatgttctctttcatacgtgggagctgagctatgaggatgcaaagccataagaatgatacaatggactttggggacttsggggaaaggctgggaggagggtgagggataaaagactacaaattggg

SEQ ID NO: 565341 - DNA, 633 bp, Homo sapiens
gaggaggagctcaggcagtaatgcttgctgctcacctcacctcctgctgtgcggcctggctcctaacaggycatggactggtctgcagcccagggttggggacccctgctttatagtatttttgtgtattttgattttttttgttttgttttaagaaacccaggattcaggcagtatgtctgcattgcatttggttgtcctgtctctttggtctccttaatctagtgcaacacctcccacatcttttttttttttttttttaacgtccagccacttgtcttgtagaatgtgtcgcatgaatttgcttgattatttttctatgaattgattcagggtgagcagttttggcaagaatacaagcaggcagggttgtgcacttccagttggatcacctcccaagatacatcaggtccactgtctgcctcattcagacacgtttgtcacttggttgttagggtgcccaccacactgcttcattggaaaggtaccctgttctcttttgccattgctaagttgatctctaaagtgatagctgaacagtgtgaatacctgttctctcccagccttttactcagtgttttgaaaatccactgatgatcttttcctgaatcagttaacctgttagtggtcata

SEQ ID NO: 565342 - DNA, 633 bp, Homo sapiens
gaggaggagctcaggcagtaatgcttgctgctcacctcacctcctgctgtgcggcctggctcctaacaggtcatggrctggtctgcagcccagggttggggacccctgctttatagtatttttgtgtattttgattttttttgttttgttttaagaaacccaggattcaggcagtatgtctgcattgcatttggttgtcctgtctctttggtctccttaatctagtgcaacacctcccacatcttttttttttttttttttaacgtccagccacttgtcttgtagaatgtgtcgcatgaatttgcttgattatttttctatgaattgattcagggtgagcagttttggcaagaatacaagcaggcagggttgtgcacttccagttggatcacctcccaagatacatcaggtccactgtctgcctcattcagacacgtttgtcacttggttgttagggtgcccaccacactgcttcattggaaaggtaccctgttctcttttgccattgctaagttgatctctaaagtgatagctgaacagtgtgaatacctgttctctcccagccttttactcagtgttttgaaaatccactgatgatcttttcctgaatcagttaacctgttagtggtcata

SEQ ID NO: 565343 - DNA, 483 bp, Homo sapiens
tgagcaatttcagtgacttacgagatgttctggttatttgttgctatgaaacaagtaactccaaaacctagtagtttataacaccagtagttttgttatctcatacttcgagagtttgactgggcttagctaggccgttgtcactgagggtctcttgtgtctgaaggtggctgggctgagggtcagctcactcatatgtctggtacctgggcactggggcccctgggacatctctcactagccctgtgtggctcccagcatgtagtcagggaagccggtcctcttacatgctggctcagggctgtaggggagagtcctcagagagagcccagtggaggccatgttgccttctgtgttccagccttggaagtcaacggtggtccttttgcttcatttgttggtcaagatggtcacaatggcccatccaggttyatggggaggggccataggctccccttcttgatggtgggagtgtaaatgtac

SEQ ID NO: 565344 - DNA, 444 bp, Homo sapiens
tgagtctcaaatttcttatgaactatgacaagactaaaagatactgagtgagaatagaaaatagaaacaaacagggccaggtgtggtgactcacacgtgaatcccagcactttggagactgaggccagtgrattacttgaggtcaggagcttgaggccaggctggccaacatggggaaaccctgtctctactaaaaatacaaaaattagccgggcgtggtgatgcgtgcctgtagtcccagctactcaggaggctgaggcaggagaatcacttgaacctaggaggtggaggttgcagggatctgagattgagccacgagccactgcactccagcctgggcgacagagcgagactcctcaaagaaaaaaaaagaaagaaagaaagaaaggacaagctgctgagtctcttgtgcaagacttctgctgctggaggcttgataatctc

SEQ ID NO: 565345 - DNA, 444 bp, Homo sapiens
tgagtctcaaatttcttatgaactatgacaagactaaaagatactgagtgagaatagaaaatagaaacaaacagggccaggtgtggtgactcacacgtgaatcccagcactttggagactgaggccagtggattacttgaggtcaggagcttgaggccaggctggccaacatggggaaaccctgtctctactaaaaatacaaaaattagccgggcgtggtgatgcgtgcctgtagtcccagctactcaggaggctgaggcaggagaatcacttgaacctrggaggtggaggttgcagggatctgagattgagccacgagccactgcactccagcctgggcgacagagcgagactcctcaaagaaaaaaaaagaaagaaagaaagaaaggacaagctgctgagtctcttgtgcaagacttctgctgctggaggcttgataatctc

SEQ ID NO: 565346 - DNA, 444 bp, Homo sapiens
tgagtctcaaatttcttatgaactatgacaagactaaaagatactgagtgagaatagaaaatagaaacaaacagggccaggtgtggtgactcacacgtgaatcccagcactttggagactgaggccagtggattacttgaggtcaggagcttgaggccaggctggccaacatggggaaaccctgtctctactaaaaatacaaaaattagccgggcgtggtgatgcgtgcctgtagtcccagctactcaggaggctgaggcaggagaatcacttgaacctaggaggtggaggttgcagkgatctgagattgagccacgagccactgcactccagcctgggcgacagagcgagactcctcaaagaaaaaaaaagaaagaaagaaagaaaggacaagctgctgagtctcttgtgcaagacttctgctgctggaggcttgataatctc

SEQ ID NO: 565347 - DNA, 578 bp, Homo sapiens
tcttgtgcaagacttctgctgctggaggcttgataatctcttttattgccacttttttttttttttttttttttgctccaaacatttttatcaccttctggtaatttttcttcacttcacttcaatctgaattgtagccttctgaaagtattaatcactgtgattttgtttgctgtagcttattaaatgcccttttggtcctttttaattgacctttttaaatatgagctcatcttagagaactatctttatatctaaaattagtccttagaagttcctagttgtatttcttatcagggtcacttgtaattataatgtcagacttttagaatgaaacataagcatttgtcacatttagccatgattggtattcttagcactgaactkgtttccttaactctagtaagttcctttctaatttataaattatgtcaagtttctaatgctttggattaaattctaaaggatattatcacactttccaaccatgtctgtcatcatgcacattagtttactagggctaccataacaaagtggcactcagtaggtggcttaagaacacagaaatttatgtcctc

SEQ ID NO: 565348 - DNA, 578 bp, Homo sapiens
tcttgtgcaagacttctgctgctggaggcttgataatctcttttattgccacttttttttttttttttttttttgctccaaacatttttatcaccttctggtaatttttcttcacttcacttcaatctgaattgtagccttctgaaagtattaatcactgtgattttgtttgctgtagcttattaaatgcccttttggtcctttttaattgacctttttaaatatgagctcatcttagagaactatctttatatctaaaattagtccttagaagttcctagttgtatttcttatcagggtcacttgtaattataatgtcagacttttagaatgaaacataagcatttgtcacatttagccatgattggtattcttagcactgaactggtttccttaactctagtaagttcctttctaatttataaattatgtcaagtttctaatgytttggattaaattctaaaggatattatcacactttccaaccatgtctgtcatcatgcacattagtttactagggctaccataacaaagtggcactcagtaggtggcttaagaacacagaaatttatgtcctc

SEQ ID NO: 565349 - DNA, 578 bp, Homo sapiens
tcttgtgcaagacttctgctgctggaggcttgataatctcttttattgccacttttttttttttttttttttttgctccaaacatttttatcaccttctggtaatttttcttcacttcacttcaatctgaattgtagccttctgaaagtattaatcactgtgattttgtttgctgtagcttattaaatgcccttttggtcctttttaattgacctttttaaatatgagctcatcttagagaactatctttatatctaaaattagtccttagaagttcctagttgtatttcttatcagggtcacttgtaattataatgtcagacttttagaatgaaacataagcatttgtcacatttagccatgattggtattcttagcactgaactggtttccttaactctagtaagttcctttctaatttataaattatgtcaagtttctaatgctttggattaaattctaaaggatattatcacactttccaaccatgtctgtcatcatgcacattagtttactagggctaccataacaaagtggcactcagtaggtggcttaagracacagaaatttatgtcctc

SEQ ID NO: 565350 - DNA, 522 bp, Homo sapiens
acaatttgtttatctttatgaagcaaataaacaaaaattaaaactttacaaaacagaatttaccaagtgctacattggaatgatttgtaattaacacatggaaaaatttttacttacattggtgatttttgcctccctctgttctctgtagataatttctttagtcagtgggtaaaatgcagttatatacatgcagaatagctaaatgtttaaatatagttatacygcttggacagatggagagacacagaaaatatttttcagtataacacagataacttctaaagcaggtgttttgtttaccaactgtctcttggaaactcttcagttcaaaatggtgaggttattttttgtatacgaaatccagtctacttcctaaaattcaacccggcatgcagtttcttgggatatactatctgactccacagagacaaacaactattcagactgcactgcgtactgagtttcattattgaaatccttacactggattttaatgattttttcttcctatttgtcatc

SEQ ID NO: 565351 - DNA, 606 bp, Homo sapiens
tcgtgtgtttgtatagtttccaaaattctacttgttacttatttctaattttattccactgtgctcagagaacatacatgacattatttcattttgttaaatgttttaagacctgttttgtggcttaatatgtgrtctatctttaagaatgatccacatgctgaggaaaaaaatatgtattttgtggctgttgggtgaaacgttctgtaacattacacgaaatatacctgatatacatataggtccttttgatttatagcacagattaagtctgaagtttctttgctgattttctgtctgaataatcagtccaatgttgaaagtgaggtgttgaagtatccagctattattgtgtccaggtctatctctctccttagctctaataatatttgctatatatatctgggtgctccaatgttgggtgcatatatatgaacaattgtggtatcctcttgctgaattgactcctttatcattatattaccttatttgtctctttctatagttttatcttgaaatctattttgtctgatataagtgtagcaactcctcctctttttttggttttaatttgcatggaacatatttttccatccctttattatc

SEQ ID NO: 565352 - DNA, 396 bp, Homo sapiens
cattgtctcatgtagtcctcataacaacttcacaagtcgttactattattttcctcattttaaagatcagtacattgaaaagtaagtaatttgcccaatgtaagtagaagagccaggattaattacactttttccagagcccaaacactaagaatgacacatatttctaggaggaatagaacctgctctgatcatgttagtyacacccatataaaatcttacacacacacagaactatgaactagagtttaatgaaagagcaatgcctcttaagaacacatatacacgccaatgtgaattccacaaagaaaatactttattgcttgagtctgcttttgagaaaagtcattttataatatgaaaaaaattgaacttgacaaaactttaggtcctgtt

SEQ ID NO: 565353 - DNA, 592 bp, Homo sapiens
ttgggacactggtaggggtccagcttctgggcacacagtggacaaggagtggggattcttagataggcatggagaaatcagacacactttactttgaatcttgcctatcctcagccaatcctcacagtgtcctatgtacttgaaaagcctttatgtagataagaggatttctaccttaaccttaaattttagtgaactacattaatattttgtactgactaaagatttcatttctacccatggaaattgaaattgtgattgcctaaaacaccaatcaggcagaaaaaaaatctctaatggaagatgccagcttattcttttatttatttatagatttatgtttatttttatttttgagtcagggtcttgctctattgcccaggctggagtgcagaggcacaatcatggccactgcagcatcaaactgctgggttcaacctcgaggtccaccttggcctccctagtagctggaacaataggtgcatgccaatgtgcctggctaamttttaaattttttgcaaagatggggtcttgttatgttgctcaggctggccttgaactcctaggctcaagcaatccccccaccttggcc

SEQ ID NO: 565354 - DNA, 536 bp, Homo sapiens
tattgaccctgatgatcactctacaatagctgttatgggaataacatttaattttgccatgcaaaactaccgatgatgtattttaaatagtaagaagcatcaaaagtcgcattagatagttttaattgwaaagaaaaaaaactcacttaaaaatattttatgtaccagctcaacataacacatgtacatcatcactgaaattttactttgccacttaacattttctgtgatttatctaatgaaattagctaatgtgattttattattgcaatttctgctataaatcttacaggagctttgtggttttttttctttttacttggaaaaagatcaaaatgcttgcagacttcagattgctattagatgtaataattatacactaaactaattaccattaaccaaaacctgacttacaactaattaaattttattacatcatcatagagtgtaggctttcaatttaacacagggcacaactataaacacaagagtctatcagcgtgtatatttatttcaagtaaaaggcgtagatcaga

SEQ ID NO: 565355 - DNA, 549 bp, Homo sapiens
cctgatctcagactcacagggagttttcgtttctagttgaggcatgatataaagaggtaactgatagtaattaaagttattaagaaagccaggagaggtaatagaaggattactactttggtcagatcgtatgtaaatagcccatgggtctttgaaatgccagagaactgaaggggggtacccaacctaatggttctagcatccacccttcctgcagcatgcagacgttagcagtgccttgaaactctgagacactgcaaaggtcttgtggccttaactgctaacaaataacaaaggggccctggggctcacaaatgtttcgaaacatagtgaactgagacagtaggaacacttggcttatcctttccccscaacccagtcgaggccggagatacccaacaaagtggggcattggaagccagtgacctgagaagaacaaaagctgaccatttgcctccttccctgtggaataacttggcaaaatgtttgttgcacgcttgcccacaaaaaccccctgtgaaggcagagacccttcttccctgttctcag

SEQ ID NO: 565356 - DNA, 576 bp, Homo sapiens
ttgtgtgggtggaaggaattttgtagggagttagctacaatcaaatgaacaaagcactattttctttcccgaacactcctgttgtgtcctcgtttctatgcccatgtcagaccctcttcacttcgtgtctgctcagccgcagtggcttccttttcccagtctctccccggggcaagcaactgcaccctgcacactcactaggttttctaagccctgctttcatgacatctcttcttgatttaaccattttgaatgggtccccattggttactcaatgaagtcaaatttctttttttttttgagacaaagtctcgctctgttgcccaggctggagcagtggygcgatctcggctcactgcaagctccgcctcccgggttcacgccattctcctgcctcagcctcccgagtagagtagctgggactacaggcgcccgccaccacgcccggctaattttttgtatttttagtagagacggggtttcaccatgttagccaggatgatctggatctcctgacctcgtgatccgcccttctcagcctcccaaagtgctgggattacaggcgtgagccaccgc

SEQ ID NO: 565357 - DNA, 633 bp, Homo sapiens
gattcccctgcctcagcctccctagtagctgggacttacaggtgtgtgccaccacgcctggctaattttttgtattttagtagatacggggtttcaccatgttggccaggatggtctcgatctcctgacctcatgatccgcctacctcagcctcccaaagtgtataatatcttttttacaggctccatrttgacaacaaatctttgctaatagatgtatcaccccttgccaatttaaacagtagaggtacattatattcttaatagttttggtaatgatattgaattcatatccctcagtaagaaagagtgtcgtttggtacagtctgcacatattgattgtaagtcccaaccatacccagggcaagttatttattttccttaagcctttgcttcttaatatataaaatgggtaagatgatatttactttatataattactttgaggaagaaagaaactatacccctaaggtacctaataagcccttgataaatcatacccaggctttacttcttcttgacgtcttcaattcaatggaaggagaaatattcctattccaaagtggtagattttatttatcttggctggtagacgttatgtttagaacactgttgaaatgtcgttactatctct

SEQ ID NO: 565358 - DNA, 541 bp, Homo sapiens
ttttcctctgctgaatctagtagcaagtaaatgactattaaaatgtatttctttctttaatgttttgtacatacagccatagaagtcttgaaggaaaacttgactcagtatttatttagcatgttccataagtcaggaactcttctaaaatgtgggatacaaaaatctgaatgcttcccacacagaattgcttcatgtaagagtatttaaatagaactgaattctgtccatagcctttatgtatatttttaagtaaacctaacaaacaaaaagtartattcacatgtgtgcaggcacacacacatacatgcacatgcatgctcatatagagtaaacagttgatttttaagccaacaaataagataaaaatgaatacatttgtatgtttttcctattctttatactcttaacttacacaaataaaataatcttatgaagtaaagcacacctctattattgaaagaaatacacagatttagtcaatatttttcttgtcatagtttagatattataaatattaagattgtttctaacattattt

SEQ ID NO: 565359 - DNA, 598 bp, Homo sapiens
gattataggcatgtgccaccatgctcagctaattttgtatttttagtagagactgggttttgccacgttggtcaggctggtctcaaactcctgacctcaggtgatccgcccacctcggcctcccaaagtgctggrattacaggcataagccatagtgcccagccaaatctttcaaataactacaggaaaaaaataaggaagaacttgccttctatggatataaacacctattatgtaagtgcaataattaggtcactaggttatataatagtgtaaaaaaagacaaatgaaagagtagtacagaattcatccagatattgtttcatgcatgtgtaagtatttggtgtgtaataaatgcatatgaaagtcataaattagaatgaactatttaagaaatgtcatttagtcaattgtcttgctatttggaaataaataaaatgagatgagacctcaaattgttaatagctctggcttctggtgaaagaagtggaataagggaagcctaaaaggaaagttatccttttcaaaaatatatgttttggatgattttattaagactatatacaggcattacttatataaaaatgtaaaaggaaaa

SEQ ID NO: 565360 - DNA, 595 bp, Homo sapiens
cacagcacctatgatatagtttaataatttcacacactttttccctttggagggggatccccttcttatttccattcttctagttttgccatagacttcttccattaacttcaaatattgtaataacaggtatattttaagttcgagatataagcaagttaatagtttatgtctrtagatggatataagaatacacatcatgaaaacaacatataattaaaagaaaattgtatatttgcttttaaaatttactatattaatatcgggattcagaattgccctcttttttggcagaggattggctgaaacagtaataaaaagaagtcagcctgaatggtgactgagagattcattacatatttcagtggattcattcatgaaagatggacacatcttagcgtctgaagatgactttgtgcagggtagtgttttctctcttccacagaatacctttgggtaattctgaaatacagactgttgaacagaattgaccactgtatttttttttatagtggtttaaacagggcattcacagttgagttagtatgtacctctgttagatactccttttattcttcaggctagcgtttttatt

SEQ ID NO: 565361 - DNA, 519 bp, Homo sapiens
tcttatttggaaacattgtagaatatttccaaggaattaaattacacctaaatatttgttctttgtgtccttttattctttaatgatttagttaagtgtttgcaacatattggaattgtgtaagtaacttgtgactcaaaaataaatagatgacagcttctattatcttttaacacacatttagagggtgacaatttttttctaaaacatggtaaaccaatgtgataagttaattattagaggtaggaacagatgtctatgggagaatagaggatgaagcctaaatttgttcagacaacttgacagatttctaaagtgtctttgtgtgtatatgtatacatatatatatatatattctaatgtgtgtatgcatgtatatatacatattttctgtgtgtgtatatatagtgtatgtgtatgtatatgtatacatagaytatatattaattttaactccattcaagtgtatttatttgttttaaagccagaagagcgttactcttgcaggatccaactttt

SEQ ID NO: 565362 - DNA, 519 bp, Homo sapiens
tcttatttggaaacattgtagaatatttccaaggaattaaattacacctaaatatttgttctttgtgtccttttattctttaatgatttagttaagtgtttgcaacatattggaattgtgtaagtaacttgtgactcaaaaataaatagatgacagcttctattatcttttaacacacatttagagggtgacaatttttttctaaaacatggtaaaccaatgtgataagttaattattagaggtaggaacagatgtctatgggagaatagaggatgaagcctaaatttgttcagacaacttgacagatttctaaagtgtctttgtgtgtatatgtatacatatatatatatatattctaatgtgtgtatgcatgtatatatacatattttctgtgtgtgtatatatagtgtatgtgtatgtatatgtatacatagattatatattaattttaactccattcaagtgtatttatttgttttaaagccagaagagcrttactcttgcaggatccaactttt

SEQ ID NO: 565363 - DNA, 523 bp, Homo sapiens
aaaccaacacaaaggtctctactacrgctttgaaagctaaccggaacctcattgtgcattcataatttgttgattttagtgttcatagggatcacctggggatctgggtaaactgtggaatcgtattcagtggacctcagattctgcatttctaacaagctccaaactgctgccattgctgctgctttgccagcgcagtttgaatagcaaggctctattgcattgagcctgtggatcagagccgcatttgctcttgctatactattgtcctccatcccatttatttttgacagatcttcttcttataaataattacatttttgagatataaacaaaatcctgcatatttattccaactttaacatatcccttggccgggaaattttaacaacaaagaatcttcgttttatactttatctagaaaactctcacattaattagccaactcacacacagtaaaatcagaagaccatttgatgcaagctttgtgtgttttgtcctttgagaattagaatatagaatc

SEQ ID NO: 565364 - DNA, 523 bp, Homo sapiens
aaaccaacacaaaggtctctactacagctttgaaagctaaccggaacctcattgtgcattcataatttgttgattttagtgttcatagggatcacctggggatctgggtaaactgtggaatcgtattcagtggacctcagattctgcatttctaacaagctccaaactgctgccattgctgctgctttgccagcgcagtttgaatagcaaggctctattgcattgagcctgtggatcagagccgcatttgctcttgctatactattgtcctccatcccatttatttttgacagaycttcttcttataaataattacatttttgagatataaacaaaatcctgcatatttattccaactttaacatatcccttggccgggaaattttaacaacaaagaatcttcgttttatactttatctagaaaactctcacattaattagccaactcacacacagtaaaatcagaagaccatttgatgcaagctttgtgtgttttgtcctttgagaattagaatatagaatc

SEQ ID NO: 565365 - DNA, 657 bp, Homo sapiens
gaagtttggtactttgtcattacacatagggatttaagtatcagcttgtggcactattgtgtgacaggagggttgggaaattgcaaaataatttaggaattttaaaatctaatgaagaaaatatcaggcctaaatgtatgcattgtgaattctatacaactagaaacctttaagtgaaaaaacacaatggctatttaggtattcacattagataaattttgtctctagtgatctacctacacattataaactttttctatactcttgttaaattcatccatgaggtaattaaataaattctgtaattagccctcaattttatgtttattagaaatagtttgactgtgtgtctttttcttttatactcagattattgattaaatgaattttcctatgwaataaattctaatacatattaaaatctatttattttggtgtccagtgtatattctctcattcactgaatatttaccaaacagttttcatgagacaagtactttctagattctagatgtgctgcttcaaataaactcattctatatctttggattatcagacctcgtattattataaaaccagtaagtgctaagagacatctaccccagagtaaggactatgtaaccgtgggaactaggggagtcatgtcataaattaatt

SEQ ID NO: 565366 - DNA, 628 bp, Homo sapiens
ctcatttcgcctttaactttacattggttatggtatttaaatgctttttatcagaattgaagactgtcaccgtagtactttagaatttccatcgatgccaaaattttaacgcactatgatgaaacagaaagtgcacacagaaaaatttcactctcattccattactgctccaattcaaatttctttgtttcagttgttgacttaaatataaatcattgattttgaaggacatagattcccactaatgaaaatggaaaactattgaatcctctggaactggtacaaatcatccacatgatttagtaatagtccactctggcaaatgaccatgccatgatgattacagcaccccttaacaggaataaattgtagtgcagtgrccactgtatgctcacttcactgctctctagatcaatagatccagtaataacaaagtaaacttaaaataaatctgaataaaaattagtgtatagaaaaatccagtcccatttcttaacacggattttcaaattaaaaaaaaaaaaaaagaaaaaacccaaggtataatgtcaggggtggggagagaagagcaataatcatggaaaactttacctagtaggtgtttttaaaacatacatatatgtgtgtg

SEQ ID NO: 565367 - DNA, 614 bp, Homo sapiens
tattgcattctaatggcccttctggccatacattaacctctatacctgcttcatcttgttcagaagcagctcagtattttttttttatatggttgatttatgctgggttaggtaaaagttgattgatggatctcttagttcaaaaaaaggtgtagtctctttttcttgtttactctggtgtgaaacatagagctttgttgaagtatgggctcattatatcttttcttaaaagtattttttcagacattcagagtatttaaggctttttaatgctcatatccatatgatatgggtaatggtggtgaccacgttttcctcagcaggtatattctttagtttttttgctaaatacagcttctctggacccttcatcactgactgctcsgtggttggaagcaaaggtgggttaagctttgggatacaaaaaaccttcctcttgccccatggacattttgtcattttaagggggctgtagtactacccaaatctttggtcattcctgcgttattttcaaaatctgaaaacagtgtgctatcggggggatgtttccttttagagtattgagggcagtctcaaggacagcaaaaactagatcatcaaatacacctgagaac

SEQ ID NO: 565368 - DNA, 617 bp, Homo sapiens
acatagtgcagtgctgtaaatgtattttctcttcctaatgattttcttttccttaggttactttattataagaatatattatataatgcatataacttacaaaatatgtgttaattggctgttcatgttactgataaggcttctggtcgatagtaagctattagtaaagtgtggagggagtcagggttacctgtggattttccactgtgcagggagtcggtgcctagaacgcctacattgtctgggtcaactgtatattgatttacttttgccgatacaatactgaaaagaaactaaggcaaaaaagtacatgagaaaacctgaaaagtctcctttcagctccaaaatctccatttcttctcctccagcctccaatattgtactctatatgactgcaaacaattttctgcagatcaacatataatttgtacacaaacatatatatatacagaggttttaacattttacataaatatgatccaagtcctatgcaaatattattctgtgattttgctcttcaataatttctcttttgatcttcaataatatgtctttggratctttacctatcaacatatctttaaaaagaatatattttgtttttttttttgagacag

SEQ ID NO: 565369 - DNA, 488 bp, Homo sapiens
cattcttctaacattgtaaatgttttgtgtaaaattatttctaaatttaaaaattatgaaaaattacataaaataaacatagagttggtcaactcttcattgcctaaattgcaacaactgggattcagccacattaactcttaatgggattattacagcaagcccatgaattctcccattttttactcctaactcccctattcccaactcagcaaccagagtaatctttcagaatgtaaattagaagatgtcattcttcttatctcaatcctccaatggcttctcacctttctcagaatcaaatcaagatttggaaatggtctgaaaggccttacaggatgtgatccctcctccccgctctctgtcctttgatctcacttcctacagtcaaaatgcagtgaaacacattttaaacctaaaatgctcatgwtcataccaaattaaaacacccattggtttccacatggtggcagtgagggaaataaaag

SEQ ID NO: 565370 - DNA, 538 bp, Homo sapiens
atcttggctattgtgaattgtgctgcaataaacatgggggtgcagatatccctttgatatactgatttcctttctttggggtatatgtctagcagtgagattgctggatcatgtggtaattctatttttagttttttaggaactaccaaactgttttccatagtgactgtactaatatacattgccaccaacagtgtaataggattctcttttctccatatcctcgctggcttttgttattgcttgtcttttggataaaagccattttaactggggtgagatgagatctcattgtagttttgatttgcatttctatagtgatcaatgatgtggagcaccttttcatatacctgtttgccatttttwaaaaatttttaatatttgtgtatacacagtaggtgtatatatttatggagtattacatgagttgttttgatacgggcatgcaataatcacatcatataacatggaatattcatgccctcaagcatttatcctttatgttacaagcaatccaattatacgctttaagttattt

SEQ ID NO: 565371 - DNA, 550 bp, Homo sapiens
gagagagaaaaaagaaaacgatttctgtcttctaagagcttatactgtagaatgggaatttacttatgaacatgaattgatataagataaaatacctataccattttgaatcaagcacatttgtttttatgtggttcatatctactacacaccatgctgggcacttttcatgatccttgaaagccaaacaaccttgccatgtgtccttttatgtaaatatgaaatgcatattttttctttaccttcttctttttgttaaaattccccttgaatgtcctgatcagtgacacakaatatttctattgtcattctggccatagacaaacatgccacataagaataatcaatatttactcccaaattatttttcccagattggaaaagcactgtttcaatttgaaaacttaaaaaattatataaaagtaatattaaaaactatatcactgagagttgcataaatagaagctctctcatcatcttaaaacatcttcccaaatgtttttcttttttattatttctgagtcaaaaggtctccctaatttggcatcac

SEQ ID NO: 565372 - DNA, 580 bp, Homo sapiens
tgaaaacattctccctgaaaactgaaacaagacaagaatgtccatttttaccatttctattcaccatagtactgagtsctagccagagcagtcaacaagagaaagaaataaggggcatccacatcagtaaagagaagtaaaactgtcactgtttgccaattatataattatatacttaggaaaccctaaagactcattcaaaaagctcctagatctgataaattaactcagtaaagtttcaggatacaaaatcaatgttcacaaattagtagaaacagctatacacaaacagctgagacaccaagctgagaaaaaatacatcaagctgagaaacaaatcaataactcaatcccttttacaacaatggcaaaataaaataaataaataaataaatacctaagaatatacctaaccaaggaagtgaaagatctctacaagaaaaactacaaaacactgctgaaagaaataatttacagctgggcatggtggttcacacctgtaatcccagcactttgggaggccaaggcaggcagatcacgaggtcaagagatcgagaccatcctggctaggaaagtgaaac

SEQ ID NO: 565373 - DNA, 580 bp, Homo sapiens
tgaaaacattctccctgaaaactgaaacaagacaagaatgtccatttttaccatttctattcaccatagtactgagtcctagccagagcagtcracaagagaaagaaataaggggcatccacatcagtaaagagaagtaaaactgtcactgtttgccaattatataattatatacttaggaaaccctaaagactcattcaaaaagctcctagatctgataaattaactcagtaaagtttcaggatacaaaatcaatgttcacaaattagtagaaacagctatacacaaacagctgagacaccaagctgagaaaaaatacatcaagctgagaaacaaatcaataactcaatcccttttacaacaatggcaaaataaaataaataaataaataaatacctaagaatatacctaaccaaggaagtgaaagatctctacaagaaaaactacaaaacactgctgaaagaaataatttacagctgggcatggtggttcacacctgtaatcccagcactttgggaggccaaggcaggcagatcacgaggtcaagagatcgagaccatcctggctaggaaagtgaaac

SEQ ID NO: 565374 - DNA, 580 bp, Homo sapiens
tgaaaacattctccctgaaaactgaaacaagacaagaatgtccatttttaccatttctattcaccatagtactgagtcctagccagagcagtcaacaagagaaagaaataaggggcatccacatcagtaaagagaagtaaaactgtcactgtttgccaattatataattatatacttaggaaaccctaaagactcattcaaaaagctcctagatctgataaattaactcagtaaagtttcaggatacaaaatcaatgttcacaaattagtagaaacagctatacacaaacagytgagacaccaagctgagaaaaaatacatcaagctgagaaacaaatcaataactcaatcccttttacaacaatggcaaaataaaataaataaataaataaatacctaagaatatacctaaccaaggaagtgaaagatctctacaagaaaaactacaaaacactgctgaaagaaataatttacagctgggcatggtggttcacacctgtaatcccagcactttgggaggccaaggcaggcagatcacgaggtcaagagatcgagaccatcctggctaggaaagtgaaac

SEQ ID NO: 565375 - DNA, 580 bp, Homo sapiens
tgaaaacattctccctgaaaactgaaacaagacaagaatgtccatttttaccatttctattcaccatagtactgagtcctagccagagcagtcaacaagagaaagaaataaggggcatccacatcagtaaagagaagtaaaactgtcactgtttgccaattatataattatatacttaggaaaccctaaagactcattcaaaaagctcctagatctgataaattaactcagtaaagtttcaggatacaaaatcaatgttcacaaattagtagaaacagctatacacaaacagctgagamaccaagctgagaaaaaatacatcaagctgagaaacaaatcaataactcaatcccttttacaacaatggcaaaataaaataaataaataaataaatacctaagaatatacctaaccaaggaagtgaaagatctctacaagaaaaactacaaaacactgctgaaagaaataatttacagctgggcatggtggttcacacctgtaatcccagcactttgggaggccaaggcaggcagatcacgaggtcaagagatcgagaccatcctggctaggaaagtgaaac

SEQ ID NO: 565376 - DNA, 294 bp, Homo sapiens
ggatcctgaggcaaaggtagagtggccagttactaagacmcaggaaagaaaacaagccagaagattaaagaaagagtagagctcaataggtacgcagacttggtgtcaaaggtagaataacatggaatcaaccggagtgtccatcaacagatgaatggatttcaataatgtggcatatatatacaatggaatactattcacccctaaacaagaaggaaatcctatcatctgcaacaacatgaataaacctggcagacattatgttaagtgaaataagccaggcacaaaaagaca

SEQ ID NO: 565377 - DNA, 577 bp, Homo sapiens
gctaattacctcgatttaaccattctacaatgtatatgtatatcaaaacatcatgttgtatatcataaatatatagaatttttatttgtcaacttaaaaaaggcagggtaaagatttcacttcataagagattattgtttttccattgttattaaaaatatatgaatttctattccagaatttagcataaagtataagtgagcagagatgtttctaaacaagggaaaactcaatatttagctaacttacacagccttrctatgataaaatatatgattttattaagctctaagaaatattcataatggcttgtagaaattttgcaagctccctggagccaagatttaatatttgagggcatcattacagtggatctatcccaattcaatcacatttatttttggaacacctttatttcaggaagaatatttcctctagctttactttctcatcctactgctttactctcagcaaagagggtcttcactgtaaaattcagagaatttaaaaatccctctgaagccactcattttaattgttcaagtctgccaatctaccctcttccttcatgaaacct

SEQ ID NO: 565378 - DNA, 608 bp, Homo sapiens
gatgcccaacttgtctgactattagtcacaccaattagattggatagatgcatggctttagtacggtgttgtgcctcaggacatgcacatagacttaacatgatgtattatttcttgttgagcacaacctacctaaaatgatgactactaaatagcatacaatgagtatagcacatagtacactcaaagagccccaagattatggaatagtaacattccacagaaaatttgagattcagaacttgcaatgatgctttccaagatctgtaggattctaggatttatgagatctgatagattattttgggatgaatagattcctgagtagagccagtttatatagctttgtcattattcatgaaacacatttcaactcaaggtcccaagtcaaatttcatcaatgattgctttcaagcataataagtacaactttaayagatttacagcatcttaagaagttgcaagttgactgagaattacccaatgaagggtcaacattcagaaatccatggaattgccccaaataagttcctttttccttcaattttataatcaggcatcatatggctatatttttcactgttctgtgatttcctttctttggaaaa

SEQ ID NO: 565379 - DNA, 515 bp, Homo sapiens
aatgagggtcatatgactggcttgaggggagaaattcaagaagaaggtgagagtgacctttctgcttctgcagatttctcaaatgccaagatgccatatattgaggtagcatgtcctgaactccatcattacacagcaaaagccatatggctgtcacatgataggcactcagatgaattgtccaaaatgtggccaattctgattttaacatttacccatagcagtcattatcagcaaatatgtatcagatgtcaactaaatatgaggtagtgaagtgttaacamtataaagataatgatgatatagtagtattatgaatagcatagacaaagaaacctgcaattttaggatgacaggaaccatggtagaaagatgcatgaagtgcagtgcatacacacacacacaacacacaaaggacaaatatgttttgaggagatcagggattttttttttttttttacagagaagattatatttggatgagatcattcataaacaggtgaagagagaatggg

SEQ ID NO: 565380 - DNA, 477 bp, Homo sapiens
tgcatttatggtgaaatctatatttccctgaaactgagactgtgtttcttttattttattaaatttttattttaaaaataatgggacttttcagaatgcagcagcactgctttgctgtccaggccattttttgtctgagtgtttcatactgatcttttttgcatattatttcaaaaatcataaaggtacaaaaaaaagagcaaacatgctgtaggaaagaaaaggagaaaccacattataactgaaatgccactaaacataacatatcactcagatgcttttaacttccgattatattgctcaactcattcaatcaaagtagcacaacatttcttgttcagagcttaagtcaacatttgtggagtgaacaatagaaccatttawcttataaatgattgcacctgcgaaggtgaggcattctcaagaggactatgctggcataggcctatcagactcaccatgagagtatgcagaaga

SEQ ID NO: 565381 - DNA, 610 bp, Homo sapiens
aaataagctttattttttagaacagttttagatttatagaaacattgagaagatagtacagtttccatataccttatcacccagtttcccttttggttaacatggtatatgttattcatatggtacatttgttacaattaatgaaccaaatgatgcattgctatcgattaaagcccatcatttgttcagatttccttagctcttaacttatatccttttctattccaggatcccagccgggataccatattacattgagtagtcatatctccttaggctcctcttagctgtgatactttcacagatgttctttattttttatgaccttgacagttttgaagtgcactggtcaagtattttgtagaatgctaccctaatgaaatttttcagatttttgttttcatgatttgactgaagttatgggtttttgggaggaagaccacaggtaaagtttcattttcattacattctatccagggtacatatatcagcatgatttatctttgttaatattgaccttgatcatctggctaaggtagtgtttgtcaggtttctcactgtaaagttactctattttcactcttttccawactgtacccattgggaaaag

SEQ ID NO: 565382 - DNA, 509 bp, Homo sapiens
gaatagttatttttaaatttatatmtttagggcacaccaggaaaaccaaatgaacagggaagaaactggcagcgtgtaacattaagcacaaaatggtaagatgttatacacagctagggacttgtgcagaaatacaatacacagaaaaatcttttgaactattagttcttcagatattacaaaaaatgcagctccaagaatgagtccattgaaaagaaaataatagtaatgctgaattaaagtacactattccattcagcacataactgattattttatatgaaagtgacctatgtcatctttacttccttctctccttccatctgttaagaagtataaatgacttaagggtgggctttattattttctcacaggttaaagcatttcctgatgtcgacattggatttgcacaatttcaactaatatgggagtgtgttggccgagtctttttgagggtcgcattaactcattaataaaagaaaccgacttatagcatttcagttgaccac

SEQ ID NO: 565383 - DNA, 376 bp, Homo sapiens
ttttaaatcccccaaatctcatgkgtatatcagaataaattattaaaatggaacataattttgtaaccccaacaaacatagagacagaatataaccagtacacaaagaaattacttctcccacacactcttaatcactacttcctctgactttctaaagtcagaatcctgactattctgaattctaacatcgaaaatttttgcctatttttaaattttaaattaataaaattagacatttattcaaattatatgtatgcataattcatccttttttggtgtacctgtagtttgttcatttaaatttgttagaataattgcattaaataaatatcctacattctacttatccattgtactactgatgaccctttggg

SEQ ID NO: 565384 - DNA, 631 bp, Homo sapiens
aaactacactgggcgtttaccatgggtagctcttcaccagcatatcttcctaccttcttgtttttttcttatgttttgcatttttttctatctaaataagagtatcctttaacacttcartctcctgaacttattttgtcccttggtaggggtgaatcaatgtattgctttcttttcaaaagttaaaggccatataatatgctttttcttttaatcttttcatttttaatgtttttaaattctttatcctctactatatcttttttcttaaaagaccaagcatttcctttcaatgagctgacaaattctatgtctttctgactgatgccaaatctgatgctatgtgaaaaaagagacccattgttaggaatcaataagataaaaagaaacgggtccggcgtagtggctcatgcctgtaatcctaggactttgggaggccaaggcaggtggatcacctgaggtcaggtgttcaagaccagcctggccaacatggtgaaaccttgtctttactaaaaatacaaaaattagccaggagtggtagcaggcacctgtaatcctagctacttcggtggctgaggcaggggaatcgcttgaacctgagaggcagaggttgcagtgagctgagatcacg

SEQ ID NO: 565385 - DNA, 631 bp, Homo sapiens
aaactacactgggcgtttaccatgggtagctcttcaccagcatatcttcctaccttcttgtttttttcttatgttttgcatttttttctatctaaataagagtatcctttaacacttcagtctcctgaacttattttgtcccttggtaggggtgaatcaatgtattgctttcttttcaaaagttaaaggccatataatatgctttttcttttaatcttttcatttttaatgtttttaaattctttatcctctactatatcttttttcttaaaagaccaagcatttcctttcaatgagctgacaaattctatgtctttctgactgatgccaaatctgatgctatgtgaaaaaagagacccattgttaggaatcaataagataaaaagaaacgggtccggcgtagtggctcatgcctgtaatcctaggactttgggaggccaaggcaggtggatcacctgaggtcaggtgttcaagaccagcctggccaacatggtgaaaccttgtctttactaaaaatacaaaaattagccaggagtggtrgcaggcacctgtaatcctagctacttcggtggctgaggcaggggaatcgcttgaacctgagaggcagaggttgcagtgagctgagatcacg

SEQ ID NO: 565386 - DNA, 512 bp, Homo sapiens
tggtcttcagggctagattacagagaatcaccataacttcagcaaagctttaaccctcaccacccccgtgtattctccagggagaaagtgtcttcctgttactggctgtccttacagaaaaacawgcttttattattcccttggacgagggacctttcatattcaatctcacaggcaagctacagctctttctgctataacagagctctgtaattacagttattaatcttaaaatcatgggctctaatttaaaaggtttcttgtaacctgaaagtctttcaaaatataatggtgcaaaaaataaatcactctctgcaagtggcatctatgcttggtaaatgccggcagtaagaaggatataaacgtattccccaaacaggtaccataaactgagaaataacacagtgtcaaccataaacatgtctttgccatagccttgcctaaaaatcttctcactcacaaacctgagagaagcctttcaaatgctatttcaaaaagaaaatcaataaacc

SEQ ID NO: 565387 - DNA, 506 bp, Homo sapiens
ttctataatggttgcttgagctcctccctctcaaatctgtgtgcactgtgctgggaattcacacttagatattatggagaatcaatttgtaagggagtagtctttatttcacttcaatgaactaattttattttaaatgaatgtattagaaaatttgctcagaaagtactgatatatattacattatgaaaaagaatatattaaatcagcactctgtgtctagctcagggtttgtaaatacaccaatcgacactctgtatctagctaatctagtggggacgtggagaacttttgtgtctagcccagggattgtaaatgcaccaatcagcaccctgtcaaaacagaccaatcagttctctataaaayagaccaattggctctctgtaaaatggaccaatcagcaggatgtggatggggccagataagagaataaaagcaggctgcctgagccagcagtggcaccccgctctcaggtccccttccacagcgtggaagctttgttcttt

SEQ ID NO: 565388 - DNA, 635 bp, Homo sapiens
ccagtttggtgatactgggaggataggaccagcacaggcaggcaatttacattctctcacatcagttttcagctgacattcaaggtggttttgaccaaacttatggaagcagaatgtatgttctgtttaagcattttctgtgtagtcagcatgctcataagtaaggctaacgcctcctcctcttattctcagaatgaacttcctaacttcttctctgaccatggctcttttgcctcaccagtggcctactttgcatgtcccccaggcattcagtcttattaggtacattttggccaactctctacatgataaagccttaggtatgttttaagaagcaaaacactgatgttattagaagttgttcttgaaatwaatgcatctttgggggtttcctttcctttaaatgcaaatatctctaggagaataaatactgcaaagataaataaacagagcctctgtcatcacagagataatagggtggttggggaggcaaataagtaaattatcattccagggaaatgaataaattttatgtaggtgcttagaaatctaatgagacttgagcataaactctgtgcacctccttctgaccatgaaacacacacacaaacacacacaccccacaagtggctgtc

SEQ ID NO: 565389 - DNA, 635 bp, Homo sapiens
ccagtttggtgatactgggaggataggaccagcacaggcaggcaatttacattctctcacatcagttttcagctgacattcaaggtggttttgaccaaacttatggaagcagaatgtatgttctgtttaagcattttctgtgtagtcagcatgctcataagtaaggctaacgcctcctcctcttattctcagaatgaacttcctaacttcttctctgaccatggctcttttgcctcaccagtggcctactttgcatgtcccccaggcattcagtcttattaggtacattttggccaactctctacatgataaagccttaggtatgttttaagaagcaaaacactgatgttattagaagttgttcttgaaataaatgcatctttgrgggtttcctttcctttaaatgcaaatatctctaggagaataaatactgcaaagataaataaacagagcctctgtcatcacagagataatagggtggttggggaggcaaataagtaaattatcattccagggaaatgaataaattttatgtaggtgcttagaaatctaatgagacttgagcataaactctgtgcacctccttctgaccatgaaacacacacacaaacacacacaccccacaagtggctgtc

SEQ ID NO: 565390 - DNA, 560 bp, Homo sapiens
gataatatttttttctcttgcaatctttggtgtgtcctggtgctaaaatagtgcttttcacaccatagcatttcacagatatttgccatagcagtggaagggctactctaaggaaacgtgccttcggagtttcccaccccacccttgtcatggcagggttaggaacacactctgcaatcagaaagaactaggttcagactctagctctaagagttaatgaccttgagccaagtatttaacccctgcaactggaagtctcgttggtaaattcatatttcatcagggcttgtrcagaccaagacacaaaacatggaaacaagatgttccacccaagcctgcaccattatgtgtattccacataaactacagtgtgggtgctgcctgagaatctgggataatttttaaagtcccaaatattcacagacctggatacttagtctcacctctgaaattagttgttaactgtggaagaagctagcttgctggttttgaagcatgagatctgagatgttaccttattatgtcaataaacagataattttagtagacacattaacaac

SEQ ID NO: 565391 - DNA, 587 bp, Homo sapiens
cacactacgtacacatacaccaacacacacgcacacacgcagactttctgcttcttccttagtcttgactcatatcagtaaatgacattatatcatgccaggttactcaaaccaaaaacctatgagttagcctcgatttccttctcactcaccctcttgttcagcccatcagcatgtctggtcagttcttccttccatgtaaaaacacatctgaaagctgcaaatttctcttygtctccaggaccatcaccttggtccaagccatcaccctctctcctaactcatgtcctgtccaatcttgacttcttctattccattctctctacagcagccagaatgacgtaaaaatgtcatttagttcatgtcataccttctcataaaagtctacactgtttatcttattttggaaaaaaaaaaatccaaactgtttatcctggcttacaaaggactcctgccacccttctgactcaatgtcctaccccttcccagtggattcatttgttccattatgaaaagggtatggttacaggcacctgtgatgcatcagtgaaaaaaacaaagatccctgccctaatgcaatttacatt

SEQ ID NO: 565392 - DNA, 579 bp, Homo sapiens
gaatcttggccctcccctgaaagaatgccaaataatctcttttgccaatttctgatttttccttacatacacacaaaaaaaaacccacaaaaaaaatggtgaaaatttcaatagctttccactataggcactgattctgctcacaggtctgtgggacagtgaggtagctctgttccccctgtctcattctggggtccaggctggagggggcagcagttccctggggcatgttcttctccwggtggaggtcaggcctcccagagaagcagcatgagcaggtgatgcctctgaatgcctgtgcttggaggtggcacatgtttgcttctgtccgtattccaccagcaagagcaagttatgggaaccagccacgtcagcgggaagcgtaatcctcccatggatgcaggagagtgcatatttgctgaagagtaatcattctcctgattttcagaccacatcaggttgtgctaagagatgcaaaaacaaacatacgaacaaaaaagaaaaaaaaatcccacatctgggcacggaggcactgtgtaaacacaaaggaacaacctttacatacagatatcctgttgg

SEQ ID NO: 565393 - DNA, 579 bp, Homo sapiens
gaatcttggccctcccctgaaagaatgccaaataatctcttttgccaatttctgatttttccttacatacacacaaaaaaaaacccacaaaaaaaatggtgaaaatttcaatagctttccactataggcactgattctgctcacaggtctgtgggacagtgaggtagctctgttccccctgtctcattctggggtccaggctggagggggcagcagttccctggggcatgttcttctccargtggaggtcaggcctcccagagaagcagcatgagcaggtgatgcctctgaatgcctgtgcttggaggtggcacatgtttgcttctgtccgtattccaccagcaagagcaagttatgggaaccagccacgtcagcgggaagcgtaatcctcccatggatgcaggagagtgcatatttgctgaagagtaatcattctcctgattttcagaccacatcaggttgtgctaagagatgcaaaaacaaacatacgaacaaaaaagaaaaaaaaatcccacatctgggcacggaggcactgtgtaaacacaaaggaacaacctttacatacagatatcctgttgg

SEQ ID NO: 565394 - DNA, 579 bp, Homo sapiens
gaatcttggccctcccctgaaagaatgccaaataatctcttttgccaatttctgatttttccttacatacacacaaaaaaaaacccacaaaaaaaatggtgaaaatttcaatagctttccactataggcactgattctgctcacaggtctgtgggacagtgaggtagctctgttccccctgtctcattctggggtccaggctggagggggcagcagttccctggggcatgttcttctccaggtggaggtcaggcctcccagagaagcagcatgagcaggtgatgcctctgaatgcctgtgcttggaggtggcacatgtttgcttctgtccrtattccaccagcaagagcaagttatgggaaccagccacgtcagcgggaagcgtaatcctcccatggatgcaggagagtgcatatttgctgaagagtaatcattctcctgattttcagaccacatcaggttgtgctaagagatgcaaaaacaaacatacgaacaaaaaagaaaaaaaaatcccacatctgggcacggaggcactgtgtaaacacaaaggaacaacctttacatacagatatcctgttgg

SEQ ID NO: 565395 - DNA, 604 bp, Homo sapiens
aaatgtaaatcagccagaaggcaacagtaatcatcttgttacccagaaacaccctctgtgaatattctgatcatgactactgccaacaggactgaagcatgcctgacctgcaagcaatggagatgctcagcccccagtggggcaccttccctaggggaccagtcagccacttggtggcaagttgattacactggaccttccaaacatgggcgggggcggacatatgccattactggaatagacacgtatcctgggtacagaattgcctctccagtcctcaatgattctgccaacaacaccatccatgcatttaggaatgcctcattcaccrtcaaagaattccacatgaaactacttctgatgaaatcatttgtcccctaaatgcttactctggacctgggtataaatctacctctcagaggagccagtgagacagatctttgtagccaaaaagagcactctttgcttgtttggaggagacacgacaagctctaattctgggtctaggaacaacccgggccaaaaggaaatatgtttgggaacaatggatcccattactaccctatatgcgttttttattcttgaaaacccaatctcagcaaat

SEQ ID NO: 565396 - DNA, 457 bp, Homo sapiens
gccagggatttccaccaagcaccagaagctaggaagaggcaaggaagaacccttcttcagactctttgaagggagtactaccctaatgacatccttgattttgggcttccaggctcccatattggaagagaataaattactgtgttaaaccactttgttgttgttgttgttgttgttgtytttgtttctgagatggagtctcactctgtcacccaggctggagtgcagtggtgtggtcttggttcactgcaacctttgcctcctgggttcaggcagttctcccacctcagcctcccgagtagctgggactacaggtgcccaccatcacatgtggttaatttttatatttttagtaggacggggtctcaccatgttggccaggctggtctcgaactcttgacctgccttgacctcccaaagtgctggaattacaggcatgagccaccgcacccggtgc

SEQ ID NO: 565397 - DNA, 457 bp, Homo sapiens
gccagggatttccaccaagcaccagaagctaggaagaggcaaggaagaacccttcttcagactctttgaagggagtactaccctaatgacatccttgattttgggcttccaggctcccatattggaagagaataaattactgtgttaaaccactttgttgttgttgttgttgttgttgtttttgtttctgagatggagtctcactctgtcacccaggctggagtgcagtggtgtggtcttggttcactgcaacctttgcctcctgggttcargcagttctcccacctcagcctcccgagtagctgggactacaggtgcccaccatcacatgtggttaatttttatatttttagtaggacggggtctcaccatgttggccaggctggtctcgaactcttgacctgccttgacctcccaaagtgctggaattacaggcatgagccaccgcacccggtgc

SEQ ID NO: 565398 - DNA, 457 bp, Homo sapiens
gccagggatttccaccaagcaccagaagctaggaagaggcaaggaagaacccttcttcagactctttgaagggagtactaccctaatgacatccttgattttgggcttccaggctcccatattggaagagaataaattactgtgttaaaccactttgttgttgttgttgttgttgttgtttttgtttctgagatggagtctcactctgtcacccaggctggagtgcagtggtgtggtcttggttcactgcaacctttgcctcctgggttcaggcagttctcccacctcagcctcccgagtagctgggactacaggtgcccaccatcacatgtggytaatttttatatttttagtaggacggggtctcaccatgttggccaggctggtctcgaactcttgacctgccttgacctcccaaagtgctggaattacaggcatgagccaccgcacccggtgc

SEQ ID NO: 565399 - DNA, 508 bp, Homo sapiens
ctacttgttgggtaccataagcagtgtggagggggcaggatggataagcatacatgcccactaggagcttataatctagtggaggagaaagaagtaacaggctggagagtatcaaggaaagaagataacctgtctggctgaaagagaagccatctgggttgtgatatcactgagcaggtcttgaaacatgacgcttaagtacctcctatcctcccctgcccaccgcagctgcattttctcgcctgccattcgctagtgaccctgaatttccaatcgtgccctacttcagcttgaaccctccagcctgttgtgattggttatttccttttttctattaaatattcccagctagatgtccctctgataaagtcctgtacattccatttgaaagtatgaatgaygggtaaccaatgttgatgctgcccttggagacaatgacacatgaaggattcctatggaggaactctagatgttggagacaagttatttggagagttgtttggggaca

SEQ ID NO: 565400 - DNA, 508 bp, Homo sapiens
ctacttgttgggtaccataagcagtgtggagggggcaggatggataagcatacatgcccactaggagcttataatctagtggaggagaaagaagtaacaggctggagagtatcaaggaaagaagataacctgtctggctgaaagagaagccatctgggttgtgatatcactgagcaggtcttgaaacatgacgcttaagtacctcctatcctcccctgcccaccgcagctgcattttctcgcctgccattcgctagtgaccctgaatttccaatcgtgccctacttcagcttgaaccctccagcctgttgtgattggttatttccttttttctattaaatattcccagctagatgtccctctgataaagtcctgtacattccatttgaaagtatgaatgatgggtaaccawtgttgatgctgcccttggagacaatgacacatgaaggattcctatggaggaactctagatgttggagacaagttatttggagagttgtttggggaca

SEQ ID NO: 565401 - DNA, 425 bp, Homo sapiens
tgcggggtcttgtctctctytcctgcttatgtgtgtgtgtaaacacacacatgcacactcaccaggaagatacaacaatttatccactctggaatctggcttctgagtcagtattttcatgccattcccactgacttgtaggattagttcttgtgtcgtgtcaacaaagcatctcaccatagactaactttcttaacacatttaggaaaagccaggaaaagaagtaatttggaacctgaaaaaacttgaaagggggacaactgacttttagctctttccctggaaatattgtagggcctggaggacctttctcagctttggaatcaacctatatcccaaggatatggctggtgaagggacagccagagatgaatgttgctaggcctcttaaaatggccctgagctgagcaggtcaacagctatgg

SEQ ID NO: 565402 - DNA, 570 bp, Homo sapiens
ttaagagcaagaaaatccactgggaaggaagtaaaattyatatgattctatcaagtgaattataaaggagccagaatctctggcacactcctgctgggaaatgaggagggtgagatttaccacctgcctcctgctttaggtttttatgaccttcacatttagatctttaaaaagtgaggggagatctttaaaagtgaggggagaatccttgtccatcgttctttgtattagtgaacattaaaggttctcaaggcctcctaaaatcaactattccaaagaatgttagactgggaagaagccatctaatccacctgcctgccttttcagatgaacatagtatccagtatataggatacactcgagaaataattgttgagtgaatgactgaaaaaaatgcaagaagctcctggtccggaggggagagtaattcctctgagactctgcagctgactagagacaaagctggcttggaacccaggtctcttgttcctcagttaagttgtcctcttactaacatactctctgaccctcaatgcaaactgtctctttgcagctactacatacagcaag

SEQ ID NO: 565403 - DNA, 516 bp, Homo sapiens
aaataaagagctacctgcaggaagcataactcagtatcaagtcactgaggcactatcacagacttacgagcacctggcaaacggcccagaacaatttttaaaagtcacctatttgtcaattaaacttcaccacaagtcaattagcatggtgatttttatgctccagagagaacaggctataatgaacagtcaggagttgtgaggactcacaataacagtaattctttatgggatggtatgtgaaaaatatcaacagcataacataaattttaaartaaatttctttctggctgagtgcagtggttcatacctgtaatcccagcactttgcgaggccaaggcaggcagatcacagggtcaggagactgagaccaccctggccaggatggtgaaaccctgtctctactgaaaatacaaaaaatcagttgggcgtggtggcacgcgcctatagtcccagctactcaggaaactgaggcaggagaatcgcttgaactccaaaggcagaggttgcagtgag

SEQ ID NO: 565404 - DNA, 604 bp, Homo sapiens
ctccctaaatgattgttattcttaatagagtttgaaaaccactgctctatacaaacacattcatgtatgggaaactgaggcttaaaaaaaccaaartaattgtctaagattgaatatctcttttgtagcatcatcaagatgacgttccagtcttttttgttttcattatacaaaaactaataaagtgacagtgagttttatacagagttattaaaggttattctacaaccatgtagtcatttagacctaatatggacaatctaaatcaaattttccagcttttacaattcactgtgaaatatgacagtaagttagtagtattaaagcctaaactgaagactgcctgaaactccaaaaaacacagataaaaatagtttcctatattttatacaaaataatgccattattggcattagttccaacttatgtagaatatgcagtgtttggttttctgctcctgcattactttgctgaggataacagcttccagctccatccatgtcaatattgctcctttttatggctgcatagtattccatcatgtgcatgtagcacattttctttatccagtctaccatcgatgagcatttgggttgattccatg

SEQ ID NO: 565405 - DNA, 517 bp, Homo sapiens
atgtcactacctagcactttgggaggccgaggcagacagatcacaaggtcaggagatcaagaccatcctgcctaacacagtgaaaccccatctctaataaaaatacaataacttagctgggtatggtggtgtgcgcctgtaatcccagctactcgggaggctgatgcaggagaatcgcttgaacccaggaggcrgaggtcgcagtgagccaagatcatgcaactgcactccagcctgggcaacagagtgagactccacctcaaaaaaaaaaaaaaaaaaggaaagaaaaaaagaaaatgtcactgaatccttccaaatattatagtttaagcagaagctataagtaaagaccatcatttttctggatgtgaatgaattcgtaaagacatttcacagaagactcctactgatatggaacacagagtcaataacaaactgaaaagctccattggagtaagaaggatcctccatggcatccaaatcatccatgcagaattttgtccaacataacctcaga

SEQ ID NO: 565406 - DNA, 444 bp, Homo sapiens
gttttacttctgggataaaatttatataattttggtatgccaagcaaaatatttcataatatgtttctaatttgacatttgcctgcctattgccacctactaaagctttcataattattccttcctgaaaactaatagaccttgactrttctttaaaaatatcaggctctctgactttatacttttgcacgtactgatttttcaaactagaatgttttctcttcctttgggttatctgttatgtgcactaaaaatgtatataaaatgtatgtcactccaggaaaaaaatatataaataaaaattactgtatttcatcttaccttctttatgtaaaaattaattataattcttgtttataaaccacaaaaatgatctttattatataactaaataagaaatgactaggaaggtggctgcagatatggaaggaagggctctaggtc

SEQ ID NO: 565407 - DNA, 444 bp, Homo sapiens
gttttacttctgggataaaatttatataattttggtatgccaagcaaaatatttcataatatgtttctaatttgacatttgcctgcctattgccacctactaaagctttcataattattccttcctgaaaactaatagaccttgactgttctttaaaaatatcaggctctctgactttatacttttgcacgtactgatttttcaaactagaatgttttctcttcctttgggttatctgttatgtgcactaaaaatgtatataaaatgtatgtcactccaggaaaaaaatatataaataaaaattactgtatttcatcttaccttmtttatgtaaaaattaattataattcttgtttataaaccacaaaaatgatctttattatataactaaataagaaatgactaggaaggtggctgcagatatggaaggaagggctctaggtc

SEQ ID NO: 565408 - DNA, 512 bp, Homo sapiens
catctcaaaaaaaaaaaaaaaaaaaaaaaaatatatatatatatatatgtgtgtgtgtgtgtgtgtgtgtgtgtgtgtgtgtgtgtagtaagagagagaaaaaaaagagagacagaaagagactcaaagactgtcataataaaatcyttagaggagttgtctcaggttacacaagctgatataagaaacagaaaagtgaaaatagaaatattagaagactatgaggtaaggtagaattcatatattaacatatatggcaatttgtttctacctgaggaagacaatttctagtcttggatgcacatatgttcatggatgtgctaaccctattgagacatggagcagtattatgaaaaaatatctaagccttgcacttggaaatgtgccaaaaaggaaatattcctttactactatgttgaacgcatctaccaactggaaggcaattacaaaaaaaaaaaaagtgtgtatggggaggagatagatttaaagatcctatacttaagaagaaagga

SEQ ID NO: 565409 - DNA, 518 bp, Homo sapiens
ttattcataatagccgaaagatgaaaagagctcaactgtccatcaactgataaattgataaataaaatgtggtatagccatataaggggaaatcrtcgaccaaaaaagaaggaaggagtgatacatgttacaacatgaataaaccttgaaaacaaaggttttcaaacaaagtgaaagaagccagccacaaaagtacatgaaatgtccagaataagcaaatccatagagatataaagtagttaatgattgccagaggctggggatagaggaatagggaatttgactgctatcaggtacacggtttctttttggagtgatcaaattgttctggaagtgggtattggtgatagttgcacaaacaactatactaaaaaccactgaattatattgttggcacacaaatcatatctcaataaagctgaaggaaggaaggaaaaagagagaaggaaggaaggaaagaaaggagaagaaagaaagaaagaggaagaaagaaggaaaatagagaaaagaggagagaa

SEQ ID NO: 565410 - DNA, 478 bp, Homo sapiens
gtgtgccaccacgcccagctaatttttgtatttttagtagagacagagtttcattatgttggccaggttggtctcgaacccctgacctcaggtgatactcccaaagtcctgggattacaggcgtgaaccaccacacctggcattgcagaggattttctaagatggagtctgcagcattttccttggggggtcatttactcactcctgcctccccaacccctattccattctgagcctggagtatcaaagataccaaaggtattgaaactctcctcacactaacttatacgtcatgcgtcagcctcaccattgctgggtggggatrgcagggaagtatgcatgaatttctctgaaccatttttccggttcaagcaaaaagcaaaggaaatgaaggaatctgtctcatgcacaaagcacagactatgattctcctctaagacatgtgcccacaagtagactatcattatttgaggtaacc

SEQ ID NO: 565411 - DNA, 617 bp, Homo sapiens
aaatgtactcattaaacaaatatttgttttgagactgctatgagccaggcaacatttgagcgtcttgggaaacattaataagcaaaacaggcaaggatcactgccctcatgggagaggagtgactataaaacctacctcacagtataattgtgaagattaagagacatgattaaagtgaaagtgctttataaatagagatgtgttacactgatgttagttattgttgcttgccttggtagaatcataagctagagtgttctagtatgtaagatttaatcaatctcattctagagataaggaaactgagacttagctgtgagtggcatacaggatcacacagccatagagttagtgctacaatttgagtctcctacctaccacaggagtcctctttctcccccatcatagcacctcattcagtggggtaccaagtgtgcagtgatggrcaggtgagggcaaaaagagtgagcattgtaaaaatatagaagtaatatcacaaccaagtaaaaattggcctgctttcaggattcaaacagatatttgtataccaatgttcataatagcattattcacaatagccaaaaggtaaaaacaacccaaatatccattgacagat

SEQ ID NO: 565412 - DNA, 617 bp, Homo sapiens
aaatgtactcattaaacaaatatttgttttgagactgctatgagccaggcaacatttgagcgtcttgggaaacattaataagcaaaacaggcaaggatcactgccctcatgggagaggagtgactataaaacctacctcacagtataattgtgaagattaagagacatgattaaagtgaaagtgctttataaatagagatgtgttacactgatgttagttattgttgcttgccttggtagaatcataagctagagtgttctagtatgtaagatttaatcaatctcattctagagataaggaaactgagacttagctgtgagtggcatacaggatcacacagccatagagttagtgctacaatttgagtctcctacctaccacaggagtcctctttctcccccatcatagcacctcattcagtggggtaccaagtgtgcagtgatgggcaggtgagggcaaaaagagtgagcattgtaaaaatatagaagtaatatcacwaccaagtaaaaattggcctgctttcaggattcaaacagatatttgtataccaatgttcataatagcattattcacaatagccaaaaggtaaaaacaacccaaatatccattgacagat

SEQ ID NO: 565413 - DNA, 506 bp, Homo sapiens
gttgttttgcgctactatgaaagaataccacagactgggtaatttataatgaacagaaatgtattgacttgtgattagggaagctggaaaatccaagatcaaggggctggcattttgtgagtaccttcttgctatgctataacatggtagaaggcataacatgggagtggtggggaaactagggagggggagagagagaaaaaaaaaagaacccactgaactcatccttttacaaggaacccactcctgagataatggcattaatctattcatgacctaatcacctcttaaagatcccacctctgaatgctgttgctttggggattaagtttccaacatatgaaatttaggggacgtatttaaaccttagcactgtctgkagcagtggagaacatttcaacactggaaatgaaggaagatgtttaaccccatcaaagatatacattcagtaatgtactttagtaagcagatgccttatttgaaagcagtccttaatgtatgaacat

SEQ ID NO: 565414 - DNA, 506 bp, Homo sapiens
gttgttttgcgctactatgaaagaataccacagactgggtaatttataatgaacagaaatgtattgacttgtgattagggaagctggaaaatccaagatcaaggggctggcattttgtgagtaccttcttgctatgctataacatggtagaaggcataacatgggagtggtggggaaactagggagggggagagagagaaaaaaaaaagaacccactgaactcatccttttacaaggaacccactcctgagataatggcattaatctattcatgacctaatcacctcttaaagatcccacctctgaatgctgttgctttggggattaagtttccaacatatgaaatttaggggacgtatttaaaccttagcactgtctggagcagtggagaacatttcaacactggaaatgaaggaagatgtttaaccccatcaaagrtatacattcagtaatgtactttagtaagcagatgccttatttgaaagcagtccttaatgtatgaacat

SEQ ID NO: 565415 - DNA, 529 bp, Homo sapiens
agcctgggcgacagagctagaccctgtctcagaaagaaaaaacagaaagaggggcatagaaggaagacttgacctctagacataaagatattacaaggccagtttggtaaatgcaacgtggtgtctgtgcagggataggaaagaagatcagtggaacagcacagagtgctcagaggcagacccatggacacctgggggatttaatacgtgacaaaggtggcatcattattttcagaggaggaaatacctaaaactaacacrttagttcatgaagacacatttaaaatcattagtcatcagagagctgcagactgaaatgacaatgagacctcattgtatccttattaaactgatgaactagaaagctagatggtaccaatgggcagggacgatatgggagccagggagagtctagactgcttcagctgcctggagaaaaacacagtgcttctgctgagccagcaatcttgctactggttgtttatcttgaagaaacattcttccagatctagacccctctagacctgtg

SEQ ID NO: 565416 - DNA, 529 bp, Homo sapiens
agcctgggcgacagagctagaccctgtctcagaaagaaaaaacagaaagaggggcatagaaggaagacttgacctctagacataaagatattacaaggccagtttggtaaatgcaacgtggtgtctgtgcagggataggaaagaagatcagtggaacagcacagagtgctcagaggcagacccatggacacctgggggatttaatacgtgacaaaggtggcatcattattttcagaggaggaaatacctaaaactaacacattagttcatgaagacacatttaaaatcattagtcatcagagagctgcagaytgaaatgacaatgagacctcattgtatccttattaaactgatgaactagaaagctagatggtaccaatgggcagggacgatatgggagccagggagagtctagactgcttcagctgcctggagaaaaacacagtgcttctgctgagccagcaatcttgctactggttgtttatcttgaagaaacattcttccagatctagacccctctagacctgtg

SEQ ID NO: 565417 - DNA, 529 bp, Homo sapiens
agcctgggcgacagagctagaccctgtctcagaaagaaaaaacagaaagaggggcatagaaggaagacttgacctctagacataaagatattacaaggccagtttggtaaatgcaacgtggtgtctgtgcagggataggaaagaagatcagtggaacagcacagagtgctcagaggcagacccatggacacctgggggatttaatacgtgacaaaggtggcatcattattttcagaggaggaaatacctaaaactaacacattagttcatgaagacacatttaaaatcattagtcatcagagagctgcagactgaaatgayaatgagacctcattgtatccttattaaactgatgaactagaaagctagatggtaccaatgggcagggacgatatgggagccagggagagtctagactgcttcagctgcctggagaaaaacacagtgcttctgctgagccagcaatcttgctactggttgtttatcttgaagaaacattcttccagatctagacccctctagacctgtg

SEQ ID NO: 565418 - DNA, 529 bp, Homo sapiens
agcctgggcgacagagctagaccctgtctcagaaagaaaaaacagaaagaggggcatagaaggaagacttgacctctagacataaagatattacaaggccagtttggtaaatgcaacgtggtgtctgtgcagggataggaaagaagatcagtggaacagcacagagtgctcagaggcagacccatggacacctgggggatttaatacgtgacaaaggtggcatcattattttcagaggaggaaatacctaaaactaacacattagttcatgaagacacatttaaaatcattagtcatcagagagctgcagactgaaatgacaatgagacctcattgtatccttattaaactgatgaactagaaagctagatggtaccaatgggcagggacratatgggagccagggagagtctagactgcttcagctgcctggagaaaaacacagtgcttctgctgagccagcaatcttgctactggttgtttatcttgaagaaacattcttccagatctagacccctctagacctgtg

SEQ ID NO: 565419 - DNA, 570 bp, Homo sapiens
tcagagcagccacagcagacctcaggacaaagtaagtgccccagaagcttcaggctgggcaagagaggggcctgctcagccatcttcccagccatgattaagctatcctggctggggtgtgcgcggtgaaggtagccaaggcaaagaatcaagggggagcagagtggatgcaaaggagcagtgtgctgagggcccaggcccagcactggccctccagggttcaggtgccccacctgaaagtgaggcgtaggcatcaattccccaacttcagacattcaagttccagcttcctgacgtcgctctattcatgcactattatttcctcaccatttctcctggcttaattaaatgtctttcaaaaggaaactttgtatcaagtggatatttggaaatagaaagccagtatcctttgtcctaaatagaagccacctaaagagtcaatttaattttttaaaataatgttattaaagtctggttagacaccattgcttactaaagcctctgtgcctgaagcctgttytgtctttgttttttgtttctaattttagtttttagtgtggaaaatataca

SEQ ID NO: 565420 - DNA, 603 bp, Homo sapiens
cattgttaacaactagacctttacactcattcatacgagattaaatggttttatacaaaacaaaattacatgttttctttatcatcatttgttaaatgtgttccatgtggccataattgaactatgctacatacgttatctcatttaacccctaaaataatttacagggtgtcttaattcattcaggctgtcataacataataccatttactgggtggcttataaatgacagacatgtattgctcacaattytggagaatgggaagctcaatatcaaggtgttggcagattcggtttctggtaagggcttgcttgctccctggttcatagctagcaccttctggatgtgtccttataaggtggaaggggctagctcactctatggagtctctctctttttttttttttaaacagggtctcactatattgcccaggcaggtctcaaactcctggactcaagccatcctccccactctgcctccctgagacctgagattacagatatgagccatgccactgcgcctggctggagtctctttttttttttttttttttttttgagacagagtctcgctctttcaccaggctggaatgcagtggcat

SEQ ID NO: 565421 - DNA, 603 bp, Homo sapiens
cattgttaacaactagacctttacactcattcatacgagattaaatggttttatacaaaacaaaattacatgttttctttatcatcatttgttaaatgtgttccatgtggccataattgaactatgctacatacgttatctcatttaacccctaaaataatttacagggtgtcttaattcattcaggctgtcataacataataccatttactgggtggcttataaatgacagacatgtattgctcacaattctggagaatgggaagctcaatatcaaggtgttggcagattcggtttytggtaagggcttgcttgctccctggttcatagctagcaccttctggatgtgtccttataaggtggaaggggctagctcactctatggagtctctctctttttttttttttaaacagggtctcactatattgcccaggcaggtctcaaactcctggactcaagccatcctccccactctgcctccctgagacctgagattacagatatgagccatgccactgcgcctggctggagtctctttttttttttttttttttttttgagacagagtctcgctctttcaccaggctggaatgcagtggcat

SEQ ID NO: 565422 - DNA, 603 bp, Homo sapiens
cattgttaacaactagacctttacactcattcatacgagattaaatggttttatacaaaacaaaattacatgttttctttatcatcatttgttaaatgtgttccatgtggccataattgaactatgctacatacgttatctcatttaacccctaaaataatttacagggtgtcttaattcattcaggctgtcataacataataccatttactgggtggcttataaatgacagacatgtattgctcacaattctggagaatgggaagctcaatatcaaggtgttggcagattcggtttctggtaagggcttgcttgctccctggttcatagctagcaccttctggatgtgtccttataaggtggaaggggctagctcactctatggagtctctctctttttttttttttaaacagggtctcactatattgcccaggcaggtytcaaactcctggactcaagccatcctccccactctgcctccctgagacctgagattacagatatgagccatgccactgcgcctggctggagtctctttttttttttttttttttttttgagacagagtctcgctctttcaccaggctggaatgcagtggcat

SEQ ID NO: 565423 - DNA, 426 bp, Homo sapiens
taggtgaggtgaaaggaaaatactttgggccccgaaaattactaagctaaaagtaagatccaagctggaaactactcagggcaaacctgccacccattctgttcaaagtcatccctctgcttactgagaaatggatacatgttctgtgtcaggcctctgagcccaagctaagccatcatatcctctgtgacctgcacatatacatccagatggcctgaagtaactgaagaatcacaaaagaagtgaaaatggcctgttcctgycttaactgatgacattacattgtgaaattccttctcctggctcatcctgcctctaaagctcccccactgagcaccttgtgtcccctcgcccctgaccaccagagaactaccccctttgactgtaattttccattacctacccaaatcctataaaacggcccca

SEQ ID NO: 565424 - DNA, 557 bp, Homo sapiens
ataatgacataccagtaatgtgtccctgcatgcgtgtttacatatgcattgggggtgaaaaaaagatgcaggagaaggtagtagggagttgcagttggttgcattgtgataaaacttctgttcctccataaaaggcttgtgttctttagggacatgaaatgaattaagacatatatctcaaactcaaaaatgagacctccaatgccaaacagtaaaagataacaggataaattatatcaatgctttacagtctcaaggtgtcagaaattcttcattgatactgcagcaacatcaaacattcaaaggtcttaagttagattagaaattggaagaacagagcatgcttgatattagactcttaagatttctctgatttccttccattaggatatgtcatttaygttattagagaactacagttaaattcaacttagtgatgggtgtttaggccactatgactataagtatatgcctggatagcacctcagacaaaaatttgcctgttaactgtggaaattttatttatttatttatttatttttgagatggagtctcac

SEQ ID NO: 565425 - DNA, 455 bp, Homo sapiens
gtagaggtttacttttctcctccaccttcctcctcctcctcctcctctttctccttcttcttcttcttcctcttcttgtttttctycttcctctttttcatttactttaattttacattccaggatacacatgcaggatgtgcaggtttgttacataggtaaatgtgtgccacggtggttagctgcacctatcaacccatcacctgggtatgcaaccctgcatgcattagctgcttatcctgatgctctccctctcgctgccccaaccacagaccccagtgtgtgtcattcccctccctatgtccatgtgttctcattgttcagctctctcttttgagtgagagcatgtggtctttggttttctgtctctgtgtaagtttgctgaggatcttctccttctccttagccttttccttctctttctccttctcctcctcctcttcttcctcctcctc

SEQ ID NO: 565426 - DNA, 574 bp, Homo sapiens
ctttaaaccaatacctagacactagtctgctccttcatccttctgtagagattgtagcttagtcaaaagccattttctatgtctgcactgaatagctatcaatctgtctcacagtttcacagaagattaaaatgagccccaattactgcacacattaaataataaaggaattgattcttctgccctgccactactaatatgtcctattcacatgaggaagagtttctgcatccaaatagactgactatgttttctctagcacctatgtgagcatttaacacttgattttaaatgtgtgcaaatgratattttgaaggctttcccttattcttatcagataattgtaataggtcaccagaccatcatgtgaactttttcttctttaagttcccaaaagtatccagttggctaatctaaatgttcattcattcatccattcatatcatcagcttgcctaagtgcctagtaacaagcaccccaaatatctcaagggctgaatttgtgtcttctacattgctgaatccctaggaattaaaattatccaagaaacgaactctcatacaaaagaagacaa

SEQ ID NO: 565427 - DNA, 617 bp, Homo sapiens
atataaaatttaaaaatgatatatatatcatatatacatatatatacatggtttattggtgtaacaaaatgaaatattttgtctttgttttgttttgtttttgtttttgttttgtttcgtttttttgacagagtctgtctctactgcccaggctggagtgcagtggcatgatctttgctcactgcaacctctgcctgatgggtttgagtgattctcctgcctcagcctcccaagtggctgggattacaggcgcctgccaccacacccaactaatttttttgtatttttagtacagacagtgtttcaccatgttggccaggctagtctcaaattcctgaccccgtgtgattcacccaccttggccttccaaagtgctggaatttacwggtgtgagccaccatgcccagcttgtctttgtttcctaaaatgtggcagatgtgacgccagaaaggtgtcccgatccagaccccaggagaggtttcaagagttcttggatctcgcacaagaaataattcagagtgagtccctacagtaaagtgaaagcaagtttattaagaaagtggaagaataaaagaatgactacttcatagacagagcagccccaaggcctgctggtt

SEQ ID NO: 565428 - DNA, 494 bp, Homo sapiens
aaattggcaactgcctatttgactaaaatgcatgtccttacaaaatccctgtgatgaattcctgtgattttgtgttaccttggaattcacttttaatcttcctctaacayacccagagtccttcttggtaatgctcaaattctctctctgtgatttgagatgaaaatttgctaccctgttttctctaaatgtcagtaaagtcttcatccacaatggacagataagttttaatttgttctatttatagaaacacagtttaatcaaattgttattagtattattattgagatggagtcttagtctttcgccaggctggaatgcagtggtatgatcttggctcactgcaatctttgcctgctggttcaagtgattctcctgcctcagcctcctgagtagctgggattacaggtgcacaccatcacacccagctaatttttgtatttttagtagagacggggtttcaccatgttggtcaggatggtctcaatctccta

SEQ ID NO: 565429 - DNA, 621 bp, Homo sapiens
aaagctgtttatttcacccgggtgcaggtgggctgagtccgaaaagagagtcagcaaagggtggtgtattatcattagttcttacaggttttgggataggtggtgaagttaagagcaatgttttgcgggtaggggtggatctcacaaagtacattctcaagggtggggagaattacaaagtacattgatcagttagggtggggcaggaacaaatcacaatgttggaatgtcatcagttaaggctatttttacttcttttgtggatcttcagttacttcaggccatctggatgtatacctgcaagtcacaggggatgcgatggcttggcttgggytcagaggcctgatattcctgccttcttatattaataagaaaaataacacaaaatagtgttgaagtgttggggcggcgaaaatttttgggcggtggtatggagagagaatgggtgatgtttctcagggctgcttcaagcgggattaggggcagcgtgggaacctagagtgggagagattaagctgaagggaggtcttgtggtaaggggtgatattgtggggatgttagaagaaacatttgtcgtatagaatgattggtcatggcctggatacggttttggatgaattg

SEQ ID NO: 565430 - DNA, 510 bp, Homo sapiens
ctactgaaataattgacaacacaaaaagagtggaccaaaaatgactgaggatgtcttttcaactttaactaactgctcttgggttactggttctattatacactgaaagtcacctggttcagagccaccaattggtgagcttttgtttggtctgcacaggagtttatgacctttatcaggagttgctgtctttatccacactaaaggactctcatctgtagattgctttgagtagtataaacattttaacaatattgattattccaatccatcaacataaaatattgtacttttcttgtattgtctttaatttctttcatcagtgttttatagtgtttattgtaaagatcttttacttttttgattaacttcattctggggtrtcaaaatttgttcatgtctactgtaaatggaatttatttttaaatttcatgttcagcttgttcactgttgacatgtagaaatgctactgattttttatgttgattttgtgtcctgcaactttactga

SEQ ID NO: 565431 - DNA, 549 bp, Homo sapiens
gggcttattacagcacctacaacactgatttgaaattttttattatgtctgcctcttagactaaactgcaagtgtccatctcacacacaaaaacagaatccattaataaactaaataggcctcataaaacatctcmctaaattgtttgttttaaagcatttacttctgaggggtaaaaagttgacataacctaattcaaaagtgcttacctcttaagaggtggcatttagatacagagaggtaaataattcattaatgcacttaccatttttgatatgtgcatagttattaaacagtttgtagaatgtagtttttaaaaaagtgctgctttcagtgtaaaccagaatttcttattaatcaaaatactgtacataagtttatgtttatatttgatgattgctggctttttatcttttatgctttttctagtcaatccacatacaatacatatagaattgacttttaaaatgcttgctcctttctaaggtaagaatagttacattaattttagggtttattctaaaaactgtctcacaaagaaataatcta

SEQ ID NO: 565432 - DNA, 549 bp, Homo sapiens
gggcttattacagcacctacaacactgatttgaaattttttattatgtctgcctcttagactaaactgcaagtgtccatctcacacacaaaaacagaatccattaataaactaaataggcctcataaaacatctcactaaattgtttgttttaaagcatttacttctgaggggtaaaaagttgacataacctaattcaaaagtgcttacctcttaagaggtggcatttagatacagagaggtaaataattcattaatgcacttaccatttttgayatgtgcatagttattaaacagtttgtagaatgtagtttttaaaaaagtgctgctttcagtgtaaaccagaatttcttattaatcaaaatactgtacataagtttatgtttatatttgatgattgctggctttttatcttttatgctttttctagtcaatccacatacaatacatatagaattgacttttaaaatgcttgctcctttctaaggtaagaatagttacattaattttagggtttattctaaaaactgtctcacaaagaaataatcta

SEQ ID NO: 565433 - DNA, 549 bp, Homo sapiens
gggcttattacagcacctacaacactgatttgaaattttttattatgtctgcctcttagactaaactgcaagtgtccatctcacacacaaaaacagaatccattaataaactaaataggcctcataaaacatctcactaaattgtttgttttaaagcatttacttctgaggggtaaaaagttgacataacctaattcaaaagtgcttacctcttaagaggtggcatttagatacagagaggtaaataattcattaatgcacttaccatttttgatatgtgcatagttattaaacagtttgtagaatgtagtttttaaaaaagtgctgctttcagtgtaaaccagaatttcttattaatcaaaatactgtacataagtttatgtttatatttgatgattgctggctttttatcttttawgctttttctagtcaatccacatacaatacatatagaattgacttttaaaatgcttgctcctttctaaggtaagaatagttacattaattttagggtttattctaaaaactgtctcacaaagaaataatcta

SEQ ID NO: 565434 - DNA, 636 bp, Homo sapiens
aactcctgggctcaagcgatccttcttccttggcctcataagatgttgggattacagstgtgagccactgcacatggccaatgtatttacacactcgtacataaactcaggattatattacgtaaatactcatgtaaaaactcataaggaaaagaatagtgtattgtatgtatccatatttctgctctttcaattgttcattctttcttcctgatgctccaagatttattcttttatcattttatttctgtttgaagaacttcctttggtcagtttttaagagtagtttcattcattaaaaaattatcttaattttcctttgtgtgtgaatgttctttacttttcattccttaaggataatgtcacccaccaggtataaaattcatggttgacaagtcttttattttggcacttaaaaaatgtatcataccactttcttctgacctccatagttttagatgagaaatcagatttcatttggattggtgtctccctgaaggtaatttgtcatttctcctcaaatgcttgcaagattttattttttgtctttagttttcaaaaatgtaattatgatgtattttggcatggactttgggggcttatcctgtttgttgcataagtgatgaagatgttatt

SEQ ID NO: 565435 - DNA, 636 bp, Homo sapiens
aactcctgggctcaagcgatccttcttccttggcctcataagatgttgggattacagctgtgagccactgcacmtggccaatgtatttacacactcgtacataaactcaggattatattacgtaaatactcatgtaaaaactcataaggaaaagaatagtgtattgtatgtatccatatttctgctctttcaattgttcattctttcttcctgatgctccaagatttattcttttatcattttatttctgtttgaagaacttcctttggtcagtttttaagagtagtttcattcattaaaaaattatcttaattttcctttgtgtgtgaatgttctttacttttcattccttaaggataatgtcacccaccaggtataaaattcatggttgacaagtcttttattttggcacttaaaaaatgtatcataccactttcttctgacctccatagttttagatgagaaatcagatttcatttggattggtgtctccctgaaggtaatttgtcatttctcctcaaatgcttgcaagattttattttttgtctttagttttcaaaaatgtaattatgatgtattttggcatggactttgggggcttatcctgtttgttgcataagtgatgaagatgttatt

SEQ ID NO: 565436 - DNA, 636 bp, Homo sapiens
aactcctgggctcaagcgatccttcttccttggcctcataagatgttgggattacagctgtgagccactgcacatggccaatgtatttacacactcgtacataaactcaggattatattaygtaaatactcatgtaaaaactcataaggaaaagaatagtgtattgtatgtatccatatttctgctctttcaattgttcattctttcttcctgatgctccaagatttattcttttatcattttatttctgtttgaagaacttcctttggtcagtttttaagagtagtttcattcattaaaaaattatcttaattttcctttgtgtgtgaatgttctttacttttcattccttaaggataatgtcacccaccaggtataaaattcatggttgacaagtcttttattttggcacttaaaaaatgtatcataccactttcttctgacctccatagttttagatgagaaatcagatttcatttggattggtgtctccctgaaggtaatttgtcatttctcctcaaatgcttgcaagattttattttttgtctttagttttcaaaaatgtaattatgatgtattttggcatggactttgggggcttatcctgtttgttgcataagtgatgaagatgttatt

SEQ ID NO: 565437 - DNA, 517 bp, Homo sapiens
attcattttattgtatgtaaattatacaccaactttaaaaaggaggggggaacaagatgtggtgacataagtggatggtgaagaatattaattttatactatagcaaatgtgttccaatttatattgttaaaagttagtttcctcatcctttcccaagcstgttacttaattagaaatttatgacttacattgtttcaaattgaaacgattatcttacctctttaaaggatattgctgtaaattgaattgggttgttaccatgatggacctcttaatcttgttttccactccttagtttttaatgcctattttcaatgtacagtgtatatattctggaatatctgatgctatcatgaatactaggtgcttaggagaaggacaaatttgattttaaagtattatagtgttcaatcaagattaagtggtgtggtataaactatagtgcaaagagtgaatttagatatatttcaaaggtaaaaatcattaaatatgagatagcttagatgattaagaaaa

SEQ ID NO: 565438 - DNA, 581 bp, Homo sapiens
gaattctatattttgattaatgtgtacattcaacaaaaattattgagctatatacttaagactaattcattttattgtatgtaaattatacaccaactttaaaaaggaggggggaacaagatgtggtgacataagtggatggtgaagaatattaattttatactatagcaaatgtgttccaatttatattgttaaaagttagtttcctcatcctttcccaagcctgttacttaattagaaatttatgacttacattgtttcaaattgaaacgattatcttacctctttaaaggatattgctgtaaattgaattgggttgttaccatgatggacctcttaatcttgttttccactccttagtttttaatgcctattttcaatgtacagtgtatatattctggaatatctgatgctatcatgaatactaggtgcttaggagaaggacaaatttgattttaaagtattatagtgttcaatcaagattaagtggtgtggtataaactatagtgcaaagagtgaakttagatatatttcaaaggtaaaaatcattaaatatgagatagcttagatgattaagaaaa

SEQ ID NO: 565439 - DNA, 592 bp, Homo sapiens
gtgtcacctactttggagaacttacttcaccctccgccccaccgccattttattatttctaaaacataggtgtctacccttcatcatctcttattacaaagtgcatttttcttcattgaacttggcatttttcattatattctaatgttcagaataagagcttggcctacttcccttgaagatgaaattactgttcatattcctctcatttttgaygaattcagagaaaatgaggcactgctattgttatggcattattttaaactcagaaattttataacacttaattacatcttgaaatgttattagttctacaagttttggccatatttaaatactcaaaatgtactgagtcccttcaatacacaaagtattctgtgtcgtgaaaaatgagtatgatacaattcaattcctcaagttgttaacaattttctcagtgagaacacatatacatctaatcacaatacatgtcagagtgtgataaggtctaaaatcataattgattaagacataatgtgatttagtaaaataaaaagatgactgttaaagctatcgtatttcttttctgagttatgaaattatgacagtccac

SEQ ID NO: 565440 - DNA, 604 bp, Homo sapiens
aaaggttgtccccatatattattgagtaaaaaaagcaagttgtagaacaatatgtatcatttatttctgattaataaataaataaaatatacacatatctatgcttgtagcgcaaaaaaaatctggaaaaatatacactgaatcatgttgtgtagggcatcgagtagaaactttttgtttatatactcctatattgtctatgtgtgtactgctttaaataattttaaaaatataatatcaattttaaaattataattaattrtaattatatataattatataaattaattataaattaaatataaattaactataatttatatacttcatatctttaagaaactatagtcacttaacttttttatacaatgagatattctcttgcattgtggtaactctttcatggacattttttaaagcaagacatctccaagatcagttctgcctcttaagttaccttcctaccctgtaagtctgactcacttgctggtctacaaagctgaccagatgagtgctgactgaacaatgcacaatttgtcaagttacttctgtgatagtgtaatacaatcatttagataatggtcaagtaacttgttgggtagag

SEQ ID NO: 565441 - DNA, 532 bp, Homo sapiens
tttctttcttaacatctcaagaagtgagcctgacagcagccacaagaaggagccaaggagaaagagcacagctgcaggagggatgtctcctctgtcagtctccaagccctggcaccctttcaaagagctgctgtctgcgttcatagtaatcagagttgtaacacggaagagaagtggaggcaggtccacctgagaactgtgtatgtgaaaaagacttcaacctgatcccagtgctaaattagataagtgcagccaccaggatgagcactctgcctcgtcatactcccaggacaattttgagcctccccatcagtgtcaaattacctgtattggtgcttgctgcrgaaagttataaggacttcatcatgccttttctttggggtaaaagtaattttaaaagaagaagagaaagttaaaaggaaaacttgagacctcagagccataaggaaagtgcatagaaatatcatcatctaagaagatggttttccaatttgactacacactgaaataatcaagggagctttatatgtac

SEQ ID NO: 565442 - DNA, 598 bp, Homo sapiens
  misc_feature 596, 597, 598: n = A,T,C or G
acctgaggtcaggagttcaagaccagcctggccaacatggtgaaaccccatctctactaaaaatacaaaaattagctgggcatggtggcatgcacctgtaatcccagctacttgggaggctgaggcaggagaatcacttgaacccgggaggcagaggttgtagtgagccaagattgtgccactgcactccagcctgggcgacaagggcgaaaaaaaaaaaaaaagaagttataaaatttgcccacagtcatgcatcagtgccaggattccagcacaggctcactagctcctgagtacatgttatttttgtaacttctacaattttataccattctaaaaatcaaaaagaatttagatattcaagcaataaacaatttggatttggggcaatagcacttacaaccagtttttgaaaactttatgcccaaatgtaaaagtaatttcattttttcctgttgagataaataagcactaaaattccattttgacctaaattaataagaaggaattccattttaggaatttatatcaaagatatagaacacatakgcatgaagacatatatacgagcatatttattatagtgtttgtgttcnnn

SEQ ID NO: 565443 - DNA, 546 bp, Homo sapiens
tataagccagaaatacttagaaaataaagggttaaaatcaatacaatttgcaatagtattaaaaacatcaattagctaagaatacatctaattaaagatatacaagaactctacactaaaaatgacaaaacactcccaaaagaaaataaaaacaacctgaataaatagggggatatatcatgttcatggsctggaaacttaatattgagatgtcaattctgtcaaatctgagctacagattcaatacaataccaattgagatgctagcagccttttaaaagggctaattccaaatttcaatggaaatgcaaaggacccagaacagctgaaacaatcttgaaaaagaagaacaacgctggaaaactctcactagcagatattaaaaattactacaaggctacagtaatcaagacagagtggtaatggtgcaaagatagataatggaacagaaaagagaggccagaaaacattggccgggtgtggtggctcacgcctgtaatctcagcacattgggaggctgaggtgggtggattgcttgaggtcagg

SEQ ID NO: 565444 - DNA, 546 bp, Homo sapiens
tataagccagaaatacttagaaaataaagggttaaaatcaatacaatttgcaatagtattaaaaacatcaattagctaagaatacatctaattaaagatatacaagaactctacactaaaaatgacaaaacactcccaaaagaaaataaaaacaacctgaataaatagggggatatatcatgttcatgggctggaaacttaatattgagatgtcaattctgtcaaatctgagctacagattcaatacaataccaattgagatgctagcagccttttaaaagggctaattccaaayttcaatggaaatgcaaaggacccagaacagctgaaacaatcttgaaaaagaagaacaacgctggaaaactctcactagcagatattaaaaattactacaaggctacagtaatcaagacagagtggtaatggtgcaaagatagataatggaacagaaaagagaggccagaaaacattggccgggtgtggtggctcacgcctgtaatctcagcacattgggaggctgaggtgggtggattgcttgaggtcagg

SEQ ID NO: 565445 - DNA, 568 bp, Homo sapiens
ggcttgatagagatagcattctctctcacattattgaagggtggaggtttgtattccagggttgatgtggcttctaaaaaactgttagtgactcatactctatctagctaactgttttgccatttttaggacggtccaggatgatgactagaactctagccactgtgtggaggaagatattaaarggtagataaggagaacctgtcacgttcttaaaggaagttttctagaagctgtctcataccatttttctttatgtctcattggtccaaatttagttccatgggcgcacctagctgcaaaagaagttgggaaatgtagtcttgattcttggagccatctgctcagctaaggagttgagagttctttctaagagaaaggcaaacaagacattgaggtgctaacctactatctctgctgcagtgagattaaataattgcttaggatcttacagttttctagtggcagagattagaagtatatcccttgatggtacagtactctttaaatcaaagaaaatggccctctaatcttatatggggcaaatttatgtatagagggaaatgag

SEQ ID NO: 565446 - DNA, 581 bp, Homo sapiens
gatatatacgtatataaacatatatacatatataaacacataattataaaatatatgtgtttattataatagtattattcaactaaattctactatgtttttcaaaatataagtcaagattcaagatagwaatgtgcttgaaaagaagtttcagcgcttttatttacctgtttaaacaactgatgaatttagaaacaaactttcatggggtacctgaatatggggaaagtttctgaaaatttagggtgggagagatgccatcaagatggctgactaaaggcacccaacatttgtctcccccacaaagaaggaccaaaacaacaagaagataacaatacattgaatagagtgccaaaggagaatgctagaattcagcaggaaagtgacaggaaccctctgacatataaaaactcaaaatgacagtataaagaggaaagaaaagccagggcaaggattggctcagagccaggagtgactctctagtgcaaggaaaagaaaagcaagagatccccaacagttcacatttccaccaccaatgcctgcaatattagctacaggacaacacctcagccctcacttgc

SEQ ID NO: 565447 - DNA, 589 bp, Homo sapiens
tactgtaccttctgttcttcagtatatttcccaaccgaaggaaagaggtctgcaattgtgtgatctccaagctagcattatgttccttcataaaagcagcatcggagccttttctgcaccagaaatggttcatctgcwttgaagatggggcaagaagtaagagagaagatatgttttcttgtgtatttcttaatgacaattctaggtgagacaggaaaaaaaaaagaagaaaattctgtgtagagttaaattgtcatgttgggttgtgccttggaattttcctctcagttagattcattgttaaggaaatcagaagcttagaggagccacaggcagcatgatgaggaggatgatgaggaggctccccacagctgcctcctgcagtgctgtccacccactgagtccaactagctaccaggacgctcgcctcattcctctcctgctccattgtcagaaaacccaaaaatctcctaatgcatttcttctgtttctcttctgacttattattgtcaatttataattgttgttgactccaagctctggggccattacagagagatagaaagggaaagacagagaaagagaaaaa

SEQ ID NO: 565448 - DNA, 589 bp, Homo sapiens
tactgtaccttctgttcttcagtatatttcccaaccgaaggaaagaggtctgcaattgtgtgatctccaagctagcattatgttccttcataaaagcagcatcggagccttttctgcaccagaaatggttcatctgctttgaagatggggcaagaagtaagagagaagatatgttttcttgtgtatttcttaatgacaattctaggtgagacaggaaaaaaaaaagaagaaaattctgtgtagagttaaattgtcatgttgggttgtgccttggaattttcctctcagttagattcattgttaaggaaatcagaagcttagaggagccacaggcagcatgatgaggaggatgatgaggaggctccccacagctgcctcctgcagtgctgtccacccactgagtccaactagctaccaggacrctcgcctcattcctctcctgctccattgtcagaaaacccaaaaatctcctaatgcatttcttctgtttctcttctgacttattattgtcaatttataattgttgttgactccaagctctggggccattacagagagatagaaagggaaagacagagaaagagaaaaa

SEQ ID NO: 565449 - DNA, 614 bp, Homo sapiens
ctgacagatctgcttgatgcagggttgccacaaatctttaatttactaaaaatgcactatctgtgaagtgcaataaagtgaagtataatgcaatgaggtatgcctatacttgaaatttcctaattttagggagaaaagaaaatagctgacatgatattgcaggaaaacactrtagttgagcaggtctggaatctattatctctgaatattacttttaataagcccattatatataatcataaatctaaatttgaaaattgtacttttaagaactctttgatgttggcataatttcccagaattactgagcattgacttccattgggtagaagaatatttttcagcgatctaaaaattagcttgccattcattttgcattcaataaatactgcatatacattttatatcagatactgtgctaggtattgaggatatagaaaatgacttagaaacctagttataagaatcatgtaatatataaggaatttaataaagaattatataacatacatgtggataaatgcatgtgtacgtgtatgtatgtatgtatgcatgtaatgtgtgtaatatgtacaactgtgtcagtcaaaattcatttggaaatgcagagccac

SEQ ID NO: 565450 - DNA, 614 bp, Homo sapiens
ctgacagatctgcttgatgcagggttgccacaaatctttaatttactaaaaatgcactatctgtgaagtgcaataaagtgaagtataatgcaatgaggtatgcctatacttgaaatttcctaattttagggagaaaagaaaatagctgacatgatattgcaggaaaacactgtagttgagcaggtctggaatctattatctctgaatattacttttaataagcccattatatataatcataaatctaaatttgaaaattgtacttttaagaactctttgatgttggcataatttcccagaattactgagcattgacttccattgggtagaagaatatttttcagygatctaaaaattagcttgccattcattttgcattcaataaatactgcatatacattttatatcagatactgtgctaggtattgaggatatagaaaatgacttagaaacctagttataagaatcatgtaatatataaggaatttaataaagaattatataacatacatgtggataaatgcatgtgtacgtgtatgtatgtatgtatgcatgtaatgtgtgtaatatgtacaactgtgtcagtcaaaattcatttggaaatgcagagccac

SEQ ID NO: 565451 - DNA, 527 bp, Homo sapiens
ggaatataaatcattataccttaaggatgcatgcacacgtatgttcatcacagcactattcacagtagcaaagtaatggaatcagcctgcatgcccatcaatggtagactagataaagaaaatgtacactatggaatactatgcagccataaaaaagaactagatcatgcctttgtagcaacatgggtggagctggtgaactaatgcaggaacagaaaatcaaataccrcatgtgtcacttctaagtgagataaacactgagtagacatgagtagacatggagaaaaagaagggaacaacagacatcagggcctacttgaggagggagaggattgaaaaactattgtatactatgcttatttcccaagccacaaaataatctgtataccaaaccgtgtaacacacagtttatctatataagaaacttgtgtgtgcatatgtccctgaacctaaaataaaacttaaaaaaagatgcaatctccataaaaatcctggaaagtttatttttattaattttttttgcaagg

SEQ ID NO: 565452 - DNA, 611 bp, Homo sapiens
tcccgggtgggatgaagcagggcagcattagatttcatcacattgctcagaatggcatccaatttaaaactcattaatcgtttatttctggaatttgtcattgaatatttttggatcagggttgaccaagtgtaactgaaacagcagaaagygaaagtgcagataagaagggggctactgtactgttattcagcctgttttttctgtttcccctgagagcatataaagtccagggggaaaggaccagccttatgtgtgtgggtattcaatactctgcacattatatactgtagtaaatgtattgaataaactttcagctatctaatatgtttctggtatgtcaaatgggtgtatgcttggcacaatgctggttctctttccagggagcacagttacttgtctaatcttttttaaagatttgagtgaaaccctctcaccctctcaactgttgaccaacttttgacttcttaagaatttgttgagaataggaaatttattctacaaccccattgtagctcattctactttctgaatgacattcttgcctttactgtcttactaattcaaaaggaaatgacaatttttttctcatatttgattcaattcagcag

SEQ ID NO: 565453 - DNA, 560 bp, Homo sapiens
aaatgatttaacccttttatgttgctcctatgttgtggatttagcgttttaggctaaaaacagattaagttggattgtaaataaacattttgtgttgggtaaattagttaatatttcaaaagcatctcttctttgggcatgaagatttgcagaaaaacattccagaagaaaaaagtcgtttattttagtatgttgatttattgtactaatccttgttcaatataatcattgctactcagggtgaaaagttcggaccctttgctggagagaagagaatgcctgaagacttggatgaaaatatggattacaggttgatgtgggaggtgaggatatgacttattttaatgttaaaaatatatttgtattgtaccatttaatgcatttttaaggctacattaattgatattgattccagttaagtatttaagtattraaatgttttaggtttttttttttttttttgagatggagatttgctcttgttgcccaggctggagtgcaatggtgcgatcttggctcactgcaacgtccgccccccaggttcaagcgattctcctgcc

SEQ ID NO: 565454 - DNA, 621 bp, Homo sapiens
acactctcctggcaccattgctgtgcttttctgcaatgcaactttattagcagcttgtcacagggcctggcttacttaggaccccgctgagcgagggagagaaggaaggaggcaaggaatctgggagaatgccctctggggctgtgcatgtggtccaagaggcccacaataaatatttttcatatgatttcaacaggatctgtagatttggtcagcttggttcctgcctcaagaaagagccatttttggtcagagggattgtaaaagaaattatttcagttatcaaaattttgttgcagaagtatgaggaaaagcctaaaagtgaacattagacaatagaatacatggcctttccaacaataaggaagatcaattgagtcaaagtttgaaaaattgcaagtaggttttttattttttggctttaggtgagtcatattacatgagacaccacccagttaatactttccatacagttattttcaaaggttttcaagatgtacaaagaaatgtcaattcatggcctaaataaatgaacttgtggtgtagagttttaaaaaattctttatatggttagttttctcatagagaatggtgctctrgctatggtaagtcaaaaaatcc

SEQ ID NO: 565455 - DNA, 644 bp, Homo sapiens
gtaaaatgcacatacctgttttttcagctatttacaatttaaaatatattatttcttttctcattctaaataaattctcactttcaaacttaatgttgtatttgtaattttgtattctttttcctgaaagtactcccttcccccatctcaactggataagctttaggccccacagaacctggtcccacccctggmggtttgtggggagtgcctggcacataggaagatctcaatcaatgtttgctgtgatggctgtccttcatgtttttaatttcttagcattgggtgaaattatgcactcaaaggtagagatattcacgtttcagagtgaaaacatcaaatccaaattccttggttcagctttcaaagccttcatgtttctggttccaaactcccttttatgcaaacatttgctcttgtcctcaatgtgtatccttggttctagtctgcctattttttgtttatttctgagactttgcctttgctatgatttaggaaaaaatcaattggcatggaaatatattcacacacacacgtatttcagtgaaaaaaagcagtgtataaacctcaactcaagcatatcctcaacttcgtaaaatagaaaaattatgtacagcaaatatacatttacataatgtttaatt

SEQ ID NO: 565456 - DNA, 644 bp, Homo sapiens
gtaaaatgcacatacctgttttttcagctatttacaatttaaaatatattatttcttttctcattctaaataaattctcactttcaaacttaatgttgtatttgtaattttgtattctttttcctgaaagtactcccttcccccatctcaactggataagctttaggccccacagaacctggtcccacccctggcggtttgtggggagtgcctggcacataggaagatctcaatcaatgtttgctgtgatggctgtccttcatgtttttaatttcttagcattgggtgaaattatgcactcaaaggtagagatattcacgtttsagagtgaaaacatcaaatccaaattccttggttcagctttcaaagccttcatgtttctggttccaaactcccttttatgcaaacatttgctcttgtcctcaatgtgtatccttggttctagtctgcctattttttgtttatttctgagactttgcctttgctatgatttaggaaaaaatcaattggcatggaaatatattcacacacacacgtatttcagtgaaaaaaagcagtgtataaacctcaactcaagcatatcctcaacttcgtaaaatagaaaaattatgtacagcaaatatacatttacataatgtttaatt

SEQ ID NO: 565457 - DNA, 637 bp, Homo sapiens
tattacatttaattgtatgggatgttgaccaaaacgtcctttttcctaaggctgtttatattaataatcctttcaaaacctaaagttgaaatttaaatcttttcgatttcctttttggttatttttcccctttccttcattgcgggaactcactgatttattatctcctggatatttcctgggccctggtgactttattctgggaactaagagataaycaggtggtcctcaaacctttcttcttaaagttgatgcttgtatctacaaaaaagagaactatctaaggaaagaattcacaggggtgtggatattaatgcttttgatgagtaaataaatccagcctcacgaaatgcattgcaacattttcagttcattgtttttcctgctgtctgtgtcatgattggatgcccctgtgccagatacattgtgtttaccaattgatatattgcaaatagtcaatacggaaaagcagaaattattgtattacaggaaatatagtttagaatcatttctctatatacatgccacctaatggcctagctatataaaataaaaggttatcaatcagacactcacttttctatgatgattttgattttaaaaataatcacaacacactatacaagataccccacac

SEQ ID NO: 565458 - DNA, 565 bp, Homo sapiens
atcacttgaagtcaggagttcaagactaggctggccaacatggtgaaaccctgtctctaccaaaaaatacaataattagccaggcatggtggtgcatgcctgtaatcccagctacttgggaggctgaggcaggagaattgcttgaacccgggaggtggaggttgcagtgaactgggatagcaccactgcacttcagtctgggcgacagagcgagactctatctcaraaaaaaaaaaaaagaagaagaagaaaagaaaaagaaaaggccaggatagcttgaggtcataacaacagtaatatttgctgattttaatatagattttgtcatctttgactcctatttccaaaccccaagcattgcatatcgacaggtacaaggtcatcaccactatatagcactacaggtttccgaggcatgacacaaaagacatttaggcagtgactgatgaggatttcttcaacaatcttttaaaaaccaagagtgatttagtaaataaaatttattaattaatgttaattaacactaatgtatatattgattaattttacggattacaaaaagaca

SEQ ID NO: 565459 - DNA, 613 bp, Homo sapiens
tgcataatatataaactaaagaagtgctgagctggaaaattgattttatgcttatagtggtttaaaatttctaccaagcctaataatattactatttttttctctaagagctactattttccgttgcaaaaatagcaggagaggattatgtatagttctaattttaccacactcctcctgaatayaattcttccagaaacacttaatgcttttttcttttttattctttaatgactgcctagtatattgtctcagtattataagtctctttccttaccagattttcagcatatgactaatgagggaagccagtcaactcagatcattttttatttctgagatttatgtaaagttaatgacatcttaaatataattgtgtcaaattagtcagatatttttctgtatcttccttctagttccaacctactcagttacctttacttctctctacaccttctcatggaccctagtgttcagctaaatgaaatacctatcagtgcgcactccatacattatctacttccatgacttttcttacgctgttcctttctcaatttgtcctttctttactctttaatgtcttacttctacctattcttcaaggttctactta

SEQ ID NO: 565460 - DNA, 612 bp, Homo sapiens
ctggtatctgacttcagtttytactactagttcctaacgcagcggtacagttcctggcatatgtacatactcctatagtgtgtgctaaagaaaggaaagaaattaacaagtctttttctcccatgttgtataagcccagtactagttgctctcagacactagtgaataatttattactgttcatagtttaaagaatgctgataattgagtgtattggtttgttattgctgtgtaacaaattaccacaaacttagcaatttaaaacagcacatatttattaattcacagttttgtatgttagaagtctggcactgtgtggttctctcctcagggtatcacaaagaagaaatcaagtattacctaggttgagtttacctatacaatccctatgtgtaagctaggaatatttggaaacagtggaggttcatgtgttcttcgctgaccgtttatggttttgaaggcctaagaggtttcaataaactatgtcgatatgcctagcagctggcgcaaaatttttggtgaagtatttacttaatttggggaggtatgtgtgatgcatgttaagataaaagtaaagctgctcaatggagagcatctcaaaatatgattttc

SEQ ID NO: 565461 - DNA, 550 bp, Homo sapiens
tgaatccatcgttcctccacctgtaggttgagaaccactccagtttctgaggcattctcaactaagacgatacatagggcaataaccattatgacctatctccactcttgtccagtatggtttgaatgaaggtcaccttcttggtacctggtagctcagacagaactactgggtcccttgtgtaaattaccrccagcctctccttccccgttactcctgctgcaatcgaacaacatgatcatgtcaagaaaaagggtttatgttgagcctgcgaatttggaaagctgatgactgtatttcatggagtctactattgcttatgtgagtggtttttgatttggtgggaagacagaaagaggcagagcccacatctgaagttaatgcattgtgaaagggagggacatgggcagtggttacaggtggtgtgttgatccataacctgaaacgaaattgaaggaaattcagtttattaatatgtaataaaggtattattgggatttccatacttcttaagatctagatgctatggcctcaactctcatttcacact

SEQ ID NO: 565462 - DNA, 545 bp, Homo sapiens
ggggtttcactgtgttgtccaggctggtcttgaactcctgggttcaggtgatcctcccatctcaacctcccaaagtgttgggagctaccaggcccagtcattgccattacttgaatatgccatgcattttgtcctagaagatggtcttgacatagatgaagttcaaggctgtagttaagtggtaacagaaaaatacattctgaattggcctgagccaaaggctaaaggctggcttctagggtgggctcgattgggagacagaagtgattaactgaacaaggagatccaagtctcaagaatgacaccaggctaaaagcacaagtgtgmcccatcgaaccttaaggtactttactttagataacagcacatacatttctttgcttcatttttctgtgtataatctgcataatacttgggtgatatgttttaagaaatacagaagaatagttaatttctggctgctggcctaatatttgctttgagccaagaccagaatatctatggtcctcctgtctgttagttttcctgggtcatttttgtcactg

SEQ ID NO: 565463 - DNA, 574 bp, Homo sapiens
tcttatatcctgactttgtcttctgctaagtctctgtagccaccttccaactcaaatggaacaaccagaagggacacgccaaaggatgccacatggcaacctctgccactaaacacctgttccagaaggagctagtagaggattatgactagttcttcaccatgaattcattaaaatcagaagaaaatacacaccaaaggaaatctgattagacctgactcgaggtacaggttgaacattcagtagagtggcttttgtggcacaaagaggaagaagccctttgggcagaacctgaagtgttgtgaaatggtacccaaccctgtggggaacctgatggagtggcagtggctgaggacttctgtccatgaggcagctgctgctcctccagcagtgtgatttagacatagctaagtgttcagagctggaatgggccctactccatatttagtgcaactcctcatctcagtaaatgtcttgacacttaggtaaggttagggaagtgatctgcctgagatctctcacttttgttagggaatggctgtgagaccccaktccaagcccagctgtctgcttt

SEQ ID NO: 565464 - DNA, 611 bp, Homo sapiens
aaactcctgtccttaagtggtccttctgcctaagcctcccaaagtgctggggttataggcatgagccaccatgcctggtctattctcttaataatatcaatatattgttgtacaaatattcattcccaaagtataacctgactctcgctttccttgaaaaactattttaaagttgcacatttaaataatgtcaaataaataaattaattaaataatggaaaccatgcacgttttttaaaatgtcatcctccaactgatctccttacacagcatttattaacaaatttgactacataatgcatatctcctagccaaytgattttgaactttttagagcttgctagcaaagaataaaatttacttgcactaatcatatgacttaaagtctggctaaatatgctcactcgtgaatattcaaaatgaaactatgtatttgtcagttgcatactatctatcatattatgaattaaaatggtatgtgcatttacttaataaacatgattgattgcaaaatttacctctctgacatctaatttttaggatttttttgtttttatgaaactcagtaacctcaacataccaagacctagcatattgcatgtttaattata

SEQ ID NO: 565465 - DNA, 611 bp, Homo sapiens
aaactcctgtccttaagtggtccttctgcctaagcctcccaaagtgctggggttataggcatgagccaccatgcctggtctattctcttaataatatcaatatattgttgtacaaatattcattcccaaagtataacctgactctcgctttccttgaaaaactattttaaagttgcacatttaaataatgtcaaataaataaattaattaaataatggaaaccatgcacgttttttaaaatgtcatcctccaactgatctccttacacagcatttattaacaaatttgactacataatgcatatctcctagccaactgattttgaactttttagagcttgctagcaaagaataaaatttacttgcactaatcatatgacttaaagtctggctaaatatgctcactcgtgaatattcaaaatgaaactatgkatttgtcagttgcatactatctatcatattatgaattaaaatggtatgtgcatttacttaataaacatgattgattgcaaaatttacctctctgacatctaatttttaggatttttttgtttttatgaaactcagtaacctcaacataccaagacctagcatattgcatgtttaattata

SEQ ID NO: 565466 - DNA, 420 bp, Homo sapiens
aaactataaaaactctggaagacaacctgggcaataccattctggacataggaatgggtgaagatttcatgaaaaagacaccaacaaatttttgcaacaaaagcaaaaattgacaagtgggatctaactaaacttaagagtttctgcacagccaaagaaactacaaacagagtaaacagacaacctacaraatgaaagaaaatatttgctggcaaggttgcagagaaaagggaatgattatacgctgttggtgggagtgtaaattagttcagccattgtggaaagcagtatggtgattcctcaaaaaaactaaaagcagaactcccattcagcccagcaatcccattactgggtacatactcagacaaatataaatctttctaccataaagacacatgcacgtgattgttcactgcagca

SEQ ID NO: 565467 - DNA, 595 bp, Homo sapiens
ttctgcctaggttgagtgtttttcttctctcttaaattgggtctcctatgaatgatacctagattatcactcttttgctttggtataaatctgaaatcctcttacttatttcaaagccttatgatactaagaaggaggactagccttctgatcacctaaagaatcccattttggtcccctagaactgtgctagacagtttgatttaattattattgcagatagatttgcataacgctttcttctgaaaagtctttggtcacttaagcaatgccattatatgtgcagagacattcttttgagaaagtgtaatgggacatgaaaaataataaaatccacaaaacacatttattcaaggattttaataatgaagagaaattgcaattcagagtgaagaactagaagctgagtactgtctattattttttaataaaacataattaaataggcacagtataatgccttagagccagaggacagtatccgtgttaygtctaccggaaaacccactttcatatcagacaaaaggggaggtcaatacattcttatgccatctgtggaatttattgaagatgcagagcagcaattaatttaaca

SEQ ID NO: 565468 - DNA, 415 bp, Homo sapiens
agaagtaaaattattctgtttacagataacatgattttatatataggaaatcctaaagaccataccaaacaactttagtatctaaaaytaaactaaaattaataaatgaattcagtaaagttgcaggatacaaaatcaatatacaaaatcgttgaatttctacacattaatgacaaaaatatctgaaaaaggtataaagaaaagaattccatttataatagcatcaaaacataaaatacttaagaaaaaatttaaggaaatgagagatatatgcactgaaaactataatatattgatggaagaaattgatgaaggcacaattaaatggaaagatatcccatgttcatgggttggaagaattagtactgttaaaatgcccataccaccccaagttttctatagattcaatagaatc

SEQ ID NO: 565469 - DNA, 415 bp, Homo sapiens
agaagtaaaattattctgtttacagataacatgattttatatataggaaatcctaaagaccataccaaacaactttagtatctaaaactaaaytaaaattaataaatgaattcagtaaagttgcaggatacaaaatcaatatacaaaatcgttgaatttctacacattaatgacaaaaatatctgaaaaaggtataaagaaaagaattccatttataatagcatcaaaacataaaatacttaagaaaaaatttaaggaaatgagagatatatgcactgaaaactataatatattgatggaagaaattgatgaaggcacaattaaatggaaagatatcccatgttcatgggttggaagaattagtactgttaaaatgcccataccaccccaagttttctatagattcaatagaatc

SEQ ID NO: 565470 - DNA, 633 bp, Homo sapiens
catgatgatgattatcacgaataggctctgaaggtgcatccatttggaatgatccagaaatagtttctggacattgattttcttctttaaaacaaaatttctgcttaagactatttctatggccttgaattttttgtgacaaaagtggagtgcagcaaaaattctgagttacctttgctagttagtgtttttgcgatgtcacaatacaaaaagccaaatgaaacatttaatcaatgtaatagattattagctgtctgctctgaaacattatcttactcaaaaaatttgagaaaaaatcctttaacttcacgggcaatattttattctgcayctaatattataggcccttatctttccctatatcacgacttctaacatcttcaataggagatatatttttcttttatattaaggaaaaagatgtttcctcaaacatttatcatgatgctgatagacttagcaactactctaagctccacactacattaagaaaagaagtctcagtatttctggtctataaagaagaatgatgatgacactctccttgctctgattcactcgttgactcattctgtacacacatttattcatttagcaaatgtttattgatcatctactctgttaggtactagc

SEQ ID NO: 565471 - DNA, 633 bp, Homo sapiens
catgatgatgattatcacgaataggctctgaaggtgcatccatttggaatgatccagaaatagtttctggacattgattttcttctttaaaacaaaatttctgcttaagactatttctatggccttgaattttttgtgacaaaagtggagtgcagcaaaaattctgagttacctttgctagttagtgtttttgcgatgtcacaatacaaaaagccaaatgaaacatttaatcaatgtaatagattattagctgtctgctctgaaacattatcttactcaaaaaatttgagaaaaaatcctttaacttcacgggcaatattttattctgcacctaatattataggcccttatctttccctatatcackacttctaacatcttcaataggagatatatttttcttttatattaaggaaaaagatgtttcctcaaacatttatcatgatgctgatagacttagcaactactctaagctccacactacattaagaaaagaagtctcagtatttctggtctataaagaagaatgatgatgacactctccttgctctgattcactcgttgactcattctgtacacacatttattcatttagcaaatgtttattgatcatctactctgttaggtactagc

SEQ ID NO: 565472 - DNA, 449 bp, Homo sapiens
gtgtgtgcgtgagcagctgcagtagtccaacwgcagtcttctgaaggtttttccaggtattggctggtagacgcaaaggcatatacagaaactgaaaaaggaatctgggggatttgtttcaatagtatgttgaatactgacagtgttcatatactgttgatatatgacaatatatcaaatatggcaaatattctatttttatattttaaaaatacttttattttaaatctgagcccatcaaagacttacttgtgcaatcaggtttgtttccaaaatgcctccctttttttttttctttttttttgagacggagtctcgctctgtcgcccaggcgggagtgcagtggcgcaatctgggctcactgcaagctccgcctcccgggttcacgccattctcctgcctcagcctcccacgtagctgggactacaggcgcccgccatcatgcccgg

SEQ ID NO: 565473 - DNA, 562 bp, Homo sapiens
agtttgaatatattcattcattcattcattcattattaagcattcacacacatattttatcttccttcaaagagtttgtaatttaatggtgagagtaagacataaatgaaaataaaaggcagaagaatagttcagtgaaagaggcatccataaatttgttaagtcagaaagaagcataacttctcagggtagagactacggaaggctttctggaagaagtcgcatttggactatgcctaacagatgataatggtggaacagggaagggtattcaagtaggagggaacagactgactgacaacatagatagcttttgggtatgtatggagaatggggagtagtgwgatttggcttgaaacaggataataaaatgggaaaataaggtgggacacttgggaagtgttgaaattctggatggagtgtgtgacaggctaaggaatttggcttttattccacaggcagttgagaaaccaattggcactaatgcagccactggagaactcagtgtaccacaaggaatttcaatagtcttgcgagaggtgttaagaagtcatttaacaaa

SEQ ID NO: 565474 - DNA, 562 bp, Homo sapiens
agtttgaatatattcattcattcattcattcattattaagcattcacacacatattttatcttccttcaaagagtttgtaatttaatggtgagagtaagacataaatgaaaataaaaggcagaagaatagttcagtgaaagaggcatccataaatttgttaagtcagaaagaagcataacttctcagggtagagactacggaaggctttctggaagaagtcgcatttggactatgcctaacagatgataatggtggaacagggaagggtattcaagtaggagggaacagactgactgacaacatagatagcttttgggtatgtatggagaatggggagtagtgtgatttggcttgaaacaggataataaaatgggaaaataaggtgggacacttgggaagtgttgaaattctggatggagtgtgtgacaggctaaggaatttggcttttattccacaggcagttgagaaaycaattggcactaatgcagccactggagaactcagtgtaccacaaggaatttcaatagtcttgcgagaggtgttaagaagtcatttaacaaa

SEQ ID NO: 565475 - DNA, 549 bp, Homo sapiens
tgatttaattacctcccactgggtccctcccatgacacatgggaaatatgggagctaccattcaagatgacatttgggtggggacacagccaaaccatatcatatcacgttgtccgagtgcttgagacagggtactacaaccagactcctcggagaaggttgtgtttggtctaaggctcgtcaagctcacccttttaaaaagaattgttcaggaatataggcctagccaggcagcctgaatcagttcctccgtcaggcagggatatgggatatatatggggttggtgaatgcaakggagcagggttgtttggaactttaaggaattagttttctgacccagaagagatgtgggtcttcttttagatttcaagttgtgtgaaataaagctgaaaaatgtcatagccatttttttctgtcaccaaggaagctattttgaaccaactcagaggagggaatagtgaaggggagtccagagaaataaaactgaaatactgggttcagcctaacctgaggcctaacgtgcctcatggcttgcacttaagagagcc

SEQ ID NO: 565476 - DNA, 600 bp, Homo sapiens
aatatccctgtctgacagctctaaagagggcagtggttctcccagcacagtgtttgagttctgagaacagagagacagcctcctcaagtgggtccctgamccccgtctagcctaactgggagacacttcccagcagaggcctacagacacctcatacaggtgggtgcccctctgggacaaagcttccagaggaaggatcaggcagcaatatttgctgttctgcaatatttgctgttctgcagcctctgctggtgatacccaggcaaacagggtctggaatggacctccagcacactccaaaagacctgcagctgagggacctgactgttagaagaaaaactaacaaatagaaaggaacagcatcaacgtcaacaaaaaggacatctacacaaaaccccatctgtaggtcaccaacatcaaagacaaaaggtagatggtaccacaaagatggagaaaccagagcagaaaagccgaaaattctaaaaaacagagcgcctcttctcctccaaaggattgcagctcctctccagcaacagaacaaagctggacagagaatgactttgatgagttgacagaagtatgcttcagaaggtcagcaat

SEQ ID NO: 565477 - DNA, 600 bp, Homo sapiens
aatatccctgtctgacagctctaaagagggcagtggttctcccagcacagtgtttgagttctgagaacagagagacagcctcctcaagtgggtccctgaaccccgtctagcctaactgggagacacttcccagcagaggcctacagacacmtcatacaggtgggtgcccctctgggacaaagcttccagaggaaggatcaggcagcaatatttgctgttctgcaatatttgctgttctgcagcctctgctggtgatacccaggcaaacagggtctggaatggacctccagcacactccaaaagacctgcagctgagggacctgactgttagaagaaaaactaacaaatagaaaggaacagcatcaacgtcaacaaaaaggacatctacacaaaaccccatctgtaggtcaccaacatcaaagacaaaaggtagatggtaccacaaagatggagaaaccagagcagaaaagccgaaaattctaaaaaacagagcgcctcttctcctccaaaggattgcagctcctctccagcaacagaacaaagctggacagagaatgactttgatgagttgacagaagtatgcttcagaaggtcagcaat

SEQ ID NO: 565478 - DNA, 580 bp, Homo sapiens
cacacaagctcttagaagcagaagagagagtcagaagaaggggtgagagaaatacagcataagaagacttgacccacaattgcwggttttaaagatggaagaaagaggctatgagccaagggatgtgctggcttctagaagctgggaatgacccctggcttacagtgagtgagaaaatcaagaccccagtcctataactacgagaaactgaaatctgccaacagcctgaataaagacaaaacatgcttccctagaataaacaggaaacatgcttccctagagcctccagaaaggaaggcagcctgccatcatcttgagagtatattgagacccatttcagacttctgatctacagaactgtaaggtaatatatttgtgttattgtaagctactaaaatgtgatgatttgttatgctagcaatggaaaatgaatacattgatgctttaattttctttccaagataagaagtaaattggagcatttaattttttatttacagtgttattgaattgtgattagaaaatgtgatctgtttgtttttgtttttaaattttatcaatatttcctatgggccctaat

SEQ ID NO: 565479 - DNA, 544 bp, Homo sapiens
tttatattttagagaccgagtcttgctctgttgcccaggctggagtgcagtggtttgatgacagctccctgcagcctcaaactcctgggctcaagtgatccctctgccttggcctcctgggtagctaccatgtctggctgattttttttttttaatttttagtagacacagggtctcactgtgttgcccaggctggcctcaaactcctaaactcaagtgatgctccccttaccttggcctcccaaagtgttgagattacaggtgtgagccaccatgcccagcctccactttctttttttaaattattattattatttttttgagacagagtcttgctctgtcacctaggctagagttctgtggcacratctcagctgattgcaccctttgcctcccaggttcacacagttctctggcctcagcttcccaagtagttgggattacaggcacgtgccatcacacttggataatttttgtggtttcagttgagatgagatttcaccatgttggccaggctggtcttgaattcctgacctcaagtgat

SEQ ID NO: 565480 - DNA, 544 bp, Homo sapiens
ttatttttgttttgagacggagttttgctcttgtcacctaggctggagtgcagtggcatgatctcagctcactgcaacctctgtctcctgggttcaagcgattctcctgccttagctcccgagtagctgggattacaggtgcccaccaccactcctggctaatttttgtatttttagtagatacaaggtttcrccacgttggccaggctggtctcgaactcctgacctcaggtgatttgcctgcctcggcctcccaaagagctggtcttttttctgtctgcatagtgttaccatttctacaacataatgtagttggaatggtgcagtatgtagccttttcagatggcttcttccatctagcaatatacatttaacattgaccatgtatgtttttaagataacatctaaattttttcataagttttagttatttcaaagcatacaacctttatgatattatgatagtgacatttaaaaatggttatatttattaaaagataatttttaatgggtaaaagcatgactctcatactgctgtaaaaat

SEQ ID NO: 565481 - DNA, 544 bp, Homo sapiens
ttatttttgttttgagacggagttttgctcttgtcacctaggctggagtgcagtggcatgatctcagctcactgcaacctctgtctcctgggttcaagcgattctcctgccttagctcccgagtagctgggattacaggtgcccaccaccactcctggctaatttttgtatttttagtagatacaaggtttcgccacgttggccaggctggtctcgaactcctgacctcaggtgatttgcctgcctcggcctcccaaagagctggtcttttttctgtctgcatagtgttaccatttctacaacataatgtagttggaatggtgcagtatgtagccttttcagatggcttcttccatctagcaatatacatttaacattgaccatgtatgtttttaagataacatctaaattttttcataagttttagttatttcaaagcatacaacctttaygatattatgatagtgacatttaaaaatggttatatttattaaaagataatttttaatgggtaaaagcatgactctcatactgctgtaaaaat

SEQ ID NO: 565482 - DNA, 598 bp, Homo sapiens
taatgaatagaaatttatttcttacagttctagaggctgggaagtccaaaatcaaggtgccagcaggttagggcccaatctctcttcttctaccatagcaccttgaacactgcctcctgtgttcaagaggaatggaggaaggaatgctatgtcctcacctggcagaagggtagaagatagagaacatgctcctgcaaaccctttttatggtggcattaatscactcataagggcagatccctcatgacctaaacacctccatgtaggccccacctcccaacaatgttgcattggggattaagtttccaatacatgaattttcagagacacatgcaaaccataccacccatgtaatgtttggacaatcttcttgggccaccaattttgagacaagtccaccaaggattggggaatacattaataagaaaagcaaagcaggccaatgggcctggagagcaaaagttggggtttgaattcaggactgggccagatctgtgatctaatgagaagacaatctgtagtcataaaggcacaagtaggatatgcctatagaacagagagcttaatatgattgtgcatgcaagatggagtgaggtat

SEQ ID NO: 565483 - DNA, 602 bp, Homo sapiens
ttaataagaaaagcaaagcaggccaatgggcctggagagcaaaagttggggtttgaattcaggactgggccagatctgtgatctaatgagaagacaatctgtagtcataaaggcacaagtaggatatgcctatagaacagagagcttaatatgattgtgcatgcaagatggagtgaggtatatattgggaaargcagcctcattcacataattttttgaccccttctcagatgcattaagaatgggccttggccaggcatagtggctcacaccagtggatcccagcactttgtgaggctgaggcagaaggatcctgggaggagtttgaggtgagcctgggcaacatagtgaaaccctgtctcatatttttttaaaaaagtaaaaattaaaataaaaaaatgaatgggtcttaatctggagcgcttcctcatcgagagatagagttctcatggtctgtgctaggcttaaattaaaccttgtattgaaatacctttccctattccagattcaatgtgtactcctttgttctgcttaagtgtgtacattatatggcaccttgccaataccattactatatctgtccccttttgggagggcaggtc

SEQ ID NO: 565484 - DNA, 602 bp, Homo sapiens
ttaataagaaaagcaaagcaggccaatgggcctggagagcaaaagttggggtttgaattcaggactgggccagatctgtgatctaatgagaagacaatctgtagtcataaaggcacaagtaggatatgcctatagaacagagagcttaatatgattgtgcatgcaagatggagtgaggtatatattgggaaaagcagcctcattcacataattttttgaccccttctcagatgcattaagaatgggccttggccaggcatagtggctcacaccagtggatcccagcactttgtgaggctgaggcagaaggatcctgggaggagtttgaggtgagcctgggcaacatagtgaaaccctgtctcatatttttttaaaaaagtaaaaattaaaataaaaaaatgaatgggtcttaatctggagcgcttcctyatcgagagatagagttctcatggtctgtgctaggcttaaattaaaccttgtattgaaatacctttccctattccagattcaatgtgtactcctttgttctgcttaagtgtgtacattatatggcaccttgccaataccattactatatctgtccccttttgggagggcaggtc

SEQ ID NO: 565485 - DNA, 596 bp, Homo sapiens
ttcttatatgggataggggaracattttattttttattatgctggcacacagttgatattttggtatttttaggtgccaaaaatgccttggttatattttatggctttgttcctgtagattttctttaaggcagcatttcccaagtgtgcttcatgaaaacaaagctccagtatggggtaaattaagaaaattctgcatattatatccttcccgtggagattcacaattcacattatcatattaaacccactgagaagtcctcatgtaaagacattagtagcattgtttaatctcatttccccacatttacttgatcaaggatcccttttatgttttattcattattatttcaagatctgggaaatactactttaagtctacacagtagaggcagtttagtagaaagcaaatttttctctaacttttgaggatgaggcaagtggacacgtttaaatagcataaaacgatatacaaaggattacagagagattttcctgactataagaggagagaaactcggacagagattacttaggtcaaaactgatgcaggttaaactgagaaaacttatgaattgcaccaagtatgtgcacac

SEQ ID NO: 565486 - DNA, 364 bp, Homo sapiens
ttcattctattctagattaaaaaaaaaaaacactggagaaatctcaatttaaagatagaatagcaccatatgttaaaaaaatcctaaggagaaatttgcaagggcagaacatagtaattgaaaaggaactggccagtgtgtcagaattcatattctcaactttggttatttcagagagtgtcatggggattgttccaaggttgccaagatccaatttacactggagttagtaaaataacaaaatttcttttcttcaccattactacctcccattattgtaatccwtatatacaaaaacaaaaacaaccttcccccttcaccaccctaattttcgtcctttttggggagatagggttgaaggaat

SEQ ID NO: 565487 - DNA, 537 bp, Homo sapiens
gtaaaataacaaaatttcttttcttcaccattactacctcccattattgtaatccttatatacaaaaacaaaaacaaccttcccccttcaccaccctaattttcgtcctttttggggagatagggttgaaggaattttctaatattattctgacctgggagggaggcagataattttattacagtaagatacaggaaaaagtctagcatattgttaactttcataataacaaaaatcgaattgtgtccagattccccaccatgatgacctctgagcctcctcttcttcactctaaagaatcaaaggctctatttcatcatactcaaaatgtyatttttatgcctcagcatttatgttacctatgctatgccatcaggcagcatctaataaattggtaacaatgcagtcattctgtgggcacaaacatgtcctgattttctaagatatctgtattgagatccttacttcttgtattagaatattctggttctaatgaaaggtcattggcaaaaaaaagatccgtgggaagttttaaaa

SEQ ID NO: 565488 - DNA, 544 bp, Homo sapiens
ttcaaaaacaatggaaaatttcaacgtattattctaagtataccatgagtaaagtgggaaatcaaaactgagaattataaaatatttagaaatgaacaacaatgtaaattactgtgggatgagggcaagtatcaatcagaaaaaaaattgccttaatgcttacattaagaaagtaaaaaggctgaaaaatgatggtctacatatttatccagctctagcaattagaaaagaaatgacagaatgaatccaaagaaaaataaaggcaattgtgaatgaaatagtaataaaagataaaagactcgaaataattgaccaaaccaaaaattattttttgtaaagactaataacagagacacctttctgaaagggctggttaaatcaacaaggaaaaaaaagrcaaaataaataatattaggaatgacagcacagcagaagttaaaaaataatagaagaaaataatattttaggaaacaaataggaaaattttcctataataatttaacttaccaaaagtgactaagtagaaatagaaagcatcataaga

SEQ ID NO: 565489 - DNA, 521 bp, Homo sapiens
aacctgttagtgttctccagattgaagccttccctctaactgctcctaaatctgtgatgtagtggaaaaggtttgaggccttgattctcatcccgggtttttcacctacagatcatatggccttagcctcttgacaccattgtctccttatggccaaagatggaactgtacttgggtggtatctgagcaccctgttggctttgacattctagggctcttcccttggcaccactctcttatttaaaaggaataggatgtggacttagaagggttatttctctgcaaactatcctctctttcttatgacaagctatttctgaatgtgcacatttgaggctaagcaaatcccttcctgggaggtgtgaaagacctttatttctctccagaggagtattatggatgtggtagagacctrgctaactcatctgcagcggctttgagcaaggcttttagaaccataaggtggctggggtcctgtgtcctacaccacaggccagctagttcatttcaggagactttct

SEQ ID NO: 565490 - DNA, 547 bp, Homo sapiens
gagacctaagaacaggaactggtccaaaggggtaacctggagctgtatctttttaaagacaaaacaccctcctccaggcttaacagagcttgaagtgtgagaaccaggaaaagaggagtcaatctctgggaacttagctaatatctactttcatggacacccctacagtctaactttcattcattcatttaactattatatgttgagtacataaaatgttctaggcactagagtggtgaatgagacttaatccatgctctgatggaactgattctttttctttttcctcgcccaggttggagtgcagtggtgtgatctcggcttattgcaacctctgcctccctggttcaagcgattattgtgtctcagtctcctgcgtagctgggatcacaggtgtgcatcaccatgcccagctaatttttttatytgtggtagagatggggtttcaccatgttggccacgctggtctcaaactcctggcctcaagtgatccattcacctgggccttccaaagtgctgggattataggcgtgagctactgtgccca

SEQ ID NO: 565491 - DNA, 547 bp, Homo sapiens
gagacctaagaacaggaactggtccaaaggggtaacctggagctgtatctttttaaagacaaaacaccctcctccaggcttaacagagcttgaagtgtgagaaccaggaaaagaggagtcaatctctgggaacttagctaatatctactttcatggacacccctacagtctaactttcattcattcatttaactattatatgttgagtacataaaatgttctaggcactagagtggtgaatgagacttaatccatgctctgatggaactgattctttttctttttcctcgcccaggttggagtgcagtggtgtgatctcggcttattgcaacctctgcctccctggttcaagcgattattgtgtctcagtctcctgcgtagctgggatcacaggtgtgcatcaccatgcccagctaatttttttatctgtrgtagagatggggtttcaccatgttggccacgctggtctcaaactcctggcctcaagtgatccattcacctgggccttccaaagtgctgggattataggcgtgagctactgtgccca

SEQ ID NO: 565492 - DNA, 378 bp, Homo sapiens
actttattctctatcaaaattaattttatgctaactacactcccagaaaggtagaagtgggccttttactctcaatttgccaaggacagaaaaactgaggcacaaaggtgtaaagtttgcagggygagtgtagtgaggaatagagactaaaaccttggtttaggcatgaaactgtctttcccctctcagcaatgaatatcagattccacaaacatgtaacatcactgttggttaaaacatctcaggattcgatttaaacttttttaagagcgcccatttgcaaagcactgtgccaacagcatcaggggtgatagaagtaatagtataccctatctgccttgaaggaacttaaaactagctattctcaactgagtcaca

SEQ ID NO: 565493 - DNA, 378 bp, Homo sapiens
actttattctctatcaaaattaattttatgctaactacactcccagaaaggtagaagtgggccttttactctcaatttgccaaggacagaaaaactgaggcacaaaggtgtaaagtttgcagggtgagtgtagtgaggaatagagactaaaaccttggtttaggcatgaaactgtctttcccctctcagcaatgaatatcagattcyacaaacatgtaacatcactgttggttaaaacatctcaggattcgatttaaacttttttaagagcgcccatttgcaaagcactgtgccaacagcatcaggggtgatagaagtaatagtataccctatctgccttgaaggaacttaaaactagctattctcaactgagtcaca

SEQ ID NO: 565494 - DNA, 538 bp, Homo sapiens
gcttctagtgaaccctcaccattcctcccaccttctgttcttttggagtctgcaaaaacgtctactgacccccaaatctgcaagaacactattaaaaccagtttttaaaagtgcaatcaagttacctctgctttcccagcaactgacacctaccaagaatctttcaccatggttttctagcagcctgttctctactatacagccacactatttataagctcctctagcgttgggacgaagggagaacaggctgttacaaaaccatagtgagaaactcttggtaggtgttagtagctgggaaagcagaggtaattagagtgaatttaaaacgctggttttaatagagttctagtaaacttsgaggtcagtagctgttttcttgctggttgatctggtaccatgaacacaagacttacattttatgtttaagtgatgcaaattactgtggttgaaagactgaaagcaaaagtgaaaggaaatgggctaggaattgagaactttggttttgatgttaatctggcctaataatcatgtccag

SEQ ID NO: 565495 - DNA, 499 bp, Homo sapiens
aaattaccaaatagattttttaaaacacaaagcagaacccctgataaagcctcaaaagcctttggagatcaagaattaacaatagaagactggagtagaggttaggcttgtaattattcacaatagcgaagacayggaatcaacctaaatgcccatcaatgataaactggataaagtgtggtgcatatacaccatagaatactatggagccataaaaaaagaataagatcatgtcctttgcagggacatggatggagctggaagccattattcttagcaaactaaagcaagaaaagaaaactaaacattgagtattttcacatatatgcaggagctaaatgatgagaatatatggaaatagacagaggagcaacacacactggggcattttggagagtggagagtgggaggagggagaagatcaggaaaaaataactagtgggtactaggcttaatacttgggtgacaaaataatctgtacaacaaagccccatgacac

SEQ ID NO: 565496 - DNA, 499 bp, Homo sapiens
aaattaccaaatagattttttaaaacacaaagcagaacccctgataaagcctcaaaagcctttggagatcaagaattaacaatagaagactggagtagaggttaggcttgtaattattcacaatagcgaagacacggaatcaacctaaatgcccatcaatgataaactggataaagtgtggtgcatatacaccatagaatactatggagccataaaaaaagaataagatcatgtcytttgcagggacatggatggagctggaagccattattcttagcaaactaaagcaagaaaagaaaactaaacattgagtattttcacatatatgcaggagctaaatgatgagaatatatggaaatagacagaggagcaacacacactggggcattttggagagtggagagtgggaggagggagaagatcaggaaaaaataactagtgggtactaggcttaatacttgggtgacaaaataatctgtacaacaaagccccatgacac

SEQ ID NO: 565497 - DNA, 538 bp, Homo sapiens
ggtgacagagtgagaccccatctcaaaaaaaaaaaagaagaaggtaattagagttagtgaccccaaaagagaggtaacacaaaattataactaccttttactaagcatttactatgtgtcaggcaccatggcagttgctctgcatatatgcattatctcaattcatacagcaacaccatgagatacatggaaaaaacaatggcacagaaagttcaaataacttgtccaagattatgaactaataaataccaaagctggatttacgtatagtcaattaggctcctacaattgtgcaccttctacctctcacaaggcaatagagaaatacgaagtcttagtgtctacatttttttctgaacgtgtayaactgaaagcacattatttggtgaaagcaagtttaagtaaggcttggagtaagaatcttaagcctaaaaggaagatgggagaacagaagtcctaatatcatcccacaagtgccaatcctgacactttaccatcactatgactatctcttgggggagcctgtaataaagataat

SEQ ID NO: 565498 - DNA, 506 bp, Homo sapiens
ttttctgaaatgcctttcccctgcactcatggacagagattacagtttatgtgaaggatagatttttaaagaatttacataattcaaagctaacataattgaagatgaattttctcacagacccaataaaagtatttctgatggtgggtttctgtttaccggctcaagtggtagtaacatgaacactgcttacaattcactttgcataacagcactgaaaataatagttgctgatgaactaaacaatgttttggaaattgcctaattttgaattttgtgcatagatggggacttcattaatatttttataccatatactttcacattaattcaatgttgcataatatgtaattgcccttcrttatactacctcctctgatttctcattagtgcttgattatatttgtcataataattgcaatagttgcagcagaaaccttcactcattttctctaagaatggagttgctgttctaattgggtagagcctaagtgctcaattgggca

SEQ ID NO: 565499 - DNA, 507 bp, Homo sapiens
aggatggatagatagatgatagatagatagatagatagatagatagatagatagatagataatggattaactttcaatattttccttacttatggacctctttttccatggacacctattaccatcccagcacaatggtgttctaagaaacacactttgggaacagtgcaggaccacacctgacacactgtagcacactcctgaccaagattctgtcctcgaccaaactctagccagggccctctgagccctttctctactagacctcaaggcrtggcctagaaagacttgagcaaacactaacatagtttctaacagctcagccatatccctaggacaactccagcttccttaaagtgcctgcctgagaaaactccaggttgccaaaagaatgtactgtttgttccagcaacctgaggacagagcctgtctcccagtctctgtgggagggtaggagcccacctacattcaataagagccaggcaacaaacccagatgggtttcaca

SEQ ID NO: 565500 - DNA, 574 bp, Homo sapiens
aactggactctgtttcacttctgcccacatggacaactattattctgtccttctcagagaacaggtaagtcatctttggtggcatccaacgtctcaaaactaagagtagaccaaattctctctggaagyctcatacatcccccctccccaacggcagccagtccctgtcagtcttagatctaatattcacaggacctgtggcatgaatacaaatgaagacccatatactgatgttatcaactgagctcgcaaattctgtataaaacatgttgtatctttctaccttgacaagtatgccttcatactaatctggaaggccagttcaaatttaccagtctcagactcttcagcgtttcatgcaggaacgtggtggcagtgtggaggaagttggctgggtcctcagcctagagcccaccccacttctatttctatccccaggtgcctgttgcaccataaggaggctcacgtgtgcccactccatccggcatctacgctttgtccacacctctactaacagcctccccttggctgcctcaggggcctgaggattcccacctgcagagtaacttcccct

SEQ ID NO: 565501 - DNA, 280 bp, Homo sapiens
ttttagcatcaaattcatttggattyttcggctttaaggtatgaatcttcaaaggattgacttatttgaaggtctacatgaatatctgattagcttctccatatactgatgtatatcatggtgaggaagggaagaattttcaaatcctcaggttaactctgaagtcagaatatccatcctactgccattgtttgagggctaaaataactatgaatttatgataaactttcttccaaaaatctacatgtcaaatactttgactttgggcccttatacataa

SEQ ID NO: 565502 - DNA, 481 bp, Homo sapiens
ggatgcccactctcactacccctattcaacatagtactggaatcctaggcagagcaatgaggcaaaagaaagaagtaaaaggcatccaaataggtagagaggaagtcaaactatctctgtttatggatgatataattctagacctagaaaaccaattagtctctgcccacaagctcytagatctgataacttcagcagtttcaggatacaaaattaatgtaccaaaatccattgcatttctatacatcagtgacatctaagcagagacccaaatcaagaacacaatcccattcacaaaagccacaaaaagaataaaatacaaatatagctaaccagggaggggaaagatctctacaatgagagtaacagaacactgctcaaagaaattggggatgatacaaatgaatgaaaaaacattccatgctatggataggaagaatcaatattgttaaaatggtcatattgcccaaagcaatttaca

SEQ ID NO: 565503 - DNA, 595 bp, Homo sapiens
atacctctaacctatataacatttgtttgctgtagattaagaaaacacatattgccaaagcagcacacatcagtgayagatttcctttcactttactcttccagaaacagaatttattttcttctttttagagtgccatctctcttttagggcagaagaggcctgataattaattaattattaaatcaattttataacatttattatatacctgctatgtgccaggtgcttttcttgtaacttgaaatcaccaagaataaaacagtcttcatcagaatttaacagttaatgttgaactgttctaaggggaaataaacactaatgaagaagaaaaatattgccaaacaaagttgttttggtgtcctctattttcagttacagagaaggtaaggtagaatatcaaaataataaggtcatttgcttcagatatactaatgcaaagattacagggccttattccaaagcagtaatcctctccatctctcagagctgaaggcttatgtctatcattctgccagagccagatgcatcatagatagcaattgtgtctttgaatgtctcttgtcttttctcatgatccactggcagtggcctt

SEQ ID NO: 565504 - DNA, 579 bp, Homo sapiens
tgtctctactaaaaatacaaaattagccaagcatagtggcacatgcctgtaatcccagctacttgggaggctgaggcaggagaatcatgtgaacctgggaggtggaggaggttgggtgagctgagatcgcaccactgcactcctgcctgggcaacaagagcaaaactccatctcaaaaaaaaagagaagaaatagtgtgcttttctataagtactttctctttttttgaagaatgcggaccaatgctgaacacggaatcaagcttgggataagaatagctagaggacaaaatgctggtgtgtgsgttattatgcaagtaagatgccttggatctccgtctcatataaggtggaaactctccctccccaccctacatctttgccactctcatgaattccaggatagttggtagtttcctaatcaagagcttacttatcgaaaatactccatggcttttgtagaagcttctgtttgacaattcctcactacacattggttctttaccattacaaagcaccgcggaggtaagttcattatgcacagcagatgtgtagggcacatttgggataatggagaggg

SEQ ID NO: 565505 - DNA, 309 bp, Homo sapiens
tctttctttctatttctttttgagacggtgtcttgstctgtctccactggagtgaagtggcgccatctgctacctctgcctctgggattcaagcaagcaattctcctgcctcagcctcccaagtagctgggattacaggcacacatgaccatgcctggctaatttttgtatttttagtagagacagggtttctccatgttggccagggtggtcttgaactcctgacctcaggtgatccgcccacctcggcctccaaaaatgctggattacagatatgagccactgtgcccggcccaaaagcacatattt

SEQ ID NO: 565506 - DNA, 612 bp, Homo sapiens
tgggcatggtggcacacgcctgtaatcccagctattcaggaggctgaggcaggagaattgtttgaacccgggaggcagaggttgaggtaagccaagatcatgcgactgcactccagcctggtaacagagcgagactccatctcaacaaaaaagcttccctaacaaagaaacagttggaagatgcttaagtctccttggttttcatttagtggcagtggcaacctaagacggcaaagaatgtggcactatctcaggtattagatgcaagactagggctcttagtaaacagccatacttcagagttaagaactactcaaacacaggatatatgatctctacaactctaagttaaatcatgtacaggtaaattctgytacattgcttgttttgaaaacacacattggctccaacacaattcatggggagcatttttaacattttaaatttcatgtttgcttctatgaatttcatctattagaaactctagatgaacacagaaaacagcacctagccaaaacaagtctcataggcatgcacagcagcacccagacacacacctcaaacaactacctcagatccccttgtatgttgtgagccacaatgaaccacacc

SEQ ID NO: 565507 - DNA, 581 bp, Homo sapiens
ttctgccttaatttcattatttagaaaaaatattccaaagcagactggtttattttattttgaatttttttagacagtgtctcactgtgtcactcaggctggagtgcagtgtcacaatcatggcttactgcagtcttgacctcgtgggctctgatgatcctccaacttcagcctcccgagtaaatgggactacaggtgtatgccaccacacctagctgatttttgtattttttgtagagatggctggttgctctgtcccccagactgctctggaactcctaggctcaagcaatctaccagycttaacctcccaaagtgctgggattacagtcatgaacgactgtgcctggcccagaaacacattgcttaattttcataaaattctgtggttttaagagatctgattggtattgatttctatttttactgcactgtggtccaagagtatggttcatatgacttccttttctttaatttgttgagaattgctttatggccaaatatgtggttagttttagagtatgtcacgtgcaagtaagatgaatgtatattctgttgttgctgagtagagtgttttgtag

SEQ ID NO: 565508 - DNA, 615 bp, Homo sapiens
cctaacatatggtctatcctgttgaatgttccatatgctggtgagaagaatgtgtattcttcaactgttggatgaaatgttctgtaaatatctgttagatctacttggtctaaagtgcagtttaaatccagtgtctctttgttgattttttttttttttttggtctaggtgatctgccctatgctaagagtgaggtgttgaggtcctcaactattattgtattggtggcaatttatctctttagatctaataatattttctatatatatctgggtgccctcttgttgggtacatttatatttagaattgttatatccttttgctaaattgattcctttaacattatataatatcctttttttgtttctttttacagcttttgaattgaataatttttttttttttttttgagacaaaatctccctctgtcgcccaggctggagtrcagtggtgcgatcttagctcactgcaacctctgcctcccgggttcaagcgattcttctgagtagctgggattacaggcatgcgccaccacccctggctaatttttgtatttttagtagagatgggatttcaccatgttggtcagtctggtctcaaactcctgacctcgtc

SEQ ID NO: 565509 - DNA, 489 bp, Homo sapiens
aagaattccaaaagtctattagttctgtgtcctctcaggcaatgtttaaactattttcaaagtgaagatagggtggttggataaggatgcccagtaaaacacttgtgtgtggttttaacttctggaatctttgcttaaaaatgaatcttgacctctgtcagctgctctggctgtattctgactatgcaccctaccccatgtctgaaaggagaatcacagactgacagcataaaaacatctagaacagatcaaacccagcaaagcatgctgggagcaaacagtactgttctcacaggttcaaacaccaattatggstttttcctccccctgtaaaaatcaaagcacacacttctgtttaccttggtctgaaatcactggcctctgtttcaatccactcactctttctgggtagccccatactccctaaatactgatggctttgaatacctacccttagctctgatttctcctgatctccaggcctttata

SEQ ID NO: 565510 - DNA, 489 bp, Homo sapiens
aagaattccaaaagtctattagttctgtgtcctctcaggcaatgtttaaactattttcaaagtgaagatagggtggttggataaggatgcccagtaaaacacttgtgtgtggttttaacttctkgaatctttgcttaaaaatgaatcttgacctctgtcagctgctctggctgtattctgactatgcaccctaccccatgtctgaaaggagaatcacagactgacagcataaaaacatctagaacagatcaaacccagcaaagcatgctgggagcaaacagtactgttctcacaggttcaaacaccaattatggctttttcctccccctgtaaaaatcaaagcacacacttctgtttaccttggtctgaaatcactggcctctgtttcaatccactcactctttctgggtagccccatactccctaaatactgatggctttgaatacctacccttagctctgatttctcctgatctccaggcctttata

SEQ ID NO: 565511 - DNA, 489 bp, Homo sapiens
aagaattccaaaagtctattagttctgtgtcctctcaggcaatgtttaaactattttcaaagtgaagatagggtggttggataaggatgcccagtaaaacacttgtgtgtggttttaacttctggaatctttgcttaaaaatgaatcttgacctctgtcagctgctctggctgtattctgactatgcaccctaccccatgtctgraaggagaatcacagactgacagcataaaaacatctagaacagatcaaacccagcaaagcatgctgggagcaaacagtactgttctcacaggttcaaacaccaattatggctttttcctccccctgtaaaaatcaaagcacacacttctgtttaccttggtctgaaatcactggcctctgtttcaatccactcactctttctgggtagccccatactccctaaatactgatggctttgaatacctacccttagctctgatttctcctgatctccaggcctttata

SEQ ID NO: 565512 - DNA, 489 bp, Homo sapiens
aagaattccaaaagtctattagttctgtgtcctctcaggcaatgtttaaactattttcaaagtgaagatagggtggttggataaggatgcccagtaaaacacttgtgtgtggttttaacttctggaatctttgcttaaaaatgaatcttgacctctgtcagctgctctggctgtattctgactatgcaccctaccccatgtctgaaaggagaatcacagactgacrgcataaaaacatctagaacagatcaaacccagcaaagcatgctgggagcaaacagtactgttctcacaggttcaaacaccaattatggctttttcctccccctgtaaaaatcaaagcacacacttctgtttaccttggtctgaaatcactggcctctgtttcaatccactcactctttctgggtagccccatactccctaaatactgatggctttgaatacctacccttagctctgatttctcctgatctccaggcctttata

SEQ ID NO: 565513 - DNA, 604 bp, Homo sapiens
ttctagttagccattcatctaatcttttttcaaggatttttgcttctttgtgatgggttcaaacatcctcctttagctcagagaagttgttattaccgattgtctgaagccttcttctctcaactcgtcaaagtcattctccatccagcctttttccattgctggcgaggagctgcattccttcggaggggaakaggcactctgatatttagaattttcagcttctctgctctggtttctccccatctttgtggttttatctacctctggtctttgatgatggtgatgtacagatggggttttgatgtggatgtcatttctgtttattagttttccttctaacaatcaggaccctcagctgctggtctgttggagtttgctggaggtccactccagaccctgtttgcctgggtatcaccagcagaggctgcagaacagcaaatgttgctgtctgatccttcctctggaagcttcatctcagaggggcacccagctgtatgaggtgtcagtcagcccctactggaaggtgtctcccagttaggctactcaggggtcagggacccacttgaggaggcagtctgtccactctcagatttcaaactcc

SEQ ID NO: 565514 - DNA, 546 bp, Homo sapiens
gtctcactctgttgcccaggctagagtgcagtggtgtgatcccggctcactacagcctccacctcccaagttcargtggttctcgtgcctcagcctcctgagtagctgaaactacaggtgtgtgccaccacacccagctaatttttgtatttttagtagagacggggttttaccatgttggccaggctggtcttgaacttccaactcaggcccaccttggcctcccagagttctgggattacaaatgtgagacactgcaccagggcaaccaatttttttaattgccagaggtaacaaaatatttcagtaagtagaaagggttagagtctgtgggtggcctttgtttaactcactacaaaactataaattaaagattttaagggaagaggactggattcattctgtgggttaattatacaccattgccagtaaagaatactttaaaatgttaaattatttcatatagtataaacagtatattatggttatatttatgtatgcaggcatttatttgctttatttttgtctgctgattacattgtgaat

SEQ ID NO: 565515 - DNA, 546 bp, Homo sapiens
gtctcactctgttgcccaggctagagtgcagtggtgtgatcccggctcactacagcctccacctcccaagttcaggtggttctcgtgcctcagcctcctgagtagctgaaactacaggtgtgtgccaccacacccagctaatttttgtatttttagtagagacggggttttaccatgttggccaggctggtcttgaacttccaactcaggcccaccttggcctcccagagttctgggattacaaatgtgagacactgcaccagggcaaccaatttttttaattgccagaggtaacaaaatatttcagtaagtagaargggttagagtctgtgggtggcctttgtttaactcactacaaaactataaattaaagattttaagggaagaggactggattcattctgtgggttaattatacaccattgccagtaaagaatactttaaaatgttaaattatttcatatagtataaacagtatattatggttatatttatgtatgcaggcatttatttgctttatttttgtctgctgattacattgtgaat

SEQ ID NO: 565516 - DNA, 603 bp, Homo sapiens
aggttaacatttcaacatacgaattttgggggcacacaagcatttagaccatagcaaagaagaaaacatagagcaaaaaattcattccattggatttggcagtgatttcctgaatatgacacaaaagggacaggcaacaaaagaaaaaatagtcaagttgtactttatgaaagttaaacattttgtacatcaaaagacactatcagcagtgtggaaaggtagacctggagaaaatatttgtgaatcatatctctgaaaagggattaatacccagagcagctgggcacactggctcatgcctataatcccagctactcactttgaggctgcagtgagctmtaattccaccactgcactccagcctgggtgacagagtgagaccccatcactaaaaaaaaaaaaaaaagaacatctagagaacctctaaaactcaacaagaagaaacaaacaacctgatttacaaaatgggccaagaacttgaatagacatttctccaacgaagttatataaggtagggtgtggtggctcacacctataatcccagcactttgggaggctgaagagggcagatcctttgaggccatgagtttgagaccagcctgg

SEQ ID NO: 565517 - DNA, 560 bp, Homo sapiens
ttttatggctgcatagtattccatggtatatatatgtcacattttctttatccagtctatcattgatgggcattttggttggttccaagtctttgctattgtaaatrgtgctgcaataaacacacgtgagcatgtgtctttatagtagaatgatttgtaatcctttgggtttatactcagtaataggattgccgggtcaaatggcatttctggttctagatccgattttattctgtaaccaataaagagttcacaggtgaatgaaaggaaatcagtgagaaattaaatttgtggtagtttgtaggataaattagagtaggaagttactggtgaaagggggatatttggaggtaatttttatgaatagaatgctatgcctacctttaataatcattagtaagcagcccttatattggagagggaatccaaggtaaatgcatcattatttctgaggagtgttccttgtataaaatgtagttgaggatcctggatttgaacttaaatcctcatctctagatcatttccttcatttaagttggttaaacccaatgaaccagcac

SEQ ID NO: 565518 - DNA, 560 bp, Homo sapiens
ttttatggctgcatagtattccatggtatatatatgtcacattttctttatccagtctatcattgatgggcattttggttggttccaagtctttgctattgtaaatggtgctgcaataaacacacgtgagcatgtgtctttatagtagaatgatttgtaatcctttgggtttatactcagtaataggattgccgggtcaaatggcatttctggttctagatccgattttattctgtaaccaataaagagttcacaggtraatgaaaggaaatcagtgagaaattaaatttgtggtagtttgtaggataaattagagtaggaagttactggtgaaagggggatatttggaggtaatttttatgaatagaatgctatgcctacctttaataatcattagtaagcagcccttatattggagagggaatccaaggtaaatgcatcattatttctgaggagtgttccttgtataaaatgtagttgaggatcctggatttgaacttaaatcctcatctctagatcatttccttcatttaagttggttaaacccaatgaaccagcac

SEQ ID NO: 565519 - DNA, 619 bp, Homo sapiens
tgggaatctggctgggtgcagtggctcatgcctgtaatcccagcactttgggaggccgaagcgggaggaccacttgaggtcaggtgttcgagaccagcctggtcaacatggtgaaaccccatctctactaaaaatacaaaaaattagccaggtgtggtggcaggcacctgtaattccagctacttgggaggctgaggcatgagaatcacttgaaaccaggaggcagaggttgtagtgagccgagatcgcacactgcactccaacctcggtgatacagtgaaactcagtctcaaacaaacaaaaaagactgggaatcaaactttaaattgtactttagtgtgcctatagttagatcatggttttgtgccatataatgatattttagtctgacaaaacttgcaagacaattatcatgggtttatgtcccaagtggacaaagaaaaatgcaactcagtcgttatccttaaggagctcacagcttagtggaggagaccatcatgaaattagaaattataacaccagcagtattaactagtaatggaaaaccrtataaatgagtggcaggaagtcacaaaggaggaagagttactctgctgaacaagtcacagacttgagaggg

SEQ ID NO: 565520 - DNA, 562 bp, Homo sapiens
tttttttttttcttttctccctttttgtaaaaagagaaattttcaggcaatctcctttactcttgacactttggctcttacttgcatgatgatgaaaggaaaaccgtgattacattgatactgaatttccatacttgagccagtactatgattaggcatcctatatgatgtctcattcatgttgttattgtcattgcttctagatttaaatgatcagatgtgggttttcctttagtattttgtatttctgatcacagaatcttagagatggaagaaacattaaatatatcttccagctccatctcccacccatttcaaaatgtcttatacagtatccctgacaaagggccatgtagttggtgaatactacagctaataagaaactcattrctgcacaggcagctaatcacattggtatcttaataatggtagtatgtgacttcccatttttacccctttaaaagcagtgtgacattgacccattgttctttatgccttgcctcatcctaaactattaagaaactgaaactcaaaaagaagagtgactttccctaaaattatc

SEQ ID NO: 565521 - DNA, 350 bp, Homo sapiens
tcatctgattttttgttgttgttgttcttatgaaggtgcttttttgtttctatttggtggacgattgctggaaggttctctttgtccttgtttctctgcttcctgtcttgtrtctctttgacatggttctcatttgtctttgaacatatttaactttccctgttgtggttaaaattagccttcgtcaaaggaatattggctgaacagtattacagtcagcactagatgtgcttattgctacaggagtcataacgcctagtctgctttagtcaaatgtgcttgggaagatatatttttataataaattataaaattatatttccaaacaaaatgtagcattagagggtatt

SEQ ID NO: 565522 - DNA, 547 bp, Homo sapiens
atataatatatattctaaatattcctaaagcattcatcattacaattctataataaataaaagaatgtggcataatctgcctccaggtagartctacatttactaaatcaaagtaaaattttttcccctgaggctaaaaaattattttcacctgccaagcttaaggaaagagttacttggatgcagaatcttttgctataagctgctaacatctactctggatatatgtattaactttaaattttctttttaaaaaagagcctttcccagagtatgcagatattcccccaaaggattaccttggactgggtgggacttgagattcagagcaggtagtgtggaaaggcataagtaccctttgaagagcgggagactgaaggcccagggcttcaggaggggatggttctcttatgaagagacccttcctcacatctcctctattcacttttcttccacattaatgtttaatcataattaccaacccattttacgtttttaatcccatatagtttactattaacttatttcaatactctatttccttatc

SEQ ID NO: 565523 - DNA, 484 bp, Homo sapiens
gccctgggtggcctcgctaaaatgcagattatgtttctgtaggggtggagcccaggtgatgtggtcctgctgagccattcatggtctactggactcacctgaaaaactggaaaacaaacaaaactgaggcctgggttcaccccctggagagtttaatctaattggcacraggcgcagcctggggtgagtctagtgtgtaaccaagcttgagaatccctgctttcactgcaggtacagagaaaccacttcctttttttttttttttttggagatggggcttcactcttgtcactcaggctggagtgcagtggcgcaatctcggctcactgcaacctctgcctcccgggttcaagcgattcttgtacctcagcctcccaagtagctgggattacaggtgcccggctaatttttgtatttttggtagagatggggtttgccatgttggccaggctggtcttgaactcctgacctcaggtgatccacc

SEQ ID NO: 565524 - DNA, 583 bp, Homo sapiens
actgttttaattaaataattaatatttaaacaaaaaacagacttgagaataaatttaccaaaggcctatgttgggcacaggcccccaaatctggccataaactggccccagtaaactggccataaataaaatctctgcagcactgtgacatgttcgtgatggccatgacacccatgctgaaggttgtgrgtttaccagaatgagagcaaggaacacctggcccacccagggcaggaaaccacttaagggtattcctgagccacaaacaatagcatgagcgatctgcaccttaaggacatattcctgctgcagataactcgccagacccatccctttgtttcggcccatcccattgtttcccctgaagaatactttcagttaatctataatctatagaaacaatgcttatcactggcttactgtcaataaatatgtgggtaaatctctgtttggggctctcagctctgaaggctgtgagacccctgatttcccactccacacactatatttctgtgtgtgtcttaattcctctggcgccacaggattagggtctccacaaccgagctggtcttggcaggcccaa

SEQ ID NO: 565525 - DNA, 640 bp, Homo sapiens
cttaaacaatttaaacctgtactgtatgatatgtgtattgggttttaaaatttccctatgtaacaactgacgatgctggacacaaattatggagaggttagcaaggacaacaattgcaaaacaattaaaaaaatgcctttatttgcatactaacacatgagaatttacttttcacttcatcctcaatataaaatatttcagcatatagtaagacagacagtgtatgaagaggagtgaatttgagctgttttgagaataagaatattttctatttctataaagacagctttgaattcatccattagcatatgatggtgctttcctgttgaaattagtcatgaatttaaaggcagaaaatgttactrcacatttaaaagtcaagtgtttatcgacattaaggtctggatattaagggaatcacaaccagtgttattaaggctgcattttttctttcttttcatttgttcaaacatgatatgttttctgctcatcattttatcaattctggtagtgtttgcatttgttcttggaaatgttgccaatggcttcatagctctagtaggtgtccttgagtgggttaagacacaaaagatctcatcagctgaccaaatttctcactgctctggtggtgtccagagtt

SEQ ID NO: 565526 - DNA, 403 bp, Homo sapiens
acacatacaacctacaaagatcgaaccataaagaagcccaaaacctgataagaccaaaaacaggtaatgagataaattctgcaataaaatgtctcccagtttaaaaaaaaaaaaaaaaaaaagcctgggagcagacggctttagatctgaattctaccaaacatttaaagaactgatgycaatcctactcaaactcttctgaaaaaatagagaaagagggactacttccaggctcattcttttttttttttttttttttttttgaggcagagtctcactctgtcacccaggctggagttcagtggcatgctctccactcactgcaagcgccacctcccgggttcacgccattctcctgcctcagcctcccgagtagctgggactacaggcgcccaccaccacg

SEQ ID NO: 565527 - DNA, 566 bp, Homo sapiens
gagacaggaacaaatgtgaaacaatgtgtggtgatgtctggtatgactgctggcagccacttcacagtgaggtgagagagacagcatggtggtcatcagatgcatgcacttgactcccagaacttttccagaagggctacaaagggaaaccacagctggcattagtccatggaagagagagagaggagggagaatgtatctgctcagctgtygttagtcttctgtttccccttggccagggtttccctgagttagaactaccatctctgttgttctgtcttacatcatccagtcccttggtggtggtcatgaaagtcagacctcatgcccacagtgtggtgatgcattcaagtcccaaatggaaggatgatctggatcaggcaaggtgctgaccaggggaacaggagatagtgaagggaatctgagaaagcacatgtttgtgtccaataccaccactccttgtgccactgagacgtgctcataccctccagtcatggctggctttatgagcatatgacttgcacagttgtacagggttttgtgcttataggggcttgtgcttagag

SEQ ID NO: 565528 - DNA, 586 bp, Homo sapiens
ctcactctggagcctaaactggagtgcagtggtttgagattggctaactgcaatctatagctcccagcctcaatctgtttcccaccttggcctcccaagtagctaggactacaggtggacaccactatacctggctaattgttgtatttttactagagactgggtttcaccatgtttcccaggttggtctccaataattgggctcaagaaatctgccygcctaagcctcccaaggtgctcaattacaggcttaagccacagcatccaccctggtactgttacttcaaaatgtacatttgacatttgaaggaaaaatatttacataatgtgctatatgccaacatgcgtgaataaataaataatataaatggataatcagccttattcctgtctgttgaatcacttggctacattgtcagtaaagagattacatgagatcaccaacacaacaggcatcattgtagagattgaagaattgagaccttgggcagtctgatattttcagtttagagacaaaagagaactagcaaaggagattgagaagtagtgcccagtggataaggataaaatcaggagagggcagcat

SEQ ID NO: 565529 - DNA, 586 bp, Homo sapiens
ctcactctggagcctaaactggagtgcagtggtttgagattggctaactgcaatctatagctcccagcctcaatctgtttcccaccttggcctcccaagtagctaggactacaggtggacaccactatacctggctaattgttgtatttttactagagactgggtttcaccatgtttcccaggttggtctccaataattgggctcaagaaatctgcctgccyaagcctcccaaggtgctcaattacaggcttaagccacagcatccaccctggtactgttacttcaaaatgtacatttgacatttgaaggaaaaatatttacataatgtgctatatgccaacatgcgtgaataaataaataatataaatggataatcagccttattcctgtctgttgaatcacttggctacattgtcagtaaagagattacatgagatcaccaacacaacaggcatcattgtagagattgaagaattgagaccttgggcagtctgatattttcagtttagagacaaaagagaactagcaaaggagattgagaagtagtgcccagtggataaggataaaatcaggagagggcagcat

SEQ ID NO: 565530 - DNA, 526 bp, Homo sapiens
ggagataatcaacaagctcaatattgtgactatacagagattacacatcattttcttatgtcactgggacatctagttgcaaaggcacctcattctctgattagaagctaaaacaacctaaaacacaagaaagatgagttttttaaaaaatgacacggggaatttaatgtaaaatttccktttaaaaattctctggaacgaggaataaaaatggaaatttaataactttaattttctaaatggcagagtaaaggtagagaaagaacaaaagactcacaaatccaattccctaaccaaatctcaggacgaggtttgcctaagaagtcgcacaccctcactcagctgccatacaacctgggaggctctgaggttggacaatttcctgagggcagagccactgtaactacattcctttttcaccaaattactaaaatacaggttatggtccaacatcttccatgaatatgggctcagctttgcttaactaacataagaggcagattttttctagtacacttttgagaac

SEQ ID NO: 565531 - DNA, 526 bp, Homo sapiens
ggagataatcaacaagctcaatattgtgactatacagagattacacatcattttcttatgtcactgggacatctagttgcaaaggcacctcattctctgattagaagctaaaacaacctaaaacacaagaaagatgagttttttaaaaaatgacacggggaatttaatgtaaaatttccgtttaaaaattctctggaacgaggaataaaaatggaaatttaataactttaattttctaaatggcagagtaaaggtagagaaagaacaaaagactcacaaatccaattccctaaccaaatctcaggacgaggtttgcctaagaagtcgcayaccctcactcagctgccatacaacctgggaggctctgaggttggacaatttcctgagggcagagccactgtaactacattcctttttcaccaaattactaaaatacaggttatggtccaacatcttccatgaatatgggctcagctttgcttaactaacataagaggcagattttttctagtacacttttgagaac

SEQ ID NO: 565532 - DNA, 402 bp, Homo sapiens
gaattctaaacatccaacttagaggagatctacaatgcattttttaccattcaatgcattttttaatcattaacccagcrattcaactctttgaaagggttgcaagaatattgtttaatagcagaaaaaagttatatccaagatgtgtttttaatgagtatttctaatatcaaaaataaatatccacagtggaggaacagtccaagtcctgtctatctcctccgtgaaggctttctttcttctgtctcagttctcgaactctgtagcagctataccctgtgtcacacaatttagcactaactgtacactctgcttttagaaaatagcactatttatgtctttctaattattcatttatattttatatttattttattattacttatttttgaaaatggagat

SEQ ID NO: 565533 - DNA, 466 bp, Homo sapiens
ttgcccaccatttcaagataaaagaatccagtctaagagtaattgggtttttttttttaaaggaagttcattgagccattgctgcagctgtgccagcaggcatatagatcttgcactttttctgaaatacctttttatctcacactgaaaatgcagcttttatgcaggtgcaggattactataagaaaggcatgcctatagactctaatatgattcccaaaaaagcaaagttatcatatgacaacttaaagcaaaagtaagcgagggatctaaagctggagaatttaatgcctgcaaaggatggtttgataatttttgaaaaggttaaaaaatattaacatatcaggagaagcagctgctgctgaccaagagacagcagaaaagtttccagatgcctttaagaaaataattaaggagaaaagatgtctacctgaacaggtytttaatgcagatgaaagtgccctaa

SEQ ID NO: 565534 - DNA, 591 bp, Homo sapiens
gatagtaaaaggcaactacggaatgggaaaaaaatttacaaatcatatatctaataagagtttaatattcaaaataaataatggacaactaaaactaaacaaaaagacagaaaactcaatttaaaaatggacaaaagacataaataagacatttctcaaaagatatacaaatggccaataagttcataaaaagatgtttaacatcactagtcactggggaaatgtaaatcaaaaccagaatgagataccgtttcacacttaacaagaatggcttaaaaacatacraacaaaaaacctaacatagaaaatcacaagtgttgacaaggatgtggagaagctggaactctcatacattgctagtgagaatgtaaaatggtgcagcctctgtaaaaatcagttcagcagtccctcaaaaagctaaacaaagaatttaaaaaaaaattctttaacaatgtttttaaaattctattttttttccccaataaagctcttagtcccagtttggtagttgaggaggagtctaagaaaacaagcccttcctcaatatccctgggaaagaagggttgagagaacacagatccaccaggccct

SEQ ID NO: 565535 - DNA, 510 bp, Homo sapiens
gtcacctaacactttagaatcagaaagttctttamaagcaaagggctcttctgaaaagagactaaattgcaactgcttcccgtatgtgcccatcaactaatgtgatcacagaactgctttagaaacaacttttatcttagttttttcctcatcaaagattttcaatttagtttttacacattttaatttttcttaaaaaagaatcccccattttataattgaatttaatataaaactaagctttgctaaaatgcacttatataataagagaggacagatataccacgatcccgcaagaaaggtatcatttctggtatcaggagtgaaacaaaaccaacagaccctaagtttttctaatacatatatcaatacccacatgtctatcccaaaactacacttttaattaagcaggtttgtgtatttggttaactggggacttttcaatagttagattggtgcctcctgattgggaaactaagaccagtgatttcccaacaggtattctcccag

SEQ ID NO: 565536 - DNA, 510 bp, Homo sapiens
gtcacctaacactttagaatcagaaagttctttaaaagcaaagggctcttctgaaaagagactaaattgcaactgcttcccgtatgtgcccatcaactaatgtgatcacagaactgctttagaaacaacttttatcttagttttttcctcatcaaagattttcaatttagtttttacacattttaatttttcttaaaaaagaatcccccattttataattgaatttaatataaaactaagctttgctaaaatgcacttatataataagagaggacagatataccacgatcccgyaagaaaggtatcatttctggtatcaggagtgaaacaaaaccaacagaccctaagtttttctaatacatatatcaatacccacatgtctatcccaaaactacacttttaattaagcaggtttgtgtatttggttaactggggacttttcaatagttagattggtgcctcctgattgggaaactaagaccagtgatttcccaacaggtattctcccag

SEQ ID NO: 565537 - DNA, 550 bp, Homo sapiens
aaacttgctggtttgaggctcaggtgggcatcacagtactaccgatatgtgatgtcacccccggcggcccagctgtaaaattcctctctttgtactctctctctttatttctcagccagctgacacttatggaaaatagaaagaacctacgttgaaatattgggggcaggttcccccaatatctggtgcccaacgtgggatactgagattacaagcatgagccactgcatctggcctcttcttttgatttttttttttcaaacttttacaaatgtagaaaccrttcttagcttttgggcattaccaaacccggcagtggcaggctcggttcaccaacgtcatttgcagttccccgctttatgttatgggttttgttttgttttgttttttttattgagacagagtttcactcttgttgcccaggctgtagtgcaatggtctgatcttggctcactgcaacctccacttcccaggttcaagccattctcctgcctcagcctctcaagtagctgggattacagacactcaccaccacacctggctaattttg

SEQ ID NO: 565538 - DNA, 487 bp, Homo sapiens
ggcgcgcgcacacacgcgcacacatggcagcctgccccaggatggcaccccgggcaatargagtcccaccgtttgctaagtagaagtacaatggacaattctacttcctttatctcatgagtcctcaccgcaaccctgtgtatgtcgccactttgcagacaattaaatgaagacacagaaaattaccgaatttgcccaagattgcacagcttggtagaaactcgaaccgtctccctgccggccctctccaccacctggtggttttcaacagttgcactgctacacagcagtgcctccaacacttcaccggtgaactgccaaatgccaatccctgtgtgacatgtcttttcgctaaaactgatctctcaaaaatactgtttcagagatgtctgccagaaagaatggtgagctaagctgcttgtgagaagtggattacaactggtttctagtaagaggtgtgaggagaacagtaaaatcaaaggctggg

SEQ ID NO: 565539 - DNA, 487 bp, Homo sapiens
ggcgcgcgcacacacgcgcacacatggcagcctgccccaggatggcaccccgggcaataggagtcccaccgtttgctaagtagaagtacaatggacaattctacttcctttatctcatgagtcctcaccgcaaccctgtgtatgtcgccactttgcagacaattaaatgaagacacagaaaattaccgaatttgcccaagattgcacagcttggtagaaactcgaaccgtctccctgccggccctctccaccacctggtggttttcaacagttgcactgctacacagcagtgcctccaacacttcaccggtgaactgccaaatgccaatccctgtgtgacatgtcttttcgctaaaactgatctctcaaaaatactgtttcagaratgtctgccagaaagaatggtgagctaagctgcttgtgagaagtggattacaactggtttctagtaagaggtgtgaggagaacagtaaaatcaaaggctggg

SEQ ID NO: 565540 - DNA, 570 bp, Homo sapiens
tttcactaattaatttaaaacctatttcaaagaaaacagatgcatttctgtatttaaattttatttgtttatgcataggccagtatttttatctttcttggcagctatgtaataatattttagatcaatttgttatcttttattatccacacagtatccaggatcatttgccattttaaaaagtcaactgtaatttaaygacatgctgaattccttgtattgttttggaaataacttcaggaaaatgtaactataatacacccaaatggcatacaaattttgatattgttgtataaaatttgttcaagttcactctatgttaattttttattttttatttatttgtttttagagacaggatcttgctctgtcacctgggctggagtgcattagtgcaatcatagctcactgcagcctccatctcctgggctcaaggaatccttctgcttcagcctcccaagtagcttggattacaggcatgtgctaccacacccagctaattttttcattcttttgtagagagggaggtttcactatgctgtccaggctggtctcaaactcatggcctca

SEQ ID NO: 565541 - DNA, 570 bp, Homo sapiens
tttcactaattaatttaaaacctatttcaaagaaaacagatgcatttctgtatttaaattttatttgtttatgcataggccagtatttttatctttcttggcagctatgtaataatattttagatcaatttgttatcttttattatccacacagtatccaggatcatttgccattttaaaaagtcaactgtaatttaacgacatgctgaattccttgtattgttttggaaataacttcaggaaaatgtaactataatacacccaaatggcatacaaattttgatattgttgtataaaatttgttcaagttcactctatgttaattttttattttttatttatttgtttttagagacaggatcttgctctgtcacctgggctggagtgcattagtgcaatcatagctcacygcagcctccatctcctgggctcaaggaatccttctgcttcagcctcccaagtagcttggattacaggcatgtgctaccacacccagctaattttttcattcttttgtagagagggaggtttcactatgctgtccaggctggtctcaaactcatggcctca

SEQ ID NO: 565542 - DNA, 392 bp, Homo sapiens
gtacaggtgagctcacccacattggccaactctgatcaaagatcaataagcaaccaagaactggttactgcttaaacttataacaagcaagtattctaaatcctcttctctcacacaactaaagctttggataagactgctccttgaagaagacagtctaacagaaccaacagagggtgtctagccatcaaagaaccaaccaatggrccatcccttcaaagcggattaattcaaactcattctccaatgccagggaccccttccaagtgtctccatagaagtagccctcgcagtcacctgtggcctcttgggagtttctcaggatgtcacagaaggttcacagacttgggccaaatattactccattcagtttagttcatctctattgaacc

SEQ ID NO: 565543 - DNA, 392 bp, Homo sapiens
gtacaggtgagctcacccacattggccaactctgatcaaagatcaataagcaaccaagaactggttactgcttaaacttataacaagcaagtattctaaatcctcttctctcacacaactaaagctttggataagactgctccttgaagaagacagtctaacagaaccaacagagggtgtctagccatcaaagaaccaaccaatgggccatcccttcaaagcggattaattcaaactcattctccaatgccagggaccscttccaagtgtctccatagaagtagccctcgcagtcacctgtggcctcttgggagtttctcaggatgtcacagaaggttcacagacttgggccaaatattactccattcagtttagttcatctctattgaacc

SEQ ID NO: 565544 - DNA, 551 bp, Homo sapiens
tccaatttccctcttcctccaatgcccaaatcctcaccttccaggactccaacttccaggactcattcctctctggttgtcactctgattcttaatcacggctatcaacccattgcaggtgaaatcacctgggggacttttaaaaataccaatgcctgggtgccttcctagagcaatcaaatcagaaactctggggctaggtctggagtgccaatctaggtattttacagctccccggtgattctaatgtgcaactgtgttgatagccatgccttcrttttgttacagaagagtttctcaacgggagagccactggcattcgggggaattcttccttgtgcaaggaagcactgcagcctgtcactaacacaccccagtcatagcagtagccaaaaatacattaaacatctccacatgcccttagctgagaatctcatcaactcttcttcctttcatgcgcttcttaagagtcaaagcatacataccccatggctcttcaggtttttggttgcttttttgagacagggtcttgctctgtcacccaagctgga

SEQ ID NO: 565545 - DNA, 437 bp, Homo sapiens
ttctgttgcattctattgcttaatattttatactggctttttgcaatgatactcttcagtgagatttgtctttagtttttactgtgtgtgaaatatttatatcaggttttgatattgatataacactgtcataaaaataasttaaaagttttcttttctcttttcttttcttttttctgagacagggtctctgtctgctgcccaggctggggtgcaatggctcaatcttggttcactgcagcctctgcttcctgggttcaagcgatcctccccactcagcctcccaggtagctgggactacaggcacatgccaccatgcccagcctaattttttgtattttttttttagagatgaggtttcaccatgttgcccaggctggtctcgaactcctgggcttaagcaatctgcccaccttggcctaggattacaggcatga

SEQ ID NO: 565546 - DNA, 437 bp, Homo sapiens
ttctgttgcattctattgcttaatattttatactggctttttgcaatgatactcttcagtgagatttgtctttagtttttactgtgtgtgaaatatttatatcaggttttgatattgatataacactgtcataaaaataacttaaaagttttcttttctcttttcttttcttttttctgagacagggtctctgtctgctgcccaggctggggtgcaatggctcaatcttggttcactgcagcctctgcttcctgggttcaagcgatcctccccactcagcctcccaggtagctgggactacaggcacatgccaccatgcccagcctaattttttgtattttttttttagagatgaggtttcaccatgttgcccaggctggtctcraactcctgggcttaagcaatctgcccaccttggcctaggattacaggcatga

SEQ ID NO: 565547 - DNA, 559 bp, Homo sapiens
ttctttttcaggaggcagtgttytgacaactttcttctccagaaactggaccacttaaatttttggtcttctgaggaatctgtaggcaaattctattttcttagaaaattttctttttcatctagactttaaactttattaatttagagttgagtagtcttttatgcctcttttttaaaatttattttttatttttttgagacagagtctcgctttgtcactcaggctggagtgcagcagcataatcttggcccactgcaaccttcgcctcctgggttcaagcgattctcctgcctcagcctcccaagtagctgggattacaggcacccactaccatgcctggctaatttttgtatttttagtagagatggggtttccccatgttggctaggctggtctcgaactactgacctcaaatgatctgcctgccttggcctcccaaagtgctaggattacaggcatgagacaccgtgcccggccctttaatgccccttttaattttgtttaatgtttaagcaggatgcagataagctccaccaccagatatttaccagggagt

SEQ ID NO: 565548 - DNA, 542 bp, Homo sapiens
ctcaagtaatccacccacctcagcctcccaaagtgctgggattacaggcatgagccactgtgtctggtttatttttctttaacaaaggtcacagatagtttttttwaactaaatatatacatattatatatatatatatacacacacacatatgtatatataaataacaagttgtatttattatatattgataatatattatataaatgtatattcatatgtataatatatattaaccactattctgcaccatggcctaactggatgcaacttcctcaactaaatgtgaggtttatatgtatacacatatatatatgtgtgtatatattttatatatatatattatgtataatgtttaaagaaaaatctatctgcaacctttgttaaagaacagtaatgcagactttatttaaggggactatagagacaggtatgggaattaccaaagtggggttttacagtaggggtgagaaactgggctcaactctgaatacaacaaggaaaagtgggaatttatagccaaggaacagagtcggaattcc

SEQ ID NO: 565549 - DNA, 535 bp, Homo sapiens
aacctgtagcccagtagcctttaggaatgtaggccctgcttatccaacctgggccagcttcatgagaaagacagcttctttctttctcacaaacttctgcttcacttcacagctgctatcrgttttgtgggaggggagggcctcatggattatggaaaataacacactctccttaattctctccttttccttgttccagaaacaagccaaaagcatcccttaccttgaaagaaagaaacacaagaagaggccttgtgctttaccagtcttgactgcaattgtcagggtccacttattatttatgataatactttgtggggttctttttataaaatatttttgcaactgaaggatctctcctcttggagtgaggactctctgcaatgtcttttttctttttctttttttttttagacggagtcttgttctgttgcgcagactggagtgcagtagtgcaatctcagctcactgcaacctccgcctcccgggttcaagtgattcttgtgcctcagcctcctgagtagttggcattaca

SEQ ID NO: 565550 - DNA, 558 bp, Homo sapiens
cccaggcctcctcttgggcttccacatctaccttgccttcaaaaatggctctcagaggccactagcaatgctggtgttacacagaggtgtcaacttggtgttgatggcaagttctcagagtgactgatctctgggacagtctcacagacgccatcatccagcaggcacttgttcagtgagcgcttgttcactagacggattctgggggcccaaataccatcttaccccagtcctaagggcatagctctgaaatgtggagcagtcagaggtggcacaccagactggaacagccttgaagaagctagtctcagctcactttgggggagatctgatactcagmgactccaacccaaatcagacctctgaggtgaccttggagtgatccattccccagaggcaaaccaggctcccagcccccgatcccctccactgacgcaggatgagcttgcactgctgggttctcactgagcccctggtctggacacgcaccctttgcatcccatcaaaccggtgttctctagggagagggcgggacaggtgggaacaaagaaaggcttc

SEQ ID NO: 565551 - DNA, 551 bp, Homo sapiens
tcatacaatagctgtccttttgtgactggctcatttcatttggcacaatgtcttcaaggttcatctatgtgtagcatgtgccagaatttccttccttttttaaggtcaaataaaattctattttatgggttccttccaccttttggctattgtgaatagtgctgctaaaaacatgggtgtgcagctctctttttgagatcctgccttcaattcttttggaggtagatcagaagtgggattgctggatgataggacagttctattgctaattttttgaggaasctccatactgtttcccacaggagcaataccattttacactcctgccaatagcacacaagggttccaatttctccacatccttgccaacacctgttaatttctgtttttttttttaattttgtttttatagtagccatcctaatagttgtgaggtggattaaagggagacttttaaatacatctcaaaattcatgtaccaaaattctaacttagggctttagagttcctggattccaagggaatgcactcttacatatactacatcatgt

SEQ ID NO: 565552 - DNA, 554 bp, Homo sapiens
gtgttttgagttactatcaataaccagattgtcagggtttcagtaaaaaacaaacaaatgcaaaaacccaaaacttaaacaagattgttctgagtgcctgtgaaatagactaatgcatggtaattaccttgaccttgtaaaaacatagtcctcaaagaagttagggatcatctcccatcttctagcaagggctgccatctgcattagtgaactgcttggcctccaggactgagaacttctcaaacaggaacatgaccatggtaacatgtccagaacaagccaastaaatgggacacgccatactgaaatggtgcttagggttgtaacaattagaaagcaccacagataatacacagaaagactactttctggacagaatacccaaatccccagacatacttaatttacaagatttctgtgccatcggttatgtaagaactgtttttcttgagtaaatctgactaataacagtagcagcaactgataagcacagatcacaagaatttttcatactgctttagttctatttccttaaaatgcctactcattcattt

SEQ ID NO: 565553 - DNA, 552 bp, Homo sapiens
attgactctttaaatttccgagggactcatttctaaagacttattttcttcagaggttagctgttccatatggcagtgttcccaaacctgactgattatcagaatctcctggggaatttttaaaaatacaaggatctctgtggaattaaataggcagctcctgtagagctttgttctcacattttttgatatggagctgagactcgttccaagggctttcaatgacaacaataacggattgagactgaccaattggaagagaaayagcagtgaaagaactgtgttctccttgcttcttggctttgagactttatcccttgttgctgtttgtaacatagaaagatccttatgtgctattagaaaaatactccagaagaaaaatttgcaaaggatatgaacatatagttcatgggggaaatagtagtacccaacaattttaggttcagcctcactagtctagtaatcagagaaatgcaaattgaaacccatgcaatacctttttatgttggcctatcatactggcaagatgataaatggttatctcattgctgc

SEQ ID NO: 565554 - DNA, 574 bp, Homo sapiens
tgttacatatattttaccacaataaaaaacatgggaggaaatgggtaaattgtaggcaaaaaatatttttaatgttttcaggaatcattttggtggtagtattagtactggtattctaataccactgtggtacaatctaggattttttcaaatgagtaattatgggatttggtaatttcatcttcctctgtgtcccttagaaccagatttcttggtgtgggaaaaaaggaaatacccatacaatagcgaggaggttgagtaaaagcttaactgtagttttggaatcaaaattgtaaatatcaagaattcaggaggtatttaatccatctatctatagatagacacagataggtctacccaaacagacagatagatatagatagaacagatayaggtaggtacaaatagattggatggatggatggatggatggatggatggatggatggatggatggacagaggaattgatgaaaagagttacattcttagctctttccactaaaaggcctctaaataaatgaccaacctggtagcaatgagtatcttaacccccagactggaattgggaaata

SEQ ID NO: 565555 - DNA, 577 bp, Homo sapiens
gggcatgcatttaagcaacagactcactgctctagggcatagcaaactattccatccaccactgtccacaggtagtttatttctgcttcagaaatgcaaaagcaagtgcggagaagcaagaatggagatctgaaagcattattttcttaaaaagtaaagttagataaataaaagggcaaagtttgagcctaggacatttttacagattattcagatataaaatttttcagataagttattccgctatatgtcccataacatcatgctgtacatctgaaatatacacaataaaatgcatttctttaaataaataaaatgtaccaagtaatatttttaaaaaattgttccactataacaacaaaaaaagggcaataataactactattcaaatgagggaaagaggagaccagaggraagttcgttggtttgaacactaggtttgaacaaagcttccagaaagcctatccactgacagaccagctcccttttccaaaataaagtatacacaaagccttcttttttatttcatttcagacacttacattgcttacctctgtatcttattctctctgaattc

SEQ ID NO: 565556 - DNA, 616 bp, Homo sapiens
atgaaaatcccaatctgtccagtcccagggcaattctcccaaactgccctaaccactgcatttgactgcttgcccacaccccaaaggatggttacatcaaattaaggcaattatctctctaaatctggtattcttgccagattggtagagaaaacaggtccttcagttcacttcctattagtcaatgttgctagatttataaaatgtayaagatttttaaaaaggtgatgatcatttccataaggaggttggcccttggtctatagacatcacaagaaccaagggcaccctgacaagcccttcctccaacaatgacagacaaaagagataacaggtgggtcagtattatgtttgtgctgccttcaactccataatgaccagcacattaacactgacatcaacatgagaacacaaaacataagtgatcacatcagtcacaccgacataactagccatgactagcatatagataaccatggcaaaataccctttttctaagtcctctatatgaattcaggaaccaacaatgcagctctggctgtaggtactgatgacatacgcatgtaggcttgtgctatgataaagagcttcttgccgggcgcggtggctcacgcct

SEQ ID NO: 565557 - DNA, 566 bp, Homo sapiens
tgttgagcataaaaagccaggctcacaagacaacaaacagaatgatagcattttcataaagctcaataattagcaacatcaagcaacatgtcctattaaccaaacaaggtaatcacaatctagaaatttagaatcgaggttatctctgcttttctgggcttccattttaataagaggaaatacatggtaaacaagatacataattaaaataaatgttagatgttgaaaagtgctctggagacaaatgaagcagggaaagaaagatgtggggtgtaggtgggggctctagacagacagatgtttaaataggatgatcagggaagacctgagacattgatgcgtgagcaaatacctgagaagatgagggagcaagcactttggtgatctgggcaaagagtgtcctggggaaagttacaggaaatgctcacactctcatccgtacgtagctcagtttcataagtgaaagtcaygttgtcaacactggtgcaatgaaatcaagcagcatccttcaccttctgttatcttgccttccctgtttctccatttccctccatcctctggctttc

SEQ ID NO: 565558 - DNA, 577 bp, Homo sapiens
gtggttcagaaggaaatactaataaaaaataagcatatgaacaatagtaaacctaatcagtaaaataacatatttttcaacaaacaaattagtaattctaaaaaagtataatacactttatgctaatgagggtatgttaatatgatcactcataaactgctgaaggccaaaaattaaaaaatttgccaaaatcattctagaaagcccccattcaaccttgtggagcagyggttctcaaacctatttgcacattggactcactctggggacttaaaaaaaaaaaaaaatgcaatgcctgagcttccctgcccatagattcttatttaattggcttgggatggatagtgggctttggtattttgggagcttataaagagtctgttatgcacacaaggttgagaacaattacttcagaggcataacctcagggaccaggttaccatagaaatctcatttgaatgtgggactctgagaggaagggcattcatgcccactgcctggctctaccatagagagctctaccaggcatcaggttcgccaagttctcaatatgtctacatcccaatatgtcttcccc

SEQ ID NO: 565559 - DNA, 577 bp, Homo sapiens
gtggttcagaaggaaatactaataaaaaataagcatatgaacaatagtaaacctaatcagtaaaataacatatttttcaacaaacaaattagtaattctaaaaaagtataatacactttatgctaatgagggtatgttaatatgatcactcataaactgctgaaggccaaaaattaaaaaatttgccaaaatcattctagaaagcccccattcaaccttgtggagcagtggttctcaaacctatttgcacaytggactcactctggggacttaaaaaaaaaaaaaaatgcaatgcctgagcttccctgcccatagattcttatttaattggcttgggatggatagtgggctttggtattttgggagcttataaagagtctgttatgcacacaaggttgagaacaattacttcagaggcataacctcagggaccaggttaccatagaaatctcatttgaatgtgggactctgagaggaagggcattcatgcccactgcctggctctaccatagagagctctaccaggcatcaggttcgccaagttctcaatatgtctacatcccaatatgtcttcccc

SEQ ID NO: 565560 - DNA, 370 bp, Homo sapiens
aaagacatgagccaacaatttgtggttcagaaggaaatactaataaaaaataagcatatgaacaatagtaaacctaatcagtaaaataacatatttttcaacaaacaaattagtaattctaaaaaagtataatacactttatgctaatgagggtatgttaatatgatcactcataaactgctgaaggccaaaaattaaaaaatttgccaaaatcattctagaaagcccccattcaaccttgtggagcagtggttctcaaacctatttgcacattggactcactctggggacttaaaaaaaaaaaaaartgcaatgcctgagcttccctgcccatagattcttatttaattggcttgggatggatagtggg

SEQ ID NO: 565561 - DNA, 552 bp, Homo sapiens
gaggtaaggagggaaaggaaagaagagaagggaacagaaaccctatcacagtgagaaattttttgacctatccatatgaataagtaggaaaaaatgaaaaaggaaataaatggtttgaataatacaatgaatatgattgaattaatacatactgcaagtgtttgtaccctacaaagaaaacaccctcttatcaatacttattcatggtaaaactcytattaaactaggaagaaaatgaaacttctttttccaaagaagtttatctacctaaaatctatagcaaatttcacactgaatagtgaagcattagacagattcagatgtgagacaaggatgctcattatcattgtttctattcaacattgtattgaagattgtctccagtgcagcttagaaaagaagaaaggaaagggaaaaagaaaataataacggatggaaagaaaaggaatattgttattttttattatactatctgcatagaaatcctgaaataatctataatacattgtcagaattaatacacagggttatttgtagaaatgaattgcattt

SEQ ID NO: 565562 - DNA, 552 bp, Homo sapiens
gaggtaaggagggaaaggaaagaagagaagggaacagaaaccctatcacagtgagaaattttttgacctatccatatgaataagtaggaaaaaatgaaaaaggaaataaatggtttgaataatacaatgaatatgattgaattaatacatactgcaagtgtttgtaccctacaaagaaaacaccctcttatcaatacttattcatggtaaaactcttattaaactaggaagaaaatgaaacttctttttccaaagaagtttatctacctaaaatctatagcaaatttcacactgaatagtgaagcattagacagattcagatgtgagacaaggatgctcrttatcattgtttctattcaacattgtattgaagattgtctccagtgcagcttagaaaagaagaaaggaaagggaaaaagaaaataataacggatggaaagaaaaggaatattgttattttttattatactatctgcatagaaatcctgaaataatctataatacattgtcagaattaatacacagggttatttgtagaaatgaattgcattt

SEQ ID NO: 565563 - DNA, 552 bp, Homo sapiens
gaggtaaggagggaaaggaaagaagagaagggaacagaaaccctatcacagtgagaaattttttgacctatccatatgaataagtaggaaaaaatgaaaaaggaaataaatggtttgaataatacaatgaatatgattgaattaatacatactgcaagtgtttgtaccctacaaagaaaacaccctcttatcaatacttattcatggtaaaactcttattaaactaggaagaaaatgaaacttctttttccaaagaagtttatctacctaaaatctatagcaaatttcacactgaatagtgaagcattagacagattcagatgtgagacaaggatgctcattatcattgtttctattcaacattgtattgaagattgtctccagtgcagcttagaaaagaagaaaggaaagggaaaaagaaaataataacggatggaaagaaaaggaatattgttattttttattatactatctgcatagaaatcctgaaatwatctataatacattgtcagaattaatacacagggttatttgtagaaatgaattgcattt

SEQ ID NO: 565564 - DNA, 591 bp, Homo sapiens
tacatgtaatataacacgaagttttgactcatggagaacaacagtatatattgttaggaatagacacatatataccaaaagtgtaaaaaattcatgggaaggataaaaaactaaactgagaataatggttacatcagggtgggaaatcaggaaaatataattagaaaggatacaaaatgggctttaaatatattagtaatgttttgtttcttaaagtggatatattatgggcttagagttttattatattattctttttcacttgtaagatataagtcttgtgcmtttttaaaagatctgcatctaaaaacttcattttgttgagtgagtgtagtttaatttgtttccaaaggctcattgctagtatgcagaaatacaattgattttttgtatcaatcttgatacctgagaacttaatgaacgtatttagtcattctaagagttttctagatttcttggaattttctatgtagatcataatattatctgcagataaggatttctttctttgtaatgtgtattctttttattacattttcctgctttattgcactggcttgaacttctagtcctatgttaaatgagtgatga

SEQ ID NO: 565565 - DNA, 591 bp, Homo sapiens
tacatgtaatataacacgaagttttgactcatggagaacaacagtatatattgttaggaatagacacatatataccaaaagtgtaaaaaattcatgggaaggataaaaaactaaactgagaataatggttacatcagggtgggaaatcaggaaaatataattagaaaggatacaaaatgggctttaaatatattagtaatgttttgtttcttaaagtggatatattatgggcttagagttttattatattattctttttcacttgtaagatataagtcttgtgcatttttaaaagatctgcatctaaaaacttcattttgttgagtgagtgtagtttaatttgtttccaaaggctcattgctagtatgcagaaatacaattgattttttgtatcaatcttgatacctgagaacttaatgaacrtatttagtcattctaagagttttctagatttcttggaattttctatgtagatcataatattatctgcagataaggatttctttctttgtaatgtgtattctttttattacattttcctgctttattgcactggcttgaacttctagtcctatgttaaatgagtgatga

SEQ ID NO: 565566 - DNA, 443 bp, Homo sapiens
ctcatattgtttttcagtctattttctctctgttggtcagattgggtaatttcaattcttctgtcttaaggttcattaagtttttttcctctgtcctctctatttcactcttgtgcccatccaatgagttttaaaatttcagtgattgtactgtttagtcataacatttccttttggttcttctttatrtcttctgttctttgctatggctttctctttctttgctgaaattatctatcgcttcatttgtttcagtcatgttcctaattgcttgttgaagcatttttatgattgctactttaaaatccttacctgataattccaacatctgtgtcattttggtgtgggcatatattgatggtcttttcttatccaagttggcctttttcctaattcttgatatggtgagtggtttaattatatcttagacagtttggatagtg

SEQ ID NO: 565567 - DNA, 496 bp, Homo sapiens
gaaataaatgaggccaggtgcagtggcttacacctataattgcagtactttgggaggccaagtgagtggatcacttgaggccaaaaaaaaaaaaaaaaaaaagaaagaaatgacattcaaggaagaataatagtggatgaggtcagaatatagcatgtacatggttgaacaagccttaggttgtatagagttgcccaatgaccagaggatgctacagcaagcactcactagcgattcttccacctgtcatgccttctgtaacaatgctccacacagtactctttcacaatcatacacatgcacacasacacacacacacacacacacacagacacacacacacagtgaagtgaagttcttcctatagaagcttcatttaatgccctctaaagattggtctgctcaccaagcaggaagacatctggatgtcagtttctccagggactttgggaagcaggaggagtttagaagatagagaggaaaggtagaggcatgg

SEQ ID NO: 565568 - DNA, 558 bp, Homo sapiens
ctcaaacgaggagaagccacaggagcagtgggcatggctcatgaaaaccacacaggggctactaattgagggatacgatagaacagctaaagccccaacaagcagcaggggtgagactcctaggaaaattaaaacatttaaaagcaactgtgtctactggggaactgggaaaaaagcacacacacaagcccagggaaaatgcatacccaggaaaggcctgaaaagatgtgaagcctgcatgcaagcctgatcctaggcttagaacacacgccactaattagtcctctgcagcrctgagctagtctgcagctttggagaggtagctgttttttcaaatgcccaattttcaacaaaagagcaaaggcatacaaacaaacagaaaagtgtggcccattcaaaggaacaaaatgaatctacagaaagcatccgtaaaatacaccaacacaatcttctgctatgtgtatacaaatttacaagcacaatatctagcaggtatctagcaatttacttcttacttgtaccataaactcatcttatctggctcaatattatatatta

SEQ ID NO: 565569 - DNA, 558 bp, Homo sapiens
ctcaaacgaggagaagccacaggagcagtgggcatggctcatgaaaaccacacaggggctactaattgagggatacgatagaacagctaaagccccaacaagcagcaggggtgagactcctaggaaaattaaaacatttaaaagcaactgtgtctactggggaactgggaaaaaagcacacacacaagcccagggaaaatgcatacccaggaaaggcctgaaaagatgtgaagcctgcatgcaagcctgatcctaggcttagaacacacgccactaattagtcctctgcagcactgagctagtctgcagctttggagaggtagctgttttttcaaatgcccaattttcaacaaaagagcaaaggcatacaaacaaacagaaaagtgtggcccattcaaaggaacaaaatgaatctacagaaagcatccrtaaaatacaccaacacaatcttctgctatgtgtatacaaatttacaagcacaatatctagcaggtatctagcaatttacttcttacttgtaccataaactcatcttatctggctcaatattatatatta

SEQ ID NO: 565570 - DNA, 574 bp, Homo sapiens
acctcaactcacctcttttcaggatatggtccaaatggaggtttaaaatagtcttcacaaagatcaaaacttttccagagttcttctaaagttgtataatagtgtagaccactggtgagaggtgctggtactggacccctggaatgggaaatttaaaaaaaamaaaaaaccaaaggattttgtaaagataccaagtgtacacacatgtatacctaaatatcccagataaacgcaaatgccaatgagatctatgtgaaataatgtaatatatccactcagaaacatgcacatcagagcttgtctaagtcattggcatcattacattctaatttgaaggttaagtaaatattcattgctgtgaatattccatagccattaaagtactaatataggcaaattatcttcctggagattccctagtccatttgttatgcaagggctagcaatatatcaactgctataaaagttaaaaataggtgttttccaactttatttataatctaatgctttgaaatggtatccaagtaaaatatttctaaaaattctaccattatacgttcaactaaactctagc

SEQ ID NO: 565571 - DNA, 475 bp, Homo sapiens
gaagtttttaaaaatcaagttttaagaattaagttgatgtgattgtaaaaacatttttgcatcacaataactgatctgtagcgatgccaagactgacacacctaacatctctggaaataagtcatatcccagagagatcagaatcccttttgtcactgctgtatcccctgcacacagcacacasactttagcacaaagcaggacctcaacaaaccactttaatgtacaacagtataaatttgggggggataatataaagagtgaataatgtttaccattttttataacctggattagaatttgctgtcaactgttcctagcttgaaaaagtctaggtcaagcttttgaaattgttccttagagaccatgacacatgagcgctaacgtgggctcactgaacacactctctggtggatacttgattaccaaaatcattttactttttccctgagctctgtgtttctatgtaaacaag

SEQ ID NO: 565572 - DNA, 599 bp, Homo sapiens
tgttcccataatccctcttgtatctagtaaagaataagcttagacaacaaaaaactagagcagtgttgacctatggtctaatgatgagtattaagtatgtacatacttgagaactaagacaaaaggagagtattcaatgactaygctttgatagtgtagctatgaatccataaataatgggggggagaacatttgtaaaaaatgtttttaactattttttggttttcattatgggtgctggtggtattagtactgttattctgagactgttctgtgtgtaagatgggataaatcaacggagtaatttaatgggagattgtatcatctcctgtgtctttcagaattagggttctcagtgtggaagaaagagaaatacataatagaaaaaaacttaagtaaaaatcttgaaagtcctgaatttgaattggaaatactaactgaatttatgaactattttatctatccacataaaagacctagaaatgacaaccaccccaatagtaatgaacatccctggtaacaacaatgtgttcttgcactaccatttctcacttaaagaaacccagatttcttgaagaaaagactgattccaggtctgg

SEQ ID NO: 565573 - DNA, 574 bp, Homo sapiens
acagattggatattgggttgggagagaaacgagtacaaagtttttggcctgataactgcagatacagagttggcatcaaataagagtaagatttagggcaacaatcagtatttcagttttggaagaagtgagtgtagatagggaaataatggaagggaaaggaagaaaaggaaaaaggagagaagggaagggaaaagaaagaaagggaaggacaaagaactgagccctcagatcctccaatatcaagaaattggaaagaaaaagagaaaggagactgaaaaggaacaagagaagcagggggaaaacaaagatttaattaaatggctcagacaataaatctattcttagaagaacaaatttatcacaagaaggaatatgatgctaattttaggaggactagagatacagtaagatagtcattatataatctattccctgcccacctaccagttggaaacaacaatgaagaaaggaatcaaaggamgactttggaggaagggttctagtacatcacaaatcattcctttgtccattcacttttactcattcgtaggttcagcaaaatttattgaag

SEQ ID NO: 565574 - DNA, 592 bp, Homo sapiens
tgcattcaaagctgtcctcaaccacatgtggccggcaggctgtgggttggacaagctttgtttagagccgtgaggatcctgagttcaaattagacacraagagcagagggcaaagatactggaaatcaaatgtcttctctcgagattcacgttgatccctgggtgacagagcaagactctggctcaaaataaaataaaataaaaaagattcacattgatgtgttaatactgaaaaatgcacctgagtaaaagaaggcatttttcttctgaaatcaaaatagacattcctaagctgtgtgatacttggacaagcagcctcttccctgagctgacctgggtcctgagagtattgaaaggaaatggtgcttggtggatgcaagtgcctaatactttgtcaccacaggtccactttctcatttccccttcatacagttagtacttacaggattgtactggccttgtctgctgtacacacatatttgctaaattgtctctcaatgaattggtcattcagcaatttttctttctggagaattggctctcagtgacttggcttgcttcaggggtaaaggtgttggaggagctggttgca

SEQ ID NO: 565575 - DNA, 592 bp, Homo sapiens
tgcattcaaagctgtcctcaaccacatgtggccggcaggctgtgggttggacaagctttgtttagagccgtgaggatcctgagttcaaattagacacaaagagcagagggcaaagatactggaaatcaaatgtcttctctcgagattcacgttgatccctgggtgacagagcaagactctggctcaaaataaaataaaataaaaaagattcacattgatgtgttaatactgaaaaatgcacctgagtaaaagaaggcatttttcttctgaaatcaaaatagacattcctaagctgtgtgatacttggacaagcagcctcttccctgagctgacctgggtcctragagtattgaaaggaaatggtgcttggtggatgcaagtgcctaatactttgtcaccacaggtccactttctcatttccccttcatacagttagtacttacaggattgtactggccttgtctgctgtacacacatatttgctaaattgtctctcaatgaattggtcattcagcaatttttctttctggagaattggctctcagtgacttggcttgcttcaggggtaaaggtgttggaggagctggttgca

SEQ ID NO: 565576 - DNA, 556 bp, Homo sapiens
acatctgtaacctatacatgagtgttgcaaaaataaaaacctctcactgatagggttggttatatattttttgcaacagtaagaaaagagstgtgcactttttttttactcaaacctgcaaagaaaaatgtttaagtgtttatgaagtaaggctgattaaaattacatttacagttctctaagattctcttagagatgttcaaattaatgtgctttgggagtcattcagaaaagtaccatttaagataggaagagagaagaaataaagcaacaaagaattgtataagcaaggaatgagaaaatgagtaaattggatattttattaaattatctaaattcatattaaattatgatcacatttatagaaagaattgtatatttataaatgattggagtagcaatcaagaaatgtgatgttagcagattttgttcagattgaagagtaaaaaataatattcttgggcatttcttcctaacaaagacaaattatttaggttctagaggaaacctccagtgaccttaggaataggaaataaagggcctggtgcggtggctt

SEQ ID NO: 565577 - DNA, 613 bp, Homo sapiens
agaataccacggttgaggtgtagggtatctgcatgttcaactttagtaaataatgctcaactattttccaaggtataccaatttcatttcccatcagttctcttataagagtttccattgccccacatattgatagtctttataattttagtacttttartttatgcatagtagtatctcattgcgattatattttgcatttccctgattaataataaggctgggtatctcttcataagaatatgggctatctggatattattttgtgaagggattttcctatgggttacctatttttttcttaataatttgtaggagttctttatatatttcggatacactttgttggttatagttacggcaaatatctccccactctctgtagtctgtcttttttttcctcatgctgtgttttcagttaacaggagatcttagttttaatgtactgtaatattccagatttttccttcataatgaatgctttttgtgttacatttaagaaatcttgaccccatgatcataaaaatattatcttacattattttttgaactattattattttgcttttcacattttatagataatctaccttaatttttatatatggtgtga

SEQ ID NO: 565578 - DNA, 545 bp, Homo sapiens
tctcttgaacctgggccagagaggttgcagtgagccaagatcatgccactgcattccaggccgggtgacagagctattggcagtgtagtgttatataattagacaatagagatttttttatgtgcttaaaagacatatatctaagacagttatatatactagctggataatatgtacaactttatctgcagaatgttagtttcatgtttccactgawccatacattctacattcatgctaatagaaagccattcaatgttggtttgatggctgtcttcagaaaggctgatttcttcttactagaaatgtataaagtttggaatggatttgtaagcagccagtttgtagcatttagtcaatggttcttactcttcttcctatggtttaaatattcattcattcactcactcattctgctttgagtgaggttatttggcaagcactgtgaggatgtaacatatgactcttgccaaaaatgaacaccttcccactggggacagactttaaataaagaaaccagatggagaaagaataggaagagcatt

SEQ ID NO: 565579 - DNA, 652 bp, Homo sapiens
tctacaaaaaaagaaaaattagctgggcatgatggcacatgtgcttgtagtcctagcttgggaggcagaggtaggaggattgcttgaacctggaaggtcaagtctgcagtgagccatgatggtgccaccacactcaagcctgggtgccagagtagaatctgtctcaaaaaaaaaaaaawttttttttttgtagagatgggagacttgttatgttgccctggccaatctcaaactcctggtctcaagagatcctcctgccatggcctcccaaagtgctgagattataggcatgaaccaccatgtccagccaggaacattaattattaaagcctacaaagtaccagttccttggctgtctttattcctcctggtgcctctctcaaaaacctaagcttctcttttcactgtgtcttttgtacctattgctttgatagtgccacagttaactaactataccctgtttatattgtccaatggagaagttctttttttaaaaaaagtggtaaaaaacacataacatgaaatttaccctcaattaactttaagtgtacagtacagtattaactatatgcacattattgtatagcagatctctagggagaagttctattttttttccaaaaagcattgtcactttaccaaaatcaaactg

SEQ ID NO: 565580 - DNA, 652 bp, Homo sapiens
tctacaaaaaaagaaaaattagctgggcatgatggcacatgtgcttgtagtcctagcttgggaggcagaggtaggaggattgcttgaacctggaaggtcaagtctgcagtgagccatgatggtgccaccacactcaagcctgggtgccagagtagaatctgtctcaaaaaaaaaaaaatttttttttttgtagagatgggagacttgttatgytgccctggccaatctcaaactcctggtctcaagagatcctcctgccatggcctcccaaagtgctgagattataggcatgaaccaccatgtccagccaggaacattaattattaaagcctacaaagtaccagttccttggctgtctttattcctcctggtgcctctctcaaaaacctaagcttctcttttcactgtgtcttttgtacctattgctttgatagtgccacagttaactaactataccctgtttatattgtccaatggagaagttctttttttaaaaaaagtggtaaaaaacacataacatgaaatttaccctcaattaactttaagtgtacagtacagtattaactatatgcacattattgtatagcagatctctagggagaagttctattttttttccaaaaagcattgtcactttaccaaaatcaaactg

SEQ ID NO: 565581 - DNA, 550 bp, Homo sapiens
gacaattttgagcatagatcttaactgtaaattattttaaggaaagttacttattgtcattgctttcacaattacttctacatgaataacttcttatcgcataacctcttttcatgcctaagcagttcagataattcctatgcagtaaaagcactttacatraataattttatgtcaggctactgagaaattgaagagctattcataggatctttttacctatcaagtaaaacaattataactattctctaaaaaatggaaaaatatcagttttatgctcaacctaaatttatgtatttattttttagctctgttgcccaggctggactgcagtagcatgatcatagctcactgcaacctcgaacttctaggctcaaacaattctcccatctcagcctcctgaatgagtgggactacaggcacaatccactatgcccagctaatatttatttttgtgtgtagaggcagggtctcaacatgttgctatgctgttcttgaactcctagcctcgagtgatcctcccagagggctggaattacaggtgtgagcc

SEQ ID NO: 565582 - DNA, 464 bp, Homo sapiens
aggtgtgagctaccgtgcctggccttttcttttcctcttaatttttccttccttttagaattgttgagtcttctagtgctatattaatcagttatggtgatactgggtatttttaatattttaaagggtatgccatctatgtttctgcactaaatgtagtgtttgctaaaaggttttgatatatgatgtttactgatgcaagaaatttcacttctaatctcagtttgctaagatttttgaacttaagaaaaggtcctgaactttatgaaggccttttttkgcatcatttaaataataacatgatcttttcccctttactaatgagaaaaatggcattcatggatttcatgatgtataacaatttttgcatttctaggattaaccgcatatgagcatgaagcaatttttaaaaaacgaattgttaggttcagttagctatgtttatgaccttgagtaagtcatat

SEQ ID NO: 565583 - DNA, 510 bp, Homo sapiens
tctgtaacctcagcactttgggaggccgaggagggcagatcacttgagcccaggaattcaagaccagcctggacaatatggtgaaaccctgtctctaaaaaaaaggcaaaagaattagctgagtgtggtggcatgtgcctgtagtcccagctacttaggaggctaaggcaggagaatygcttgagcctgggaagtggaggttgcagtgcaccaagatcacaccactgcactccatgcactccagtctgggtgacaggagtgaaaccctgtctcaaaaaaaatatatatacagttctaaagatctcaaattaacaatctaactttgtacttagaggaactagaataagaaagaacaaacgaaacccaaagctagcatgctaaataactaaaattggagaataacttaatgaaattgagaaacaaaaatccatataaaagatcagtgaaactgttagtttttctaatgggtaaacaagattgatagacagctagctagattatgaaagaaaa

SEQ ID NO: 565584 - DNA, 510 bp, Homo sapiens
tctgtaacctcagcactttgggaggccgaggagggcagatcacttgagcccaggaattcaagaccagcctggacaatatggtgaaaccctgtctctaaaaaaaaggcaaaagaattagctgagtgtggtggcatgtgcctgtagtcccagctacttaggaggctaaggcaggagaatcgcttgagcctgggaagtggaggttgcagygcaccaagatcacaccactgcactccatgcactccagtctgggtgacaggagtgaaaccctgtctcaaaaaaaatatatatacagttctaaagatctcaaattaacaatctaactttgtacttagaggaactagaataagaaagaacaaacgaaacccaaagctagcatgctaaataactaaaattggagaataacttaatgaaattgagaaacaaaaatccatataaaagatcagtgaaactgttagtttttctaatgggtaaacaagattgatagacagctagctagattatgaaagaaaa

SEQ ID NO: 565585 - DNA, 510 bp, Homo sapiens
tctgtaacctcagcactttgggaggccgaggagggcagatcacttgagcccaggaattcaagaccagcctggacaatatggtgaaaccctgtctctaaaaaaaaggcaaaagaattagctgagtgtggtggcatgtgcctgtagtcccagctacttaggaggctaaggcaggagaatcgcttgagcctgggaagtggaggttgcagtgcaccaagatcacaccactgcactccatgcactccagtctgggtgacaggagtgaaaccctgtctcaaaaaaaawatatatacagttctaaagatctcaaattaacaatctaactttgtacttagaggaactagaataagaaagaacaaacgaaacccaaagctagcatgctaaataactaaaattggagaataacttaatgaaattgagaaacaaaaatccatataaaagatcagtgaaactgttagtttttctaatgggtaaacaagattgatagacagctagctagattatgaaagaaaa

SEQ ID NO: 565586 - DNA, 578 bp, Homo sapiens
acagctagctagattatgaaagaaaaagagaagatccaaataaatacaatcagaaatgacaaagattacaacatcctacaagaatgcaaaagacctccagagacattctgagcacctctttgcacacaaattagaaaatctaagggaaattgctaaatttctagatatacacaacctcccaagattgaaccaagaagaaagtaaaaccctgaacagaccraaaacaaatagtgcaattgaatcagtaacttaaaaaacctaccaacaacaacaacaaaaatccctagaccagatggattcacagctgcactttactagatttacaaagaaaaactggtaccaatcctactgaaacgattccaaaaaatcaaggatgaggggctccccactaactcattctacaaagctagcatccgcctgataccaaaatctggcagaaacacaaaggaaaaaagaaaacttcagaccaatatccccaaagaatatagatgaaaaaatcctcaacaaaatactagcaaatccaatccagcagcacatcaaaaagtgaacaaaccatgatcaagtaggctttattcctg

SEQ ID NO: 565587 - DNA, 578 bp, Homo sapiens
acagctagctagattatgaaagaaaaagagaagatccaaataaatacaatcagaaatgacaaagattacaacatcctacaagaatgcaaaagacctccagagacattctgagcacctctttgcacacaaattagaaaatctaagggaaattgctaaatttctagatatacacaacctcccaagattgaaccaagaagaaagtaaaaccctgaacagaccaaaaacaaatagtgmaattgaatcagtaacttaaaaaacctaccaacaacaacaacaaaaatccctagaccagatggattcacagctgcactttactagatttacaaagaaaaactggtaccaatcctactgaaacgattccaaaaaatcaaggatgaggggctccccactaactcattctacaaagctagcatccgcctgataccaaaatctggcagaaacacaaaggaaaaaagaaaacttcagaccaatatccccaaagaatatagatgaaaaaatcctcaacaaaatactagcaaatccaatccagcagcacatcaaaaagtgaacaaaccatgatcaagtaggctttattcctg

SEQ ID NO: 565588 - DNA, 578 bp, Homo sapiens
acagctagctagattatgaaagaaaaagagaagatccaaataaatacaatcagaaatgacaaagattacaacatcctacaagaatgcaaaagacctccagagacattctgagcacctctttgcacacaaattagaaaatctaagggaaattgctaaatttctagatatacacaacctcccaagattgaaccaagaagaaagtaaaaccctgaacagaccaaaaacaaatagtgcaattgaatcagtaacttaaaaaacctaccaacaacaacaacaaaaatccctagaccagatggattcacagctgcactttactagatttacaaagaaaaactggtaccaatcctactgaaacrattccaaaaaatcaaggatgaggggctccccactaactcattctacaaagctagcatccgcctgataccaaaatctggcagaaacacaaaggaaaaaagaaaacttcagaccaatatccccaaagaatatagatgaaaaaatcctcaacaaaatactagcaaatccaatccagcagcacatcaaaaagtgaacaaaccatgatcaagtaggctttattcctg

SEQ ID NO: 565589 - DNA, 586 bp, Homo sapiens
tatatctgtgaatttaatttgcttgctaagcacgttgtgtatgaagtgggtggagtttgtgaactgagggtgttccatatctcatatatagtccatatctcatatacattattctagttgatatttcaaaatatagaaaaatgacaaagttttcatcattcaacttatttggatggtcaagaaaatatagagactatgtgataagtgacataatcaatcaagttcaaaatataattttgaaaaaaagaagtggtcttctgtctaactaggaatacaaattttatgtttaacagcatgcattgtttactaggtctgccttaaaaagtaccgcacrctggttggcttaaacaacagaaatgtattgccctgaaggtttgaagtctatattagtccaatttcatactgctatgaagaaatacccgagactgggtaatttatcaagaaaaataggtttaatagacttacagttccacgtaactggggaggcctcacaatcatggtggaaggcgaaggaggagcaaagtcactatcacaagaacagcacaggagaatcccacccccgtgattcaattacctcccactgggt

SEQ ID NO: 565590 - DNA, 586 bp, Homo sapiens
tatatctgtgaatttaatttgcttgctaagcacgttgtgtatgaagtgggtggagtttgtgaactgagggtgttccatatctcatatatagtccatatctcatatacattattctagttgatatttcaaaatatagaaaaatgacaaagttttcatcattcaacttatttggatggtcaagaaaatatagagactatgtgataagtgacataatcaatcaagttcaaaatataattttgaaaaaaagaagtggtcttctgtctaactaggaatacaaattttatgtttaacagcatgcattgtttactaggtctgccttaaaaagtaccgcacgctggttggcttaaacaacagaaatgtattgccctgaaggtttgaagtctatattagtccaatttcatactgctatgaagaaatacccgagactgggtaatttatcaagaaaaataggtttaatagacttacagttccacgtaactggggaggcctcacaatcatggtggaaggcgaaggaggagcaaagtcactatcacaagaacagcacaggagaawcccacccccgtgattcaattacctcccactgggt

SEQ ID NO: 565591 - DNA, 535 bp, Homo sapiens
tgcctttccctgggactgtaacttaaggagtctaacctgggacatttgttcatccccaggagtggatctataggaccatgattaatagtcccaccagaattacatggaggaaaagaggagttcttaaaggaaccataaaactagttaccatagtacactacaatgagatcactatggccattctcaaaaacattcagaatctgggggccccaatttgaacacaagaaacacaggaaaatattaattctcttttataagacacagcaataggtactggagaaataactatgtaaaagacagaaataattacttttgtaggcctggtgtggtgactcttgcctataatcccagcattttcraaggctgaggcaggaggatcacttgaatccaggagtttgagaccagcctgggcaacatagtgagccctatctctattttctaaataataataataaaaattcctgtcctcatcaaaagaacaaataatataggcaattgtacagtggaaaaagcgtgatgaagcagaaacacaggt

SEQ ID NO: 565592 - DNA, 535 bp, Homo sapiens
tgcctttccctgggactgtaacttaaggagtctaacctgggacatttgttcatccccaggagtggatctataggaccatgattaatagtcccaccagaattacatggaggaaaagaggagttcttaaaggaaccataaaactagttaccatagtacactacaatgagatcactatggccattctcaaaaacattcagaatctgggggccccaatttgaacacaagaaacacaggaaaatattaattctcttttataagacacagcaataggtactggagaaataactatgtaaaagacagaaataattacttttgtaggcctggtgtggtgactcttgcctataatcccagcattttcgaaggctgaggcaggaggatcacttgaatccaggagtttgagaccagcctgggcaacatagtgagccctatctctattttctaaataataataataaaaattcctgtcctcatcaaaagmacaaataatataggcaattgtacagtggaaaaagcgtgatgaagcagaaacacaggt

SEQ ID NO: 565593 - DNA, 470 bp, Homo sapiens
agacaaggacactgaaacagttattttaactgtagtagtccctgtgttcactaagttagaggaaagcttgagcaaagacatgcaaatataaaaacatgtaaatcaaatttctagatactaaaactacaatgactgagatgaaaaatacaacacatggcaacaacaacatatgagatgatgracatgaaaatatcagtgaattttcagacacagaattagtgatatggtttggctctgtgtttccacccaaatctcatattgtagctcccgtaattcccatgtgttgtggaagggacctggtgggagatgattgaatcatggagcaggtctttcccatgctgttctcatgatagtgaatgggtctcataagatctgatggttttataaacgggagtttctttgcacaagctctctctctgcctgccaccatccacgtaagatgtgacttgctcctccttatcttctgccat

SEQ ID NO: 565594 - DNA, 519 bp, Homo sapiens
ggactgggttctgcactacctgtataaccagtaawtcatgatctgtagggacagggaaactaacatttactgagccccaggtttctctctcatttgatacaacagtctttcaaggtaagtacagatacccttcttagcatatggagactttgaagcttaaaagtgaaagttgccaagtttacccagttaataagtcgtacaactacacttaaaatccagtctctctgactcagtacacaagcgctttccactaaattatgttccctgttatgtaaaggaaatctgaaaacctcattcgctttataatccaattttcttccatcccttatcacttgaccataagtgctgctatatttatttcagttttggcacaagaggtgacttttctaagttcatttgtgctgctatgacaaaatacctgagactaggtgacttataaataatagacatttatttctcacagttctagagactgggaagtccatgatcaaggagcagccagtaggttcggtgtcaaat

SEQ ID NO: 565595 - DNA, 519 bp, Homo sapiens
ggactgggttctgcactacctgtataaccagtaaatcatgatctgtagggacagggaaactaacatttactgagccccaggtttctctctcatttgatacaacagtctttcaaggtaagtacagatacccttcttagcatatggagactttgaagcttaaaagtgaaagttgccaagtttacccagttaataagtcgtacaactacacttaaaatccagtctctctgactcagtacacaagcgctttccactaaattatgttccctgttatgtaaaggaaatctgaaaacctcattcgctttataatccaattttcttccatcccttatcacttgaccataagtgctrctatatttatttcagttttggcacaagaggtgacttttctaagttcatttgtgctgctatgacaaaatacctgagactaggtgacttataaataatagacatttatttctcacagttctagagactgggaagtccatgatcaaggagcagccagtaggttcggtgtcaaat

SEQ ID NO: 565596 - DNA, 519 bp, Homo sapiens
ggactgggttctgcactacctgtataaccagtaaatcatgatctgtagggacagggaaactaacatttactgagccccaggtttctctctcatttgatacaacagtctttcaaggtaagtacagatacccttcttagcatatggagactttgaagcttaaaagtgaaagttgccaagtttacccagttaataagtcgtacaactacacttaaaatccagtctctctgactcagtacacaagcgctttccactaaattatgttccctgttatgtaaaggaaatctgaaaacctcattcgctttataatccaattttcttccatcccttatcacttgaccataagtgctgctatatttatttcagttttggcacaagaggtgacttttctaagttcatttgtgctgctatgacaaaatacctgagactaggtgacttataaataatagacatttatttctcacagttctagagactgggaagtccawgatcaaggagcagccagtaggttcggtgtcaaat

SEQ ID NO: 565597 - DNA, 561 bp, Homo sapiens
gagtgaacctaggaagagatcaagacacgctctcacaaggaagcagcacaaatgctcatttcttaagaatgaggttgggcaagtcaggagggtaggaaccctctgctcagtcaaacaagaactagggagatgggaatgtccaaggggaggcagtagaagggtaaagcaaggcaggcaggtgagtcatcaagggctctggggaagtgggatttgttgaggtgaagcattgctgcactatggaccttctgccatgctttaacttttataccaggtaactagatatctgggacatttccttttgcaggccaaactctggcttttaaaaaagatatgtaagaaaagcaaagcaaggttccgtgaagataggagatttgactgacttattgtcttatcctcagatttagaataatgcacgcagtgggtgctccataaatatctgaggaatgagcaggctgcccagtgaattcagtgcagsgattttcttctacagcctctgtttttctatgaaaggggaaagtgtcctccatctttcaaagggaacacttggggttactaagggct

SEQ ID NO: 565598 - DNA, 580 bp, Homo sapiens
cttcgctagtgtgaatagttctaaataaacataaacacctgcatctttttttataatagaacaataaatatggatcgggatatatacccttttatggggttgctgggttgaatggtatttctgttattaggtctctgaggaattgccacactgtcttccacagtggttgaactaatctacaccctcaccaagaagtgtacaagcattcttttcctctgcaaccattaatccatatttttttgcctttttaaraatagccagcatcagtaattttttgcctttttagtaatagtcattctgatgggtatgagatagttatctcatcatggttttgagttgcatttctctaattatcagtgatgttgagttttttgcatgattactggccacatatatgccttcttttgaaaagtatgtgttcatgttctttgcccactttttaatggggtggtttggtttttttcttgcaaatttgtttaagttccttatagatgttggatattagacctttgtgagatgcttagtttgcagaaatgttctccttttctgtaggttgtctgtttactccattgatagtttc

SEQ ID NO: 565599 - DNA, 572 bp, Homo sapiens
acttttacgtggaagctaaaaaatttgatcacatgaagtaaagagtggaaagatagataacagacactgggaaggataaggaagggagcagggaaggatgaagggaactggcttaaaagtacaaacatacagtaaaatggaataaattcaatgtttgrtagcagagcagggtgactatacttaacaaaaatgtattgaatttgggtgaaggacacccaaaataccctgacttcattactacttattatatatatgtaacagattttctcatgtacaccactaatttgtacaaataaaaataaactttatttgttgccaataaaaaactggtttccctatactgcccttatatcaggcaacctgttaaatttacctattaattctaattgtttaccagtacatatttttggaattttaaacctgtagaatcgtgccttctaaaaacactgacagtcttgtatcttcttttacaagattcactcttttagttctttttactatattaccatactggctaagatttctaacacagttattcttgacttgggaagaacttttaatattttaccaat

SEQ ID NO: 565600 - DNA, 572 bp, Homo sapiens
acttttacgtggaagctaaaaaatttgatcacatgaagtaaagagtggaaagatagataacagacactgggaaggataaggaagggagcagggaaggatgaagggaactggcttaaaagtacaaacatacagtaaaatggaataaattcaatgtttggtagcagagcagggtgactatacttaacaaaaatgtattgaatttgggtgaaggacacccaaaataccctgacttcattactacttattatatatatgtaacarattttctcatgtacaccactaatttgtacaaataaaaataaactttatttgttgccaataaaaaactggtttccctatactgcccttatatcaggcaacctgttaaatttacctattaattctaattgtttaccagtacatatttttggaattttaaacctgtagaatcgtgccttctaaaaacactgacagtcttgtatcttcttttacaagattcactcttttagttctttttactatattaccatactggctaagatttctaacacagttattcttgacttgggaagaacttttaatattttaccaat

SEQ ID NO: 565601 - DNA, 586 bp, Homo sapiens
ttcccaaagtgttgggatcacaggcgtgagccactgggcctggccaggaaggttgatttaaaaaaaaaagagaaaaagaatgaaaaaaggacaaaaatagtgtaatataagcattataaacaacaattcttaaataaattgacaaacctaaatgaaatggatacatttttagaaccagatcatctcactatactgaccaggaaaaagacacctgactagaccattatgcttgacctacgtaaaaacaatcttggctgcaaagcctagatggctgtacaggttaattctactagactytgatgaacagttaattcctatattgtactagctgttccaaaaaccagaaaaaggataaagcatctcagcttgttttatgactctaatctttattccaaactaagataatgaaaatataaaaaacttacaaaaccatttcacttatgaatgaaattgtaacaaccctaaataaatctgactgaatccaactgtgtgtctaaaaatatataatgataagtaggatatatccaaggaatgtaaatactgttcaacagaaaaatcaactgcttgcagagtgtcgagtgttaga

SEQ ID NO: 565602 - DNA, 498 bp, Homo sapiens
aatggccaacaggtatatgaaaagaggctcaacatcactaattgccagacaaatgcaaattaaaactayaatcagatatcacctcaacttgttatagtggctattatcagaaagacaaaagacaacaagggttgttttggatgtgtagaaaggggagtcctctcacaccattggttagaatgtatattagtatagccattatggaaaacagtatgaagattcctcaaaatattaaacataaaactgtaatataatccagcaatcccactactgggtatttgtccaaaggaaataaaattcatatgtcaaagagtcaaagagatatctgcattcccatgttcattgtagcattattcacaacagccaagatgaagaatcagcctaagtgttcatcaacagatggatggataaagaaaatgtgatacgcatacatagtgtagatgttatatatacatatttttattatattattattattatttagtgattaaaaaagaa

SEQ ID NO: 565603 - DNA, 498 bp, Homo sapiens
aatggccaacaggtatatgaaaagaggctcaacatcactaattgccagacaaatgcaaattaaaactataatcagatatcacctcaacttgttatagtggctattatcagaaagacaaaagacaacaagggttgttttggatgtgtagaaaggggagtcctctcacaccattggttagaatgtatattagtatagccattatggaaaacagtatgaagattcctcaaaatattaaacataaaactgtaatataatccagcaatcccactactgggtatttgtccaaaggaaataaaattcatatgtcaaagagtcaaagagatatctgcattcccatgttcattgtagcattattcacaacagccaagatgaagaatcagcctaagtgttcatcaacagatggatggataaagaaaatgtgatacgcatacatagtgtagatgttatatatacatattwttattatattattattattatttagtgattaaaaaagaa

SEQ ID NO: 565604 - DNA, 591 bp, Homo sapiens
agataaattttcaaattcagtagcaggaaccaccccagcacttttttaaaacttcagttaaacaggttttctaaactgcataccagcacctaatcagtttggtctttctttctcttttctttcaattttactttagcttctagccttatgcagttggccgtgtaaggaggcgaaaagaattctctgtgctttgtygtcttttttctgttatcctctactttctcacatggtagtcttaatttgatcagcagttatgaaaaagaaacactaatcctgggacaaaggacattgttcatagccagacagtttcagtattgcttctaaaatgaagtgttttgtgcttggatatgagttttgcccgctgggacactgtaattctttcatgtgagaatagaaagggtacaaagttgcttagtatcggacagaggacatctggtacctggagggcctggcagagatcatggtaaattctgtaccccagctgagttttggggtaagagggtcccagaagatgctgctgtatatgtctgtaatcatcagggcactggcgatgggaggcaagagggggaggaatgagagaaaagagaaaaa

SEQ ID NO: 565605 - DNA, 599 bp, Homo sapiens
gaagaatggaggaacagatgaatgaatggatcaatggatggatgaatggaagaaggggcagatggacagacagatggatagatggatggatatgtagatgaatggatggatagataaatagatggaagaatggatgaacagatgaaaggatggatggatggatggatggacggatggatrgaagaatgggcagatagatggattgatggatggatacatatatggatggatgagtggacgaatgaacagatggatggataggtggatggatggatgaatggatgaaatataatgtagtatcataactgcactaatagaggtaatcatggggtgctgcaggaacatagagaagaaggaatcaaatctatttaaaataggtggtgtttgagctgagatttgaagtaggggtagaagttcaccaggcagtggctaccatccatataagactgactccaattgtactctcaccattactctgctccagcaaaacagctctgagttttcttctgtcatccagagagccagagactgtagagtaaagagcaaagatcccaacctgctcagtctccattcactcttctccctggggcattcccaag

SEQ ID NO: 565606 - DNA, 599 bp, Homo sapiens
gaagaatggaggaacagatgaatgaatggatcaatggatggatgaatggaagaaggggcagatggacagacagatggatagatggatggatatgtagatgaatggatggatagataaatagatggaagaatggatgaacagatgaaaggatggatggatggatggatggacggatggatggaagaatgggcagatagatggattgatggatggatacatatatggatggatgagtggacgaatgaacagatggatggataggtggatggatggatgaatggatgaaatataatgtagtatcataactgcactaatagaggtaatcatggggtgctgcrggaacatagagaagaaggaatcaaatctatttaaaataggtggtgtttgagctgagatttgaagtaggggtagaagttcaccaggcagtggctaccatccatataagactgactccaattgtactctcaccattactctgctccagcaaaacagctctgagttttcttctgtcatccagagagccagagactgtagagtaaagagcaaagatcccaacctgctcagtctccattcactcttctccctggggcattcccaag

SEQ ID NO: 565607 - DNA, 544 bp, Homo sapiens
tgcagaacagcaaatattgctgcctgatccttcctctggaagttttgtcccagaggggcatccacctgtatgaggtgtcagttggcccctagcccctacttggaggtgtctgccagttaggctacacgggggtcagggacccacttgaggaggcagcctgtacattcccagagctcaaacactgtgctgggagaaccactgcttcttcagagctgtcagacaaggacgtttaagtctgcagaagtttctgctgccttttgctcagctatgcccttcccccagaagtggaatctatagaggcagcaagccttactgcgctgtggtggactctgcccaggttcaagcttcctagccactttgtttacctactcaagcctcagcaatggcagaatcccctctcctgtcaggctgctgcctcacaggttgatctcagactgctgcactagcagygagcatggctccgtgggcatgggacccactgagccaggcacaggatataatcttctggtgtgctgtttgctaagacgattggaaaagtgctgta

SEQ ID NO: 565608 - DNA, 519 bp, Homo sapiens
tccccaattgggactaatggcatsgtgggggtgacaggggaacagactgagtgagtggtgaaagttgaatgaatgctgtgaaaagggatgcccagggtttaatagacatatagggtgattcctttgggggaatcagagaaggcctcctggacaagcgatatgaactctggtttcagaggaaggaggccacaacatcacgactatcataaaactagaaaacacagagttgacattcttccagtctccatttccatatattaaataaggattcaaagtagttcctcctattgttgcacagatataaaattaaaatgaattcttaggttgagggtgaactttcacacagaacattttccattctgatcctccttggctagctgagcagggctcagtatctcctgaaccatggttgagaggcaaaaccccatttctcttgataggtataaaatagaaacccacacctctatctttgaggggatacaaatacctttcctattcctacataaacaaaccaagggg

SEQ ID NO: 565609 - DNA, 553 bp, Homo sapiens
attttatttcactttttaaataccaacctgctttcaaaatagattacgactttatttaaaaatttctgtaataaaagttctggaagaaaacatcaagctggcttattatatgagatttctattttatctgattcttcctctatgcacaaactcagcttcagtcattagtatcattaaaattaactttctagaaatgatgcaaaggaaggataacatacaattaaaatacaatatttacagcaatcgaagcaggtaacacacctcagaggctggggggaatgaaaacagcttttcctttctcttctttggattaaacataataatttagcgatttcttacaacctatgactagattcttcattttaatcgttcatccaacatttcaatgtcacaatgttaaatattctgggtagctagctgtccttctcaagaggattttggtagcatgraactcaaatgttatcttggtccattttctgcaaattacaggactctccagagcatagtcgttcctatgtggggagatagcatggcttaaatttttctgaataat

SEQ ID NO: 565610 - DNA, 363 bp, Homo sapiens
aactaaattatgacacaaggctagagagttgatattcccctgaggtaggaccgtgaaggtgtactgctggccttgccagctaaaagcaccctgctcctgctggtccttatgaacaggtatggagaaaaagggatttgttatacaaaaacttaattccaggaaagctttttttggttgattctttcagattttctttttttttttctttttctttttttgtagacgagtcttgctcttatcaccaaggctggagtgcagtggtgcaatcttggctcgctgcagcctcyacctcctgggttcaaacaattctctgcctcagcctcccaagtagctgggattacaagcacctgccaccatgcctgg

SEQ ID NO: 565611 - DNA, 496 bp, Homo sapiens
cctttttgcagaatctgcaagttgatacttggagccctgtttcaccctatagtggaaaagcaaatatcttcacataaacaaaccctacagagaagcattcagagaaagtcctttgtgatgtgtgcattgaacatgcagagttgacactatcttttgattgtacagttttgaatacgtctttttgtagaatctgcaagtggaagtttggagctgtttgcaccctgtggtgtaaaaggaaatatcttcatataaaagctacacagaagcattcagaaagacttctttgtgatgaatgcgttcctcacacagagttgaatcttcctttttattgagtagtattgaaaccctctttttgcagaataaccaggtggatattyggagagctttgaggcctgttttggaaaagcaaatatcttcaaattaaaaccacacagaagcattctgagaagcttctttgtgatgtgtgcattcaactctcagaattcaacgtgtctta

SEQ ID NO: 565612 - DNA, 496 bp, Homo sapiens
cctttttgcagaatctgcaagttgatacttggagccctgtttcaccctatagtggaaaagcaaatatcttcacataaacaaaccctacagagaagcattcagagaaagtcctttgtgatgtgtgcattgaacatgcagagttgacactatcttttgattgtacagttttgaatacgtctttttgtagaatctgcaagtggaagtttggagctgtttgcaccctgtggtgtaaaaggaaatatcttcatataaaagctacacagaagcattcagaaagacttctttgtgatgaatgcgttcctcacacagagttgaatcttcctttttattgagtagtattgaaaccctctttttgcagaataaccaggtggatatttggagagctttgaggyctgttttggaaaagcaaatatcttcaaattaaaaccacacagaagcattctgagaagcttctttgtgatgtgtgcattcaactctcagaattcaacgtgtctta

SEQ ID NO: 565613 - DNA, 496 bp, Homo sapiens
cctttttgcagaatctgcaagttgatacttggagccctgtttcaccctatagtggaaaagcaaatatcttcacataaacaaaccctacagagaagcattcagagaaagtcctttgtgatgtgtgcattgaacatgcagagttgacactatcttttgattgtacagttttgaatacgtctttttgtagaatctgcaagtggaagtttggagctgtttgcaccctgtggtgtaaaaggaaatatcttcatataaaagctacacagaagcattcagaaagacttctttgtgatgaatgcgttcctcacacagagttgaatcttcctttttattgagtagtattgaaaccctctttttgcagaataaccaggtggatatttggagagctttgaggcctgttttggaaaagsaaatatcttcaaattaaaaccacacagaagcattctgagaagcttctttgtgatgtgtgcattcaactctcagaattcaacgtgtctta

SEQ ID NO: 565614 - DNA, 306 bp, Homo sapiens
taatttgaagatatttgcttttccaaaacaggcctcaaagctctccaaatatccacctggttattctgcaaaaagagggtttcaatactactcaataaaaaggaagattcaactctgtgtgaggaacgcattcatcacaaagaagtctttctgaatgcttctgtgtagcttttatatgaagatatttccttttacaccacagggtgcaaacagctccaaacttccacttgcagattctacaaaaagasgtattcaaaactgtacaatcaaaagatagtgtcaactctgcatgttcaatgcacacat

SEQ ID NO: 565615 - DNA, 511 bp, Homo sapiens
tttctaggagtgcttctgtgtagttgttatgtgaagatatttgcttttccacagtaggcctcaaatcgctctacatatccacttgcagtttctacaaaaaagagtgtttccaaactgctccatcataagacacgttgaactctgagagttgaatgcacacatcacaaagaagcttctcagaatgcttctgtgtggttttaatttgaagatatttgcttttccaaaacaggcctcaaagctctccaaatatccacctggttattctgcaaaaagagggtttcaatactactcaataaaaaggaagattcaactctgtgtgaggaacgcattcatcacaaagaagtctttctgaatgcttctgtgtagcttttatatgaagatatttccttttacaccacagggtgcaaacagctccaaacttccacttgcagattctacaaaaagacgtattcaaawctgtacaatcaaaagatagtgtcaactctgcatgttcaatgcacacatcacaaag

SEQ ID NO: 565616 - DNA, 511 bp, Homo sapiens
tttctaggagtgcttctgtgtagttgttatgtgaagatatttgcttttccacagtaggcctcaaatcgctctacatatccacttgcagtttctacaaaaaagagtgtttccaaactgctccatcataagacacgttgaactctgagagttgaatgcacacatcacaaagaagcttctcagaatgcttctgtgtggttttaatttgaagatatttgcttttccaaaacaggcctcaaagctctccaaatatccacctggttattctgcaaaaagagggtttcaatactactcaataaaaaggaagattcaactctgtgtgaggaacgcattcatcacaaagaagtctttctgaatgcttctgtgtagcttttatatgaagatatttccttttacaccacagggtgcaaacagctccaaacttccacttgcagattctacaaaaagacgtattcaaaastgtacaatcaaaagatagtgtcaactctgcatgttcaatgcacacatcacaaag

SEQ ID NO: 565617 - DNA, 306 bp, Homo sapiens
taatttgaagatatttgcttttccaaaacaggcctcaaagctctccaaatatccacctggttattctgcaaaaagagggtttcaatactactcaataaaaaggaagattcaactctgtgtgaggaacgcattcatcacaaagaagtctttctgaatgcttctgtgtagcttttatatgaagatatttccttttacaccacagggtgcaaacagctccaaacttccacttgcagattctacaaaaagacgtattcaaaactgtacaatcaaaagatagtktcaactctgcatgttcaatgcacacat

SEQ ID NO: 565618 - DNA, 514 bp, Homo sapiens
cttgcagtttctacaaaaaagagtgtttccaaactgctccatcataagacacgttgaactctgagagttgaatgcacacatcacaaagaagcttctcagaatgcttctgtgtggttttaatttgaagatatttgcttttccaaaacaggcctcaaagctctccaaatatccacctggttattctgcaaaaagagggtttcaatactactcaataaaaaggaagattcaactctgtgtgaggaacgcattcatcacaaagaagtctttctgaatgcttctgtgtagcttttatatgaagatatttccttttacaccacagggtgcaaacagctccaaacttccacttgcagattctacaaaaagacgtattcaaaactgtacaatcaaaagatagtgtcaactctgcatgttcaatgcacacatcacaaaggactttctctgaatgcttctctgyagggtttgtttatgtgaagacatttgcttttccactatagggtgaaacagggctccaagt

SEQ ID NO: 565619 - DNA, 603 bp, Homo sapiens
ttgcttttccacagtaggcctcaaatcgctctacatatccacttgcagtttctacaaaaaagagtgtttccaaactgctccatcataagacacgttgaactctgagagttgaatgcacacatcacaaagaagcttctcagaatgcttctgtgtggttttaatttgaagatatttgcttttccaaaacaggcctcaaagctctccaaatatccacctggttattctgcaaaaagagggtttcaatactactcaataaaaaggaagattcaactctgtgtgaggaacgcattcatcacaaagaagtctttctgaatgcttctgtgtagcttttatatgaagatatttccttttacaccacagggtgcaaacagctccaaacttccacttgcagattctacaaaaagacgtattcaaaactgtacaatcaaaagatagtgtcaactctgcatgttcaatgcacacatcacaaaggactttctctgaatgcttctctgtagggtttgtttatgtgaagacatttgcttttccactatagggtraaacagggctccaagtatcaacttgcagattctgcaaaaaggagattcaaaacagctaaatcca

SEQ ID NO: 565620 - DNA, 229 bp, Homo sapiens
tcactcaaaagataggttcagctctgtgagttgaatgcacacatcaaaaagaagtttcttagagtgcctctatgtagattttatrtgtagatatttgcttttccactttaggtctcaaagcgctccaaatatccacttgcagattctaaaaaaagagagattctaacctactccatcaaaagataggttcagctctgtgagttgaattcacacatcacaaagaagtttc

SEQ ID NO: 565621 - DNA, 229 bp, Homo sapiens
tcactcaaaagataggttcagctctgtgagttgaatgcacacatcaaaaagaagtttcttagagtgcctctatgtagattttatatgwagatatttgcttttccactttaggtctcaaagcgctccaaatatccacttgcagattctaaaaaaagagagattctaacctactccatcaaaagataggttcagctctgtgagttgaattcacacatcacaaagaagtttc

SEQ ID NO: 565622 - DNA, 229 bp, Homo sapiens
tcactcaaaagataggttcagctctgtgagttgaatgcacacatcaaaaagaagtttcttagagtgcctctatgtagattttatatgtagatatttgcttttccactttaggtctcaaagcgctccaaatatccacttgcagattctaaaaaaagagasattctaacctactccatcaaaagataggttcagctctgtgagttgaattcacacatcacaaagaagtttc

SEQ ID NO: 565623 - DNA, 229 bp, Homo sapiens
tcactcaaaagataggttcagctctgtgagttgaatgcacacatcaaaaagaagtttcttagagtgcctctatgtagattttatatgtagatatttgcttttccactttaggtctcaaagcgctccaaatatccacttgcagattctaaaaaaagagagattctaasctactccatcaaaagataggttcagctctgtgagttgaattcacacatcacaaagaagtttc

SEQ ID NO: 565624 - DNA, 464 bp, Homo sapiens
tatttgcttttccacagtaggcctcaaatcgctctacataccaacttgcagtttctacaaaaaagagtgtttccaaactgctccatcataagacamgttgaactctgagagttgaatgcacacatcacaaagaagcttctcagaatgcttctgtgtggttttaatttgaagatatttgcttttccaaaacaggcctcaaagctctccaaatatccacctggttattctgcaaaaagagggtttcaatactactcaataaaaaggaagattcaactctgtgtgaggaacgcattcatcacaaagaagtctttctgaatgcttctgtgtagcttttatatgaagatatttccttttacaccacagggtgcaaacagctccaaacttccacttgcagattctacaaaaagacgtattcaaatgtgtacaatcaaaagatagtgtcaactctgcatgttcaatgcaca

SEQ ID NO: 565625 - DNA, 511 bp, Homo sapiens
gttcaactctgtgagttgaatgcacacytcacaaagaagtttctcagagtgcttctgtgtgtttttatgtgaagatgattccttttccacaataggcctcaaagctctccaaatatctgcaagcagagtctacaaaaagagagattcaaaactgctcaatgaaaagataggttcaactctgtgagttgaatgcacacctccaaagaagtttctcagaatgcttccgtgtagtttctatgtgaagatatttacttttccacaattgtcccaaagctctaaaatatccacttgcagaccctctgaaagagtgtttcagaattgctcaatcaaaggagaggttcaattctgtgtgaccaatgcactcatcacaaaaagtttgtctgaatgcttctgtgtagaatggatttgaagataattccttttccaccacagtctgcaaatggctaaaaatatccacttgcagattccacaaaaagagagattcaaaactgctcaatcacaaggtaggttc

SEQ ID NO: 565626 - DNA, 477 bp, Homo sapiens
gtgtttttatgtgaagatgatyccttttccacaataggcctcaaagctctccaaatatctgcaagcagagtctacaaaaagagagattcaaaactgctcaatgaaaagataggttcaactctgtgagttgaatgcacacctccaaagaagtttctcagaatgcttccgtgtagtttctatgtgaagatatttacttttccacaattgtcccaaagctctaaaatatccacttgcagaccctctgaaagagtgtttcagaattgctcaatcaaaggagaggttcaattctgtgtgaccaatgcactcatcacaaaaagtttgtctgaatgcttctgtgtagaatggatttgaagataattccttttccaccacagtctgcaaatggctaaaaatatccacttgcagattccacaaaaagagagattcaaaactgctcaatcacaaggtaggttcaacttggtaatttgaaagcacaca

SEQ ID NO: 565627 - DNA, 512 bp, Homo sapiens
ggttcaactctgtgagttgaatgcacacttcacaaagaagtttctcagagtgcttctgtgtgtttttatgtgaagatgattccttttccacaataggcctcaaagctctccaartatctgcaagcagagtctacaaaaagagagattcaaaactgctcaatgaaaagataggttcaactctgtgagttgaatgcacacctccaaagaagtttctcagaatgcttccgtgtagtttctatgtgaagatatttacttttccacaattgtcccaaagctctaaaatatccacttgcagaccctctgaaagagtgtttcagaattgctcaatcaaaggagaggttcaattctgtgtgaccaatgcactcatcacaaaaagtttgtctgaatgcttctgtgtagaatggatttgaagataattccttttccaccacagtctgcaaatggctaaaaatatccacttgcagattccacaaaaagagagattcaaaactgctcaatcacaaggtaggttc

SEQ ID NO: 565628 - DNA, 477 bp, Homo sapiens
gtgtttttatgtgaagatgattccttttccacaataggcctcaaagctctccaaatatctgcaagcagagtctacaaaaagagagattcaaaactgctcaatgaaaagataggttcaactctgtgagttgaatgcacacctccaaagaagtttctcagaatgcttccgtgtagtttytatgtgaagatatttacttttccacaattgtcccaaagctctaaaatatccacttgcagaccctctgaaagagtgtttcagaattgctcaatcaaaggagaggttcaattctgtgtgaccaatgcactcatcacaaaaagtttgtctgaatgcttctgtgtagaatggatttgaagataattccttttccaccacagtctgcaaatggctaaaaatatccacttgcagattccacaaaaagagagattcaaaactgctcaatcacaaggtaggttcaacttggtaatttgaaagcacaca

SEQ ID NO: 565629 - DNA, 510 bp, Homo sapiens
gttcaactctgtgagttgaatgcacacttcacaaagaagtttctcagagtgcttctgtgtgtttttatgtgaagatgattccttttccacaataggcctcaaagctctccaartatctgcaagcagagtctacaaaaagagagattcaaaactgctcaatgaaaagataggttcaactctgtgagttgaatgcacacctccaaagaagtttctcagaatgcttccgtgtagtttctatgtgaagatatttacttttccacaattgtcccaaagctctaaaatatccacttgcagaccctctgaaagagtgtttcagaattgctcaatcaaaggagaggttcaattctgtgtgaccaatgcactcatcacaaaaagtttgtctgaatgcttctgtgtagaatggatttgaagataattccttttccaccacagtccgcaaatggctaaaaatatccacttgcagattccacaaaaagagagattcaaaactgctcaatcacaaggtaggtt

SEQ ID NO: 565630 - DNA, 515 bp, Homo sapiens
gttccaaaactggtcaatcataagataggtttaactctgtgagttgaatgcacaatcacgaggaagtttctcagaatgcctctgtgtgcttttcatttgaaggtatttccttttccaccataggccgcaaagggctccaaatatccccttgcagattctgcaaaatgagagattcaaaactgctcaatcaaaagataggttcaactctgtgagttgaatgctcacataacaaagaagtttctcacagtatttcygcgtagttgtttaagtgaagatattttcttttccaaaatagggactcagaatgcttctgtgtagtttttatttgaagatatttccttttccaccataggccgcaaagggctccaaatatccacttgcagattgtataaaaagagagattcaaaactggtcactcgaaggatcggttcagctctgtgaggtgaatgcacacatcaaaaagaagtttcttagagtgcctctatgtagattttatgtgaagatatttgcttttc

SEQ ID NO: 565631 - DNA, 512 bp, Homo sapiens
gttccaaaactggtcaatcataagataggtttaactctgtgagttgaatgcacaatcacgaggaagtttctcagaatgcctctgtgtgcttttcatttgaaggtatttccttttccaccataggccgcaaagggctccaaatatccccttgcagattctgcaaaatgagagattcaaaactgctcaatcaaaagataggttcaactctgtgagttgaatgctcacataacaaagaagtttctcacagtatttctgcgtagttgtttaagtgaaratattttcttttccaaaatagggactcagaatgcttctgtgtagtttttatttgaagatatttccttttccaccataggccgcaaagggctccaaatatccacttgcagattgtataaaaagagagattcaaaactggtcactcaaaggatcggttctgctctgtgaggtgaatgcacacatcaaaaagaagtttcttagagtgcctctatgtagattttatgtgaagatatttgctt

SEQ ID NO: 565632 - DNA, 512 bp, Homo sapiens
gttccaaaactggtcaatcataagataggtttaactctgtgagttgaatgcacaatcacgaggaagtttctcagaatgcctctgtgtgcttttcatttgaaggtatttccttttccaccataggccgcaaagggctccaaatatccccttgcagattctgcaaaatgagagattcaaaactgctcaatcaaaagataggttcaactctgtgagttgaatgctcacataacaaagaagtttctcacagtatttctgcgtagttgtttaagtgaagatattttcttttccaaaatagggactcagaatgcttctgtgtagtttttatttgaagatatttccttttccaccataggccgcaaagggctccaaatatccacttgcagattgtataaaaagagagattcaaaactggtcactcaaaggatcggttcwgctctgtgaggtgaatgcacacatcaaaaagaagtttcttagagtgcctctatgtagattttatgtgaagatatttgctt

SEQ ID NO: 565633 - DNA, 535 bp, Homo sapiens
tgtgtctgtttttgtaccactaccatgctgttttggttactttagccctgtagtatagtttgaagttgggtagtgtaatgcctccagctttgttctgtttgcttaggattgccttggctatttgggctctttttagggtcctcatgaattttaaaataggattttctagttctgtgaagaatctcagtggtagtttaataggaacagcaataaatctataagttgctttgggcattatggccattttaataatattgaatcttcctatccatgagcrtggaatgtgttctcatttgttttgtagttctctttgtataggtcatttacctccctaactgtattccttgatattttattctttgtgaagcaagtgtgaattgtatttcattcctgatgtgactctgagcttgcttgttcttggtgtataggaatgtcagctagctatttttgcacattgatttcatatcctgagactgcttaagttgtttatcagcttaagaagcttttggactaaacctatggggttttctatata

SEQ ID NO: 565634 - DNA, 547 bp, Homo sapiens
atggtggcccacacctgtaatcccagcactttgggagaccaaggcgagcagatcacttgaggtcaggagtttgagaccagcctggccaacatgatgaaaccccatctctactaaaaatattacaaacattagctgatcatcgttgtgcrttcctgtaatcccatctactcaggaggctgaggcaggagaatcacttgaacgtgggagtcggagattgcattgagcagagattgtgccaccacactccagcatgggcgacagagtgagactctatatcaattaaaaataaatatatatatatatatagtgaaatgtcttaagtctttattcctttttcacatgttgtataataaagatagatttgtgctttttaaatagcacatagagttgagaggtctttgaatcaaaggttacacacatcatgtttcaaggttcttaaaaatgtcagctgacttccttatactcacaaattgaatacatttttgcatatataattgggaaagtgaattatggcctacattagtagctactagttctactagtaaat

SEQ ID NO: 565635 - DNA, 539 bp, Homo sapiens
atagaaaaaaaacttcatttcctggggagaaattcaagcaggctgcagacatttgtttaagtaacaaggagccaaatgttaatcaccaataaaatgggaaaaatatatctgacatgtttccagggcatatcagagaccttcacagtagcccctcccatcacaggcctggaggcctaggagagaaaaataatttcctgagccgggcctaggtccccttgctccatgcaacctctgggacatgaggccttgcatcctagctgcttcaacaccagctgtggcttgaaggggccaatgtacagctcaggccattgtttcagagggtgtaagccccaagccttgrtgtcttacatgtggtgttaggcctgagggtgcacagaagtcaagaattgaggtttgggaacctctgccttggtttaacaggatgtatggaaacacctggatgtccaggcagaagtttgctgcaggagcagagccctcatggggaacctctgctaggaaagtgtggaagaaaaatgtgaggttgaagtccccacacagat

SEQ ID NO: 565636 - DNA, 531 bp, Homo sapiens
tatagtggttatttcttatataatgcttcataatgtcagtgacaaagtaggctgaacaagaatcagtcacatggagattcaatactgggatgtataacttaatgtcattggtacatctgagtgatatattttctacttttttctacagcactttctaaaaattctgtctctatcattccttcattatctgcctctcttgaccttttcctgatttcctaaactagggccctcttatttcttgtcttggttttggcttatttttcagagaatgcacaatttttcagatgaaagttcaagcagaaatgattcacaaataaccataagtgcagactcccacctctcaattacatattctttttctcttgttaagaataaacaattctkggatgttaaatgatgactcacagtctattctcatcattattctgtctataaatttgtaataaaaatgaatgcatatcattaagacagctaaaccacctccttatcaaaaaggcagaaaagcccagggcaagttggtttttatttatt

SEQ ID NO: 565637 - DNA, 504 bp, Homo sapiens
tgtttgtctttgtgtgtggggggtgtgtagttattatttccattataactttataagctattattttcatataacatcatagtaccagtttttgttttcatttttaccctatattctcttattttcctaaaatctatcttcttttaaaaaatagtgaccatttaggtcaaatgtttcttttttaaaatccaaagtagtatcattttattatataaccaataaactattgcatataaaaagatgggatatacttttgcaaaagttcccaaaccccttgcttttgatcaaacagtgcaaawttctatcaaagctgcatatttgattcagaaatgtattatgaagtcttcagtagacatgggcctcaggtaaattttagctctcctgaaccatgggccaaaaaagagctcacgcccttctgccagccactagctctcagttgtctggaacacaaggtaagagcaggtgccagagcccatcagtcactgcaggggtgctgtgcagcat

SEQ ID NO: 565638 - DNA, 526 bp, Homo sapiens
tcgttgactgcttctttaggcaatattttactaagcaataggtggcagtagtgtgttgtacttgactttacctttgtgatttttttttttttcagctttcataatcttaatgcagtgtcaaagtgtaaaggacacaattgcagtactctgatacctaactttttgtaacatgatcatgttttaagcaagtgagcatctcatagaaaataaagcaaaacaacaacaaaacacagccaaagtcagtcaatgtgcatctcttgcctgtctaaactatattcagattcattagagaattacaactgcacggtcttaacagcatttcctcaccaactgtttaayagctgcttcaaaataacagtgatttgcaataatgaaaatcaaaaattatctcagaggatatgtgtttcttttttttttttattttcccccgagatggagtcttgctctgttgcccaggctggtgcgatctcagctcactgcaacctctgcctcctgggttcaagtgattctcctgcctcagcctccc

SEQ ID NO: 565639 - DNA, 552 bp, Homo sapiens
ttttagaagttgctagaattttcacactgcattgtatgatgctattttcataattttacatgcttcatttcttagttgaaaaacttgtttctgtgctaaatttatcagtgggtatcatcattagtgttaagtaggtgaagcctgatacaaattatgcccctctcttaaaaaaaaawaaataaacaggttaaaataccactggcatattgttcacatttcatcagcatcttcatctgtgacataagatggtatcaatacaaacagtggaatgaagaagttgacatttatgattagtgaacgaaaggtatcaaatataaaaaaaattccgacttgaaacacattgcaattttcattgtggtgttacaggttattggattttttccccctctttttggtgtacatacttggaaggacgcatctgtcacaggaaaatttttgtgaagcactcatcttctgacttgcccatgaattccttgttttaagcagtcaaggcaaacagtgtgcttctcaaattttagcacgcgtaacagttgcttggagagcttggtgaaa

SEQ ID NO: 565640 - DNA, 540 bp, Homo sapiens
caaacttgcatttcaaaattattctcattgaattaataacaaaatacatttttatttcattgtttctagctagtgaactttgtcttagttatcctgctaactagcaccttggttttattttttccattgactactactgctttgttgccctgraagcttttcacccaatattcccattagaggtatgtcgtgattatagaaatttgattcagtgtctcatatttgctttcattctgtttaacagtgaaaccagctcaggtgaataattttttgcacgtgtcttcctttaatccttcagatgactttttgcttctaacttatatgtgttctgttaggcttaggagagattaggacagtttttgataaaatgatgctaacaataaattggcttaaaacatggaaacttagtatttctgaggagaagttgtactggctttaaatatctcaaatattagtgtaataaaaatggtaaatgtagtcccaacctctctttgaaactatgtcagaagttcttttcagatttttattagagattttata

SEQ ID NO: 565641 - DNA, 540 bp, Homo sapiens
caaacttgcatttcaaaattattctcattgaattaataacaaaatacatttttatttcattgtttctagctagtgaactttgtcttagttatcctgctaactagcaccttggttttattttttccattgactactactgctttgttgccctggaarcttttcacccaatattcccattagaggtatgtcgtgattatagaaatttgattcagtgtctcatatttgctttcattctgtttaacagtgaaaccagctcaggtgaataattttttgcacgtgtcttcctttaatccttcagatgactttttgcttctaacttatatgtgttctgttaggcttaggagagattaggacagtttttgataaaatgatgctaacaataaattggcttaaaacatggaaacttagtatttctgaggagaagttgtactggctttaaatatctcaaatattagtgtaataaaaatggtaaatgtagtcccaacctctctttgaaactatgtcagaagttcttttcagatttttattagagattttata

SEQ ID NO: 565642 - DNA, 526 bp, Homo sapiens
ctttggcaacatggcaaaaccctgtctttacaaaaaggaaaaagaaaaaattagccatgtttggtggcatgcacatgtactcccagctactcaggaggctaaagtgggaggatcacctgacgccagagaggttgaagctgctgtgagtcataatcacagcactgcacttcagcctgagcaacagagtgagaccctgggggaaaaaaaaaaarcaagacatagagtagctgcataaataaaggaacaagacccaggagtgtgctgcctactgaaatccatttcacttataatgagacacacaggctaaaagtgaaggaatagacaaagatattccatgaaggtggaaataaaaaaagaataggtgtagctatatttgtatcagataaattaaacaccaagtcaaaggctataaaaagggaagaagaatgttactatataatggtaaaatggtcaactcagcaagaggatataacaattttaaatattgtatatgctcaaccatggagtgccaaagtatataaagcaa

SEQ ID NO: 565643 - DNA, 566 bp, Homo sapiens
gaaataagtaatctaaataaaaggaargataatgacaatggtcattaactggaggactctagctaaaaacaaaaattataaaactttttgaggaaaacatatcaactatctttaagatattggtaaaaacatatagccttaccactgacttttcaaataacttgttaatactctactcttacacatcatgttgatagctttttctctgctttcagccagcaatccaaacaactatttctttaaaagaccttacctaaatatgttaacatacgaattgtcatttaaatctgtttatttctttaacactaattctacttgataatattatacttgttatttatatggttttctcttgtttactcactgacaggaggttctgtgaagtcaagactaaggtatatcttctttaccatggtgtcccagggacctaaaacaattcctggaataaagtactacttttaattatgagtccaataatttattactcagcactgagcaatacttttacatttttgatatatcttgagctttcctttgaactgttttccattttcagcccatatgtg

SEQ ID NO: 565644 - DNA, 645 bp, Homo sapiens
gtggcacaatctcagctcaccacaacctccacctcccaggttcaagcaattcacctgcctcagcctcccaagtagccgggattacaggtgtgagccaccacctggttaatttttgtatattttaagttgagacagagtttcaccatgttggtcagactggtctcaaactcctgtcctcaagtgatccacgcgcctctgtctcccaaatttggtgggattacaggtatgagcyaccatgcctagccaatcttctcatttcatccacacctttcaaagatatttcccttcatctttcccctgcactgcatgctgtatgagggttcactgcatctatcactaatgtattacatattgtttagtttattacctgtgctccagtaggatgtaagctccgcaaggtcaagcactttgctgcctttgcttctagtggtatttacagtgtacagaacagtgcctgatacctattaagtccccaaaaagtatttgtcaagggaatagatgaatcaatgagttagtgtaggagaatatagatagcaagaggaaactggtgagagagaagatcacagaagtggcccagaccaaacgacattggcccttatatgttatgataagtggtttggattctactctaaacataagacagct

SEQ ID NO: 565645 - DNA, 574 bp, Homo sapiens
gaattgtattttgcatattgaatgttttagtgttttagttttattaaactcatggactctgtggctcaggaattcagacagagcacatggggatgacatgtctcccctccacaatrtctggtcttcagctgggaaggctgcaacagctgaggtaacccaatgactgtgactggaattgttgagtggcatcttcactgacatgtttggcacctgggcttagatgaccacaggctcagttcattgggatcattgaacagaacatctacagactagagaatagagaagctacatggcttctccgtgtagccagagatttctcacagtatagaggcttcaaggtagataaacttttctatggtctctctgggctacaaacatgaatgtcccctctaaatattggtaaagatgtgaactgaatgaagttcattgctgatggaacaactgctgtgtaaaactgtccagtagtttctaataaaattatacatatatacagcaatatggataaatttcaaaaacattatattaaatgaaagaagacaaagacaaaataatatatatacacataatttcattt

SEQ ID NO: 565646 - DNA, 574 bp, Homo sapiens
gaattgtattttgcatattgaatgttttagtgttttagttttattaaactcatggactctgtggctcaggaattcagacagagcacatggggatgacatgtctcccctccacaatgtctggtcttcagctgggaaggctgcaacagctgaggtaacccaatgactgtgactggaattgttgagtggcatcttcactgacatgtttggcacctgggcttagaygaccacaggctcagttcattgggatcattgaacagaacatctacagactagagaatagagaagctacatggcttctccgtgtagccagagatttctcacagtatagaggcttcaaggtagataaacttttctatggtctctctgggctacaaacatgaatgtcccctctaaatattggtaaagatgtgaactgaatgaagttcattgctgatggaacaactgctgtgtaaaactgtccagtagtttctaataaaattatacatatatacagcaatatggataaatttcaaaaacattatattaaatgaaagaagacaaagacaaaataatatatatacacataatttcattt

SEQ ID NO: 565647 - DNA, 421 bp, Homo sapiens
gtgactggaattgttgagtggcatcttcactgacatgtttggcacctgggcttagatgaccacaggctcagttcattgggatcattgaacagaacatctacagactagagaatagagaagctacatggcttctccgtgtagccagagatttctcacagtatagaggcttcaaggtagataaacttttcyatggtctctctgggctacaaacatgaatgtcccctctaaatattggtaaagatgtgaactgaatgaagttcattgctgatggaacaactgctgtgtaaaactgtccagtagtttctaataaaattatacatatatacagcaatatggataaatttcaaaaacattatattaaatgaaagaagacaaagacaaaataatatatatacacataatttcatttatatgaatagac

SEQ ID NO: 565648 - DNA, 533 bp, Homo sapiens
tattaaactcatggactctgtggctcaggaattcagacagagcacatggggatgacatgtctcccctccacaatgtctggtcttcagctgggaaggctgcaacagctgaggtaacccaatgactgtgactggaattgttgagtggcatcttcactgacatgtttggcacctgggcttagatgaccacaggctcagttcattgggatcattgaacagaacatctacagactagagaatagagaagctacatggcttctccgtgtagccagagatttctcacagtatagaggcttcaaggtagataaacttttctatggtctctctgggctacaaacatgaatgtcccctctaaatattggtaaagatgtgaactgaatgaagttcattgctgatggaacaactgctgtgtaaaactgtccagtagtttctaataaaattatacatatatasagcaatatggataaatttcaaaaacattatattaaatgaaagaagacaaagacaaaataatatatatacacataatttcattt

SEQ ID NO: 565649 - DNA, 421 bp, Homo sapiens
gtgactggaattgttgagtggcatcttcactgacatgtttggcacctgggcttagatgaccacaggctcagttcattgggatcattgaacagaacatctacagactagagaatagagaagctacatggcttctccgtgtagccagagatttctcacagtatagaggcttcaaggtagataaacttttctatggtctctctgggctacaaacatgaatgtcccctctaaatattggtaaagatgtgaactgaatgaagttcattgctgatggaacaactgctgtgtaaaactgtccagtagtttctaataaaattatacatatatacagcaatatggataaatttcaaaaacattatattaaatgaaagaagacaaagacaaaataatatatatayacataatttcatttatatgaatagac

SEQ ID NO: 565650 - DNA, 576 bp, Homo sapiens
acttacactgaaaagtcacaaagtcctaaatttacaggaaaacaggactcgtaaaacttataacactgagtaaaatattatgctccagagcccctttcagacttctggtctgggacaacccttcccttgtagccccatggttccatcagccccgcggttgagctctagaagctggctgaatttaagtttccactgggcgattttgtggaccctatttcagtgacttcacctttttgaacctcagtttcacatctatagatggagataacccgtagcacagggctaaactctctcatcaggttatttctttttctttactgtttaaaaatgagaattaaatgaaatcatttctgtaaagtactgagcccactagaaaagacctgaaataaagtcttagaagggaagtattaaaasggaagactttttttccttcaacagctgctgaataggatgggggaattggaagccaaaaaattttaaaacttaatttaacttaaaaatttaaataaaataattagctaggtgtggtgatgtgcacctgtagtctcagctactcaggaggctgaggcagaagga

SEQ ID NO: 565651 - DNA, 560 bp, Homo sapiens
gataagagtctctaatgatttagtcatacttctcttcctggtgcagaaagaaagacacttttactaatggaaatttcattcatagataaaactttcccctataaaagggcaatttcttagagcttcaatgttacagtttctcaaaatgagcagatcaaattaattctgatgccagaagggtatattttagagtggcatattctaatctcctacagtcatattttggtgttatgggtcctaagccccatcagtttatttgggttttagtttcctcattttaaatgggtgtaagaattatatgtatctcaacaacaattgtgaaaattaagtgaactagtatagaaagtactcaaaaggttgcctagcatatagttataagaaataaaagtacaatcataagtccctcaactgactgagccccctcttggccatggggatcccagagaaaccttggaagctgagttgctggtcatgatgggataggaagtctracacaccccattatacccctcccctgttaagagcccttaggctttcttccctaagggctaaatggaaac

SEQ ID NO: 565652 - DNA, 643 bp, Homo sapiens
ttagcctcaaatccggtttgtaaagcaagattattcaggatggagaggaaaaaagatgtgtattaaatcagggtgctttaattatgagctaacatttgaccccttgaaattaaagcttgttatggtcataaaattctcccagtgtgtgggagagatgatagtgtcgagtggacatccagcacatccttgttgaactgatataagaaggaataaggaacagagatttattttctgggaagttgatttccaaacagttttgggtagtatgccgtaattggaaagttaccaacactggtacttataaagctttagaattttgcttgaaatattataaattccatgattcaaattaaaagtgttaatttagactccaatgctaaggmgaagttacatctaaattattgacagccttaaattatccattctattctttgaatttcctccattagtgcatgtaatgacagtcatctatatgattgatgatatggtttggctgtgtcccctcacaaatatcatcctgaattgtagttcccataatcccaacatgtcatgggagggattcggttggaggtaattgaatctggggtggctacctccatgctgttcttatgatagtgagtgagttttcatgagacctaatggt

SEQ ID NO: 565653 - DNA, 546 bp, Homo sapiens
ttcatctcatttcacattcaatattagaatctcaccatttccatttaagcaagatttaataaaatgcatgctgattttacagttaaaatagtgggaaaaaaatagttgaaacagcggcagagttcccccttttgtcattttcattcttccttaaaaaggaatcaggcagagaatccacacatgggtgtacacatgtacacacacacacacaaacattttccttttgagtccctgacgctcatggtctaaggaaatttatttaacattttacatagctcaagaggtatctcttctcagtgtttgaattctactgaggagaacataagaatgctttttttttttttaaaaaaaaaatagatttagggagtacaagtgcaattttcttacacaggtatrttgtttagtggtgaagtctgggcttttagtgtatccatcctcttaacagcaaacactgtacccaagatgtatttttttaattcttgtctccctctcatcttcccaccttttggagtcttcagtgtctaatttttcccccttgtatgttca

SEQ ID NO: 565654 - DNA, 467 bp, Homo sapiens
ggccataaaggatccataaggcaaggtgctttattttttaataccctaaattcttatttcagccgtagaattacttaatcccttctaaaagtaaatttccccaagaaacttcagaagaaaactttttcaactacaaccaaattaaaagcattcaatatcttagtcttcactaagactaatgcaaccttcacttcagtttttttttgcccattttctcttattatttcttcaggaaaaatgaaaagcaattatatttatsaaaatcttacaggtcctcttcgaaatggttaagtcatgggaggattccgttaaggggtggaaaaaaaaaaacagccttccctagttcaatacaagaagaggagctttcccaggatttctgcctcttctggagtttaaggcccctgtcttgccattctctcagtagcaagcttctctatggggtattttaaatgtaagaagcagaaggg

SEQ ID NO: 565655 - DNA, 617 bp, Homo sapiens
agggaagagagagattatttttcaaaaaattaataggaaaattagtttaaaaaaaaagaatgaaaggaagaaaagaagaaaggaagaaaagagaagaggaagcttagattattttaccctataccaaaattaatttcaaaaggtccaaaaagtaaagtataaatgtctaaaccatgacataactgaaagaaaacagagattacaactatagaggtggaaaagaactttctaagcctaaaagtgacttttaaaattgtcaataatatacgggttttttgtttggtttggttttgttttggggttttttttgtttgtttttgtttgtttgtttgttttttgagatagagcctctctctgtcacccacgctggagtgcagtggtgtgattgcagctccctgaaacctctgcctcctaggttcaagtgattctcgtgcctcagcctcccaagtagctggggctataggcgtgtaccaccaaaccggctaatttttstatttttttggtagagatggggtttcactatgttagccaggctggtctcaaactcctgacctcaagtgatccaaccacctcagcctcccaaagtgctgggattacaggtgtgagtcactacgccc

SEQ ID NO: 565656 - DNA, 584 bp, Homo sapiens
taaattaatgtttttctataaattcaaaaaattgacattatgtcttcgattttctcttttttctcctcttcttctagtacccccttatgcatatgttggtgtattcactgctgtcttatatttctctgactctgtgtttatttaaaaaaatattcttttgtctccttcttccttagattgcataactctatcaatctatctttaaatttgctacttctttcttcagccagttcaaatctactgttgaacacctccagtgaatttttcatttcagttttcatttttaacttcagaatttccatttcttttttgtaagttttatctctttactgttatttcagattttacatggcattcccctcatacactgttttatttcttcttctttttttttttttttttttttttttttgagacagagctctgtcacccaggctggagtgcagtggtacgatctcygctcactgcaacctccgcctcccaggttcaagcaatcctcctgcctcagcccccctagaagctgggattacaggcacgtgccaccataccctgctaatttttgcatttttagtagagacagggtt

SEQ ID NO: 565657 - DNA, 542 bp, Homo sapiens
atacaacccttttctctagctgtctttaagattttcctttcatgttgaccttggaaagtctgatgactatgccttggatgattgtcttgtcttgtgtagtatctctcaggagttctctgaatttctggaacctgtatgttgacctctttattatgattgggaacattttcatgggatgtatccttgaaaatatttttcaagttgttaactctcctttcttctatctcaggaaacccagtgagttataggttgctttatataattctgtatttctcagatgctttgttcattttttacaattttttttttttttttttttttttttttttttttgtctgggcgggttgatttgaaaaacgggatttgagctctgaacattttttccccckgattgatctagtctgttgtcaaggcttccaaatgtatttaaaaaatcctttcagtcaagttttcaattccagagtttcagttgggttctttcttaaaaaagcggggcgggctttcaaatcttgaatcattttgcctgcttcaaaggatggaat

SEQ ID NO: 565658 - DNA, 596 bp, Homo sapiens
ggttatagtttttaaatagttgaatttttcattaaaaccaaaaactcctctataagaaagatagatcaaaatatttttaccaaaatgtgtgtacaaacatgtatatatgtcatatatatataacatatatattatgtatgtgggtgtgtgcatatgcatatatgcatatacacacatatttctttaaattcatccaatctaaaatgtatctaatttactggtattatgtcaaaatttcctgatatatcattgttgaacacataaaagttttcttggttttggtttagttttattctatttcttaatttataaataatttttcattgtggatatgtcatctgttgtatttagaacatatccaacacctctcagttgtgttaactgaggcataatttcctttgctaaaaattgcaggacaatttggcctccaaatcacagtagctgcattttgtcagtggaccttacatggaaacttttgctgctttagatggaagacttatgttaagttcccatgaatatgatgtaattgagtttccaccaaggtagttgctagaaaataaattaaaactgaggcratcacatacttaaatttatag

SEQ ID NO: 565659 - DNA, 511 bp, Homo sapiens
gaattcatttacataagccatttgtgagcagtgtagactgccctgaagatttcatgtgggaattaagaaatggcttatgccaaataatagaaatgaagctcattaacattgctaagtattaatataaaaacatgatatgcctcactggccactcaattcatctcagccaactctttgtctcttatcttacctctttctcttctctccatcttcatactcaggagaaaaaccacaaaatgcctttctttgtctcatgaaragaaattctcccctcctctgaagtcttggcctttgaactgaatgggcctacctcttccatcctactccagagacacaccaagaccttcttctaggtcgacacaggaattttttcctcggagggagcctggggaataaaatgtcctcactcatttcgccttcactacagatgtctcagcagaggagacattttgtactggtagaaatatccagtgaaacagatacaaaaatctatataaaaagtagatgatta

SEQ ID NO: 565660 - DNA, 604 bp, Homo sapiens
aaagtcacaacttctcacagccaactctccagtgtcctcctaattaacaaacccattatattttagttctaattttaaaatgtaggtatttaaacatttcagcatggtaactagaacattctcaggagtacagaaaagtgtattaaagacagstgttcaacatcaaaacaatgaaagaactggtgagtttagtcagcatggctgttggactgcatggcagactctttagcttcttaccaattggctaagtaccagaagtatcaagtttttaagtgtgttctggcagcttagtgttcaggctgtcccttgttgaagagtcctcgatatgtgataatgacaaccttactttaaaaatatcacacatggccaggtgcggtggctcacacctgtaatcccagcactttgggaggccgaggtggggagattgcttgagtccaggagttcaagaccagtcttcccaatgtggtgaaatcctgtctctactaaaaatacaaaaattagctgggcatggtggcacatgcctgcagtcccagctactcaggaggctcaggtgggtggatcagttgagctcaagaggttgggcctgcagtgagccatgaacatg

SEQ ID NO: 565661 - DNA, 604 bp, Homo sapiens
aaagtcacaacttctcacagccaactctccagtgtcctcctaattaacaaacccattatattttagttctaattttaaaatgtaggtatttaaacatttcagcatggtaactagaacattctcaggagtacagaaaagtgtattaaagacagctgttcaacatcaaaacaatgaaagaactggtgagtttagtcagcatggctgttggactgcatggcagactctttagcttcttaccaattggctaagtaccagaagtatcaagtttttaagtgtgttctggcagcttagtgttcaggctgtcccttgttgaagagtcctcgatatgtgataatgacaaccttactttaaaaatatcacacatggccaggtgcggtggctcacacctgtaatcccagcactttgggaggccgaggtgggragattgcttgagtccaggagttcaagaccagtcttcccaatgtggtgaaatcctgtctctactaaaaatacaaaaattagctgggcatggtggcacatgcctgcagtcccagctactcaggaggctcaggtgggtggatcagttgagctcaagaggttgggcctgcagtgagccatgaacatg

SEQ ID NO: 565662 - DNA, 553 bp, Homo sapiens
tctaattaggttcacagagtaattactcccaaaaagaattatggtattaaaaaataaatgtgctttctttttccaacatgaagataatttttttctgatcacraagataatgtatatttatttagaaaattaaagcaatattagtaattctaaggaagaaagtaaaaattactttcctccccaaccacccagaggaaacctccatttgcttttggtgataatttttgcagctgtctctctccatgcctgtaactataatattcatgttgtttttaatctgctttttcccctcagcagtatattatggagctcattctatgtcaatgaaaacttacatatatgtaatattcgattatttgtgtaaaatattgtaccagttttttattaaagaacatttaggtcatttcctattttactattattattttattatcaaatatggtcattatcatacttatacatctttgcatatttgtccaattttctctgtagggtagagtcctacctaatgaattgatgaattaaatctttgatacatacctcatttgccaaa

SEQ ID NO: 565663 - DNA, 598 bp, Homo sapiens
actttcatgacgaatgacataaaaaaagcccacagttcttggcttaattgactcatttgaaatgcaagrcactttagtgtaatagacatagtgccagcttttactatttaatgagatttgggaagaagataaaaaggaaaaaaagttgtaattttttcactgcagcatccttagttcctgaagatttcatctaccatcagtggaaaattattatccaaactgaccaaaggaagatctattgagtcttaggattagtcataattttatttcttaatttagaatcatgtataaataagcctagttctgtaaaattaataaatttaaacaaaacactacagaagcattagaagaatctctgtctttctctttatttctatatctgcagagatagaacatccaactacattgattacctaaactgctagacagttttgacttactttgtaaatttataattatctttcaaatatatttccttagtctgtctagtaagatcattttctttatacagggtcttattatatattaactaacattattccaacagtcttccactactcttcccattttgtcactttccactttagtccactccata

SEQ ID NO: 565664 - DNA, 605 bp, Homo sapiens
aatttaataatgtgcttatttgaaacactttttcactcgcattatttctgtcatccatgctccataaaacctccctctctcatgccttcagggttggttagacagatactatatagctctccagctgaattttgttgaaacaacaatgcctgtaattaacactcactttccaatctaaaaattcgagtccaacctaaaagtggatcctatattcatttcaaagtgtcttccacaactggaggcctagactaattgtaggtacctacagtgtgaatcaagtatttgcccctcctcctctgccaaagtctatatcaggattcttcaggattggtttgggtggaaaggtagaaaagaaggkcataaatgtcttcttttgagaagtgtctgttcatatcctttgcccattttttgatggggttgtttgatttttttcttgtaaatttgtttaagttctttgtagattctggatgttagccatttgtcagatgggtagattgcaaaaattttctcccactctgcatgttgcctgttcactctgatggtagtctcttttgctgtgcagaagttctttagtttaattagatcccatttgtcaattttgcctt

SEQ ID NO: 565665 - DNA, 580 bp, Homo sapiens
atacagaatctgaaaaacagcctcaaaagggcaaatctaagagttattggccttaaagaggaggtagagaaagagagaagtgtagaaagtttactcaaatggataataacagagaacttctcaaacctraagaaatatattaatattaatactctagtacaagaaggttattgaacaccaaacagatctaacccaaataagaatacctcaaggtatttaataatcaaactcccaaagatcaagaataaagaaaggaccaaaaaagcagcaaagaaaagaaacaaacagcacacaatggagctgcaatatgtttggcagcagacttttcagcagaaaccttacaggagaggagagagtcatgtgacagacatacttaaaagtgctaaaggaaaaaaccttttaccctagaatagtatatccagtgaaattatccctcaaacatgaaggagaaatgaagacttaccaagacaagcaaaagctgggggattttatcagtatcagacctgtcctacaggaaacgttaaagagaatatttcaatccaaaagaaaaaggatgttcatgagcaataagaaatcatct

SEQ ID NO: 565666 - DNA, 455 bp, Homo sapiens
tgcataaattaattagatagattttatcattccacaatgcatatatattttgaaccatgttgtacatagcagatacatataattttaaacatcaatttcaaaattttaataacataaaaaataatgactcaagagttttattcatgtaaaaaaagcatctttctatttttagtttattagcaatttttaaagtagaagtagatataaatttttataaattttgaaatattttctgtgggtatgtaattcattttgctaatattgaaacagtcttccatttcaaaaatacaatcttactaaacatagcttcttattactattaatatactayttttgttttaacctttaaatatttttccatcctatttattttaatttcttttgaaggagtattacccataaattttaattgcacaatttgcctctacatctccccaagtctgttattttttccc

SEQ ID NO: 565667 - DNA, 611 bp, Homo sapiens
gtgttcctttctaatgatttttattagagttatttttaacctcttatttcttctaccacattatactccgtaaatgtgtcttgcatattgtcaaatatgatycacaaatatgcaatgagtattttattttattcatttctcctaaaaacaaaacaaaacaaaacaaaatgggatacatgtgcagaccgtgcaggtttgttacataggtatatgtgtgtcatggtggtttgctgcacctattgacccatcctctaagttccctccccctaccctccaccccccaacaggtcctggtatgtattgttcccctctctgtgtccatgtattctcaatgttcaactcccacttatgagtgacaacatgcggtgtttggttttcttttcctgtgttagtcggctgaggatgatggcttccatcttcatccatgtccctgcaaaggacacgatctcattccttttttatggctgcgtagtattccatggtgtatatgtaccacattttctttatctagtctatcattgatgggcatttgggttggttctatgtttttgctattgtaaatagtgctgcagtaaacatgcatgtgtatttatgtagaattatttatattc

SEQ ID NO: 565668 - DNA, 534 bp, Homo sapiens
aatagctttgtctttacagwttgagtttattcttgcccttcttattcacctaagttaataattttttatttacctgtctttaaaacatgattatacatcaccagtagggactctgtccaattgctttattttttccatagcacttactaccatctgatacactgtataatttacttatttactgtttattgttttgtgtgtcccccatcccagaatgctgaatcctcattacctagaaccatgcataggacatagtagatattcaatcaatatttattaaatgaatgaactagtcatctttaccttaattttatactattaacttaaaaattatatcacatctgggatgtgggtgttttctatttttattaggtagtacagaatcatgatacttatataatagtatattataaaataaaaagatgaaagtagaaccttccatcacgcagttgaagaaatggattattattattattttttgagacggagtctcgctgtgttgcccaggctggagtgcagtggcacagtggcaca

SEQ ID NO: 565669 - DNA, 534 bp, Homo sapiens
aatagctttgtctttacagattgagtttattcttgcccttcttattcacctaagttaataattttttatttacctgtctttaaaacatgattatacatcaccagtagggactctgtccmattgctttattttttccatagcacttactaccatctgatacactgtataatttacttatttactgtttattgttttgtgtgtcccccatcccagaatgctgaatcctcattacctagaaccatgcataggacatagtagatattcaatcaatatttattaaatgaatgaactagtcatctttaccttaattttatactattaacttaaaaattatatcacatctgggatgtgggtgttttctatttttattaggtagtacagaatcatgatacttatataatagtatattataaaataaaaagatgaaagtagaaccttccatcacgcagttgaagaaatggattattattattattttttgagacggagtctcgctgtgttgcccaggctggagtgcagtggcacagtggcaca

SEQ ID NO: 565670 - DNA, 534 bp, Homo sapiens
aatagctttgtctttacagattgagtttattcttgcccttcttattcacctaagttaataattttttatttacctgtctttaaaacatgattatacatcaccagtagggactctgtccaattgctttattttttccatagcacttactaccatctgatacactgtataatttacttatttactgtttattgttttgtgtgtcccccatcccagaatgctgaatcctcattacctagaaccatgcataggacatagtagatattcaatcaatatttattaaatgaatgaactagtcatctttaccttaattttatactattaacttaaaaattatatcacatctgggatgtgggtgttttctatttttattaggtagtacagaatcatgatacttatataatagtatattataaaataaaaagatgaaagtagaaccttccatcacgcagttgaagaaatggattattattattattttttgagayggagtctcgctgtgttgcccaggctggagtgcagtggcacagtggcaca

SEQ ID NO: 565671 - DNA, 600 bp, Homo sapiens
ataacactttttatataaaaatgaaaatagaaacaataaatttgtgaatgggtttgtaacttcaaaatactttgtaaaaatgtatttctaaaattttttcaccttctactctggttaagagttgttgtcggccaggcgtggtggctcatgcctgtaatcccagcactttgaggggccgaggcagacggatcatgaggtcaggagattgggaccatcctggccaacatggtgaaaccccatctctactaaaaatagaaaaattagctgggcgtggttgcacgtgcytgtagtcccagctacttgggaggctgagtcaggagaatcgcttgaactagggagtcagaggttgcaatgtgccaagattgcaccattacactccatcctgggcgacatgatcgataggtttgctctgacaatcatgagataatacatgtaaaatacatggatggacaactccgtctcaaaaaagaagaaaaagattagttgtctgtgattctatacacaatgccaagcctcactatcatgaagggctttggtgacacaagagtgttccaccactgtctacaagattttctttcaagctcctgacagcattcaagt

SEQ ID NO: 565672 - DNA, 600 bp, Homo sapiens
ataacactttttatataaaaatgaaaatagaaacaataaatttgtgaatgggtttgtaacttcaaaatactttgtaaaaatgtatttctaaaattttttcaccttctactctggttaagagttgttgtcggccaggcgtggtggctcatgcctgtaatcccagcactttgaggggccgaggcagacggatcatgaggtcaggagattgggaccatcctggccaacatggtgaaaccccatctctactaaaaatagaaaaattagctgggcgtggttgcacgtgcttgtagtcccagctacttgggaggctgagtcaggagaatcgcttgaactagggagtcagaggttgcaatgwgccaagattgcaccattacactccatcctgggcgacatgatcgataggtttgctctgacaatcatgagataatacatgtaaaatacatggatggacaactccgtctcaaaaaagaagaaaaagattagttgtctgtgattctatacacaatgccaagcctcactatcatgaagggctttggtgacacaagagtgttccaccactgtctacaagattttctttcaagctcctgacagcattcaagt

SEQ ID NO: 565673 - DNA, 568 bp, Homo sapiens
tgattaatctcaatttatttatattaattagtcatttaatataaattaataagtatctattgagagatgctctaagaccttatcagtgttccattccttcataaacatattactcaatgcttttagcactcactaatgccctctgtctaaatcagttattaagttagaagttacaaactctttcactaagttttgatgctggwgctttcttaatcttatcaaaaaaatcaataaaagtatgtagtgaacaatcagtaatcacatatttacaatagtctttaaatggtatatttaccagattattaggaggtttcaattttccagttggccatcaggaataacaatttgtactttcacagtgacaattactgtgtaatataaatttggccaacagagatgataaaattccatcaactacaagatgtattctcagttcagagatagtataatgtgaaaaaaaaagagttcatctcagaatggatgaaatggggcaattctgattttagccaagcagtactagagttgtttttgacagggtcttgttctgccacccagcctggggtgcagc

SEQ ID NO: 565674 - DNA, 568 bp, Homo sapiens
tgattaatctcaatttatttatattaattagtcatttaatataaattaataagtatctattgagagatgctctaagaccttatcagtgttccattccttcataaacatattactcaatgcttttagcactcactaatgccctctgtctaaatcagttattaagttagaagttacaaactctttcactaagttttgatgctggagctttcttaatcttatcaaaaaaatcaataaaagtatgtagtgaacaatcagtaatcacatatttacaatagtctttaaatggtatatttaccagattattaggaggtttcaattttccagttggccatcaggaataacaatttgtactttcacagtgacaattactgtgtaatataaatttggccaacagagatgataaaattccatcaactayaagatgtattctcagttcagagatagtataatgtgaaaaaaaaagagttcatctcagaatggatgaaatggggcaattctgattttagccaagcagtactagagttgtttttgacagggtcttgttctgccacccagcctggggtgcagc

SEQ ID NO: 565675 - DNA, 625 bp, Homo sapiens
aaatctgtgtatttgtttcttttttctttttcttccttccttccttccttccttccttccctctttcctttttttttttttacagagtttcactcttgtctcccaggctggagtgcaatggcacattctcggctcactgcaacctctgcctctcgggttcaagccattctcctgcctcagcctcccgagtagctgggattacaggcacccaccaccacacccggctaattttttttgtctttttagtagagatggggtttcaccttgttggtcaggctggtcttgaactcctgtcttcaggtgatccacctgccttgccctcccaaagtgctgggattacaggcatgagtgaccatgcccagcctgtgtatttgtttctttcctcagatttgggaagtctgggatcaatatttcctcaaataagctctgtgtccctttttttttyccctttccaagactcccataaagtgtatactgtcccataagatcctttggttgtctttggcttttttcattcatatatccttttgcctctctaattcaatgattttatatgacctatcattaagcttgctgattcttctgcctaaccaatctgctgttgtacccttctaataaatttttt

SEQ ID NO: 565676 - DNA, 483 bp, Homo sapiens
aggaattcagaggctgcagtgagctatgataacaccagcctgggtgaaaaaaaaaaaacaagcaaagaagaagaaaaagaaatcttctcctcacctcacattgattccaatagtgatatggtttggctctgtgtccccacccaaatctcatcttgtagctcctgtaattcccatgtgttgtgggagggggcccagkgggagatgattgaatcgtgggggcgggtctttcccatgctgttctcatgatagtgagtgtgtctcaggagatctgatggtttttaaaaacagggtttgcatgcacaagctctttttttttgcctgccaccatccacataagatgtgacttgctcctccttgccttccaccatgtttatgaggcctccccagccatgtggaactgtaagtccaattaaacctctttccctggtaaattgcctggtctccagtatgtctttatcagcagtgtgaaaacagacaaataca

SEQ ID NO: 565677 - DNA, 423 bp, Homo sapiens
gacaatttttctaatatattacatgtacagatgctcctcaacttatggaaaagtggtatcctgataaactcactataagttgaaaatatcataagtggaaaatacgttttatgcacggaacttactgcacatcatagcttagcctagcctgccttagttctcagaacattcacattcgcctagagatgggaaaaatcaagtaacacaaaacctgttttataatacgtgttgaatatctcatgtatttattgaacactgcactgaaactgaaaaacacgatggttgggtgggtatgtgggcacttatagcacggtttctactgaaagggcagcgccttcaccccatcctaaagtcaaaaagccgtcaggtgaagccactgtaagccagaaaccatctgcasatctagtccaccctcagtatcca

SEQ ID NO: 565678 - DNA, 564 bp, Homo sapiens
tgtattattttattaactttgtraacagttctgatcctgattaggattacaaactccctgttacaaaatgtaccctttatgaattatagtgtaagttaaattaatactatttattcctcaaataaccttagaagatgtaatttctgttatcactcactgttattattgttaagcatttttaatctcaattattttagactacagcatgtattattactgttgtacagtgaatatttatttatatttacatatatatttctaatttaccctttttctcactttattcctggatttttgtgtttctctctgggatgattttctttcttcttaagcaattttccttttaatattcatttttgtgtatcttctggcaacaaaatctttcagcttttgcttggggtggaaatgtattctgacttcacttgtgaaggacgttttcttcaggcagaactctaggttgccagttattttcttccagagctttaaggaggcattctgttgtctcccagctcccactgctgctgttgaaatgtcaactattagaatctgtgttcctccattgaa

SEQ ID NO: 565679 - DNA, 564 bp, Homo sapiens
tgtattattttattaactttgtgaacagttctgatcctgattaggattacaaactccctgttayaaaatgtaccctttatgaattatagtgtaagttaaattaatactatttattcctcaaataaccttagaagatgtaatttctgttatcactcactgttattattgttaagcatttttaatctcaattattttagactacagcatgtattattactgttgtacagtgaatatttatttatatttacatatatatttctaatttaccctttttctcactttattcctggatttttgtgtttctctctgggatgattttctttcttcttaagcaattttccttttaatattcatttttgtgtatcttctggcaacaaaatctttcagcttttgcttggggtggaaatgtattctgacttcacttgtgaaggacgttttcttcaggcagaactctaggttgccagttattttcttccagagctttaaggaggcattctgttgtctcccagctcccactgctgctgttgaaatgtcaactattagaatctgtgttcctccattgaa

SEQ ID NO: 565680 - DNA, 564 bp, Homo sapiens
tgtattattttattaactttgtgaacagttctgatcctgattaggattacaaactccctgttacaaaatgtaccctttatgaattatagtgtaagttaaattaatactatttattcctcaaataaccttagaagatgtaatttctgttatcactcactgttattattgttaagcatttttaatctcaattattttagactacagcatgtattattactrttgtacagtgaatatttatttatatttacatatatatttctaatttaccctttttctcactttattcctggatttttgtgtttctctctgggatgattttctttcttcttaagcaattttccttttaatattcatttttgtgtatcttctggcaacaaaatctttcagcttttgcttggggtggaaatgtattctgacttcacttgtgaaggacgttttcttcaggcagaactctaggttgccagttattttcttccagagctttaaggaggcattctgttgtctcccagctcccactgctgctgttgaaatgtcaactattagaatctgtgttcctccattgaa

SEQ ID NO: 565681 - DNA, 600 bp, Homo sapiens
tatgcaaagagactggcagcattttgcccctgccctagagatctgtggaactttgaagttgagatagatgatttagggtatctggcagaataaatttctaagtggcaacgtgttcaagaggaagcagagcataaaagtttgaaatatttgcagcctgatgatgcactagaaaagaaaaacatattttctcgggagagattcaagtcagctgcagacatttgcataagtaacgaggatccatatgttaatcaccaagacaataaggamaatgactccaggtcatgtcagagacctttacagaggcacttcccatcacaggactgggggccaaggaggaaaaaatggtttcctggggcgggcccagggctctcctgctgtgtgcaccctagggacttggtgccctgagtcccagctgctccagccatggctcaaagtgcccgaggtacagctcaggccatggcttcagagggtgcaagcccaggccttggcagcttccacagggtgttgagcctgaagacacacagaagaattgagttttggaaacctccacctagattttggaggatgtatggcaacacctgaatgtccaagcagaagttt

SEQ ID NO: 565682 - DNA, 624 bp, Homo sapiens
cattttgtctcatttttaatttctagggatactgtattatgatcagaaactgtaatatttacattttatggaatgtactgatgttttctatatgccctagtatacgataaatctttgtgaattttccatacatacttaagaaaaaaattttctayttttatggtgtattactcaatatacatctaaaagttctaccttattgtgttgtttgtttagtttttttctattttaatatatattttgttcacttatttgtcttttgcagagagcggtatgttaaatactgtctatattagtgtgcacctatgtatttttctctgcagcttttacagttcttatttaatataggtatttgccacattatttggtatgtggatgcccattactgttgtattttcattcaagattacggtgtttaccattacaaaatattcttttttatcttactaaatgctgcttaaattctattttatgtagtatcagaggcttaacattttctttcttgtctcatttgaattagatctttagtttgtctttcagttatatcatttctaaccactgaatttttagtgttcccttttatatagttttgttttatgagttaatttgaacatattttttctt

SEQ ID NO: 565683 - DNA, 462 bp, Homo sapiens
gattgagaatcagaattttggagttgttagtaattaacaaagtaattatccaagcatttaatttcactggacatgatagcagttgaaatgacgatttcttgttattccttgattctacatttaaaacacattattgtcccattttatttcaaggaggaataaaataggggagagaaatattaagcaaagggaaatgaagaaagaagcttaaaatgaaatgtgagacataatcccaggattatcttcagaaaaattcttaaatcttagtttggttgtgtacaggttaatctatgtaggccctccttctgggattttcttatctgtaatagaaatattgattccactatgacctctgtctctcttggctgttagaactccagatgccaataatgcaggaaaaggcacaaagtaaacawctttgtcaagagccatggatacagcacccgctcactatatggtgaa

SEQ ID NO: 565684 - DNA, 537 bp, Homo sapiens
tcaaacaaagaaaagatgtgtccccagaaaattattcagctcccccaaagcaagcatctttttaggtgggctatttcaaggagctgagtttcatatgctcgtgttaacaatcttagccacattatttaatttaagcataaagctttaagtttttgcattcagaatggaagtgtaaaagtcgtgcaaccaactcaagatgctcacatatccatggcatgttcaatcaacagtgaaatatgacttcaactgttctgcaatatgaaccccaatatttgccatcatagtacctacattttttttattttaaaagtctgagaccctaactactaactttacgtaatagtaacattaagcgcagcaaatctaactagaccaatggtatataactctagtctgtatagtaattgctcttttcaaatcaacttcttctgggtcttgggaggaaatattacattgtattcarcaacttagaaatctgtgaggtattgttttgttttgttttgttttgttttttgtacttgaaattgggttttactt

SEQ ID NO: 565685 - DNA, 561 bp, Homo sapiens
atagtgtgtctagcctatgaagaaagaacaagtaataatcttcattctacagcaatggtaatttccccaagatcattaactcttccaaacctgttttccctggatctcaaattggagcctagagaaggcatttttgctaaaggttagtttgccacaagggctcagatcaatgaaatttttctcagcttgagtttggctgaaaggccggttttgggggtgtgtgggttggtgagagggcaaagtcttagtctatacttataaataaatatatatatattacataaatacattacacacrtatatattaacaaatatatattatttctgtacaatattttacatatatatgtaacttgataaacttttggtatgcatgggagtgggttacctaaaagcatattatacagaattgttctctattaacattggagtattccttctaccagtgtgaggtcatactgtgcacactgctttagagtctctcctttgtactgtgaacacttccaatgacatcaaatatttgtataaataacaattctaaagttgcctaacagatatatc

SEQ ID NO: 565686 - DNA, 561 bp, Homo sapiens
atagtgtgtctagcctatgaagaaagaacaagtaataatcttcattctacagcaatggtaatttccccaagatcattaactcttccaaacctgttttccctggatctcaaattggagcctagagaaggcatttttgctaaaggttagtttgccacaagggctcagatcaatgaaatttttctcagcttgagtttggctgaaaggccggttttgggggtgtgtgggttggtgagagggcaaagtcttagtctatacttataaataaatatatatatattacataaatacattacacacatatatattaacaaatatatattatttctgtacaatattttacatatatatgtaacttgataaacttttggtatgcatgggagtgggttacctaaaagcatattatacagaattgttctctattaacattggagtattcyttctaccagtgtgaggtcatactgtgcacactgctttagagtctctcctttgtactgtgaacacttccaatgacatcaaatatttgtataaataacaattctaaagttgcctaacagatatatc

SEQ ID NO: 565687 - DNA, 528 bp, Homo sapiens
cgtaagttgaggtatgggggaagaagcaaggagcttccatgctttttctgggcatcaccctctaggaacctccctgtgtccaggtatgtggaaatgcccccaaccttgtcctttcggggttttatggaggcttcatgacataggcatgactgattaaaccattggccattggtgctcaacttgaccttcagcccctctcccctcccaggaggttgatgggtgggtctggaagtcccaaccctctaatccttccttggtctttttggtgaccagccccaccttgaagctattagtcaacattagcatgcaaaaagacagcacttagagattcyaaggacattaggagttgtatctcaggcagggggaaagcagaaggaaggtcaaatatatatttcacagcatcacaagtgcatatgatataggagttgaaaagaaattacttagtcagttagtgagggtacagaagtcctcagtaaagttttccttttaatcaaaagtggcccccaaatcattatttttctaacaaag

SEQ ID NO: 565688 - DNA, 528 bp, Homo sapiens
cgtaagttgaggtatgggggaagaagcaaggagcttccatgctttttctgggcatcaccctctaggaacctccctgtgtccaggtatgtggaaatgcccccaaccttgtcctttcggggttttatggaggcttcatgacataggcatgactgattaaaccattggccattggtgctcaacttgaccttcagcccctctcccctcccaggaggttgatgggtgggtctggaagtcccaaccctctaatccttccttggtctttttggtgaccagccccaccttgaagctattagtcaacattagcatgcaaaaagacagcacttagagattccaaggacrttaggagttgtatctcaggcagggggaaagcagaaggaaggtcaaatatatatttcacagcatcacaagtgcatatgatataggagttgaaaagaaattacttagtcagttagtgagggtacagaagtcctcagtaaagttttccttttaatcaaaagtggcccccaaatcattatttttctaacaaag

SEQ ID NO: 565689 - DNA, 510 bp, Homo sapiens
cagctctaaatatatcagggacaagtgaggatttacagccaagggtgggagtcagtaggtgccaaattatgaagaaaaaacctcaggagtacaggggattctgtctgaacttattcagaatcctgcaggcactagagtgctgagatatcacctggggatggtgggggagtgaggacattgctcagaacacacgttgagtgcaggaggttctgkgaggagtgaggaaattgatcagaacacttgttgagggcaggaagttctggctaaactgacttagcaggtttctggctcttggctcttgaggacaaggcccaaggatgagaccttgttgaaaaagtagctcagaggagcctgactagagtttggtcaagaagagaatctttgttgctatttgacccaaggtttatagtcatttgtcccgagtcatttcttcatggtagtctgtgtagctactgaaaatgagttggtttctagtttggccaccaattctcttaactaagcacagcactg

SEQ ID NO: 565690 - DNA, 510 bp, Homo sapiens
cagctctaaatatatcagggacaagtgaggatttacagccaagggtgggagtcagtaggtgccaaattatgaagaaaaaacctcaggagtacaggggattctgtctgaacttattcagaatcctgcaggcactagagtgctgagatatcacctggggatggtgggggagtgaggacattgctcagaacacacgttgagtgcaggaggttctgggrggagtgaggaaattgatcagaacacttgttgagggcaggaagttctggctaaactgacttagcaggtttctggctcttggctcttgaggacaaggcccaaggatgagaccttgttgaaaaagtagctcagaggagcctgactagagtttggtcaagaagagaatctttgttgctatttgacccaaggtttatagtcatttgtcccgagtcatttcttcatggtagtctgtgtagctactgaaaatgagttggtttctagtttggccaccaattctcttaactaagcacagcactg

SEQ ID NO: 565691 - DNA, 510 bp, Homo sapiens
cagctctaaatatatcagggacaagtgaggatttacagccaagggtgggagtcagtaggtgccaaattatgaagaaaaaacctcaggagtacaggggattctgtctgaacttattcagaatcctgcaggcactagagtgctgagatatcacctggggatggtgggggagtgaggacattgctcagaacacacgttgagtgcaggaggttctgggaggagtgaggaaattgatcagaacacttgttgagggcrggaagttctggctaaactgacttagcaggtttctggctcttggctcttgaggacaaggcccaaggatgagaccttgttgaaaaagtagctcagaggagcctgactagagtttggtcaagaagagaatctttgttgctatttgacccaaggtttatagtcatttgtcccgagtcatttcttcatggtagtctgtgtagctactgaaaatgagttggtttctagtttggccaccaattctcttaactaagcacagcactg

SEQ ID NO: 565692 - DNA, 599 bp, Homo sapiens
gacacaaaacctttatttagagcaaataaaatctccctaaatctccactgtaacctgaaaagacaaaagctattatgatatggacaaaactaagctcagcaagaaaatgctgttggtgtgtctactttttctttggtttactttctcattggaaaatgcaatatggttaaacacttttccccacataatctttttctgatgtaatattttgtcttcagccccatgagacttcaagatcttaacataaagttgaaaaccttgagagagttacttgtattcctgtggggtcaatagaaagcctttcctatgggcctttctgagggcaaacatctaacatctgtgggtttccaggacctcatggtgtagtctaaagtcttcccttttttctttttttctttgagacagagtctcgctctgtcaccaggctggcgtgcagtgaggcaatctcgactcactgcaacctccgccacccgagctcaagcgattctcctgtctcagcctcccaagtagctgggactataggcatacgccaaacacrccaggctaatttttgtatttttagtagagacgaggtttcatcatgttggccagggtggtct

SEQ ID NO: 565693 - DNA, 492 bp, Homo sapiens
agattgctcccttactcagcaattctggagccttttttccagcrtaattcagatgtagattatgtcagttcattcacaagtctgagaaaaggaaaaaatgtgcaggttttgacccaaaagcttgaggagagagataggagttacacagtggtctgagattgagggactggggacaaatctagggaagtcttgaggaggtgggagttcagtctgttcagaatgagaagagatatctagggagagaagaaattgtgagaaatttgtacagataaggaaggaaccaatgttcatttataacttgttgaatccatgatctcatggattctttcttctttgcagttctgcttttccagaatcctgccctttccaaaaggaagacagtatgattaagttccaggtaagttaagggtttctttctctttaaatatactgttcattctgaggaaccagcacttctgttttctgaaaggtggtcagcattttttgagtgac

SEQ ID NO: 565694 - DNA, 492 bp, Homo sapiens
agattgctcccttactcagcaattctggagccttttttccagcgtaattcagatgtagattatgtcagttcattcacaagtctgagaaaaggaaaaaatgtgcaggttttgacccaaaagcttgaggagagagataggagttacayagtggtctgagattgagggactggggacaaatctagggaagtcttgaggaggtgggagttcagtctgttcagaatgagaagagatatctagggagagaagaaattgtgagaaatttgtacagataaggaaggaaccaatgttcatttataacttgttgaatccatgatctcatggattctttcttctttgcagttctgcttttccagaatcctgccctttccaaaaggaagacagtatgattaagttccaggtaagttaagggtttctttctctttaaatatactgttcattctgaggaaccagcacttctgttttctgaaaggtggtcagcattttttgagtgac

SEQ ID NO: 565695 - DNA, 586 bp, Homo sapiens
tgagtgactactatgtattaggtacttcatcttgctcatmatgagtttgtgaggcaggtggtttgactccctttatagaagtgaagaaacaaactcacagatttcaagatgtctactttggtgctactctaagtgtggttcgtgtaccagtaccagtccatgaactgcttatcactgccccatgagggaaaaagaatcaagactaagttcagaagcttttatagcaatttggtgttgccgcagcatctgagtgcatgggcagcatatacatgaccatactctaaatgtcactggtctcgttcgataagtaacaagatttgaatgggtatgtattggtcagaattcaaccagcaaggcagaaccagtaagagatatatattaagagatttatcataaggaattgatttatatgattatgggggctaactaggcaagtccaaaatccacagggcagtcctcaggaagggtgggccagaactcttagacacagactgaagcccctgtctatgggtggaatttctccccctcccagggaagcctcagctctgctcataagacccttcagttttttgagtcagacatactc

SEQ ID NO: 565696 - DNA, 475 bp, Homo sapiens
ttccacattactgctaacatactcgagaaatttcacrttgataccactattttttaatacctagttgatatccaagtgttcttaattatgctaataatctcccttttctctattgtgttttttgaatctaggagccaggcttttagttaccctgtcttcttagttccttttaacatgataaaaatagattaatctgccatgaaaaagtgaaaataccaaatcttggtgtgtgatgagaaatgaactcatggaacagtactagacttgtgtatcagcacaacaccttagtatagatttatctgtgcctatttcctgggccatattttataatttgattcatattgtcctttgggaatccctgatccaataggattaatgtccttatgagacagcctcaacagagcttgctctcattctccctctgccatgtaaggacacagtgagaggacagctgtctgcaagccaagagaagaaa

SEQ ID NO: 565697 - DNA, 562 bp, Homo sapiens
tatgtattatttctatacacacatatactacataaaatgggagcctttcccataccttttgtagcaagattattaaagtctttttattgaccactcttatagtggggaggtgaatttcttccttcataaatttttcctaagatttccttttattcttttttgctgtgtgggggtggaaatgtcttgctctgtcacccaggctggaatgcagtggcacaatcttggatcactgcagcctctgcatcccaggattaagcaatcttccaacttcagatttccaagtagctgaaatcataggcaaaacagaaccaattttcaatttttttgtagagatgcgmtctcaccatactgcccagcctggtcttgatctcctgagcttgagtgatcctcccacctcagcctctgaaagtgttgctatgacagccataagccactgcacctggccaagatttctcttaatttccctacaatacttgatttctaattggcagctcacaggttagaattactgtggctctgtttcccatgccaatagaagccagggacaacttcccaccccatc

SEQ ID NO: 565698 - DNA, 511 bp, Homo sapiens
tggtggcatggttggagggtttctgagccaggggccagggccaggtgtcagtcatccctggctgggcttctgtgctggatcctccagaccctctgaaggtagcacccagcccactcaaggtcccatggggggcagtgccctgtggcccgcaacagggctacagctccatgagcagggatgtcactggcatgcttgggctcataattccatgtcacccatgagaaagmcactgtgtcctgtctgcagagcggggattcctgtgggaagagctcaggagagccactagccctctgggcgcacccttgcctgaggatcttatgcagccagaccagaacctgggagagagtgcaggtttggcggggagcgggctgacttcctagagagcagacaggcttcttagagatcctcagagacaattgtggagcctctggaagtgtctgaattctacgctccccacccccgacccctttctgttttctttttcttgaccatttcctttggtgtctgtatt

SEQ ID NO: 565699 - DNA, 546 bp, Homo sapiens
gcttgcttctgacagggaaggtgagtgtaagttttttccagcttctaatatggcagagaacgatcaccagcctgagccttatttccaggtaagtagctgaattagagttttgtcttaaaatttttccttaatgamtaaaatttaagattactcaccagctgcttttaatttctgcttttaatttctccttaccattagaacactcagtaatcatatgaattgtgcatttgttgttttgcttaactctttttgtttgtttatgcttggggttttattattgttgtttcacttttctcccatctcttcctgacttggtcaaattcaaaggaatgttccaaattgtggggagcaaggcctctgaattggctaaaactcctatggctgcaaaaaaacaaacaaataaacaacaacaaaaaacattccagttagcagaaattattttttaaaactttttttttacgtaagtggtctcatctacataaaaaggccattcttttgctagccaaggccaaagtgaaggagtactggtggtgacctaatgtgaag

SEQ ID NO: 565700 - DNA, 546 bp, Homo sapiens
gcttgcttctgacagggaaggtgagtgtaagttttttccagcttctaatatggcagagaacgatcaccagcctgagccttatttccaggtaagtagctgaattagagttttgtcttaaaatttttccttaatgactaaaatttaagattactcaccagctgcttttaatttctgcttttaatttctccttaccattagaacactcagtaatcatatgaattgtgcatttgttgttttgcttaactctttttgtttgtttatgcttggggttttattrttgttgtttcacttttctcccatctcttcctgacttggtcaaattcaaaggaatgttccaaattgtggggagcaaggcctctgaattggctaaaactcctatggctgcaaaaaaacaaacaaataaacaacaacaaaaaacattccagttagcagaaattattttttaaaactttttttttacgtaagtggtctcatctacataaaaaggccattcttttgctagccaaggccaaagtgaaggagtactggtggtgacctaatgtgaag

SEQ ID NO: 565701 - DNA, 613 bp, Homo sapiens
gcggtaatgatgatgatggcggttgaggtggtgatgataatgatagtgtggcaatgttggtgatggtgatgatgatgatggtggtggtgatgatagtggttgaggagttgataatgatggtgtggcaatgttggcgatggtgatgttggtgaaggccatggtgatgatgtcactctcaaargggcaagttctttttttttctcttttattgagttaaaatttacatagcataatattaatcattttaaagttaacaattcagtggtacttaataaagtcacaatgctatgcaaccattgcctctatctagcttcaaaatattttaatttccaaaggaaactccatacccactaaactgtaactcctcattcctcttgcctcccactgtctggcaccactagtcagctttctgtctctttggatagacctattataaatatattatcatttcacatgagtggaatcatacagcattagtccttatgtgtcatgcttctctcatttagcataatgccttcaagattcatccacatcgtaggatgtaagaggacctcattccttttgaaggctgaataatattccattgtatatacagactacattttgtttattc

SEQ ID NO: 565702 - DNA, 543 bp, Homo sapiens
agtggccgcagggcccgatcacaytgaagcaccatgtgccaggagggtgcccgtgaccaggaagatcccggagatatggggggcactgggaggggcgcggagtgcagcacgggacccctggttgaagaggggcgcctcgcctctcctttcatccttcagtcgttgtttcttttttgaggcttcccctcatcttgtctgactgacaggagcgtccacactttgtcctcgccgccgccaccgttcctcagggctgcagcctggtcggaggaccaggaagtgtcctgctcagactggccaggcactaaagtctgcttttccaccacgataggctttgggtttgaagaagctttgtcccagcaactctgggtgcggatgggccaaacaggctgcgggtgtattgggcttctggccccggtcagccaccccagtgtccacagcagatggacgcccagagctgaggggacagagggctgccatcaaactgctggggccacgtctgtaaatcagagcaaaggcaatccctgggcaaggagtaggggctga

SEQ ID NO: 565703 - DNA, 620 bp, Homo sapiens
actactgtactctaacccgggcgacagagtgagaccctgtctcaaaaaaaaaaaaaaaaaaaaagattccacaaaaagataaagcaaatggacagaagtgtataggaaacctttagtaatacccacattaaggtaaattactaccactagggcttcaaatctggtaagtgtttaaaaaaagaaatgcagtaagatatccagtgtcattcaatattattttatttggcataagttttttgatactaaattagtaacaagcaatcattgtcctatgtcctggtgaatcactgttctagaattcagtatctataaaaaatcataatcctcagctttgagattcaaacttcagtttctctccaccatctttagtcatttcaatatataatgtccccttaaccattccattatcaatgtcctctatatagaaaatccagcattccttctgcagtttagagacactgcaatctcttasgctactttgaaatttttaaaagagcatctcttacagctgcaaaagtagtgcttagatgtcccttcgaagtataaagtaaagctccccagagaaaccacaccgcctctggagccagactgcctacttatgatttccggtacgatcttga

SEQ ID NO: 565704 - DNA, 573 bp, Homo sapiens
gcctctgcctcccaaagtgctgggattacaggygtgagccaccgcgcccagcccttttcttcctttaatagttggtctcaattgcctaactataaatctttgttctgtggtattatgtatatcaaactcacttgcttcccccaccaaaagaagtacagctacttaatacctgaaataaaatcctaaccttagctttccatcctttatcatagatagctataactaagagacaagtagagagtgaaactacacccactgtgccagctgcacatctcaggtaaaaccaaaagtgcaaggaacaaaacgccctatgatcattctcgcttttcctgccctactgacagcatgctggagtgatgcagactctacaggtactctctatggtcagcactgatcatatacaagggtgtcaggccttatccagctcctaacaagagccatgtggccacccacagaattcttaggcttacataagtcagtccatggagactgctacaaaattagacagccaatttaaatactgcaagtctcaaatcagatatcctcagagatactcaataaaaagaattaaag

SEQ ID NO: 565705 - DNA, 531 bp, Homo sapiens
tccacctccagactcctctttgtaaaaacccacattcccggttcacacacgagtccctggcacctccatgacatcccatcactctgtcttctttttaattgacagaaggagaccactgccccagcacttgccccctaacaagccattaacctccagttgtttggctggaaaatgggaccttgatcccagagagaactgactttgtgtgaatactcctggtctgtcctccttatgcaggcagcgctgggatcgaagtggagacccccgcagtgggtgaacatcgcagcatccctgggagggttcagcatgtttatcttgggctgaaggttgtaattatgatttaggggaatgccactttataatgactttttcttcgtttcatgtaaattaagttcctagtgtgcgtgggaatgcatatgtcactattcctaaggggagttggagaattcattagttactgtctgggaagtgttctgcaaataaaaagctctccaaaaatgcgargtattattattaggtgccttcaatttg

SEQ ID NO: 565706 - DNA, 619 bp, Homo sapiens
cccgggttcacgccattctcctgcctcagcctcctgagtagctgggactactggcatctgccaccacacccggctaatttttttgtatttttagtagagacggggtttcatcctgttagccaggatggtctagatctcctgacctcatgatccacctgcctcggcctcccaaagtgctgggattacaggcgtgaaccaccatgcccggccaggaggaatcttttgtgtgaatggaactgtcaactcaaatgttcctcagatggcctatttctaaaagcacctaaaaactctcccaggcataatcatttaataatgcaatttatatggcactttgtttgtccttgtacgtttaacccaatgtctatwtgaggaattacgtaaggtacttgattctctctgggacaagagttctgataagggaagcattctggggaccaagcccatcaaagcagaaaccgacttttctaaacctttacctgttcttgctcaataccctttaaagcccgaagctaagaaagcatcaaggcccatgatggaagattttataaacagggactcattcattattccttgcaccagcccttgtagtactccagtgttgctctgtaaaagacctcac

SEQ ID NO: 565707 - DNA, 426 bp, Homo sapiens
cttttttggttccatatgaactttaaagtagttgattactatagctttgtagtaagttttgaaatcagaaagtgtgaatcttccaacttcgttttttcctttcaagattgttttggttgttttsattgtcttgcattgccacatgaattttagtatcagcttgttaatttctgcaaaaagctgagattttgacaggcattgcaataagtctacagataccagtctaggtagtgccaccatcttaacaatattaagtcttctgattcttggacatgagctatcttaacacttaattaactcttctttaatttctttaaaaaatgttatgtggttttcagagcatttgtatacttcttttcctaattttatttctaaatatcttattcttgatgttattataaatggaattgttttaatatcattttt

SEQ ID NO: 565708 - DNA, 638 bp, Homo sapiens
agaaataaaaaataaaaaatttagcctggtacagtggtgtgcacctgcagtcctagtgacttgggaggctgaggagggaggattgcttgagcccaaaagttggaggttacagtgagctatgataatgccagtgcactctagcctgggcaacagagctacatcttgtcttaaaaaagattaaaaagtgttattgtctaagagatgggatgagatcatatattctttttatcattaaaaacttttgttttctaaatttcctatgaggaatatttatttctttataaacagtataaacaactagctttaaaaaatagtgtgtctagcctatgaagaaagaacaagtaataatcttcattctacagcaatggtaatttccccaagatcgttaactcttccaaacctgttttccctggatctcaaattggagcctagagaaggcatttttgctaaaggttagtttgccgcaagggctcagatcaatgaaatttttatcagcttgagtttggctgaaaggctggttttgggggtgtgtgggttggtgagagggcaaagtcttagcctgtactcataaataaataaataaatawatatatatttacataaatacattacacacgtatatattaacaaatatatat

SEQ ID NO: 565709 - DNA, 550 bp, Homo sapiens
tggtgtgatcagaccagaatgagccagagggaagttttaagatacaataaaatattaggctagactattaaagtactttgtcattagaaattatgtctttcggatgaaatctacccaatccttgcttgtacatcttgctaaagttttaacttttccattgatttcattayatttgtcatgtctttcctatcaatttaattttcaattatcttcacttcttatacatactgctatatattatttaatcattctgccttaaattattttgtgtacagttataatacttcagcctagtttactaggaactcattacagttgttcctctgtatttgtggggtactggttctaggaaccctcagacaaaacaatctacagatgctcaagacccttccataaaatgatgtataatagtattttatacacctacatccacactgtcacatactttaaatcatctctagatttcttatgataccaagtacaatgtaaatgctatgtaggtagttatagtgtgttctttaggggataatgacaaggcagaattccatat

SEQ ID NO: 565710 - DNA, 526 bp, Homo sapiens
ctttaaatcatctctagatttcttatgataccaagtacaatgtaaatgytatgtaggtagttatagtgtgttctttaggggataatgacaaggcagaattccatatgtgttcactttttcataaatgtttttccaaatatttttgatccatgggtggttgaatccacacatgcagaacctatggatatggagggtccactgtacttttttctatcctcctaactacatattggtttctatttttgtctttattaaatcttaaattgtagtcatactacaaattcgatcttttctattgtttcatttttttctatttcttgaacagtattctgtttctgtttcaatgcattagtatccacttatttatgtttaccaaaatattatacagtcaaataattcaggaagactttgaaaatttaaagtcaacagatttgtattagcctcaattatatcatctgtaataaatcagattatcctgtcactaggattaaatattaaaatctatttaagacatcttaaagaatat

SEQ ID NO: 565711 - DNA, 526 bp, Homo sapiens
ctttaaatcatctctagatttcttatgataccaagtacaatgtaaatgctatgtaggtagttatagtgtgttctttaggggataatgacaaggcagaattccatatgtgttcactttttcataaatgtttttccaaatatttttgatccatgggtggttgaatccacacatgcagaacctatggatatggagggtccactgtacttttttctatcctcctaactacatattggtttctatttttgtctttattaaatcttaaattgtagtcatactacaaattcgatcttttctattgtttcatttttttctatttcttgaacagtattctgtttctgtttcaatgcattagtatccacttatttatgtttaccaaaatattayacagtcaaataattcaggaagactttgaaaatttaaagtcaacagatttgtattagcctcaattatatcatctgtaataaatcagattatcctgtcactaggattaaatattaaaatctatttaagacatcttaaagaatat

SEQ ID NO: 565712 - DNA, 535 bp, Homo sapiens
agagtgctgattggtgcatttacaaaccttgagctagacacagagcgctgattggtgtgtttacaaaccttgagctagatacagagtgctgattggtgcatttacaatccctcagctagacataaaagttttccaagtccccactacactcaggagcccagctggtttcacccagtggatcccgcactggggccgcaggtggagctgcccgccagtcccgcaccatgcccccgcattcctcagcccttgggtggttgatgagactgggcgctgtggagcagggggcagcgcttgtcagggaggctcgggctgcacaggagcscacggcaggggggaggctcaggcatggcgggctgctggtcccgagccttgccccatggggaggcagctgaggcccaacgagaattcgagtgcaatgctggtgggccagcactgctgggggactggacgcaccctccacagctgctggcctgggtgctaagcccctcactgcctggggctggtggtgccagctggccactccgagtgtggggcc

SEQ ID NO: 565713 - DNA, 564 bp, Homo sapiens
tcctcggcacacctaagtttttatcataaccgtaccttcaatcatcttcattcttcctgacctgatctatttttctcatcgtatttaccaccttcaaacatatggtacacatcctatttactttgggtatcttatattacaatataatctcaaaacagattttgttgattttatttacaagacgtaaccaaagggcctagattatctttatagcatagtatatgttcaaaatttattaccaaataaatataaagtacatttatgaaaggtgaaggagaatataaaacagagggaagatcttcagaactaccacaacaaaatgacacataacttaaatgtcaaaataccaacactgacttcttatcaacagcaataaaaagtaggaaaaaatttggaaaatatcctcaatgagtttagacacacttctatacattagaggtttatraaacacaaaaactccttttataaatgagtcaaaataatgacattttagacaaagaataacagaaaatttatcatccaaaagcaccttctaaagaaatctcaaaagacaaatttcaaagg

SEQ ID NO: 565714 - DNA, 534 bp, Homo sapiens
agtcaccctgtctcagttcacaggccctaattgacagtggtctctactatatgctgtcatacaccaggatacactcccttcctatagacaagacacaagaataagaatagtttatatctctgctacctgtactacgggatgtcttagccttatctattcttggggcaatggcaataacaatgaattaatataaattatgagtgacctcagrgatggggtccctaagattatataaatgtgtccttctgcatctaagaagaaccattgccctatggttatttaggcctccatctgcgttaaagtgataaagtgatgctattcagtcataatacaagctcattaccagtgttgggtcctagcattatccatcattaattgttgagtctaccttaccaagttcactaaaacttcatcattttttccaggttgaatcccatcccttcctctctcatagatgagaattccctctaatctatttattttagttaataaatcttctttccataaaagccattcatgattaaaaatgaattc

SEQ ID NO: 565715 - DNA, 534 bp, Homo sapiens
agtcaccctgtctcagttcacaggccctaattgacagtggtctctactatatgctgtcatacaccaggatacactcccttcctatagacaagacacaagaataagaatagtttatatctctgctacctgtactacgggatgtcttagccttatctattcttggggcaatggcaataacaatgaattaatataaattatgagtgacctcagagatggggtccctaagattatataaatgtgtccttctgcatctaagaagaaccattgccctatggttatttaggcctccatctgcgttaaagtgataaagtgatgctattcagtcataatacaagctcattaccagtgttgggtcctagcattatccatcattaattgttgagtctaccttaccaagttcactaaaacttcatcattttttccaggttgaatcccatcccttcctctctcatagatgagaattccctctaatctatttattttagttaataaatcttctttccrtaaaagccattcatgattaaaaatgaattc

SEQ ID NO: 565716 - DNA, 368 bp, Homo sapiens
aataaatagaacagagatcaaaattagatagatgcagaattggaatgatactgaaaacaagagatggaactgcagaaaatactatggcagatcattcattcctttgaatggtgaaagtagttaatacaatggctaacaattgaaatgaaaaaccagacccagatgaaaaaatgcaaaccagtaaacttacctagtcctattattttactcaattgtaggaaatacatgaaaaaaaagttgttcattatgaatccttttttctracatgggaagaaggcaccactaaaactttctcatttttttactcaaatgtttgtgttttctcatagaacttataattttaatttatttttcaatatatgtttccc

SEQ ID NO: 565717 - DNA, 368 bp, Homo sapiens
aataaatagaacagagatcaaaattagatagatgcagaattggaatgatactgaaaacaagagatggaactgcagaaaatactatggcagatcattcattcctttgaatggtgaaagtagttaatacaatggctaacaattgaaatgaaaaaccagacccagatgaaaaaatgcaaaccagtaaacttacctagtcctattattttactcaattgtaggaaatacatgaaaaaaaagttgttcattatgaatccttttttctgacatgggaagaagkcaccactaaaactttctcatttttttactcaaatgtttgtgttttctcatagaacttataattttaatttatttttcaatatatgtttccc

SEQ ID NO: 565718 - DNA, 557 bp, Homo sapiens
gtcagcgttaaattgattgaaaaaatgaaaaacactgtttcatttttaaatagattaacaattaagcaagttgtttatgttgtcccactgatatactagaatatgctacattcttttgggcatcttttagaccatagggctaaaatgttgagaatgacagagagacaattaggagctcagcacaaagcaaaatgttatgaatcaggaaaataaatagaacagagatcaaaattagatagatgcagaattggaatgatactgaaaacaagagatggaactgcagaaaatactatggcagatcattcattcctttgaatggtgaaagtagttaatacaatggctaacaattgaaatgaaaaaccagacccagatgaaaaaatgcaaaccagtaaacttacctagtcctattattttactcaattgtaggaaatacatgaaaaaaaagttgttcattatgaatccttttttctgacatgggaagaaggcaccactaaamctttctcatttttttactcaaatgtttgtgttttctcatagaacttataattttaatttat

SEQ ID NO: 565719 - DNA, 577 bp, Homo sapiens
tttattaaaatgccctctaaactgcaaggtcaaagaaggtaagtatgatatttggatattaatatctaccacttaatacagaaactattctagcacttgtataggcagtataagacataattttagaactctaaaataaaaactcataaactgaagttaaatatccatttcccactgctatctccttttccttttaacacattgatatcatttggatctgtgtccccacccaaatctcatgtcaaactgtaagtcccactgttggaggtggggcctgttgggaggcaattggatcatcgggcrgtttctcttaaatggtttagcaccatctccttggagctgttcttgtgacagtgagtgagttattgtgagtctggttgttaaaagtgtatagcacctccccacctctcactcttcttcctgcttccagccatgtgaagtgctggctcccccttcaccttctgccatgattgttagcttactgaggcccctgcagaagcccagcagatgcatcatgctttctgtataacgtgcagaaccatgagccaattaaactgcttttctttataaattaccc

SEQ ID NO: 565720 - DNA, 577 bp, Homo sapiens
tttattaaaatgccctctaaactgcaaggtcaaagaaggtaagtatgatatttggatattaatatctaccacttaatacagaaactattctagcacttgtataggcagtataagacataattttagaactctaaaataaaaactcataaactgaagttaaatatccatttcccactgctatctccttttccttttaacacattgatatcatttggatctgtgtccccacccaaatctcatgtcaaactgtaagtcccactgttggaggtggggcctgttgggaggcaattggatcatcgggcagtttctcttaaatggtttagcaccatctccttggagctgttcttgtgacagtgagtgagttattgtgagtctggttgttaaaagtgtatagcacctccccacctctcactcttcttcctgcttccagccatgtgaagtgctggctcccccttcaccttctgccatgattgttagcttactgaggccccygcagaagcccagcagatgcatcatgctttctgtataacgtgcagaaccatgagccaattaaactgcttttctttataaattaccc

SEQ ID NO: 565721 - DNA, 611 bp, Homo sapiens
aatagcaaaaaatattccttggtccaagtaaaatcccatgggctatgtaaaaggatggcagaaattcctctcaagtgtggctatagttacctcagcacccatatgattgacatatatttgtctttttcagacaacaagctgtttttcttagtccttgtcctcacatggatatcctctaacagtccaatccttccattgccaytgtcctgatcagatggctaggcttttggcaatggcccataagtcactgaaaatatagcaagatatgcgacagaggtagcctgcatggccatcaccactgcatttagtttggcccattgggtagaatgcccatgtccagtctcagtcaaaagatagccatccagtggctgaatggtggtccagtgcatgttgtctggcagagctatcagtaaaccatgcctgtcaggcttctgagcccaagctaaaccatcatatcccctgtgacctgcacgtatacatccaggtggcctgaagcaagtgaagaatcacaaaagaagtgaaaatggctggttcctgccttaactgatgacattactttgtgaaattccttctcctggctcagaagctcccccactgagcaccttgtgacc

SEQ ID NO: 565722 - DNA, 603 bp, Homo sapiens
taaacacccacttaaaaggcatggagtggcaaagtggataaagaatcaagacccaactgtatgctgtcttcaagagacccatctcacatgtgagaacacccataggttcaaagtaaagggatggagaaagaactaccaaacaaatgaaaaacaaagaagaacaggtgttgctgttcttattttagataaaactgacattaaactaacgatgatcaaaacagacaattaagggtattacgtaatgatgaaggattcaattaaacaagaagacttaactatcctaaatatatatgcacctaacactggatcactcagattcacaaaacaagctcttagagatatacaaagaaacttacataactacacgatgacagtggcagacctcaacacctcactgacagtgtaagacatatcactgaggcagaaaactaacaaagatattcrggacctaaacttgacacttggccaaatacacctaacagacatctacagaacactccacacatcaacaacagaatatatattcttatcatctgcacatgacacatattctaaaatcaaccacatgctcagctgtaagtcaattctcaacaaataaaaaaa

SEQ ID NO: 565723 - DNA, 591 bp, Homo sapiens
tcatggagacctctgctagggcagaaggaagatgtggggtcagagcacccatgcagggtctccactggggcactgactagtggagctgtgagaagagggccgtcattctccggatcccagaatgatagatccaccaaaagctcacaccactcaccaggaaaagctgcaggcactcaacaccaacctgtgaaagcagccagaagggaggctgtaccctgccaagccataggagtggagcttctcaaagccatgrtatcccatctcttgcatctgtgtgacctggatgtgagacatggagtcaaaggacatcattttgaaactttaaggtttaatgactgctctgttggatttcagacttgcatggggcctatagctcctttgttttggtcaatttctcccatctccaatgggtgtatttacccagtacctgcactcccattgtatctaggaaataactaacttgcttttgatgttacaggctcataggtggaagggacttgccttttctcagatgagattttgaacttgaacttttggggttaatgctgaaatgagttaagactttaggggattcttggaaaggcataattg

SEQ ID NO: 565724 - DNA, 612 bp, Homo sapiens
aactttaaggtttaatgactgctctgttggatttcagacttgcatggggcctatagctcctttgttttggtcaatttctcccatctccaatggrtgtatttacccagtacctgcactcccattgtatctaggaaataactaacttgcttttgatgttacaggctcataggtggaagggacttgccttttctcagatgagattttgaacttgaacttttggggttaatgctgaaatgagttaagactttaggggattcttggaaaggcataattgtgttttgaaatgtgaggacatgagatttgcgaggggccatggacagaataatatagtttggctttgtgtccctacccaaaatctcatcttgaattgtaatgcaaattgtaatccccacatgttgggggaaggacatcgtgggaggtgattagacatggggatcatactgttctcatgataatgagtgagttcttatgagagctgaaggttttataggggctttcccccactttactttgcacttctctctcctgcagccatatcaacaaggacatgtttgctgccccttccaccataagtgtatgtttcctggagcctccccagccatgcagaactgt

SEQ ID NO: 565725 - DNA, 591 bp, Homo sapiens
tcatggagacctctgctagggcagaaggaagatgtggggtcagagcacccatgcagggtctccactggggcactgactagtggagctgtgagaagagggccgtcattctccggatcccagaatgatagatccaccaaaagctcacaccactcaccaggaaaagctgcaggcactcaacaccaacctgtgaaagcagccagaagggaggctgtaccctgccaagccataggagtggagcttctcaaagccatgatatcccatctcttgcatctgtgtgacctggatgtgagacatggagtcaaaggacatcattttgaaactttaaggtttaatgactgctctgttggatttcagacttgcatggggcctatagctcctttgttttggtcaatttctcccatctccaatgggtgtatttacccagtacctgcactcccattgtatctaggaaataactaacttgcttttgatgttacaggctcataggtggaagggacttrccttttctcagatgagattttgaacttgaacttttggggttaatgctgaaatgagttaagactttaggggattcttggaaaggcataattg

SEQ ID NO: 565726 - DNA, 612 bp, Homo sapiens
aactttaaggtttaatgactgctctgttggatttcagacttgcatggggcctatagctcctttgttttggtcaatttctcccatctccaatgggtgtatttacccagtacctgcactcccattgtatctaggaaataactaacttgcttttgatgttacaggctcataggtggaagggacttgccttttctcagatgagattttgaacttgaacttttggggttaatgctgaaatgagttaagactttaggggattcttggaaaggcataattgtgttttgaaatgtgaggacatgagatttgcgaggggccatggacagaataatatagtttggctttgtgtccctacccaaaatctcatcttgaattgtaatgcaaattgtaatccccacatgttgggggaaggacatcrtgggaggtgattagacatggggatcatactgttctcatgataatgagtgagttcttatgagagctgaaggttttataggggctttcccccactttactttgcacttctctctcctgcagccatatcaacaaggacatgtttgctgccccttccaccataagtgtatgtttcctggagcctccccagccatgcagaactgt

SEQ ID NO: 565727 - DNA, 406 bp, Homo sapiens
tcatactgttctcatgataatgagtgagttcttatgagagctgaaggttttataggggctttcccccactttactttgcacttctctctcctgcagccatatcaacaaggacatgtttgctgccccttccaccataagtgtatgtttcctggagcctccccagccatgcagaactgtgagtcaattaaaactattttgattctaaattacccagtctcagtcagttctttatagcagcatgagaacagactaatacagtgacccacccctttatatttgtttaactgagttgattcaatgaatccatctcacagctctaagtttttttcctcagtttagtcccttctgytgttaatacttccagttaaacaatgaaatgctcatagtgagtttctcagctcttaga

SEQ ID NO: 565728 - DNA, 592 bp, Homo sapiens
gtggagggacaagggtcagtaatcgtttgctttaaacatactctgatatttcaggcctttaaaacaatagcacaggttttaggaagtggatttccaagaaaacttcccatttttgcctgacatttctactactgccttctcacttatycaccattgagtttcttctggatcaaacaaccttctcgaaaaatatcagatactttagccctaattaattctcacacttttttttttgagacagagtcttgctctgttgcccaggctggagtgtgttggcatgagcttggcttgccacaacctctacttcctgggttcaagctattctcctgcctcagcctcccaagtagctgggactataggcatgcaccaccatgcccagcaaatttttgtatttttagtagacatgtggtttcactatgttggccaggctggtctcaaacttctgacctcgtgatacacccatctcagcctcccaaggtgatttttgatcaagtagttccttacatacttaccattttcttcctttaagaagattttataaaatatttatatatctattaatattatttgcctttacctgacagaagtagat

SEQ ID NO: 565729 - DNA, 404 bp, Homo sapiens
gagtcagtgagtgagtggtgagaaaaagcaaagtctttagacattactgaacactactgtagacttaataaacactgtacacttaggctacattacatttctaaaaactattttttctctaataataaaataaccttagcttactgtatcttttttactttataatttttttgactcttgcaataaygcttagtttaaaacacaaacacattgaacatctgtacaaaaaatattttctttctttatgcccttattatataagcttttttctacaatggaacagaacagagccctcagaaataatgctgcatatttacaactatctgatctttgacaaacctgagaaaaacaagaaatggggaaaggattctctatttaataaatggtgctgggaaaactggcta

SEQ ID NO: 565730 - DNA, 603 bp, Homo sapiens
agaccagatcctcacataacttccaagagaactgaaaccaggacagggatgcaacacactcaactgttcactctccagaacgattttcagcatttcaggtggaactgaaatctctcggactctgaggcctgctctcttgtaacctctaacttaagtgctaaaaggtatactaaatgcattttcagttttgttgctatatttgcaagtktctgaaactctgcctatagttcataattgtagataaagaagtaaaaaaaagaaagcatttgttctgttgaaggtaaaatatgcccacatgtcatatgcaaaatgacattgatgtgagagccatttcctctcatttacataagacaaagttccttccatgccaaacttctctagaaacaatatctggaaaagcacaggtgaaggagaggtatgacagaagaatcccaaactggatactgaacgcagaacttgttgcccttgtctagcaagttcagattgccataaggaagtcaccatgagtggtaggttaaatggccattgctacattaaactttctcttaatatcacttcaaacatttaaaaatatatattagaagaaatgctaccattttcaat

SEQ ID NO: 565731 - DNA, 568 bp, Homo sapiens
gggctatacactaacctttacactcaaatgcagtaagttgtgttagctgtattgttgagcccagggcttggggacacggttacaaagcacagacacttgtgggttttgatcatatgcatctggaaaaatacaatcacttatttgggtaracaagtattatttgtgtgttttccttttataaacacttatcaaatgcctactctttgctattgtgttggttttggtgatagaaaccatatggtcccatcttcaaagagttttcagtctaggaggggaggcagcttcacgaacagtgattgccgcagaatgtggtcagtgcatcgtcacgcatccaggcacaaccacggcgtgatgcggggagcggggagccatgaagtcggacaaaagcatggaaagaaagatcttcgaaaaggagggggcctgcaaaagaactgaaacatgaagagccgttgaaacaaaactgacaggcaatatggtcaagttcctgatgacccaaatgatcactcattcaggcagtttggctcaccaagaacagacctgggggtggcctgggagcaggtatcagact

SEQ ID NO: 565732 - DNA, 568 bp, Homo sapiens
gggctatacactaacctttacactcaaatgcagtaagttgtgttagctgtattgttgagcccagggcttggggacacggttacaaagcacagacacttgtgggttttgatcatatgcatctggaaaaatacaatcacttatttgggtagacaagtattatttgtgtgttttccttttataaacacttatcaaatgcctactctttgctattgtgttggttttggtgatagaaaccatatggtcccatcttcaaagagttttcagtctaggaggggaggcagcttcacgaacagtgattgccgcagaatgtggtcagtgcatcgtcacgcatccaggcacaaccacggcgtgatgcggggagcgrggagccatgaagtcggacaaaagcatggaaagaaagatcttcgaaaaggagggggcctgcaaaagaactgaaacatgaagagccgttgaaacaaaactgacaggcaatatggtcaagttcctgatgacccaaatgatcactcattcaggcagtttggctcaccaagaacagacctgggggtggcctgggagcaggtatcagact

SEQ ID NO: 565733 - DNA, 568 bp, Homo sapiens
gggctatacactaacctttacactcaaatgcagtaagttgtgttagctgtattgttgagcccagggcttggggacacggttacaaagcacagacacttgtgggttttgatcatatgcatctggaaaaatacaatcacttatttgggtagacaagtattatttgtgtgttttccttttataaacacttatcaaatgcctactctttgctattgtgttggttttggtgatagaaaccatatggtcccatcttcaaagagttttcagtctaggaggggaggcagcttcacgaacagtgattgccgcagaatgtggtcagtgcatcgtcacgcatccaggcacaaccacggcgtgatgcggggagcggggagccatgaagtcggrcaaaagcatggaaagaaagatcttcgaaaaggagggggcctgcaaaagaactgaaacatgaagagccgttgaaacaaaactgacaggcaatatggtcaagttcctgatgacccaaatgatcactcattcaggcagtttggctcaccaagaacagacctgggggtggcctgggagcaggtatcagact

SEQ ID NO: 565734 - DNA, 587 bp, Homo sapiens
tctaataggtaaaaaacatataaagtaaaaaagtaaaagtctttgtttcttttagtcttttaatttttaagtcacttggtattgagcaagtacaatcacctcagtattcatatgtttgggggactaataaaaataaatttctatgtatttaaaaacatagctcragaactccaacatggcttagggggctttgctgaatcagaagagttcaaagcagttgatatgaccgtaaaatattgaaagccacaaatctagagtcttttctaatattccacattaaatcacctacttcaagtgacaagtgaaatgtgtttgtaataggtttttctttaagcgccaattgaagtgatctatactcaaaattaagaacaaatctatttagaaaacattctgtgatttatataatttttgctgcagtacgggcagtttggccaattcactgaatcttcctggacttcggtttcctgacctgtatgattggcttagtaatagtaatacttgcctcacagtgtggatgtgaagattcagggacacgaagcctggagggagggagactgggacatagagtttagggaggggcaaagcct

SEQ ID NO: 565735 - DNA, 587 bp, Homo sapiens
tctaataggtaaaaaacatataaagtaaaaaagtaaaagtctttgtttcttttagtcttttaatttttaagtcacttggtattgagcaagtacaatcacctcagtattcatatgtttgggggactaataaaaataaatttctatgtatttaaaaacatagctcgagaactccaacatggcttagggggctttgctgaatcagaagagttcaaagcagttgatatgaccgtaaaatattgaaagccacaaatctagagtcttttctaatattccacattaaatcacctacttcaagtgacaagtgaaatgtgtttgtaataggtttttctttargcgccaattgaagtgatctatactcaaaattaagaacaaatctatttagaaaacattctgtgatttatataatttttgctgcagtacgggcagtttggccaattcactgaatcttcctggacttcggtttcctgacctgtatgattggcttagtaatagtaatacttgcctcacagtgtggatgtgaagattcagggacacgaagcctggagggagggagactgggacatagagtttagggaggggcaaagcct

SEQ ID NO: 565736 - DNA, 597 bp, Homo sapiens
ctgggaggtcttgctctgagctccagggcaggastggtgggaggccaggctggtagaggcagtaggtgatgacatccagggtgggactatatagcctttcttaaaagcccctcagaggaaaaccactcaacagtgcaggagagatccacggctgaaaccctcagaccaagaaccactgctacctatgtgcccaggccaggtaccgaggccaagaatttcaagaatattcaggcctaggactgaaagaggcagtggaggctgctgtttgtttgaaggcattctgacgctcagtcacacgtgtgaaactgtcctggggtatccagggcacttggactgtgcacacaaagaggattctgcttctaaacattttcttcccattaaaaaacagactgatggcccagtgtggtggcccacgcctataatcccagcacttcaggaggccgaggtgggtggatcagttgaggtcaggagtttgaaaccagcctggccaacatggtgaaaccccatctctactaaaaatacaaaaaaattagccaggcatagtggtgcacgcctgtaatcccagctactggggaggctgaggcaggagaattcctt

SEQ ID NO: 565737 - DNA, 494 bp, Homo sapiens
ggcagccaacctctgcccgccctggttcaggccccgactggcccctgtggtgggtgatgtctatcttcctggcctttgtgctcccagccaactgggatggagcctccagctggcatgacatgttgtagctacggacagaagagtggctgtgaggctgccaggaatctcaccagggccccctcccagggcctgtccagagtgaggtctgggtaccccaggcattgccagaccacaggatctgatgttggccaagaggcatggccacaggctttctgaggctggcccccagggagagttcaatcctactatcccaattcctgtcctggccttacctctcagtctcaccgagccgcttcgtggtcccaaaccaggacccaaagtgctgcttgggctcaaggttgkaattatttgcagtcaactggagcagtggacctccttgcttactttgaattcctgggtccagagggaaaaactgggtggtgacagggaatgga

SEQ ID NO: 565738 - DNA, 391 bp, Homo sapiens
gagatcattgcactccagtctgggcaacaagagcaaaacttcatctcaaaaaaaaaaaaaaacacacaaagacatttgcaaggaccatgtcctcacccagaatggtgcctgcctttctacagtttttcaggaagasgaaacattttctgcttctctcgctgaggttttctttaaccacccattaggaacctatagatttcaggatggaacactgggattccctcagcactaaaggaggaaaattgcaaacagagctgaaagtgcaatgtgcaaaggtcaggctgaggaaggttcttagccagtagaccaagggcaggaaggacactgcctcctcagtctcccactttgtgattcttgtcccctgacctcagaattccttgtcatgtttgtt

SEQ ID NO: 565739 - DNA, 391 bp, Homo sapiens
gagatcattgcactccagtctgggcaacaagagcaaaacttcatctcaaaaaaaaaaaaaaacacacaaagacatttgcaaggaccatgtcctcacccagaatggtgcctgcctttctacagtttttcaggaagacgaaacattttctgcttctctcgctgaggttttytttaaccacccattaggaacctatagatttcaggatggaacactgggattccctcagcactaaaggaggaaaattgcaaacagagctgaaagtgcaatgtgcaaaggtcaggctgaggaaggttcttagccagtagaccaagggcaggaaggacactgcctcctcagtctcccactttgtgattcttgtcccctgacctcagaattccttgtcatgtttgtt

SEQ ID NO: 565740 - DNA, 524 bp, Homo sapiens
cctgcctttctacagtttttcaggaagacgaaacattttctgcttctctcgctgaggttttctttaaccacccattaggaacctatagatttcaggatggaacactgggattccctcagcactaaaggaggaaaattgcaaacagagctgaaagtgcaatgtgcaaaggtcaggctgaggaaggttcttagccagtagaccaagggcaggaaggacactgcctcctcagtctcccactttgtgattcttgtcccctgacctcagaattccttgtcatgtttgttttgtctccaagggaagggtttgaattacagaatttaaggctagartgggcctcgtgcagttaacattaaccctctctctccttcgctggccgaggtgaagtccaggaacatgtagttctgatgtccactctctcgggggatcaccagttcacccatctcacccggcaagctgggccctagtttggcgacaggcatcttccacccacctgggaggcagggttcaatactctgcctcagacc

SEQ ID NO: 565741 - DNA, 524 bp, Homo sapiens
cctgcctttctacagtttttcaggaagacgaaacattttctgcttctctcgctgaggttttctttaaccacccattaggaacctatagatttcaggatggaacactgggattccctcagcactaaaggaggaaaattgcaaacagagctgaaagtgcaatgtgcaaaggtcaggctgaggaaggttcttagccagtagaccaagggcaggaaggacactgcctcctcagtctcccactttgtgattcttgtcccctgacctcagaattccttgtcatgtttgttttgtctccaagggaagggtttgaattacagaatttaaggctagaatgggcctcgtgcagttaacattaaccctctctctccttcgctggccgaggtgaagtccaggaacatgtagttctgaygtccactctctcgggggatcaccagttcacccatctcacccggcaagctgggccctagtttggcgacaggcatcttccacccacctgggaggcagggttcaatactctgcctcagacc

SEQ ID NO: 565742 - DNA, 564 bp, Homo sapiens
atgtccactctctcgggggatcaccagttcacccatctcacccggcaagctgggccctagtttggcgacaggcatcttccacccacctgggaggcagggttcaatactctgcctcagaccttgtttccttcttctgccatctgcttaggcagccagaaggggttgtccagccagcacctgggctttggcgctcaagaaggtggaggaagtttcaggcacctgrctcctcaggtgtctgccatccaggtgctcttcaggcctgcccagaagagctctcttgatccagctagaactggccagaactgactcactcaggaatgtgtagactttgacatcaggggctgctttaatttgcacaatttccaaatacctcttttttcttctttttctgatgagtcatctccctagacttgcattttaaagagatagatagttatcagattccagagaagacatggtagaacatttatatgtcaaagacacagagctgagactttagttttagatactataatttgcctaaaccaaaaaggaaggtgtaggtaaagttctagtcaagacagg

SEQ ID NO: 565743 - DNA, 564 bp, Homo sapiens
atgtccactctctcgggggatcaccagttcacccatctcacccggcaagctgggccctagtttggcgacaggcatcttccacccacctgggaggcagggttcaatactctgcctcagaccttgtttccttcttctgccatctgcttaggcagccagaaggggttgtccagccagcacctgggctttggcgctcaagaaggtggaggaagtttcaggcacctggctcctcaggtgtctgccatccaggtgctcttcaggcctgcccagaagagctctcttgatccagctagaactggccagaactgactcactcaggaatgtgtagactttgacatcaggggctgctttaatttgcacaatttccaaatacctcttttttcttctttttctgatgagtcatctccctagacttgcattttaaagagatagatagttatcagattccagagaagacatggtagaacatttatatgtcaaagacacagagctgagactttagttttagatacyataatttgcctaaaccaaaaaggaaggtgtaggtaaagttctagtcaagacagg

SEQ ID NO: 565744 - DNA, 464 bp, Homo sapiens
accatgcctggctaattttgtgtttttagtagagacatggttttgccatgttgaccaggctggtcttgaactcctgacctgaggtaatccacccatcttggcctcccaaagtgctgggtatgggcaagagccaccatacctggcctcagaagcagtttttaaaagcaaacacartataacaccaaagttgaaaaatctatgctcacccaaggatgccaggtttaataaattatttatagaatactgcatcaaaaataagacaataacccaaaatataccattaaagatgtatccactcctacaactggagataattaatctatctagtagcaaatgatacttcaatcagtttcagcatgtctgaaatctttaaggacaaaagtgataaaacatgacttcattcttcattagactcttagaacacttgaaggaaaataatttctgaagcacaaagaagtaaagag

SEQ ID NO: 565745 - DNA, 464 bp, Homo sapiens
accatgcctggctaattttgtgtttttagtagagacatggttttgccatgttgaccaggctggtcttgaactcctgacctgaggtaatccacccatcttggcctcccaaagtgctgggtatgggcaagagccaccatacctggcctcagaagcagtttttaaaagcaaacacaatataacaccaaagttgaaaaatctatgctcacccaaggatgccaggtttaataaattatttatagaatactgcatcaaaaataagayaataacccaaaatataccattaaagatgtatccactcctacaactggagataattaatctatctagtagcaaatgatacttcaatcagtttcagcatgtctgaaatctttaaggacaaaagtgataaaacatgacttcattcttcattagactcttagaacacttgaaggaaaataatttctgaagcacaaagaagtaaagag

SEQ ID NO: 565746 - DNA, 464 bp, Homo sapiens
accatgcctggctaattttgtgtttttagtagagacatggttttgccatgttgaccaggctggtcttgaactcctgacctgaggtaatccacccatcttggcctcccaaagtgctgggtatgggcaagagccaccatacctggcctcagaagcagtttttaaaagcaaacacaatataacaccaaagttgaaaaatctatgctcacccaaggatgccaggtttaataaattatttatagaatactgcatcaaaaataagacaataacccaaaatataccattaaagatgtatccactcctacaactrgagataattaatctatctagtagcaaatgatacttcaatcagtttcagcatgtctgaaatctttaaggacaaaagtgataaaacatgacttcattcttcattagactcttagaacacttgaaggaaaataatttctgaagcacaaagaagtaaagag

SEQ ID NO: 565747 - DNA, 610 bp, Homo sapiens
caggcatcgtggtatgcacctgtagtcctagctacttgggaggctgagacaggagaatcgcttgaacctgggaggtggaggtygcagtgaaccgagatcatgccacctcactccagcatcagtaacagaatgagattccatctcaaaaaaagaaaagagtgtaatatcggtatacacagataatatactgaatgaaacaaatagaataatttgaagaggtgtcttgatgaacaaggagtcattagaaaggttgtattcatgtctttgaaggaaattgcaatgtgagaaattaatactttgactactatactaaaagtttattgctaacatgtattgagttattaacgtgtgttaggcagagtaccatataatttacaagtgttatctcatttattgtaggtaaaatgtaatttcgaactctgggagtataaatgaattagatagaataaaattctatttaaatggccatcagtaaatcggtatctaggaacagggtgatacggtgcccaagttttctattcttactaaatgttgtgtttcattttcaatgttttcttggatattgctcttttttggtgattttgattttttttattttagaaaactaata

SEQ ID NO: 565748 - DNA, 610 bp, Homo sapiens
caggcatcgtggtatgcacctgtagtcctagctacttgggaggctgagacaggagaatcgcttgaacctgggaggtggaggttgcagtgaaccgagatcatgccacctcactccagcatcagtaacagaatgagattccatctcaaaaaaagaaaagagtgtaatatcggtatacacagrtaatatactgaatgaaacaaatagaataatttgaagaggtgtcttgatgaacaaggagtcattagaaaggttgtattcatgtctttgaaggaaattgcaatgtgagaaattaatactttgactactatactaaaagtttattgctaacatgtattgagttattaacgtgtgttaggcagagtaccatataatttacaagtgttatctcatttattgtaggtaaaatgtaatttcgaactctgggagtataaatgaattagatagaataaaattctatttaaatggccatcagtaaatcggtatctaggaacagggtgatacggtgcccaagttttctattcttactaaatgttgtgtttcattttcaatgttttcttggatattgctcttttttggtgattttgattttttttattttagaaaactaata

SEQ ID NO: 565749 - DNA, 610 bp, Homo sapiens
caggcatcgtggtatgcacctgtagtcctagctacttgggaggctgagacaggagaatcgcttgaacctgggaggtggaggttgcagtgaaccgagatcatgccacctcactccagcatcagtaacagaatgagattccatctcaaaaaaagaaaagagtgtaatatcggtatacacagataatatactgaatgaaacaaatagaataatttgaagaggtrtcttgatgaacaaggagtcattagaaaggttgtattcatgtctttgaaggaaattgcaatgtgagaaattaatactttgactactatactaaaagtttattgctaacatgtattgagttattaacgtgtgttaggcagagtaccatataatttacaagtgttatctcatttattgtaggtaaaatgtaatttcgaactctgggagtataaatgaattagatagaataaaattctatttaaatggccatcagtaaatcggtatctaggaacagggtgatacggtgcccaagttttctattcttactaaatgttgtgtttcattttcaatgttttcttggatattgctcttttttggtgattttgattttttttattttagaaaactaata

SEQ ID NO: 565750 - DNA, 610 bp, Homo sapiens
caggcatcgtggtatgcacctgtagtcctagctacttgggaggctgagacaggagaatcgcttgaacctgggaggtggaggttgcagtgaaccgagatcatgccacctcactccagcatcagtaacagaatgagattccatctcaaaaaaagaaaagagtgtaatatcggtatacacagataatatactgaatgaaacaaatagaataatttgaagaggtgtcttgatgaacaaggagtcattagaaaggttgtattcatgtctttgaaggaaattgcaatgtgagaaattaatactttgactactatactaaaagtttattgctaacatgtattgagttattaacgtgtgttaggcagagtaccatataatttacaagtgttatctcatttattgtaggtaaaatgtaatttcgaactctgggagtataaatgaattagatagaataaaattctatttaaatggccatcagtaaatcggtatctaggaacagggtgatacrgtgcccaagttttctattcttactaaatgttgtgtttcattttcaatgttttcttggatattgctcttttttggtgattttgattttttttattttagaaaactaata

SEQ ID NO: 565751 - DNA, 596 bp, Homo sapiens
gaatattcaaaatcttttattttagttatttgaaaacacacaataaattcccgttaactacagtcacccaacagtgctgtagagaactagaacttcttccttctctccagctgtaattttgtatgtattaaccacatttttcttatactcttctttctcctactctttccaggatatggtaaccaaaactctactatctacttctacgagattaaaaattttagcttccatacataagtgagaacacgtagttatgtggtgtttatgtttctatgccaggyttatttcacctaacataatgccctccacttgcattcttgttgccacaaataacaggattttgttctttattatgactaaatagtattccattatatatgtatgtcacatttctttatccattcatctgttgatggacacttttgttgattccatatcttggctattgtgaatagtgctgtaataaacatcggggtgcaggtaagtctttgatatactggttttctttcctttggatatatactgaaaaccatatgattaaattaataaacacaataaaagcgtttggcaaaattaaatattcttacatgacaaaa

SEQ ID NO: 565752 - DNA, 532 bp, Homo sapiens
catgaccccctccttgggttaggcctctgatcagtgatgaccttggtatggtggtgatggtcagtcttggcatcaaatgagccagtttatatcatcagctattcaataaaatactaatctaggtgtcaccktgaaagtattttgtgacattgttatgtatgtgttgttacaaatgtgcatgatgcatttactacagcatagaattttgcctgggtgccagcctgaagtctgtccgacagatcatagccatgttagtcccacagtcacaggggccaattgattaaattattttatctcccttgaaaactaaaaataaaatcctaagccccccacccgacttaacagaccccctgttggccaacggaacctcaaataaatcttaaaattcagttcttggccatgacaggacaggaggtcagacatacctccctgtacctccctccctcttatggtttagaccccacaactgaacagcattaatgttaaaatagagatcatgagactgacagaacagactctttgtggcaataag

SEQ ID NO: 565753 - DNA, 532 bp, Homo sapiens
catgaccccctccttgggttaggcctctgatcagtgatgaccttggtatggtggtgatggtcagtcttggcatcaaatgagccagtttatatcatcagctattcaataaaatactaatctaggtgtcaccttgaaagtattttgtgacattgttatgtaygtgttgttacaaatgtgcatgatgcatttactacagcatagaattttgcctgggtgccagcctgaagtctgtccgacagatcatagccatgttagtcccacagtcacaggggccaattgattaaattattttatctcccttgaaaactaaaaataaaatcctaagccccccacccgacttaacagaccccctgttggccaacggaacctcaaataaatcttaaaattcagttcttggccatgacaggacaggaggtcagacatacctccctgtacctccctccctcttatggtttagaccccacaactgaacagcattaatgttaaaatagagatcatgagactgacagaacagactctttgtggcaataag

SEQ ID NO: 565754 - DNA, 610 bp, Homo sapiens
tttcatgtcatcatttcatcacatctcatctcatcatttcatctcatcatttcatcatttcatctcatttcaactcattgcatctcatctcatttccatttcattattccatttcatcatttcattatgtcatttcacctcatcatatttcatctcatttcatctcatctcatcatttcatctcatcatttcatctcattttatctcatctcatctcatcatttcttctcatctcatcatttccatttcattttcatttcattatttcatcatttcattatttcatttcatctcatttcattattkcatctcattatgtcatttcatttcatctcattacatttcatctcatttcatctcatcatttcatccatcatttcatttaatttcatcatttcatctcatgatttcatctcatctcatcatctcatttcatctcattatttcatctcatttcatctcatctcatttcatcatttcatttcatcattacatctcatcatttcaactcatctcatttcaatttcatttcaatttcattacatttcataatttcctttcattatttcatttcatttcatctcatttcattatttcatttcatctcatt

SEQ ID NO: 565755 - DNA, 610 bp, Homo sapiens
tttcatgtcatcatttcatcacatctcatctcatcatttcatctcatcatttcatcatttcatctcatttcaactcattgcatctcatctcatttccatttcattattccatttcatcatttcattatgtcatttcacctcatcatatttcatctcatttcatctcatctcatcatttcatctcatcatttcatctcattttatctcatctcatctcatcatttcttctcatctcatcatttccatttcattttcatttcattatttcatcatttcattatttcatttcatctcatttcattatttcatytcattatgtcatttcatttcatctcattacatttcatctcatttcatctcatcatttcatccatcatttcatttaatttcatcatttcatctcatgatttcatctcatctcatcatctcatttcatctcattatttcatctcatttcatctcatctcatttcatcatttcatttcatcattacatctcatcatttcaactcatctcatttcaatttcatttcaatttcattacatttcataatttcctttcattatttcatttcatttcatctcatttcattatttcatttcatctcatt

SEQ ID NO: 565756 - DNA, 610 bp, Homo sapiens
tttcatgtcatcatttcatcacatctcatctcatcatttcatctcatcatttcatcatttcatctcatttcaactcattgcatctcatctcatttccatttcattattccatttcatcatttcattatgtcatttcacctcatcatatttcatctcatttcatctcatctcatcatttcatctcatcatttcatctcattttatctcatctcatctcatcatttcttctcatctcatcatttccatttcattttcatttcattatttcatcatttcattatttcatttcatctcatttcattatttcatctcattatgtcatttcatttcatctcattacatttcatctcatttcatctcatcatttcatccatcatttcatttaatttcatcatttcatctcatgatttcatctcatctcatcatctcatttcatctcatyatttcatctcatttcatctcatctcatttcatcatttcatttcatcattacatctcatcatttcaactcatctcatttcaatttcatttcaatttcattacatttcataatttcctttcattatttcatttcatttcatctcatttcattatttcatttcatctcatt

SEQ ID NO: 565757 - DNA, 518 bp, Homo sapiens
ggaggctgtgcctgtacagaggctgagtaccttcatgtccctgcttcactttttgatgtgtagggcctaattataatacatttaaatgtcaagtctccaccccagaatgaacatgcatgtttatkgaatatgcatgcattaggacctcttttatgagtattctcataaaatgatatagctcctctgatatcctattgagtatgtatatgtagccaattcatttggctcaaattcctgtcctctcccctccctggaaatgcctgcctctggccttggctgtaggccacacttcccagcctgtcataatggccaccttgcagactgcaaacctatataagaaataaagctctcttttctaaatttataaaattgtgtgattttttagttgatgctctctttctacacacacacacacacacacacacacgcaatttatacagaaggaaatctggagaatatatgtgggaatggatattaagtgtgtggcaccatggtggaagtaacataaagttggatta

SEQ ID NO: 565758 - DNA, 518 bp, Homo sapiens
ggaggctgtgcctgtacagaggctgagtaccttcatgtccctgcttcactttttgatgtgtagggcctaattataatacatttaaatgtcaagtctccaccccagaatgaacatgcatgtttatggaatatgcatgcattaggacctcttttatgagtattctcataaaatgatatagctcctctgatatcctattgagtatgtatatgtagccaaytcatttggctcaaattcctgtcctctcccctccctggaaatgcctgcctctggccttggctgtaggccacacttcccagcctgtcataatggccaccttgcagactgcaaacctatataagaaataaagctctcttttctaaatttataaaattgtgtgattttttagttgatgctctctttctacacacacacacacacacacacacacgcaatttatacagaaggaaatctggagaatatatgtgggaatggatattaagtgtgtggcaccatggtggaagtaacataaagttggatta

SEQ ID NO: 565759 - DNA, 487 bp, Homo sapiens
agcaggcccggcacccaggtcagggctccaggggaggccaggtgggcgaaggccaagaaggggctggggctggtcaggaagggctcctggtgaccagagcactttgcgtgagccagcgtgggaggaaggtgggctggatgagccagggaggcgccgggaggggccttggcagaggcgaccccctccgtcacccgcaggccactgaaccctgggtagcgagaaccgacaggggaggctgcagacagaggagtggaggctcccckgctttgggggctctgagtagaagcatctagggggtccctcaagaggcccccaaacgcttccccatggtgagaaaagaaggcgcagagaggggcacggcgccggtgcagaggggcacacagcgagatttgctgtgagttcttttattgccccaagtgtacctcatcttggtagatttctattggctttaaaaatgtgtgtgttttgctgttggagagtggggtat

SEQ ID NO: 565760 - DNA, 580 bp, Homo sapiens
ccacggctaggcctttggggccctgtgaggctcaaagatgtcaaggcagcataggaaattttagatcttaaaattcagcgaagaccctctccagctctggtaaattattttgcttgaagtctacttcatgaratattaatatagtcactcctgcttccttaaaaaattaatgatttcacaggatatctttctccattcttttactttcaacctacttaggtccttaagtgagtttgaagtttctcatgaacagtatttagttgggccatgtgtttattataggctctccatcaatctgtcttttggtttatttagaccatttacatttaaggtgcttattgttacataattgcttatgtctgatgtttttattatttgcttttttgtttcctttttctttccctccatcttgatctatttctgtataatgttgttgcgtgtatctctttgtatagtcttaaagtgtttgctctggatgttacaatatgtgtattgtaatatagtagtctactggtaccagtatttaccacttcaaagtgtggaaacctgccttgcatttatgtctctttaccttttccac

SEQ ID NO: 565761 - DNA, 580 bp, Homo sapiens
ccacggctaggcctttggggccctgtgaggctcaaagatgtcaaggcagcataggaaattttagatcttaaaattcagcgaagaccctctccagctctggtaaattattttgcttgaagtctacttcatgaaatattaatataktcactcctgcttccttaaaaaattaatgatttcacaggatatctttctccattcttttactttcaacctacttaggtccttaagtgagtttgaagtttctcatgaacagtatttagttgggccatgtgtttattataggctctccatcaatctgtcttttggtttatttagaccatttacatttaaggtgcttattgttacataattgcttatgtctgatgtttttattatttgcttttttgtttcctttttctttccctccatcttgatctatttctgtataatgttgttgcgtgtatctctttgtatagtcttaaagtgtttgctctggatgttacaatatgtgtattgtaatatagtagtctactggtaccagtatttaccacttcaaagtgtggaaacctgccttgcatttatgtctctttaccttttccac

SEQ ID NO: 565762 - DNA, 580 bp, Homo sapiens
ccacggctaggcctttggggccctgtgaggctcaaagatgtcaaggcagcataggaaattttagatcttaaaattcagcgaagaccctctccagctctggtaaattattttgcttgaagtctacttcatgaaatattaatatagtcactcctgcttccttaaaaaattaatgatttcacaggatatctttctccattcttttactttcaacctacttaggtccttaagtgagtttgaagtttctyatgaacagtatttagttgggccatgtgtttattataggctctccatcaatctgtcttttggtttatttagaccatttacatttaaggtgcttattgttacataattgcttatgtctgatgtttttattatttgcttttttgtttcctttttctttccctccatcttgatctatttctgtataatgttgttgcgtgtatctctttgtatagtcttaaagtgtttgctctggatgttacaatatgtgtattgtaatatagtagtctactggtaccagtatttaccacttcaaagtgtggaaacctgccttgcatttatgtctctttaccttttccac

SEQ ID NO: 565763 - DNA, 569 bp, Homo sapiens
ctcagtcattttgtttcctcagatcttttgatgatccggatgatcttttaatttatgcaggatgtttctctgcttgtgcaggctggtgggattggggactggagagaggataagtgtctgcttgcccaggactggcaaactgtcacttgccctggttgtgccttgccaggagctcccgtgcctgtctctgagagtgtcatgagcgcagcggtggtagttgtgtggtggatgcatttcccctgggttggggggtgggtggctggtcctagctctgtttgttgttgccgatgagacacarcacacttctgcttcctgatggatcttgtcggtcatttgacttcttcctggtctgggctcctgagctggccctccacaggccaagcaggaatggagctggctgctacaagagttccttcactagagggcatctctcctctctcctcccacacatgggagcacaagggtgggctttcctctgcccactgtgatctgcagcccggctttcccctcctcaccctctgctctcagacagacttgcttttcgctggtgtctgtgagaggtgatgcct

SEQ ID NO: 565764 - DNA, 676 bp, Homo sapiens
acatgcacaggcactcaggcacctagagccttctcatcctgcactttgagtcccccctccccttgcccatccttgcccatccttcaaggcctcagtcaaaagccatcttttacaaattgtctctggttgactttcctttttttcccctcttagaagaagcgatgctgtcctcagtcatcaagcgttcactaggcgcttggtgtgtgccaggccccgatgtgggtcttgggcatgttccagttctcacgtcctcagggctccttggtgagtcgagggtgaggaggacacagaggcacaggaggccatggggcaggtctgggtgcactcaggctccagagctcagccctccctgctgagtcagggcgagcaggatasacgcctgctcctggaactcagtgggtgaggtggacacgcatgcagggaggtaccagcctcaggggctgtggaacagagaaagggagcttccaggacatcaaacaattcctggagtgccagggcaagaggggaatctggatggaggaaagtgtgaacagggcagaggttggaggtggatgtggcccccgagcatatcggaggcgactgagctgctccttgactttgggcatctttgttcatctctgcatttgcacatttgttgaacaaacctactgagacacttgttttctttccatggtcc

SEQ ID NO: 565765 - DNA, 676 bp, Homo sapiens
acatgcacaggcactcaggcacctagagccttctcatcctgcactttgagtcccccctccccttgcccatccttgcccatccttcaaggcctcagtcaaaagccatcttttacaaattgtctctggttgactttcctttttttcccctcttagaagaagcgatgctgtcctcagtcatcaagcgttcactaggcgcttggtgtgtgccaggccccgatgtgggtcttgggcatgttccagttctcacgtcctcagggctccttggtgagtcgagggtgaggaggacacagaggcacaggaggccatggggcaggtctgggtgcactcaggctccagagctcagccctccctgctgagtcagggcgagcaggatagacgcctgctcctggaactcagtgggtgaggtggacacgcatgcagggaggtaccagcctcaggggctgtggaacagagaaagggagcttccaggacatcaaacaattcctggagtgccagggcaagaggggaatctggatggaggaaagtgtgaacagggcagaggttggaggtggwtgtggcccccgagcatatcggaggcgactgagctgctccttgactttgggcatctttgttcatctctgcatttgcacatttgttgaacaaacctactgagacacttgttttctttccatggtcc

SEQ ID NO: 565766 - DNA, 676 bp, Homo sapiens
acatgcacaggcactcaggcacctagagccttctcatcctgcactttgagtcccccctccccttgcccatccttgcccatccttcaaggcctcagtcaaaagccatcttttacaaattgtctctggttgactttcctttttttcccctcttagaagaagcgatgctgtcctcagtcatcaagcgttcactaggcgcttggtgtgtgccaggccccgatgtgggtcttgggcatgttccagttctcacgtcctcagggctccttggtgagtcgagggtgaggaggacacagaggcacaggaggccatggggcaggtctgggtgcactcaggctccagagctcagccctccctgctgagtcagggcgagcaggatagacgcctgctcctggaactcagtgggtgaggtggacacgcatgcagggaggtaccagcctcaggggctgtggaacagagaaagggagcttccaggacatcaaacaattcctggagtgccagggcaagaggggaatctggatggaggaaagtgtgaacagggcagaggttggaggtggatgtggcccccgagcatrtcggaggcgactgagctgctccttgactttgggcatctttgttcatctctgcatttgcacatttgttgaacaaacctactgagacacttgttttctttccatggtcc

SEQ ID NO: 565767 - DNA, 610 bp, Homo sapiens
aatgggctgcgggaggctcagtgacctgccctgggtgacacggatggcatggatgccctgtccatgcacggggctgtgctaggagaggacaggatcatccccagaagctggtcctgtgtccactgctcacggtggcagctgcttgggctgacaacgccccccacctcctgatcagatagtgatatacttggtccaaacttcgaaagtaaaaaagttaaaacagaaaaatagtctcctggtcattcatgctctctggttcccttttcattmgtatctctttctccttctatttatggatctagttatttaaagcacagatggtgacattctgtacatattctgcattttgctttttaagtctattttattatgacgtacgatacatatagaaaagtggaaaaaactgaaatgaatgaattttcatgaagtgagcattggtgtaaactgagccagtacattgggaacccccttcattctccctcccagttactgcaccatccctcctgccacaggtaaatactgccctgaccttcatggtaactacttgctttgcttccattagatattctatttttgtttcagctgtgcttttgaactttatagaaatgga

SEQ ID NO: 565768 - DNA, 610 bp, Homo sapiens
aatgggctgcgggaggctcagtgacctgccctgggtgacacggatggcatggatgccctgtccatgcacggggctgtgctaggagaggacaggatcatccccagaagctggtcctgtgtccactgctcacggtggcagctgcttgggctgacaacgccccccacctcctgatcagatagtgatatacttggtccaaacttcgaaagtaaaaaagttaaaacagaaaaatagtctcctggtcattcatgctctctggttcccttttcattcgtatctctttctccttctatttatggatctagttatttaaagcacagatggtgacattctgtacatattctgcattttgctttttaagtctattttattatgacgtacratacatatagaaaagtggaaaaaactgaaatgaatgaattttcatgaagtgagcattggtgtaaactgagccagtacattgggaacccccttcattctccctcccagttactgcaccatccctcctgccacaggtaaatactgccctgaccttcatggtaactacttgctttgcttccattagatattctatttttgtttcagctgtgcttttgaactttatagaaatgga

SEQ ID NO: 565769 - DNA, 583 bp, Homo sapiens
gggttactatgaaggatgctataaagagcattcttgtacatggctcttgtagcacagtgaacacatttctgttgggtgtagagatgtacgtatatgtgtgtgtgtgtgtgtgtgtgtgtgtgtgtgtgtgtgtgtgtgtgtatatatatacaccccaaggggtaaaattgttggatgtacatacctttgacttcagtaaatcatgccaaactgctttccaaagtggttgttcacctttttttccttttgtttttcagtggatccttatagtttgggattcttccataatggtacatatagatgtgtctcatttttttaaacagttgcatagttttcacagcatggacataacatgatttatttaacctgtcttctgttgttggacttcgttattttatactcaaacaatgccacaatgaataaccttcttcataagttaattaaatactcgatgaaaaatacaggktttttttcggtttataaaagtaatacttgctcactgaggaaaaaaaatctgtaaattacagaaaaacacaaaggaaatatatcctatgatccaaccagaaagaaaactacttttcct

SEQ ID NO: 565770 - DNA, 583 bp, Homo sapiens
gggttactatgaaggatgctataaagagcattcttgtacatggctcttgtagcacagtgaacacatttctgttgggtgtagagatgtacgtatatgtgtgtgtgtgtgtgtgtgtgtgtgtgtgtgtgtgtgtgtgtgtgtatatatatacaccccaaggggtaaaattgttggatgtacatacctttgacttcagtaaatcatgccaaactgctttccaaagtggttgttcacctttttttccttttgtttttcagtggatccttatagtttgggattcttccataatggtacatatagatgtgtctcatttttttaaacagttgcatagttttcacagcatggacataacatgatttatttaacctgtcttctgttgttggacttcgttattttatactcaaacaatgccacaatgaataaccttcttcataagttaattaaatactcgatgaaaaatacagggtttttttcrgtttataaaagtaatacttgctcactgaggaaaaaaaatctgtaaattacagaaaaacacaaaggaaatatatcctatgatccaaccagaaagaaaactacttttcct

SEQ ID NO: 565771 - DNA, 365 bp, Homo sapiens
tgttgttttactttttcccataaggctaagatcatctccagaaatattaattttttagacagygtgattatagttatttaatactcatatttatcaaaatattatatgttaaaaccaataaccatctgaacttatttgaatatagtttttcctattctgttcttagaaatttcagtcattaacaatctttacacttagaaagtgttttaattttactttgatgacaggaatagtgtttttctcaatgaaatatataatagcagcttataagtgataactgttttcattctgtttttaagagaaaatactttggtcttttttaccatgatagtttagtgtgtgatgtcataaaaatgggctgtagc

SEQ ID NO: 565772 - DNA, 365 bp, Homo sapiens
tgttgttttactttttcccataaggctaagatcatctccagaaatattaattttttagacagcgtgattatagttatttaatactcatayttatcaaaatattatatgttaaaaccaataaccatctgaacttatttgaatatagtttttcctattctgttcttagaaatttcagtcattaacaatctttacacttagaaagtgttttaattttactttgatgacaggaatagtgtttttctcaatgaaatatataatagcagcttataagtgataactgttttcattctgtttttaagagaaaatactttggtcttttttaccatgatagtttagtgtgtgatgtcataaaaatgggctgtagc

SEQ ID NO: 565773 - DNA, 365 bp, Homo sapiens
tgttgttttactttttcccataaggctaagatcatctccagaaatattaattttttagacagcgtgattatagttatttaatactcatatttatcaaaatattatatgttaaaaccaataaccatctgaacttatttgaatatagtttttcctattctgttcttagaaatttcagtcattaacaatctttacacttagaaagtgttttaattttactttgatgacaggaatagtgttyttctcaatgaaatatataatagcagcttataagtgataactgttttcattctgtttttaagagaaaatactttggtcttttttaccatgatagtttagtgtgtgatgtcataaaaatgggctgtagc

SEQ ID NO: 565774 - DNA, 464 bp, Homo sapiens
ctggttttctttcagatttaaggacatatactttatttttttaagagatagggtcttctatgttgcccaggctggctttgaactcctgggatcaagtgatcctcctgcctcagccttcgaagtagttgggactacaggcccacgccaccgtgcatggctggacacgtaaatttgaaktgaatggttaaacatccagctagctgaaagcatggcagaccctaacagaaaagctacagtgtgtttttgcaactatgaagtgaatggtttcctggggaaaattgtgactttgtataactatttttgaaaccagaataaattatatttcacttgcatattcttaaattattaaaattttcagaagtcagtgatacagaaatactattttgcaatgttaatctgtttgagtctttggagaaagtggtttcattgtaggtacatgatgcactcttaatattttaaacaaa

SEQ ID NO: 565775 - DNA, 464 bp, Homo sapiens
ctggttttctttcagatttaaggacatatactttatttttttaagagatagggtcttctatgttgcccaggctggctttgaactcctgggatcaagtgatcctcctgcctcagccttcgaagtagttgggactacaggcccacgccaccgtgcatggctggacacgtaaatttgaattgaatggttaaacatccagctagctgaaagcatgrcagaccctaacagaaaagctacagtgtgtttttgcaactatgaagtgaatggtttcctggggaaaattgtgactttgtataactatttttgaaaccagaataaattatatttcacttgcatattcttaaattattaaaattttcagaagtcagtgatacagaaatactattttgcaatgttaatctgtttgagtctttggagaaagtggtttcattgtaggtacatgatgcactcttaatattttaaacaaa

SEQ ID NO: 565776 - DNA, 464 bp, Homo sapiens
ctggttttctttcagatttaaggacatatactttatttttttaagagatagggtcttctatgttgcccaggctggctttgaactcctgggatcaagtgatcctcctgcctcagccttcgaagtagttgggactacaggcccacgccaccgtgcatggctggacacgtaaatttgaattgaatggttaaacatccagctagctgaaagcatggcagaccctaacagaaaagctacagtgtgtttttgcarctatgaagtgaatggtttcctggggaaaattgtgactttgtataactatttttgaaaccagaataaattatatttcacttgcatattcttaaattattaaaattttcagaagtcagtgatacagaaatactattttgcaatgttaatctgtttgagtctttggagaaagtggtttcattgtaggtacatgatgcactcttaatattttaaacaaa

SEQ ID NO: 565777 - DNA, 464 bp, Homo sapiens
ctggttttctttcagatttaaggacatatactttatttttttaagagatagggtcttctatgttgcccaggctggctttgaactcctgggatcaagtgatcctcctgcctcagccttcgaagtagttgggactacaggcccacgccaccgtgcatggctggacacgtaaatttgaattgaatggttaaacatccagctagctgaaagcatggcagaccctaacagaaaagctacagtgtgtttttgcaactatgaagtgaatggtttcctggggaaaattgtgactttgtataactatttttgaaaccagaataaattatatttcacttgcatattcttaaattattaaaattttcagaagtcagtgatacagaaatactattttgcaatgttaatctgtttgagtctttggagaaagtggtttcattrtaggtacatgatgcactcttaatattttaaacaaa

SEQ ID NO: 565778 - DNA, 340 bp, Homo sapiens
tactgggattacatagctaccaccaaaggtgactgggggcaaaatgtgctaattgccccttgggaccttctattatctctggcagttgagagtgccagtgggcctctggccttgtgaaatcctgtcarcttcactggaagaagggagctcatgtgatcattaaaaaggaaacaataggtgctggagaggatgtggagaaataggaacgcttttacactgttggtgggagtgtaaactagttcaaccattgtggaaaaccatgtggtgattcctcaaggatctagaactagaaataccatttgacccagcgatcccattactgggtatatgcccaaaggac

SEQ ID NO: 565779 - DNA, 603 bp, Homo sapiens
gaggccattatcttttttaattatttttattattttttttctattctactttaagttctggggtatatgtgcagaatgtgcaggattgttacatagatatacatgtgccatagcggtttgctgcacccatcaacccatcatctacattagatatttctcataatgctgtccctttcccagtcccccacccctgcagtaggccccagtgtgtgatgttcccctctctgggttgatgtgttctcattgttcacttcccacttatgagtgagaacatgcactgtttggttttctgytcctgtgtcactttgctgaacatgagggtttccagcttcatccatgtccctgcaaaggacatgaactcatctttttcatggctgcatagtattccacagtgtctatgtgctacattttctttatccagtctatcactgatgagcatttgggttggttccacatctttgctattgtgaacagtgtggaggccattatcttaagtaaattaatagaatgctgcgtgttctcacttataagtgggagctaaatgttgtgtatatgtagacacagagaagggaacagatattggggtctagttagggggagaga

SEQ ID NO: 565780 - DNA, 563 bp, Homo sapiens
ctgcccgtggatcccctgaatctataataataataattaataataataataataataaataaaaagtgactttgtcattcgcagggaaatgtgaatgacattcactctgcctctcaggcccttggattcccaaagtttgttttcatcacgcccargggacactcagaatgtcgtttgcagaacacgggttgtttttcttagaaacgccttgcaaaacaaaataggaagcaaaatctttctcactccttccactccataatagacaaaataaaatgagggggcaggaatccagagactttgaccacagttggcagatttattgtggtacagacatgaaggcaagcagtgttctctctgattctatgaagcgtacagcccgggccagctgccttctgctttctggatggtgcaggcgtgagctccaagcccaaatttcactggagctccaagaatcgagcctggcccaggcactcactgcacgggggccaagcgtgaaaccagtgatcgctccagcaaggtaacaggacagcttggtgatccttcttgccggccacaaaaggtta

SEQ ID NO: 565781 - DNA, 563 bp, Homo sapiens
ctgcccgtggatcccctgaatctataataataataattaataataataataataataaataaaaagtgactttgtcattcgcagggaaatgtgaatgacattcactctgcctctcaggcccttggattcccaaagtttgttttcatcacgcccaagggacactcagaatgtcgtttgcagaacacgggttgtttttcttagaaacgccttgcaaaacaaaataggaagcaaaatctttctcactccttccactccataatagacaaaataaaatgagggggcaggaatccagagactttgaccacagttggcagatttattgtggtacagacatgaaggcaagcagtgttctctctgattctatgaascgtacagcccgggccagctgccttctgctttctggatggtgcaggcgtgagctccaagcccaaatttcactggagctccaagaatcgagcctggcccaggcactcactgcacgggggccaagcgtgaaaccagtgatcgctccagcaaggtaacaggacagcttggtgatccttcttgccggccacaaaaggtta

SEQ ID NO: 565782 - DNA, 597 bp, Homo sapiens
aattttctttacttattatattgttaaggattttttttttttttagtgaaattttccaaagtgatttacaaaactgtttgctttataaggtgtggtcaycgaagtctttttgtttccttaacaaatgttaagctaatgttttgacagtgattttcttgtatgtcaggaaccaatcaaacaggcaaatacaagaaaaacaaaaaggaaaacaagtaatcattgtccagcaaaatatgtctctaggccatgcagactggctttgtgctgggttctttaaagccggcacaaagtgtgtgttcactcttgcactgagtgaagttcaagttcactcttgcacagagcttgcactgaggggagggatcggccaaggtgaaagtgtagggtcttcttatgacatttgtcagcatgtggcttaacctatgaatacatgtgactttccagactctcccatgtacgtgaatgattttgtgtgtctttttttgaaatactcttctccaccttttcttactgtgctgaaggtgatctactatatgcgtaaactttaatttttgccctaagcatctgtggtttgttaagtctccttgcagagtttcttaa

SEQ ID NO: 565783 - DNA, 597 bp, Homo sapiens
aattttctttacttattatattgttaaggattttttttttttttagtgaaattttccaaagtgatttacaaaactgtttgctttataaggtgtggtcacsgaagtctttttgtttccttaacaaatgttaagctaatgttttgacagtgattttcttgtatgtcaggaaccaatcaaacaggcaaatacaagaaaaacaaaaaggaaaacaagtaatcattgtccagcaaaatatgtctctaggccatgcagactggctttgtgctgggttctttaaagccggcacaaagtgtgtgttcactcttgcactgagtgaagttcaagttcactcttgcacagagcttgcactgaggggagggatcggccaaggtgaaagtgtagggtcttcttatgacatttgtcagcatgtggcttaacctatgaatacatgtgactttccagactctcccatgtacgtgaatgattttgtgtgtctttttttgaaatactcttctccaccttttcttactgtgctgaaggtgatctactatatgcgtaaactttaatttttgccctaagcatctgtggtttgttaagtctccttgcagagtttcttaa

SEQ ID NO: 565784 - DNA, 194 bp, Homo sapiens
gtcagaacagacacataataacttgcgggtaagatcttctcttgttcctttggaccatggaccaggcttcctcactgggaacgtgggcttctgacacttcaaaactgccaatttgctggggcaaagrcaagtttaaaatgtcgtaaagttttccagttgtctttttcttgagtctgctttcacttggttgttgt

SEQ ID NO: 565785 - DNA, 194 bp, Homo sapiens
gtcagaacagacacataataacttgcgggtaagatcttctcttgttcctttggaccatggaccaggcttcctcactgggaacgtgggcttctgacacttcaaaactgccaatttgctggggcaaagacaagttwaaaatgtcgtaaagttttccagttgtctttttcttgagtctgctttcacttggttgttgt

SEQ ID NO: 565786 - DNA, 591 bp, Homo sapiens
cacgcccggctcattttttgtatttttagtagaaacggggtttcactgtgttagccaggatggtctcgatctcctggcctcgtaataagcccgccttggcctcycaaagtgctgagattacaggtgtgagccatcgtgcctggccattatacacatgttatttaataaacaatttattataaagagaagaaatgcatttttactgtcttttataatgtcaatattacgtatatcagtgctttttttaaaatgtggattcaagtgactgtcttctgtaacttgcttttagccttaggaatttttttagagttttttttttttatatggtaagtctgccagcaacaacttcagttaatgtttctgtttatctggctaagtctttgtgttattttcatttttgaaaaataattgctggataaggaattcgtggctgagaggtttttttcctttgcatcttttgaatatattattctactgcctcttgccttccattgtttctcttaagtcagctgttaatcttacaaaacataggtgctcagaaaataaacatgtgcatgaatatttacagcagtaatattcatacagtcaaaa

SEQ ID NO: 565787 - DNA, 533 bp, Homo sapiens
gagaaaatagccttagtctatacataataaactcaagatatgttacaaatttacatgtgaaatccaaaatactataatatttaaggaatagctaagtagaataacactgaaatttaacataatgaarcatttccttaaaaaaggaaaaagcacagtaattaaaaagggaaatatatttaatattttttctctccattaagcatgccattaactgagtaaaaaatcaagctgcaattatgtaaactacattttctaaaaccataaagaaaagaagaaataaaaaggtatttgggaaaaaaatccaaaggtacagtcaactacacaaaaaaagcttagtctcattaatcattatgaaaatgcaaatggtagctgaaagaagataaaactacaattcaaagagaaagcctaaaatttcaaccccccaaaaagtctgggttttggagatctgggatggaatagggttcctaacctgacaacaatgaaagaaccaaactaacttcaaagtcatcactttactttatagcaacgaggtt

SEQ ID NO: 565788 - DNA, 533 bp, Homo sapiens
gagaaaatagccttagtctatacataataaactcaagatatgttacaaatttacatgtgaaatccaaaatactataatatttaaggaatagctaagtagaataacactgaaatttaacataatgaagcatttccttaaaaaaggaaaaagcacagtaattaaaaagggaaatatatttaatattttttctctccattaagcatgccattaactgagtawaaaatcaagctgcaattatgtaaactacattttctaaaaccataaagaaaagaagaaataaaaaggtatttgggaaaaaaatccaaaggtacagtcaactacacaaaaaaagcttagtctcattaatcattatgaaaatgcaaatggtagctgaaagaagataaaactacaattcaaagagaaagcctaaaatttcaaccccccaaaaagtctgggttttggagatctgggatggaatagggttcctaacctgacaacaatgaaagaaccaaactaacttcaaagtcatcactttactttatagcaacgaggtt

SEQ ID NO: 565789 - DNA, 538 bp, Homo sapiens
tcctaacctgacaacaatgaaagaaccaaactaacttcaaagtcatcactttactttatagcaacgaggttgccaagaactgagtcaaaatgtgaaggaaaacaagcacctgcaaggagaaagaggacagatgcactcacataggacagatgcaaatagacaccactatgacaagtaaagctggaataatcaataaattcctaaagcaaagtggggctggtsagattgggagaccgctgacagctgcagaagttgggaaagatccatcatcttgaaaactttttccgcacaaacccactgcgatctctcaagcaattggtaaggaatccaagagagtctgtatatgacacagatcagggagagcagaacacttgggaggtgaccaggtcttgggggccgagcccttatgaatgggattagtgcctttataaaagaagctcaatggagttcttgtgtgccttccaatatgtgaggacatagaaagaaggcaccatctatgaaccaggaaattggctctcatcaacactgaatttgtgag

SEQ ID NO: 565790 - DNA, 538 bp, Homo sapiens
tcctaacctgacaacaatgaaagaaccaaactaacttcaaagtcatcactttactttatagcaacgaggttgccaagaactgagtcaaaatgtgaaggaaaacaagcacctgcaaggagaaagaggacagatgcactcacataggacagatgcaaatagacaccactatgacaagtaaagctggaataatcaataaattcctaaagcaaagtggggctggtgagattgggagaccgctgacagctgcagaagttgggaaagatccatcatcttgaaaactttttccgcacaaacccactgcgatctctcaagcaattggtaaggaatccaagagagtctgtatatgacacagatcagggagagcagaacacttgggaggtgaccaggtcttgggggccgagcccttatgaatgggattagtgcctttataaaagaagctcaatggagttcttgtgtgccttccamtatgtgaggacatagaaagaaggcaccatctatgaaccaggaaattggctctcatcaacactgaatttgtgag

SEQ ID NO: 565791 - DNA, 540 bp, Homo sapiens
actacattgatattagacacaacagagttcggaacaagaaatagtatcagagatgagagataatagataatagaataatccgttctcaagaagatgtaaacatcctactaattagggtatgcagctaacaacagaacctccaaatacatgaggtaaaacatgaaagaaatcaaaggtgaactagaaaaatccaaaattatatttgcagacttcaacacttttgtcttagtaatggaaagactaggcacaaactcagtaatcatgtggaagataagaacaacaatatcaccaacaagacacccaatcttcaatggcagatactctttcaagtgaaaaaaaaaaaaacagtatggcatattctttaacaaacgcagaatttctaatatttgcgttcttgcttccttctttccgtcttcctttctcttccmttcccttgcttcttccttcctttcttcttttcctcttccttttctttcctttttgcttttcctttcttttcttttttctccttccttccttcttttcttctttctttctttc

SEQ ID NO: 565792 - DNA, 574 bp, Homo sapiens
tccagcccatgtggtggttcatgcttgtaataccagcagttgaagaggcttaaatgagaggattcctggagcccaggagttcaaaagcaacctgggcaacctagcaagacccagtctctatcaaaagttaaaaaaaaaagtgggcatggtgatgtgcacctgttgtcctaactattttggaggccaaggtggaaggatcgcttgagcttgggaggctgaggctgcagtgagcagtgattgcaccactgcattccagcctgggcaacaaagcaagaccctatctcaaaaaatatataataaaaatgaamatcagttctcattgatttctatgtaaatatgcacagatgatgtccatatagacataaataataatatttctgacaatgggtccatatgatcttcaaaatctaaagtgcctatctgtgtaattgactggttagtctcattaatgaatatagattcaattctactttcttgttctagataaattatataatctagcttttcatttcacttatttactgataacaacaggaagaatgacaagatatctattttggaaaattactctggt

SEQ ID NO: 565793 - DNA, 576 bp, Homo sapiens
aacacatgaaaatcaggcctctcttcttgtagtggacatacacatatttgcatatagaatatcagactctttagagcatttaaaatctttaaagtcatgaatattgccttttaataaatatattttagcatgtactgagaatcccctatttatttttaatttgtgctaatcaacatgattattaatattattggattaccaaatttggaaacacactttcatctccaaggtggatatttgttttattttttgccaatttcttgtcttactctttcaaatattgttggatattatttttattttatttggcattttagtatcaacattggtaattgatgtactctacatattttttcttcgatatctggtgggttttataattactgctatattggatttgtagtagacattgacaaaaattattcctgtatgttttatarctgtatgaaggaaactaatatattttacccctaaatatatttccttgatatatttcaaaatggctattgagaagggctggaaatgctaacatagctgcaaagctgtcttggggagatttgcattggtagagaatct

SEQ ID NO: 565794 - DNA, 443 bp, Homo sapiens
aaaataatcagttttttctttctacctattaaagatgttaccttagttaattacaggggtttccttcagaatgataagtggtctttcaaaatgatgtaaagagatctaaatccgtgtgctccagaagttgaatgaagctctgtctagcacgggtgccagtgactctcccagagtgctccatgcagctggacccacagagtccctctgtgctgtcatatcacccactgccttctgtgaatgagatattctgattagaatcctggtggatgctatttgagccagtgcccccacaactcctatgaaagccgaggaccacaggcccctgaagacaatcacaggtctctagactcacagctcatgaccgtcctctgcagacacagcttctccycggatggctgagggttgtcattggctgtgttcttccttgtgcatgacaacaggag

SEQ ID NO: 565795 - DNA, 554 bp, Homo sapiens
gtgtaaattaaggagcttgaaacagggagatggtcttagattaatcaactgggacttaaatgcaaactcaagtgtcctaaaaaaaacaagaggtagagagagatttagcatagactgaagtggagaaggcagtgtgaacacagagacagagattgcagtgatgtgtccacatcccgggagagagaagccaccagaagctggaagagctaaatcagactgctccctagagcttcagaaggagccagaactgatgactccaagatcttagcccagtgaaactgatctggacttctgaactatgagagattccattcctgttgtgtgaagctaccacatttttgagaacttgttacagtagcccgaggacactaacacaaatggggctccgggaaaatccagactaaaggtgttgtgttggtttgcaatctccttgcttaactttctgatactagacgtaaatagattggtgaaacattttgtgattgaaraaatgtacatgaaacctacagtgtacagagaagcatctgttagttataagataaatattgataatt

SEQ ID NO: 565796 - DNA, 576 bp, Homo sapiens
gtgggtgtattattcattccacaaacaactctcatcatccacacaatggccttcccctaaggtagaataaaaatatcacaaggcagatttatgaggcgatcgacctagaaaaaacctgagactctaggactgtctgatgtgtggatgtcaaatcctgggagattctgagyctctgctctatgtggactctatgttgtgtagccatttgtggaaggcttctgtgattttgtgacctagagaaaatgaatctctgctaaaatcaaatctaagaaagattggcaaagggaatttaaagatttcctaaatttttggaatttccctaggcattaaaacatgagaagtggcaataattcaaaccaacgatgccctccaagaatgaggatttttccaatgcattaggttgggtcccctcagtgagaaggatgccaaagattcgcatgcgggcagtatatttacaaagtgcgggaaacaagcaagtgagcaagggaggggaggagggaaagggaaagtgaaaagtgcctcagaaggagccacctctgaggatgacgagagctcaagcccacatagaaacacagg

SEQ ID NO: 565797 - DNA, 528 bp, Homo sapiens
tgtgcataggctgcactaccttggtctggccatgggtagtcgtgcatgagaactactccctggagtatttctcagtccactgacactgatgtaattggctccacttcccctgctgttgagccaggccgacacgccctgggcaaaggcatctgtgtgaagtattgaggtgcaaatcagtgcttaagatatgtttggatgcaaaacactttttcatctacatgggcagtgtcttggcagaagatggagattctctctaaatgcatgtgagacagcgtggctggcatctgggtcaggatgatgycctggtgcatggcaagaacatgccttgtgcagcagctgccctcgctaaggagagaggctcactgacctggcttttccccctcacctgctctccagaaagccagactctagggcagatgctcctgagaccccaggaacaggctggtggggagcgcagctcagagcattactcaggggatgtggcctttgtcatcctactttgaaacaattgactatttgagcctagat

SEQ ID NO: 565798 - DNA, 561 bp, Homo sapiens
gtagtcccagaactttgggagactgaggtgagaggattgcttgaggctggagtttgagaccatcctggccaacatgccaagacggctcataaaaatattaaaaatataaaaaataaagtacaatcagatttctccttttccatcagatggataaagttcagtaacttaataatatggtagaaaacagacatttatatgttagctgtggtgatataaaccagtttcactttatagaggacaactggtaatatctgtcaagtttataaatgcatataccctttaactcagcaattttagaatgttatccttsaaatatatatttgtacatacatgaaattatataatacattactgataaaacacagacaagaatatgtatacaacccaaatgaccacctaaaggagactggttaaataaatgagtataattgaaagaaaattaggacctgaactaagacctttgagaaaagagtaaaagactatgagaataatgtcaatcttttacctttttttctctagaaaactaagacattagaaacaaaaagtcttaaaacacattcc

SEQ ID NO: 565799 - DNA, 379 bp, Homo sapiens
gggctgttgaattttgtcaaagsccttttcttcttctattgagataatcatgtggtttttgtctttggttaggtctatatgctggattacgtttattgatttgcatatgtggaaccagccttgcatcccagggatgaagcccacttgatcatggtggataagctttttgatgtgctgctggattcggtttgcaggattttattgacgatttttgcatcaatgttcatgaaggatattggtctaaaattctcttttttggttgtgtctctgcccggctttggtatcaggatgatgctggcctcataaaattagttagagaggaatccctctttttctattgactggaatagtttcagaaggaatggtaccagttcctcct

SEQ ID NO: 565800 - DNA, 379 bp, Homo sapiens
gggctgttgaattttgtcaaagcccttttcttcttctattgagataatcatgtggtttttgtctttggttaggtytatatgctggattacgtttattgatttgcatatgtggaaccagccttgcatcccagggatgaagcccacttgatcatggtggataagctttttgatgtgctgctggattcggtttgcaggattttattgacgatttttgcatcaatgttcatgaaggatattggtctaaaattctcttttttggttgtgtctctgcccggctttggtatcaggatgatgctggcctcataaaattagttagagaggaatccctctttttctattgactggaatagtttcagaaggaatggtaccagttcctcct

SEQ ID NO: 565801 - DNA, 546 bp, Homo sapiens
ctgtgcctccctacgcgatagccgtgtcacccccgccactgccctccttcttctctcccattgcagccgagcgcagcgccgctctatgcgggctgcagcagcccaggagcggagccctgggcgcyggcgtctaggcaaggaacccctgattcgggagagctggaccaggagcgccccttggcgctgccttagtcaggacgccagtagagctggcagccaagtctgcggatccagccctcagacccgcggcggtgggggcaaaaaactgcagcggtgggcgcaaaaagccggggcggtgggggaaaaggccagggcgacgggggcaacaagccatggcggcggggtcaaaaagccgcggtggcggaggcaaaaagctgtggtggcggaggcaaaaagctacggtgatgggcacaaaaagccgtaaaaagccgcagcattgggggcaaaaagccgcgacggcgggggcaaaaagccgcggcggcaaaaagatgcggcggcgggggcagaaagcggctgcgggggggggcggcaaaaagcaggggcggc

SEQ ID NO: 565802 - DNA, 412 bp, Homo sapiens
attgcacatggcaccactgtaagaatccattgactatasacacatagttttatatatggactctcaattctcttccatcaatctatatatttttctttcgtcagtattgtgttgtcttgattactgatgccttgccgtaaggtttggagcacgggggtgtgaattatcctaatatgttttcttttttcaagactattttggctattttgagtcccttacattcccatgtgtattttagaatcagcttgtcagtttctagacagaagtctgttgggatacttgcagggattacgtcaaatctgtagttcaacttgaaagtactacaatattaaatcttccaattcatggctgtaagatatttgctaattatttagatcttctttaaacaataatttttaattttccgagtaaa

SEQ ID NO: 565803 - DNA, 412 bp, Homo sapiens
attgcacatggcaccactgtaagaatccattgactatacacacatagttttatatatggactctcaattctcttccatcaatctatatatttttctttcrtcagtattgtgttgtcttgattactgatgccttgccgtaaggtttggagcacgggggtgtgaattatcctaatatgttttcttttttcaagactattttggctattttgagtcccttacattcccatgtgtattttagaatcagcttgtcagtttctagacagaagtctgttgggatacttgcagggattacgtcaaatctgtagttcaacttgaaagtactacaatattaaatcttccaattcatggctgtaagatatttgctaattatttagatcttctttaaacaataatttttaattttccgagtaaa

SEQ ID NO: 565804 - DNA, 412 bp, Homo sapiens
attgcacatggcaccactgtaagaatccattgactatacacacatagttttatatatggactctcaattctcttccatcaatctatatatttttctttcgtcagtattgtgttgtcttgattactgatgccttgccgtaaggtttggagcacgggggtgtgaattatcctaatatgttttcttttttcaagactattttgkctattttgagtcccttacattcccatgtgtattttagaatcagcttgtcagtttctagacagaagtctgttgggatacttgcagggattacgtcaaatctgtagttcaacttgaaagtactacaatattaaatcttccaattcatggctgtaagatatttgctaattatttagatcttctttaaacaataatttttaattttccgagtaaa

SEQ ID NO: 565805 - DNA, 412 bp, Homo sapiens
attgcacatggcaccactgtaagaatccattgactatacacacatagttttatatatggactctcaattctcttccatcaatctatatatttttctttcgtcagtattgtgttgtcttgattactgatgccttgccgtaaggtttggagcacgggggtgtgaattatcctaatatgttttcttttttcaagactattttggctattttgrgtcccttacattcccatgtgtattttagaatcagcttgtcagtttctagacagaagtctgttgggatacttgcagggattacgtcaaatctgtagttcaacttgaaagtactacaatattaaatcttccaattcatggctgtaagatatttgctaattatttagatcttctttaaacaataatttttaattttccgagtaaa

SEQ ID NO: 565806 - DNA, 633 bp, Homo sapiens
tatttcgttcttgcaagcgagcgcccgcggcaacatctgtttgtagcaacaagattgggatgttgttttgtgcttcttcgttgcccattccggtcctttcccgggtgtattgtcttccccggaggggtcacctcgcagggttctctcagcagtctggacttccatactaagaaactcgtaactaattaccacgacttcaattcttaacttgaccagctgtgtckaagaaaggaaaccctggtctctcccagtgctgcaggatctataattcatcctccgtaaaaaaagtcaatattggagcaaaaatgacatttaaaaatcataaaataagtagtctggtatttacctaagatgttcttttcttccctttgctttatagaccatgtactgtattgtttattttctttggggcactgtgtgtgtttgtgagacagaaacaggtagagagatggttctcctgtttccagtgacttctggataagggacaaaacaagaccactgagaaaagataatggaacagcacaggaagagcctctgcggacactctccttgcaattgtgatcttgtgaaatggttaactttaaggactgagctgtgcaatttagcttttttcttgattctaaaattgagctg

SEQ ID NO: 565807 - DNA, 633 bp, Homo sapiens
tatttcgttcttgcaagcgagcgcccgcggcaacatctgtttgtagcaacaagattgggatgttgttttgtgcttcttcgttgcccattccggtcctttcccgggtgtattgtcttccccggaggggtcacctcgcagggttctctcagcagtctggacttccatactaagaaactcgtaactaattaccacgacttcaattcttaacttgaccagctgtgtctaagaaaggaaaccctggtctctcccagtgctgcaggatctataattcatcctccgtaaaaaaagtcaatattggagcaaaaatgacatttaaaaatcataaaataagtagtctggtatttacctaagatgttcttttcttccctttgctttatagaccatgtactgtattgtttattttctttggggcactgtgtgtgtttgtgagacagaaacaggtagagagatggttctcctgtttccagtgacttctggataagggacaaaacaagaccactgagaaaagataatggaacagcacrggaagagcctctgcggacactctccttgcaattgtgatcttgtgaaatggttaactttaaggactgagctgtgcaatttagcttttttcttgattctaaaattgagctg

SEQ ID NO: 565808 - DNA, 559 bp, Homo sapiens
cttggtttctcttctgttttctcccttgtcttcccaattcatcagcaaatattctcaatagaactttttgggcccatctgaaatccatctatttctctgtgtgttcactattctcatcctagcccaaaccattgccatctctcaagaaggttcctgctacaatcttctaagtcgttctagttttgtcttctctaattttgcttttaaacttctggttttacctctctaaaatctgttctctacacatatgcaagaatgatcttgttataacttgtattagttataacttgcattagttaacrtaagttataacttgcattagttaacatcccctttcaaaaacctctaatggcttcctcgtacttaggataaaatactatttatcctggcctataacatcgtatatgataagactgctttctcatctctctacctcactataggcttctctctacattagtcacttttctttcaccactctgggcttctttttgtctctgtaaaggggcaaaagcttctaccccagtgcctttgcagttgctgaactctcagacctgtt

SEQ ID NO: 565809 - DNA, 543 bp, Homo sapiens
tctgttagatttctctgaccgtcataattttgcatagtcagtttcattagcagcagcagggctgtctccatccctgggcctgtcgggctgcagaagagaagaagccctcacaggaacttgcaaggaaggaagaaaattgtcatgacaagaggggtgacctccagtgaggggcagagcctggctgaggtgaccttgcagggaaagaagctgggacctcactttctccctctcgcctagcctctcttctcctgctggtctcgcattggctgactccaaccccaaccagagccaagccaaagccaggcagcttcctgaggagaggggaagggagggagagaaaggtgagaagtggatctttagggacaaatttatatatatttaaagatgcataycctaaaataacaattttgaaatgttgctttcgtctaacattgaattttctggaacttttttttttttgagatggactcttgttctgttgcccagactggagtgcagtggcgcaatctcagctcactgcaacctccatctcccaagttcaag

SEQ ID NO: 565810 - DNA, 573 bp, Homo sapiens
gttaatggtggttattaaaagctttcatgggacatttcagttggagagaaagtgtgtcgagctgtgggggaatggaaaatagaattcagtatattttctcacagaccaatacaatgcaaattttgaaggaccctaatttgcttatcttaagtcttcaaratatgatatttgtgaagaaagagactaagtttgttaatgaccttctaatagagaaggtgctcacctcttgttttttggaagtaaccagctcattgaatgacatgatgataaatttacgaccttggttgaacaaataactaataaaaaagattttcagtttgtaaaaatcttccttcatttgagaacaactaaatatagggaacaacagaagatttacaataaaaaataaagtagttgctatgtcacttccatgtcttgagacctcatcaagataaaattattgtttgctgtcaattttaagcattattttacatatgagattagtaatcactgttctagataattaacaaaattgtccttcataaattttgtttattctcatgcctcagctttctgagtagctgagattacaga

SEQ ID NO: 565811 - DNA, 609 bp, Homo sapiens
tgtgcttcaaataacttgtatgatcatgatcattctactttataagatattttaattatatttattttcaartaaaaatcataattcataggattaatatttgttatttgttaaatatttatcctattattattttgaaagtactctccttttaatacaaacaattgctacctgattattaaatagaatatctgcttcatgtatttaacacgtttcacataaatctcaggggttagacaaaattaacctcccctctcaagctggaatttaaaagtctacagaagggagtggcattgcactaactctatgtagtcagaaattaccagccagcagtgtaggtggacatatgatcatttatttggtcacttattcaacaaacatttgttgagtacttactgtgtgtcatatatgatgagaaccaagcaggtacaacaatccatcccattatttgatgacattcctaaggaacaggacatcagttttactggctccctgcctccagctactcctctgtccttcccctttctcaagtgagaagcatggctgcatgcagtgatgaacaaggtagactcaatttctctctgtagctgtctatggaaaggggcttca

SEQ ID NO: 565812 - DNA, 609 bp, Homo sapiens
tgtgcttcaaataacttgtatgatcatgatcattctactttataagatattttaattatatttattttcaagtaaaaatcataattcataggattaatatttgttatttgttaaatatttatcctattattattttgaaagtactctccttttaatacaaacaattgctacctgattattaaatagaatatctgcttcatgtatttaacacgtttcacataaatctcaggggttagacaaaattaacctcccctctcaagctggaatttaaaagtctacagaagggagtggcattgcactaactctatgtagtcagaaattaccagccagcagtgtaggtggacatatgatcatttatttggtcacttattcaacaaacatttgttgagtacttactgtgtgtcatatatgatgagaaccaagcaggtacaacaatccatmccattatttgatgacattcctaaggaacaggacatcagttttactggctccctgcctccagctactcctctgtccttcccctttctcaagtgagaagcatggctgcatgcagtgatgaacaaggtagactcaatttctctctgtagctgtctatggaaaggggcttca

SEQ ID NO: 565813 - DNA, 489 bp, Homo sapiens
taaattcaaccacctaaagccaatggattttcaataaagacaccaagaacaacacactggggtgaagacaataacttgtgttggtaaaacaagatattcacatgcagaaaaatgacactagactcctatctctcaccatacacaaacataaacctaaaatagatggaagacataaatgtaaaaccataatctatgaaactaacagaagaaagagaaacacttcataacattaggctgggcaaaaatttttaaaattagacctcaaaagctcaggcattacaagcagaaatagacaaatgaggttaaatcaargtaaaaagattttgcacagcaaggaaaactattaacagattgaagagataatctacaaaatttcaaaaaatatttgcaaactatgcatctctcaaggggttaaaatacagactatataaggaacttaacagcaaaaaaatatccaattgaaaatgggcagatcttaatacacatttc

SEQ ID NO: 565814 - DNA, 516 bp, Homo sapiens
aatggcctgctcagttacacttgagataatgtgaggctcatcctgaaattgcaaactatttaaaaataattgacattgatatgtacttattaaaacctgtgaattttagcaacaacagttaagggggacaactaggcctggaaatgcatgtattagacaatatggactacaaaaaaataaataaaatatacacacaaccacaagaagctaaagataaattttaaaaatttttagtagaaagtaataacatataagacaaattttttattggatttgataaaccaggaggtggattcttgcaatacaatagacaaacctattgccagtccaaagggaaaaaaaagaggcattggaaaaaaaamaacaacaaataaatgccactagaattgattaatgagaaaaacacagtttgtagaggtgattttaaattatgagaaggaatgcttcacccataccagatcaacaaaaaaattaaatatgacctgaagctacgtatatcaatatgggtaaatctca

SEQ ID NO: 565815 - DNA, 410 bp, Homo sapiens
aatactattcagccattaaaaaatgaagaaatcctaatatttgtaatgacatgtatgaacctggaggacattattttaagtgaaataagccaggcactgaagacaaaaacttatatatataatgtaaaagtcaaacttatagaarcagagggtagaatgattgtccacaggggctagggcagtgtctgggattgagaagatcaaaattttagttagacaaagggaataagttcaagagatctattgtacagcatggcaactatagttaataataatgtattgtgtgattgaaaattgccaaaagagtatatttggtgttctcaccacaaaaaataatgataagtatgtgaggtaatacatattaattagcttgatttagccttccacaatgtatacaggttttaaaacat

SEQ ID NO: 565816 - DNA, 534 bp, Homo sapiens
  misc_feature 159, 160, 499, 500, 501, 502, 503, 504, 505, 506, 507, 508,509, 510, 511, 512, 513, 514, 515, 516, 517, 518, 519, 520,521, 522, 523, 524, 525, 526, 527, 528, 529, 530, 531, 532,533, 534: n = A,T,C or G
atcctgtctgtactaaaaatacaaaaattagccaggtgtgtggcaggcacctgtaatcccagctgctcgggaggctgaggcaggagaattgattaaaccctggaggcagaagctgcaatgagccaagatcacgccactgcactccagcctgaacgacanngtgctccgtctcaaaaaaakaaataaataaataataaatattaaaaaaataaaaaataaaaagagcatcttcgagagaatggataataacagacttatctaaaaagtcaagttagagagaagatcaacaggaaaagcagtgctatctcaagccatcacacctagaaacaatacccaaatatagtctatgtgctattcttacataaaaatgttgccacatagtacattgcttttgatatgttgaggaagagagaggcaacaaaattagaaaatggaaaaatatattgcaaatatatatgtgtgtgtgaaataaatgttttaggatgtcttagtatcctgnnnnnnnnnnnnnnnnnnnnnnnnnnnnnnnnnnnn

SEQ ID NO: 565817 - DNA, 572 bp, Homo sapiens
tttattttggaatccctgaaggtcctggatcatttatacttcctcaaattttccttaaaaaatgatcagttattttcttctgttttctcttgtctctcccattttagtctagacagctggaagaagtcagctgccatctccaagacattttttttcctgaaaatttcctcatatcataaatgtctttctacagatttcttattttttcacattaatcgagacaacagttttgtcacatttcctgccatttcatatgaaaggtcctcttttttctggtgtccaacaacattttccccactttttttgaagctctcactgacaacctcctctaatctcttaaggctttttctaactctctctttgaagcccttgagttttcactagttgtccttgagaccgtgcagcttatacttgctggctgatcacaaaagtattgcgacacattttacaacttttatttcgggagcaccctacttccaggtactaaactatgtttcagttacctattgctccataccataccaccctcaaacacaatggtttcaaacaawaacaatcatatattttgttca

SEQ ID NO: 565818 - DNA, 601 bp, Homo sapiens
ttccctgggtgattccaatgcacagataaatatgggaacyactgcaatttcctctctcccttaatccacttcctagaaggaggagaaactcatgtgagtagaggaaaaaatgaattccaaaagcacatgtaagccaatgtgctaaacaaagaagcttctgtttggaaaggggtaaacatttctgtagagaaatgtttgagatgccatattccttatggtatctcaatatcttggctcctccagttaaaaaaaatattttgtgttgctcttccttccttgtgttgctcttccttcacttctctccatatagatagtgctacagaagtggcctgggggttcatccacaagggaaatgtaattctccctctctttcctttaggacaacagtcagaaaaagaatggagaaaaaaaggagttatgaggcatcttacataattttgattgtgtatggaagatacatgttatttaataaagaaaaatcctccaacatagaatataagcagctggccagatattaatgtgcttgacccagcaactttcagatgggactaaccactaaatctgcagtataaaactgatgagttaaagtcttattacacca

SEQ ID NO: 565819 - DNA, 568 bp, Homo sapiens
ctttgttatataattcaatagcaatgattcatgtaatctattggggaatcataccactttgaaaaatttggaccacttgcttatttaaaaataatcttttcacatgatggagaaatgaaatgtaaaaaaagccactcatcttggcaacgatattcatgggactgacattgatagaattccaaagacaaaaatatatttttttcattcatggtcatatggaaaaccctgcattcactatttttggattcctaaagagtgacatgtgataactatgactccagtttctttactctgcatcaatcttctctttctttttaatgtattttcagtggggaaagataaagaaactgaaaaatggggaattgtgatatttccaatatttgcctgagaaacgccrtggcctcaggtcaaagtaactagccaaatgatgttctcccttcactattgataaactggttggcagtgaaaatattccactcatttcaaacatactggtttgtatattagatgccaaaaataaatttgtttgaatattcttatgataaaattaaataatcttgttgctaat

SEQ ID NO: 565820 - DNA, 494 bp, Homo sapiens
atgacaaggaagatgttagatcagtgtatcacctgaacatggtggttacaagtatagactctggagttaggacccacctaggtccaaatcctgattttaccacctcttgctctctgtcactaggcaagtcctgaaagctcttttaaccttgatttcctcatctgcataatggaactaacaataccatctactttatccagctgttataaatatttaaagttataagtcatgttttaagtacttagcaaaattttgacatataataaggacaaaaataaatattaactttcatgattacrttattaacaaaaccttatggtgaaataagctgtcttacattagacacagcacctcatacatcattaattcaaaatcatgtaaatcctaaactgcttcatcaatttgtacctcttccaggagataaataataaaaatatgtgagcaaaataaataataaagatagaaatacatttacatgttctatgtttttaaaa

SEQ ID NO: 565821 - DNA, 468 bp, Homo sapiens
tggcaattagcgcggtgactcatgcctgtaatcccagcactttgggaggccaaggtggctggatcacctgaggtcgggagttcgagaccagcctgaccaacatggagaaaccccatctctactaaaaatacaaaattagccaagtgtggtggcacatgcctgtaatcccagctactcaggaggctgaggcaggaaaatctcttgaacctgggaggcakaggtagcggtgagtagagatcgcgccatcgcaccccagcctgggcaacaagagagaaactctgtctcaataaaaaaaaaaaaagaattccagatggcttctttgtagaaattgacaggttgatcctaaaacctgtaggaaatgaaaggactcagaatagccaagacaattttgaaaagaaaatcaaaaaacaaaaaacaaattttcaggactcaaacttctatattttataacttactagaaagatatca

SEQ ID NO: 565822 - DNA, 553 bp, Homo sapiens
acagttttcctacttcttgtctctacttccaacctagggccaaccagagaaagccaaatatgcacccttaaccaatgaaataggatgccctgtttctgataagcccacccacagctctcccatgccaatagcctccaatcagcgcacatctgaagcctacctatcctcacccatcatgaagcttcaccactgcttcgtctactttgagtcgctgcttaaacacaagtgacggtggttgactcctttggcatagcaagctctgaaaaaaatagactttgcttttctcattgggacttcatttattcctgtgggagaaaaagagaaattaaaagaaaaagcaggcttataaaacaataaaaaatgaaattagcatgtcttgtcattcctcatatcatgattgccacagacacacactcaacctctcagaaatgagggtttgtagtgagattacgaarttcagtttccttttgttatatcctctacctaagcttcctaataatttatataatgaaatcttcagaattcatcattttttggggcaggggagacaggg

SEQ ID NO: 565823 - DNA, 372 bp, Homo sapiens
gagtaattgaggaaaatttccccgacctggctagagacccagccatccaaatamaagaagcacaaacaacccttaggaaattcatggcaaaaagatcttcacctaggcacatcagactatccaaagttaagatgaaagaaagaatcttaaaagctgtgagacagaagcaccaggttacctacaaagaaaacctatcagattaacagcagatttctcagcagaaaccctacaagccagaagggattgggaccctatcttcagcctcctcaaacaaaacaattgtcagccaagaattttgtatccagctgaactaagcatcatatatgaaggaaagatacagtccttttcagacaaacaaatgctgagagaatt

SEQ ID NO: 565824 - DNA, 372 bp, Homo sapiens
gagtaattgaggaaaatttccccgacctggctagagacccagccatccaaatacaagaagcacaaacaacccttaggaaattcatggcaaaaagatcttcacctaggcacatcagaytatccaaagttaagatgaaagaaagaatcttaaaagctgtgagacagaagcaccaggttacctacaaagaaaacctatcagattaacagcagatttctcagcagaaaccctacaagccagaagggattgggaccctatcttcagcctcctcaaacaaaacaattgtcagccaagaattttgtatccagctgaactaagcatcatatatgaaggaaagatacagtccttttcagacaaacaaatgctgagagaatt

SEQ ID NO: 565825 - DNA, 615 bp, Homo sapiens
tttaaatctcagttttcgtaggactttaattagttagacataggaagagtgcatcctgtgttataagttttctatttcatagaagaatttagagaataatataggaagaaagcatttgctttaggctgcgtgtggtggctcatgcctgtaatcccagcactttgggaggccgaggtgggaggattgcttgaggtcaggacttcgagaccagcctggccaacatggtgagaccttatctctactacaaatacaaaaattagccaggtgtggtggcacgtgtctgtaatcccagctatcctggaggctgaggcacaagaattgctggaaccygggaggcagaggctgcagtgagctgagatggtgccactgcactccagcctgggtgacagagcaagactccatctcaaaaacaaacaaacaaacaagcaaacaaagaaaaccattcagtttagatctttaagttaagatatattttttaattaggccacaacatcagtcagaaccagaggggaaaaagttaaaggagctgataaaaagttgaaagagttactatctcgggccctcttgaaggggagagaaagctgaaaacagcgagatgaaattaaagttgaaatt

SEQ ID NO: 565826 - DNA, 602 bp, Homo sapiens
tttttcagtgattaaaaatgttttggaagctgtcggaaattaagaatgagttcgttagcacatcaatagactcattaagatgattggcaaaaatcactggagtgattgacttcctagaaatttgattttatttttagtgtaattcctttctgctaagcaaaatagtagtttatttggtaatttttattgtgctaatgatagtaatcattaatatttcatcaagcctggcctccagaaaaatcacgacttaggcaaagattgtttagatccatttaccactttgtaattttatttgtatttattttattaatttatgcaccaaatatttattgtccatgtaaggttgttggcgaccttgacaagtgcggttttggaggagtagaggaagtgaaagacagattgaagtggacttgagggagagtgggatgagaaaattggaaataactttgagaagctttgctacaaaggatgacaaagaaatggagtattaaatgcgatggaattgagtgcaagggaaggtgttttaaacagaagaaataacaacatatttatgtgctgatgggrtgactcagtggatattgaagacgtggtgatggaggaga

SEQ ID NO: 565827 - DNA, 301 bp, Homo sapiens
actgttgacttaattgattatccaaatagggaaaatgcaataatgatagaaataatgtcattacctaggtcatgctaagtgcaaagttattactgatcaawcgatcggccaagaaaaaatagactgactatagaaactccatatgtttttagattggcatttgtttcttctttccactggaaggaaaacaaaaactaagtatgggtaaaagggcggatcatgaggtcaggagatcaagaccatcctggctaacacggtgaaacccggtctctactaaaatataaaaaaattagctgggcat

SEQ ID NO: 565828 - DNA, 301 bp, Homo sapiens
actgttgacttaattgattatccaaatagggaaaatgcaataatgatagaaataatgtcattacctaggtcatgctaagtgcaaagttattactgatcaaacgatcggccaagaaaaaatagactgactatagaaactccatatgtttttagattggcatttgtttcttctttccwctggaaggaaaacaaaaactaagtatgggtaaaagggcggatcatgaggtcaggagatcaagaccatcctggctaacacggtgaaacccggtctctactaaaatataaaaaaattagctgggcat

SEQ ID NO: 565829 - DNA, 437 bp, Homo sapiens
atgtccccatggcatcattttccttcatcacctacatgtgtattttttaccagacgagctctcactgtgttgcccaggctggagtgcagtgactgtacacaggcgtgattgtagccatcttcccacctcagcttccagagtagctgagactacagacatgggctactgcacccagctctcattggtattttttgaaaccagttattagatccaagtccttgattagattcagataatttttgtcttttgggtacatatacttcacaggtagtgtgtctctttctagggtatcaaggttatccaggtcctggctgtctctgccatccatctgcgtgtagtacatggccggttgttgcctactcttagcctcgtctatggtgtaggaaaagagtccatttccacttcccacaatygaacatttcagatagcaagatggt

SEQ ID NO: 565830 - DNA, 587 bp, Homo sapiens
aacagaggtgtatattttaaaaagcartagtgatgaaggttgaaaaaatggagaattcctttggtataaatgtttcattctaaataaaaatggttatatatatatttttggaataatcaattttaaatattattaactaattcatttttttgctagaaaaaggtttaaaatcttcactgggtcctttctgctaccaatccaataaatgtatggatttttaacattaaattagcagtcagtagttattctcattacgataatattcagtgatgagtcaaaatatatgattattatgatttattttataaaactaaacagggggaggctgttataacatgaaggcttgctctctcatgtacctgttggtggatacaggctgtagtctgagacctcagctaggtctactagttggaacggctacataggacctcttcatgtaggtacatgtcttcctcaaagcatgatggctgcattccagagaaagcatcccaaaaataacaaaggagaagttcataacttttttatacttggatttagaagacaaatagttttactcttggcatgtgctactgagagaagcagacaca

SEQ ID NO: 565831 - DNA, 570 bp, Homo sapiens
aaatttctttcttcacaacaaaactttctgtgtctgcgtaggatataataaattcctcttcaaaggttttagccagtaaattgttaagtacaatgagttctgagatcctctccaaagaactaatgtatcagtatgttcagctctcttgttctttgttcttcattttaaacttcctcattctttacgtctcttgcccctagtttcagtaaataaccccctyctagcctctatcacctgctctgaccttagtcaccccggtcacctactctgaccttagtcatctttggtcacctgctctgttcttagtcaccctgagtcacctgttctgtaaccatccttcccaccaaactagtcaccctgccactccagctcgtacccctgctctttttaaaatagccaatcagaattagcttagactgtgtggtccaaccctagccaataggggaacgacacagcagtaggggctacctgcgtcagggataagaaccccttcccctcccttgttcaggtgtgctctcgccattgctccatccacaagatacacccttctacagaagtaaaattgccttg

SEQ ID NO: 565832 - DNA, 511 bp, Homo sapiens
gaaccccttcccctcccttgttcaggtgtgctctcgccattgctccatccacaagatacacccttctacagaagtaaaattgccttgctgagaaaattaaatttatgtttgagtgctatttatttgtggcactgaaaatttatttccaacatctgtatagactactggagaaagatacctacaggaatgtcttctctgtactcctctattgatgtaaatcttgagccttttaacgtacaactgagacataaggaatagcatgtgtagtaggttagtgggaccctagtcaagttgagctgtggaaatgataatcttgtcaatgcaaaggaggaaatgcctcagtaaatcaaagtattgatcgtatatacagccctcaacagagacctaaaacatcaggccttaattaataaagargtttatatttcttatattaccagaaatctgggaagaggaaatccagagctgacccagctcctcaaatatgcaggctcctactatttttctgttccat

SEQ ID NO: 565833 - DNA, 558 bp, Homo sapiens
aatctcatctagtttttagcttctcgacttcatctacacatgaatggtgaggctgtaraagtctgtttcttgtgaatgacctacagataactggcaagcttggtaaaatctcatatcagagcaggttgaccaggtgatttgactagggaaggaaaggataagattagttagggttggccatttgccaggacaattgacctcaatatctctaagagctggaacacaaagttgatgtcttgctcatgaaataatccaagttgactccaggcttgggggatgggagtgtatgagttccattctgcacagtcattagggattaggaccaatagaggctctgtcttcttaaacacctgacttcccacatcactgtgggcatttgcatccacctggtggtaagggaaggagcatggaggaatgccacgtgagtggcttttacaggggaagcctgaaagtggctcacatcaattctgcaattttatatttgctagaacacagttacatggcagtagctaacggtaaggcaagctataaagtgtagttcatggaagagccaactgt

SEQ ID NO: 565834 - DNA, 437 bp, Homo sapiens
  misc_feature 29: n = A,T,C or G
attcaccaggtagctttaagttaaggtangttgtaaactaaaaggcaatccagtaaattaatgcatcccatgatgcattcattctaatgaatcaagttctaattgtcaagttactatatagtttccatgcagaataaattagagaacatatagccatcctcttaaatcacttcaaggactcacatagtgtctttagtagagatattttgacatttcaggaccattatcaatattggataatgatgacaatgaaaacaatagtgcttgtttttgagggttatcaatgtgcataacacttgtgcatggcactgaaaacttacaacaatcagtaaacttcatactgtctttagtactgtcctatagctgagaaagccaaaacttagaatagaaaatcarcttgctcacggttgcacagcaaataaagctaaaaaatagaa

SEQ ID NO: 565835 - DNA, 442 bp, Homo sapiens
taaacctggcaatctgcaaaaactwcatggggaacttgctgggattttcagtgttattggatagtagtattttgtttttgtttttgtttttgttttgctttttggttgttgtttttgtttttgttttgctttttgagacaggtccttgctctgtcagccaggctggagtgcagtggctgtatctgagctcacaacagtctcaaacacctggcctcaattgatcctctcaccttagcctaccaagtagctgaaactacagggtttcaccaccatagccagctaatttttttaaatttttatagagatagggtctcactatgttgcccaggctggtcttgaactctgggttcaagagatccccccaccttggcttcccaaagtgctgggattacaggtgtgagccagtgcccctgacgttagtataataatttgaatttattga

SEQ ID NO: 565836 - DNA, 424 bp, Homo sapiens
cttcatggggaacttgctgggattttcagtgttattggatagtagtattttgtttttgtttttgtttttgttttgctttttggttgttgtttttgtttttgttttgctttttgagacaggtccttgctctgtcagccaggctggagtgcagtggctgtatctgagctcacaacagtctcaaacacctggcctcaattgatcctctcaccttagcctaccaagtagctgaaactacagggtttcaccaccatagccagctaatttttttaaatttttatagagatagggtctcactatgttgcccaggctggtcttgaactctgggttcaagagatccccccaccttggcttcccaaagtgctgggattacaggtgtgagccagtgcccctgacsttagtataataatttgaatttattgattgg

SEQ ID NO: 565837 - DNA, 601 bp, Homo sapiens
  misc_feature 1, 2, 3, 4: n = A,T,C or G
nnnntggacagcatagatgagtgggttctccccgagtgaagcacaccctctccaccaagggacaaagtgcttcattaaacaggtcctgctccccatgccacccaagtgggtgagatcctccaacaggggttgtcagataccctatacaggaatgatcctactggcatcaggttggtgccacccaaggtcagaggtcccagaagaaggagcaagcacccatctttgctgttcttcagtctccttgagtgacatctctagacacaggaatgaatcagatgaatagggcctgaagtgaatccccagcaaactgcagcagccctacagaagagggacctgactattgaaagaaaaacaaaaagcagaaagcaacaaaaaaggccccacaaaaaccccatccaagggtcagcagcctcagagaccaaaactagacaaactcacgatratgagaaagagtcaaaaaaaaaaatgctgaaaactcaaaataccagagtgccccttctcccccaaatgatcacactgtctctccatcaagggcacagaaaagtatggaggatcagatggacgaattgacagaagtaggctaaagaagatgggtaataaa

SEQ ID NO: 565838 - DNA, 509 bp, Homo sapiens
gggagctacaattcaagatgagatttgggtggggacacagtcaaaccatatcaattgtgtagtgcctaccctacattggattctgtggtgaacacttagatgtaaagcaaagattgttacacttagtaacctacaggtatatggttatatctacatgactttcacccagctttttctttccctatcctccaatctttttccttctagtttctgatcaaccagtcaatttatttgctacactaaagaactcatttatatttttacctttggccacgtctttctctccacaaagtagatgaccgagtgtactgcttaaagttctgcccaaatgagaagtattttccctaccacaaggccacccattagtgggaagaaagttaacatrgtcctgcgataggataaaaaaatgtgtactgttgtttattccaagtgaatgagaactgcttctaacatttcgtatagagaagtgttagaaataatttattagccagatgcataactacatacca

SEQ ID NO: 565839 - DNA, 518 bp, Homo sapiens
actgaactaagttttgtaatctgtcacatttttattgctacacaaaatccttttgtgtatctcttctcctcccaacctatattttaaaaatttcatctaaaaaaaagtctaactgtaagtcatgccttagctcaaaatttttctatgacttctcattgcatgtagccaaaataccttagtatgacatttcacagtatctttactcatcatgccacctgctaaaatcttgcccatcctaaatgcttagtctctttatctttcgaatttttatctgaacatagaaaaatattacttagaaaaatattctttctccttggaagttgctatggcttgaatgtttgttctctccaaaactcatgttaaaatttaatccccaatgtggcagtattgatgggggggtgtgattgggtcatgaagtctctgtcctcatgaagaattcattcattcatggattaatagattaakgagttatcaggggaggggaactggtggctttataagaagaggaagaaagatct

SEQ ID NO: 565840 - DNA, 611 bp, Homo sapiens
gaaatgcaaactgcagaacggcaaagaaaaaacctttagaattgcaaaatttttgtatttttaaaaggaaagatttttattcacagaagcctggacttcttttagcatataattttgttgaaatataaataaaattatattttatttatattttcatattatatatgaatatatgaatatataatatgaaaacatacaaatcaaaagtttacagctgcatgaattttcatgaagaaagcacacctctgtaagtgcaccaggatcaagaaggagaatattattggcacctgcagaagccaccttcatctctctcattctcgaggatacagtacawtgacttctaataccatggattagttttgcctgtagaataggcaacatgtagaacatacttgtttgtaactagttcgatattacatttgttagagttattcttgttgtatttggtcttagtttgttcattttctttggtgtatagtatgccatcttatgcatatactataacatttgaatggacatttgaatgctgtccagtttggagctattacaaatattaggttggtgcaaaattaattgtggtttttgccattaaaagtaatttgcaccaacct

SEQ ID NO: 565841 - DNA, 412 bp, Homo sapiens
agatttcttctgtgaaatatsagtgccacagattgtaacagatagcttcatgcacactctgcattttattggtttgtttggaaaatgttggccattgaattattcatagatttatttcaaatagtttggaaattgttgtacttttgaaaacatgctgttcctgtagttttttgatgagagttatagttgttatatatacataaagataattttcttttcatttttaagagacaattctttttatcctaaatattttattatctttaaatttctttctgtattattatatgtgctcctgaagcgagcactctttttatctatgatacttccataataatctcttctatttatagctattggtagttccccaccacaaaaaaaacataattctggtgatagaaatttttatttg

SEQ ID NO: 565842 - DNA, 413 bp, Homo sapiens
gatttcttctgtgaaatatcagtgccacagattgtaacagatagcttcatgcacactctgcattttattggtttgtttggaaaatgtyggccattgaattattcatagatttatttcaaatagtttggaaattgttgtacttttgaaaacatgctgttcctgtagttttttgatgagagttatagttgttatatatacataaagataattttcttttcatttttaagagacaattctttttatcctaaatattttattatctttaaatttctttctgtattattatatgtgctcctgaagcgagcactctttttatctatgatacttccataataatctcttctatttatagctattggtagttccccaccacaaaaaaaacataattctggtgatagaaatttttatttgct

SEQ ID NO: 565843 - DNA, 412 bp, Homo sapiens
agatttcttctgtgaaatatcagtgccacagattgtaacagatagcttcatgcacactctgcattttattggtttgtttggaaaatgttggccattgaattattmatagatttatttcaaatagtttggaaattgttgtacttttgaaaacatgctgttcctgtagttttttgatgagagttatagttgttatatatacataaagataattttcttttcatttttaagagacaattctttttatcctaaatattttattatctttaaatttctttctgtattattatatgtgctcctgaagcgagcactctttttatctatgatacttccataataatctcttctatttatagctattggtagttccccaccacaaaaaaaacataattctggtgatagaaatttttatttg

SEQ ID NO: 565844 - DNA, 412 bp, Homo sapiens
agatttcttctgtgaaatatcagtgccacagattgtaacagatagcttcatgcacactctgcattttattggtttgtttggaaaatgttggccattgaattattcatagrtttatttcaaatagtttggaaattgttgtacttttgaaaacatgctgttcctgtagttttttgatgagagttatagttgttatatatacataaagataattttcttttcatttttaagagacaattctttttatcctaaatattttattatctttaaatttctttctgtattattatatgtgctcctgaagcgagcactctttttatctatgatacttccataataatctcttctatttatagctattggtagttccccaccacaaaaaaaacataattctggtgatagaaatttttatttg

SEQ ID NO: 565845 - DNA, 413 bp, Homo sapiens
gatttcttctgtgaaatatcagtgccacagattgtaacagatagcttcatgcacactctgcattttattggtttgtttggaaaatgttggccattgaattattcatagatttatttcaaatagtttggaaattgttgtacttttgaaaacatgctgttcctgtagttttttgatgagagttatagttgttatatatacataaagataattttcttttcatttttaagagacaattctttttatcctaaatattttattatctttaaatttstttctgtattattatatgtgctcctgaagcgagcactctttttatctatgatacttccataataatctcttctatttatagctattggtagttccccaccacaaaaaaaacataattctggtgatagaaatttttatttgct

SEQ ID NO: 565846 - DNA, 413 bp, Homo sapiens
gatttcttctgtgaaatatcagtgccacagattgtaacagatagcttcatgcacactctgcattttattggtttgtttggaaaatgttggccattgaattattcatagatttatttcaaatagtttggaaattgttgtacttttgaaaacatgctgttcctgtagttttttgatgagagttatagttgttatatatacataaagataattttcttttcatttttaagagacaattctttttatcctaaatattttattatctttaaatttctttctgtattattatatgtgctcctgaagcgagcactctttttatctatgatacttccataataatctcttctatttatagctattggtagttccccaccasaaaaaaaacataattctggtgatagaaatttttatttgct

SEQ ID NO: 565847 - DNA, 341 bp, Homo sapiens
ggctaatttttttatttttagtggagattgggtttcatcatgttggccaggctgatctcgaaagcctgacctcaagtgatccgcccaccttaggctcccaaagtgtggggagccacygtcccggtgtattattacttttagagacgaggtcttgctttgttttccaggctggagtacagtggctcaatcatagctcactgcagcctcaaactcctggccttaagcaatcctcctacttcagcctcccaaagtgctgagattataggtgtgagccactgcacctggcctctctattctctacttcctctttctagaatttctattaggcggatgttgaatct

SEQ ID NO: 565848 - DNA, 514 bp, Homo sapiens
ggacctgctctctctgggtggccgttgttcactccaccaccccaggtttccccatcctaccaaaagacacagcagcattgtgtcaactgcccaaactgaaaacctatgagttattctcgacctgwcctttttcctgagcaagttctgtggatttaacttagcggtcacactgccaacttcaaccgaactccactgccaccaactcagtccaggccaccagttcttgtttaggtgactgccatgacccccattggtctctccctgcctcaactctgtcccctccatcctatatccccacactgtaaccagactgattatttatttatttatttattttttggggaaagaagcttgctctatcccccaggctggagtgcggtggcacaatctcagcttactgcaacctccgcctcccaggttcaaacgattctgcctcagcctcccaagtagctgagattacaggtgtctgccacaatgcctggctaatctttgtatttttagtagagacgggttt

SEQ ID NO: 565849 - DNA, 375 bp, Homo sapiens
tgtgaattgcaaaaggctaattgatgcctttgattttctgtgaaccatggcaaaacttgtggagctgtgctttttattttttatttttttaggcyaaggttaggttgaccattagagtattaacttggtattttaagtaaaagaaacaccactactaaattcttagacctcagtaagcttcttaaataatgattagaccataatataattagaagtaatgcaaataaacatttaaagcagtttttacagtaattttgttttgtttctgaggtttttgatctgtgttccacttattgctacttaagtgtcttattttagtgacaatacacctcttcttattcactcaaaaataacatggtagtaaaaaattgaaaa

SEQ ID NO: 565850 - DNA, 375 bp, Homo sapiens
tgtgaattgcaaaaggctaattgatgcctttgattttctgtgaaccatggcaaaacttgtggagctgtgctttttattttttatttttttaggctaaggttaggttgaccattagagtattaacttggtattttaagtaaaagaaacaccactactaaattcttagacctcagtaarcttcttaaataatgattagaccataatataattagaagtaatgcaaataaacatttaaagcagtttttacagtaattttgttttgtttctgaggtttttgatctgtgttccacttattgctacttaagtgtcttattttagtgacaatacacctcttcttattcactcaaaaataacatggtagtaaaaaattgaaaa

SEQ ID NO: 565851 - DNA, 375 bp, Homo sapiens
tgtgaattgcaaaaggctaattgatgcctttgattttctgtgaaccatggcaaaacttgtggagctgtgctttttattttttatttttttaggctaaggttaggttgaccattagagtattaacttggtattttaagtaaaagaaacaccactactaaattcttagacctcagtaagcttcttaaataatgattagaccataatataattagaagtaatgcaaataaacatttaaagcagtttttacagtaattttgttttgtttctgaggtttttgatctgtgttccacttattgctacttaagtgtcttaytttagtgacaatacacctcttcttattcactcaaaaataacatggtagtaaaaaattgaaaa

SEQ ID NO: 565852 - DNA, 472 bp, Homo sapiens
agtctatgtaacaagcattactractagcctttatctgtcattggtttccttcctacaacatatctactttcttacaatttcttgcccttggaagcctaccactgctttcctttcatttctctagatttattactctttgtcaatgctgctgtataatcccgagttttaagccactttttcaagtcactcatctcttgttagtcccattttacatgcatgatacacatgttaaacttttgcttgtttttctcctgttaacctgccttttgttacaggggtccagctgagaatttggaaggggagaggcaaatgctttttcctcctctacaatagtataaatatgcatatgtatgttttgagtcctcactaattgtcatatactatccatgttttatacccattttttggccacataatatattcaatatctgttatttcacttaatccttgagttaatcatgcgaggaatgt

SEQ ID NO: 565853 - DNA, 472 bp, Homo sapiens
agtctatgtaacaagcattactaactagcctttatctgtcattggtttccttcctacaacatatctactttcttacaatttcttgcccttggaagcctaccactgctttcctttcatttctctagatttattrctctttgtcaatgctgctgtataatcccgagttttaagccactttttcaagtcactcatctcttgttagtcccattttacatgcatgatacacatgttaaacttttgcttgtttttctcctgttaacctgccttttgttacaggggtccagctgagaatttggaaggggagaggcaaatgctttttcctcctctacaatagtataaatatgcatatgtatgttttgagtcctcactaattgtcatatactatccatgttttatacccattttttggccacataatatattcaatatctgttatttcacttaatccttgagttaatcatgcgaggaatgt

SEQ ID NO: 565854 - DNA, 603 bp, Homo sapiens
ttttcgcattctcttatctaaaaataaataatttactggggtctaatgggattaaatacaataacgtttgtaaagtatttagcataattcaaagyatgtggtaagcccataacgacatttactaagaatctgcttttgtgtgtgttttattcactttaaatatttgaagctaatttgatatatatatatgtgtgtgtatacatatctccaagtacttcatttcccatggaaatacactcactttattcaaactgtaagttctttttccatagaccaagtaaagaaccttacttaggaatgtagcacttttaagactttgctccaaattatgcagacacaagccattttaatttgaaaggcattcactaaagagggtagatgggattaaagaatagaaatgtataagacgtggttaagacttttttggctttactgctgttgattcaaagaataaacagattgcacaaaggtgctaaaatgatttcaggccaaactttgaggcaagtactccatgtgaatattattgcctttcaccaatgtaactatcacttccacgcagggttaggcaacttataaaagttggtctgccttaaatcagttagt

SEQ ID NO: 565855 - DNA, 584 bp, Homo sapiens
tgaaccaacctaagcactttgagaggttacagatatacatattatctatatctacagctatatttatctatctacctatttatcttttaattgttcagtaaagctccttgcttgaattttaaaatattccaatctttctaaaatttaaaatattgataacactcattactgttgggaatatagcttggtacacacattttagaggcaatttgacattacaaaccacaatatttcacattattaatattttaatataccttaaataaatgatttgaaatgtataagaagatatgtggaaaaatatttttggttaggctctttgaatagtttaatattgaaaaccaattcacaacaaaaccagattgcctacaaaattgcaaatgtataatcgtatcaatgaatatgactcaataatgaaaatgacaatgtagatttctatttgttgttawggaaaaattcaagtattacattatcaagagcaaagtatgtaaactatgttcatcataaagtcacgttaaaggcggatagatagatagattgatagatagatagatagatagataatctctgtgtttagcgagcaa

SEQ ID NO: 565856 - DNA, 530 bp, Homo sapiens
acctagacattctcacaacctcctcccccagccccccaacacagaaggtctttagagggcatagtatgaggagagagaaagtaaataaataacttactgcagtttttgaacttttgattgaccaggatgataaacactaggaagcagatgacaggaataactggatccttgtgcactgttcgaataaagtggttactcagatgagggggtgaggcaagaattcttatagatacctagcataagcactgtgagcctgtacctaatccrttctaccagaaggaaaaatataaacagatagcaattcacctggtatttgcatatgttgagccctgaggaagcaggaagagtaacctggtctctcttcagccacccaggatgagagataaatgtgagctgttctgagattgtgaagtttgagaagcaaatctccctccccttaaagattagagaagactttcagatatatctagccacttactcaaggataaaaattggttttgccagaaaaggcaaagatttcctctatcagg

SEQ ID NO: 565857 - DNA, 560 bp, Homo sapiens
tagggaattttaacctagacattctcacaacctcctcccccagccccccaacacagaaggtctttagagggcatagtatgaggagagagaaagtaaataaataacttactgcagtttttgaacttttgattgaccaggatgataaacactaggaagcagatgacaggaataactggatccttgtgcactgttcgaataaagtggttactcagatgagggggtgaggcaagaattcttatagatacctagcataagcactgtgagcctgtacctaatccattctaccagaaggaaaaatataaacagatagcaattcacctggtatttgcakatgttgagccctgaggaagcaggaagagtaacctggtctctcttcagccacccaggatgagagataaatgtgagctgttctgagattgtgaagtttgagaagcaaatctccctccccttaaagattagagaagactttcagatatatctagccacttactcaaggataaaaattggttttgccagaaaaggcaaagatttcctctatcaggaagataatgttcagatct

SEQ ID NO: 565858 - DNA, 530 bp, Homo sapiens
acctagacattctcacaacctcctcccccagccccccaacacagaaggtctttagagggcatagtatgaggagagagaaagtaaataaataacttactgcagtttttgaacttttgattgaccaggatgataaacactaggaagcagatgacaggaataactggatccttgtgcactgttcgaataaagtggttactcagatgagggggtgaggcaagaattcttatagatacctagcataagcactgtgagcctgtacctaatccattctaccagaaggaaaaatataaacagatagcaattcacctggtatttgcatatgttgagccctgaggaagcaggaagagtaacctggtctctcttcagccacccaggatgagagatraatgtgagctgttctgagattgtgaagtttgagaagcaaatctccctccccttaaagattagagaagactttcagatatatctagccacttactcaaggataaaaattggttttgccagaaaaggcaaagatttcctctatcagg

SEQ ID NO: 565859 - DNA, 629 bp, Homo sapiens
gctttgttccttttcaaattacttccaagacaagaagcgaagaagatcaagccaatgacctacctactagcatgcatttttaggataaaaaataagttgcagcttacttgaggtaatattctaagtcaaccaaaaatggagggaaccaagcctatgatcaaattacccttgaaaaatcccttatgtagcaaaagaaatatggagacttagttttgtatagacaatcttataaaagaatatgttaatatgttttaaacacatcaagcactcattaaaagtgtgtgaccttaaagttatagctaaacaccacattcttcaatttttccatatgcaaaatcaggttaataataataatatatatctcataagaaaattgtggagataaattagttaatgggtataaaaacacctacagcaatgcttagcacatagtacatgctcaacctattatttaaaaatatataataragagtatctaatgtaaaatgtaaaaaaaattacacagtatttttatcacatgtaaatgacatagttaagcccatatgttggaatttttgtaggctaatacaaacctaacgtgttgttagttggtaggttaatagaaacctaatatgttgcaaaaatagtgt

SEQ ID NO: 565860 - DNA, 443 bp, Homo sapiens
ctcagaactcttgaggcccaactctgatatgtggcttcctattttacataagcgacttttgaacagatgctatttctaagtggggaaggaaacatactggcatattatttttgagggaaaagttaaagattattaatattgctaactatatttagcaaaaagtattactttcttctataggtttgctaactcgtttttgctattctaggaccagcaactatgaacacattatcttactttctatgaacaacagaaaaaaaagcaaacacagtttgacttgtaagtcattgcaaagaaacagaccatatgtttcacattgtgccaragcttcacaatgaaaaattttaagacagaatgaaaatgtagatgaaaaagaaaggaaggaagaagtggaaggagagagggagggaggtaagaagaaaggaggaaagggagagttcatt

SEQ ID NO: 565861 - DNA, 633 bp, Homo sapiens
ttgaaatgcatatggaaatgcaacagaccaagaatcattaaaacaaatttgagaaagaaaaataaagttgcagaatttatactatattatttcaaaacttactgtgaagccacagtaatcaatacagtgtggtattggtgaaaaataggcatatagatcaatggaagaaaattgagagtatagaagcgtatttacatttttgatcaattgatttttgtaaaagtacaaaaccatttaatgcaaaaaaaagtctttttaacaaatctttctgaggcaattgaatatcaacatatataatatataaatgcacacacacacacttctgtgcttcacaaagccataaagaaaaatgacataatctkggacaaaataactgcaaatcattcttttgataaataatttgtaggcagaacacataaagaactttcacaatataataataaggaaacaacccaattgaaatatggggaaataatctgaaccgttattgcaccaaagaacgtataaaaacgagtaataagcacatacaatgatactgaatattattagtcattaagaaaatacaaattaaaaccccaataagatcacttaatatttgctagaatggctatactcaaaagacagatagtacca

SEQ ID NO: 565862 - DNA, 633 bp, Homo sapiens
ttgaaatgcatatggaaatgcaacagaccaagaatcattaaaacaaatttgagaaagaaaaataaagttgcagaatttatactatattatttcaaaacttactgtgaagccacagtaatcaatacagtgtggtattggtgaaaaataggcatatagatcaatggaagaaaattgagagtatagaagcgtatttacatttttgatcaattgatttttgtaaaagtacaaaaccatttaatgcaaaaaaaagtctttttaacaaatctttctgaggcaattgaatatcaacatatataatatataaatgcacacacacacacttctgtgcttcacaaagccataaagaaaaatgacataatcttggacaaaataactgcaaatcattcttttgataaataatttgtaggcagaacayataaagaactttcacaatataataataaggaaacaacccaattgaaatatggggaaataatctgaaccgttattgcaccaaagaacgtataaaaacgagtaataagcacatacaatgatactgaatattattagtcattaagaaaatacaaattaaaaccccaataagatcacttaatatttgctagaatggctatactcaaaagacagatagtacca

SEQ ID NO: 565863 - DNA, 535 bp, Homo sapiens
ccaacagtgtttgagcactcaagttcacaaaatagcaatacaatccttgattttgttcagatgttaactacattttctatatcatgatgcttgatgcccagtatatgtgaataagagaagcactgtcttcccaaacaagattttattttcaagatcttctatttcttgagactattttaaaacattatctggcaatatgtttctgagatattaccattttgaactttcacagtatgttgttattctaacacaagtgtaaaatcctttcaccacaacaagagtaaacatgtttaattgatgcaaaatatcaagtagcattcagtcacatttttcctaaaattatttccacagtagatattttatgcaggatattttaaaaattaaagaagacacatacagctagctcacaacttgccagccactaaaataaaataasatcctgatatttaaagagagccatgatatttctgggggctcactttatgtttaactaagcatggaaaaagttttttaaatgtgtttaaagtatcagttt

SEQ ID NO: 565864 - DNA, 562 bp, Homo sapiens
gactgaatccctgactttagacartaacttaaagccatatgaataaacatagatgtgagtaaagataaatacattgacagttataaaatcaagtattaatttaatattggtttataattacacctttgttttctacatgatgtaacaggccaatagttttttaaaaaactacttttagtttaaaaattagaattattgtaacttcagttggtagctgcactttttttctatgtaatttaagagattagtgtattgaaggacaatcattactgtatgtatttagatacacaatgtataaagatgtaattttgtaacatcaataactgaaagttggtggggacagagctgtatagaaacagagtttttgtatattcttgaagttaaactagagtaaattcacgttggaatcaaacattgagacattacatgtaattatcattgtgcctacacaagaaaataatattaaatttagacaaaagggattaaaacagttcattgccaaaaaatatctagacacaaaagaaaagaataatgtagaaaattaggtatgaaaatactgtaa

SEQ ID NO: 565865 - DNA, 618 bp, Homo sapiens
gtattaaccatcaaaaccctgtttattattaaataatcaaaactggaacttgtctggctaactcattcattagctgatgtctgcaagttactttgtgaacaacttgcactgcaagtttrttcttctaaaatattcatatatttcacatgtatgtaagaatgttatttgagctaagaataacaggtttctcttcttagaaaaactattaagctgaatttcataaaataaattagtaatatctatgtggtgtttctaaactttttggattggggatgtttgccattctaaagcctttactcagctctcttcccaagtaaactagctagaaaatgcaaatggcatgaaacctaaatgttagaatgagtgtgcgcttattctgcttcattaacagcatagcagaactgtatttctgtgaaattctgttttaattaagttttagtaaacatctcctggaaaagctaaatgccattgataacatttctgtttttagtaaatgcaatatactgagctcttatatcagccttgactcttatttatttattcaacatgattaccaagtcccttatctcagctaggcactatgtattaatctattttcacataataacatggtaagtt

SEQ ID NO: 565866 - DNA, 532 bp, Homo sapiens
tcaataacagaaattttgaaaggatgaaacagaaggcagaaagaagactttaatttagactggggtatcagggacagatttctagatgaagtgctgccagagttctctgaatcaatgagtatattggctaggtgtgataagaagtgataaattaggaaaggcaatagcaaagggagcagaatgagccagagtttagcaagagtttccactcattccctgagaaaagaaatgtgggccctgaggaagggtctctgggaaatggtacatttagggatagaactgttgggtgggataacaaggtggggtgacgattctgtaatagccacaaagatagacygaggttctggtggcaaaatggacaggatgttgaaaggaacgtcttttcttttgtcaggagtgtaggaaattctagaaaaatatgaactccatggttgaggccattgctttctatgcagattacgaatgccagagttcaagtcagcttccattgaagaatcaagtaattttgtcctgaaagcaggaaaagctgcgt

SEQ ID NO: 565867 - DNA, 532 bp, Homo sapiens
tcaataacagaaattttgaaaggatgaaacagaaggcagaaagaagactttaatttagactggggtatcagggacagatttctagatgaagtgctgccagagttctctgaatcaatgagtatattggctaggtgtgataagaagtgataaattaggaaaggcaatagcaaagggagcagaatgagccagagtttagcaagagtttccactcattccctgagaaaagaaatgtgggccctgaggaagggtctctgggaaatggtacatttagggatagaactgttgggtgggataacaaggtggggtgacgattctgtaatagccacaaagatagactgaggttctggtggcaaaatggacaggatgttgaaaggaacgtcttttcttttgtcaggagtgtaggaaattctagaaaaatatgaactccatggttgaggccattgctttctatgcagattacgaatgccagagttcaagtcagcttccattgaagartcaagtaattttgtcctgaaagcaggaaaagctgcgt

SEQ ID NO: 565868 - DNA, 538 bp, Homo sapiens
gcagctatttttaattatcgaagaattaagagttgatgagggttgttgaaagaatgtatccattgtacatggaagatgtaattcaggatgaaattagtattgcatatctttatattgtgttatacattctatgattcttttgttcccaagctctaaactgagaaaagagaagattggattattgatgacccttttatgctaccacactacattgtgacctttttttttttccttttactttactagcatgcagtcttaatagagaaaaactgtgctgaagtttaraaaggcatactttacatatgttgagatatatattgctgttcgtagggataaacaaatctgatggccacactgaattatagaaggcaatgtgatatagtggaaatggaccttgtctataagttgagccacttcattaacttttttactttgcactcctcactttaagacatcgcattgcttatttggaaagtgaaaaagtcttcagggattctatagtcattgttttttctttctttttttttttttaacattt

SEQ ID NO: 565869 - DNA, 624 bp, Homo sapiens
taatctctctggtcatctttgtatcttgaaaaaacaattgattaatacctcaacttcatcaaaaaacccttgtttaccattggaaaactgaaatttttagcaagaagaaaaaactgaatataaatctattcattttaattacaataagcagaaatagaattaataagttaattctataagttatgttagcatttgtaaaaggaggcttaaaactgagtctcatgagatttgtccttgttggagttgtaggagatgaggttaatccactaattcttaacgtacatcatgtgaagtaccacgtgggtcaaccctsatcaggctttatccacagaaacagattttcctaaaactgaaccagaaaagaagtaatagagggagagtttaatccagactttcaagtttttgactggtggatataagctaatctgttcgacttcaataagattctgcttacctgacttgttttttgtagatttcaaaaactctatttgttatttggcctctaaagcatcactggacctttttctttctttttttttttttttcaatacagatagactttaataaaatgccctaagtaatattctttatccttttcctcttagttgcttgatatgttcttcc

SEQ ID NO: 565870 - DNA, 449 bp, Homo sapiens
gatagactttaataaaatgccctaagtaatattctttatccttttcctcttagttgcttgatatgttcttcctgtgtcattttctcttttgatggattctgcatataccacgtttctgataagcattctctaaatcactttgtyctctctcacagttggcattttttttgaagtctgaaaattttctgttgcttcccttagaacttggtctcatgagcattttaaatctaatgatgttatgatcactcgatcttagatgttcccagtgtgaagcttatttaacatacttggcactctttcagggacgaagtccagaattcaatggagtcatgttggctgctcaacagactatagagaaaagtaatcctgatatacaggccctgaggaaacatggagtctcttctttctctattgctgccaaagctagtttctctaataatacaccagca

SEQ ID NO: 565871 - DNA, 650 bp, Homo sapiens
agatattttttataaaaggaaattctagagataaaaactgtaatgtcagagataaaaagatacaatggatatggtaaatagcaaaagaaatgctgcagaaaaattagtgaaattgagaacattgcactatatataatctaaaacgaaagagagaagaaaagaccaaaaaagtcataacctcagaaaactatagaaatcttaaataacaatatgtttacatgtaatttaaatttccagagaagaaaayggaccaaacaattgaaataaaaagtaaccacaattttccaagtgtgttgaaaatgataaatatatagatttgagaagctcaaccaacccccaagtcaaagaaacatgaagaaaactataccaaggagcattataaatagattaaaagcaggcataaaaagaaaaatgttgaagtattcagagttaaaagaaatattttatacagaacaacacagataaaaatgacagctgactttttctttgaaacaatgaaagccaaaaggcaaaacagaaacatcattaaagtactgaaataatattttttaaaaaactctgtcaacttagaattctgttttcagtgaaattgtctttcaaagacaaaggcatcctaaaaatacaggcaaggccatatcaaaatcacaatc

SEQ ID NO: 565872 - DNA, 444 bp, Homo sapiens
acaaaggatgattgacaagaatgtgggacaactagaactctcattcactgcccctaacaatctaaaatgataaaactacttttgaaaacagtttgaaagtttcttaaaatgttgaccacatatctcccattgggtccattcattccacttstagatatttacccaaaagaaatgaaagcaaatggagcctaaaagttgtagataaatgtttacaggagcattatatataaaagccaaaacaggcaatggcccacatcaacgtggaaatggctaaacaaattatgacatatacatacaatgaaattgactcaacaatgtaaacaaatatccaacagtataagaaaagtgccattttcttcttatctttcatcatatgcttcaaggatgcatattatcaatatgtattagtgtttatgtcaacctttgtcacctgagagacagaat

SEQ ID NO: 565873 - DNA, 444 bp, Homo sapiens
acaaaggatgattgacaagaatgtgggacaactagaactctcattcactgcccctaacaatctaaaatgataaaactacttttgaaaacagtttgaaagtttcttaaaatgttgaccacatatctcccattgggtccattcattccacttctagatatttacccaaaagaaatgaaagcaaatggagcctaaaagttgtagataaatgtttacaggagcattatatataaaagccaaaacaggcaatggcccacatcaacgtggaaatggytaaacaaattatgacatatacatacaatgaaattgactcaacaatgtaaacaaatatccaacagtataagaaaagtgccattttcttcttatctttcatcatatgcttcaaggatgcatattatcaatatgtattagtgtttatgtcaacctttgtcacctgagagacagaat

SEQ ID NO: 565874 - DNA, 553 bp, Homo sapiens
gggttcttaatttggattgttacatttttttaagttttagaatttttaaattatttttattttaaaattctgaatagtaccttatataatttccaatttcctgccgatattttcaatatcagctattatttccctaagtatattaagtatacctatttcactatctataatagtaattccactatttgtaatatctgatgtctctttttattatatgttgtttgtgctggttctcatttaccttgttttatttctttatagccttggttatatttgagagggyaggacaatgcgtttgaaaatacaaatgtaaataatttgaaggttagggtgatgttatcgtccctcatatagatgcatatcaaatttgttttattccacatacatctgggagcactggcaatctggaatcatcacatttgaaggcttgagattattctaggccatccaaatgattcaaagaccagtcaagttaatgtgaatattgattagctttcaattcacattaacttctttagcctttcaagttcccaataccaagttggatctattt

SEQ ID NO: 565875 - DNA, 600 bp, Homo sapiens
ccttaatccaagttgacaagtaaagttaaccatcacattaggacgggggacaaggaagggaaacctaagcagagcctggtagactccttaaattgaagaggtagggagaagagttcagaaaaacaaaggcagctaaagtttgcagggcagagtaatgcaacagaactctaaagatccacagaatttcccccttgggtattcagtagaagagtgatgagtgcatggctatgaggaaactctctgaggcaggcaaggaggctcackgctgtaatcccagcaatttgggaggccaaggcaggtggctcacttaaggtcaggagttcgagacaagtcaggccaacatggtgaaacccagtctctactaaaaataaaaaggtgggacgtggtggcaggcacctgtaatcccagctacttgggaggctgaagcaggagaatagcttgaatctgggaggtggaggttgcagtgaaccaagattgcgccactacactccagcctgggtgatagagcaagactccagctcaaaaaacaaacaaacaaaggaaactatctgagaccaagataaggctacctataagaattagaggaagtagtacacagag

SEQ ID NO: 565876 - DNA, 482 bp, Homo sapiens
cccacaatatcaccccttaccacaaaatcttccttcagcttaatctctcccactctaggttcccacaccacccctaattccgctggaagtagccctgagaaacatcgccaattatctctccataccatcccccaaaattttcgccrtcccagcactttaccactatttcgttttatttttcttattaatataagaagacaggaatgtcaggcctctgagcccaagctaagccatcatatcccctgtgacctgcatgtacacatccagatggcctattcctgccttaactgatgacatcttgtgaaattccttctcttggctcatcctggctcaaaagctcccctactgagcaccttgtgaccccgccactcctgcccaccagagaacaacccccctttgactgtaattttcctttacctacccaaatcctataaaacggccccacccctatctcccttcgctgactctttttggactcagcc

SEQ ID NO: 565877 - DNA, 482 bp, Homo sapiens
cccacaatatcaccccttaccacaaaatcttccttcagcttaatctctcccactctaggttcccacaccacccctaattccgctggaagtagccctgagaaacatcgccaattatctctccataccatcccccaaaattttcgccgtcccagcactttaccactatttcgttttatttttcttattaatataagaagacaggaatgtcaggcctctgagcccaagctaagccatcatatcccctgtgacctgcatgtacacatccagatggcctattcctgccttaactgatgacatcttgtgaaattccttctcttggctcatcctggctcaaaagctcccctactgagcaycttgtgaccccgccactcctgcccaccagagaacaacccccctttgactgtaattttcctttacctacccaaatcctataaaacggccccacccctatctcccttcgctgactctttttggactcagcc

SEQ ID NO: 565878 - DNA, 550 bp, Homo sapiens
aagccccagggtgggagaagagaagccaggcaaggtacccaaggagaggctccactggatcttgtgctctacagtctattgcaaggcagctctggtgaacaattagtcaatgaccctgggcagtgtggctgagttggcacctgagaggtagctggcagaggggtctgagacaatggtctccttagttggcaccacaactccacaaggcagtgggatatgatgtcttcaacaggctctcatcctaaggtcgtgaatactgctagcttgtggatcctgctgcccctcagggctgcacttctgtctcccactggagtaaaaacctgtcttcttgtagctctatgattggcactagttttccttcttttttttttttttttgagatagagtcttgctctgttgcccaggctggartgcagtgatgtgatctcagctcactgcaacctccgcttcccaggctcaagtgattctccagcctcagcctccctagtagctgggattacaggcgcacaccaccatgaccagctaatttttgtatttttagtagagacgg

SEQ ID NO: 565879 - DNA, 253 bp, Homo sapiens
ttggtgattttgctgcttagaatgagccccaagcttagcgtttgaaccaaataaaccatgatcacgccactgcatcccagcctgggcaacagagcaacaccctgtctctaaaaataaaaaataagtaaaaacgtggaaaatgtatcattaaatagacctcgaaaaagacasttgtttacaataagagagctgaaataggaaggccacacctgggaacatacaggtggctcaaattttttgccattttgtgcac

SEQ ID NO: 565880 - DNA, 620 bp, Homo sapiens
aattaaaatggtttatctcatcttcatctgttttatgccaatttaattcataacccagccaaagaacctgggcaggttagacagaagccatttttcctcctctgcaatatagataacaaaaaatatggacagcaaatttctcattttttaaaaaaggtacaaaaccaaagtcaataaaatatctttaaagtaattaaaagaaattaactgtcattgtaaaatcatacatgcactgaaaatatgttttaaaaattagtcaaaataaggctttttcagtcaaaaagcaaaacaacacaacacaacctggaagaattcagcaccagcagacctgtactgcaagaaatattaaagaaagtcctttatatgaaatgaaaattataccagacatatcttgagctaaataaggaatgaagaatagcacaratggtaaatatgtgggtaaatagagacaattttttaatgttttaaacatatcattggaagtttaagaaatgtaaaagaggccaggcgctgtggcacacacctgtaatcccagcactttgggaggccgaggcaggtggatcacgcggtcagatcgagaccatcctggtcaacatggtgaaaccccggctctactaaaa

SEQ ID NO: 565881 - DNA, 358 bp, Homo sapiens
gtcttctaagtgtattttatttcctttcattcctgttctaaagctttttaatacactttcactcttgatgtaaaacttgcctcagtctctccttctgccttatgtccctcaggtgaattctttgttctgagaagccaagaattgasgttgctgcagccccgtatggatactttccactgataacaacatgagggatgagaaaattagaatattctagcattactaatttgctttattatacacagaatcatctcagaatactaatactaatacaaccactgccaatatgatcagagaaaagacttagttttgttgtaactattgtctgtggcttttggttttgctgtatatttgtttt

SEQ ID NO: 565882 - DNA, 647 bp, Homo sapiens
ctgttagaaatacaaagcctcacccagcctaccagatcagaaatctgggagtgagtcccagaaatccattttttgacaagctttcccagtgattcggatgtacacttaagcttgagaaccactgctataacaaattacatcccgtggtctacagaggtaatccacagggattcttaaattcttgtggagagcaacatgctgattaggaaagagattgttattttttgcccaattttaatggcttgttttgaatattctctccatttattaattgaggagaaaagtatcaacctaaactccgggttttgccaggcagaaagttggtataatatttattattattagaaatcatagcatcaggaaagccttaaaacatatgaagagcttcttaaataagtcctgaattatttcaaatgagatcaatccatgttgagctttcaattagaaaagtgaaattttatagttatggattgggttggaagacagtcgaacctaatcttctgtgtccaaaatctccttcttcrgtgagcaacaaaaagaaatgaagctcaaatgaatgtccctaaagtcttgtgggaaactcaataataaaagaaaaattcaatgcttgtaatcccagcactttgggaggccgaggcgggcagatc

SEQ ID NO: 565883 - DNA, 647 bp, Homo sapiens
ctgttagaaatacaaagcctcacccagcctaccagatcagaaatctgggagtgagtcccagaaatccattttttgacaagctttcccagtgattcggatgtacacttaagcttgagaaccactgctataacaaattacatcccgtggtctacagaggtaatccacagggattcttaaattcttgtggagagcaacatgctgattaggaaagagattgttattttttgcccaattttaatggcttgttttgaatattctctccatttattaattgaggagaaaagtatcaacctaaactccgggttttgccaggcagaaagttggtataatatttattattattagaaatcatagcatcaggaaagccttaaaacatatgaagagcttcttaaataagtcctgaattatttcaaatgagatcaatccatgttgagctttcaattagaaaagtgaaattttatagttatggattgggttggaagacagtcgaacctaatcttctgtgtccaaaatctccttcttcagtgagcaacaaaaagaaatgaagctcaaatgaatgtccctaaagtcttgtgggaaactcaataataaaagaaaaattcaaygcttgtaatcccagcactttgggaggccgaggcgggcagatc

SEQ ID NO: 565884 - DNA, 562 bp, Homo sapiens
tgctgctgctgctgctgctgttgttgctggtgatgatgatgaataatcagggacttggcaagtgggaaaaatggcaaatcctatcatgagcatgaaatattcttaattggaattagtgaaagagtacgaagaataagcttgaatgagataagttaaaaaggtcttgcctttaggttcagccagatgacattcatggacagtctcctgctgtggctgggttgcttctgacgttcattctggactccaaggacaggcttccattggcactcatcctgagtgctggctctgagacttaaatctctgtgastccaggctggctgcttaaatgctctgagtctcaattttcttatctgtaagatggagatttaacactcatatcaacaggttattgtgagaattaaatatgataatgaatgtgattagacaccataaagcacatgtaaaagcttgtgattgcactgccatccaacaccatttaaggtctgtgtaactcactgggtatttaaaaaaatgcttccagggagttaccgtttttttgtgtatgtttccctcctctccctcc

SEQ ID NO: 565885 - DNA, 562 bp, Homo sapiens
tgctgctgctgctgctgctgttgttgctggtgatgatgatgaataatcagggacttggcaagtgggaaaaatggcaaatcctatcatgagcatgaaatattcttaattggaattagtgaaagagtacgaagaataagcttgaatgagataagttaaaaaggtcttgcctttaggttcagccagatgacattcatggacagtctcctgctgtggctgggttgcttctgacgttcattctggactccaaggacaggcttccattggcactcatcctgagtgctggctctgagacttaaatctctgtgactccaggctggctgcttaaatgctctgagtctcaattttcttatctgtaagakggagatttaacactcatatcaacaggttattgtgagaattaaatatgataatgaatgtgattagacaccataaagcacatgtaaaagcttgtgattgcactgccatccaacaccatttaaggtctgtgtaactcactgggtatttaaaaaaatgcttccagggagttaccgtttttttgtgtatgtttccctcctctccctcc

SEQ ID NO: 565886 - DNA, 562 bp, Homo sapiens
tgctgctgctgctgctgctgttgttgctggtgatgatgatgaataatcagggacttggcaagtgggaaaaatggcaaatcctatcatgagcatgaaatattcttaattggaattagtgaaagagtacgaagaataagcttgaatgagataagttaaaaaggtcttgcctttaggttcagccagatgacattcatggacagtctcctgctgtggctgggttgcttctgacgttcattctggactccaaggacaggcttccattggcactcatcctgagtgctggctctgagacttaaatctctgtgactccaggctggctgcttaaatgctctgagtctcaattttcttatctgtaagatggagatttaacactcatatcaacaggttattgtragaattaaatatgataatgaatgtgattagacaccataaagcacatgtaaaagcttgtgattgcactgccatccaacaccatttaaggtctgtgtaactcactgggtatttaaaaaaatgcttccagggagttaccgtttttttgtgtatgtttccctcctctccctcc

SEQ ID NO: 565887 - DNA, 545 bp, Homo sapiens
cagttcactcggatgaggctagcagtgatctatgctacccaggcaaaagtcaaggcctgagtgaagacctcacctccgtcactgctgcctaccctctcctgcatacttgctgggtgctgccccagacgccagcttcttgctgcatttgttgtcatcaatgaaagccaggctcatgtggaagtgtcatgttatttttcttatattttgtggggaaaggacagctttagggcgtgctgccttttgcaattgagttttcatctgagagggataacccagaatcacgaatttcccaaggaataagttagagtacctttttcaggtttatctcctcacacagcaacttgagtggagcaaggtagcatttggggcccatttytgcagtgtggcctggggctgtgagatgaattcactaaattttattttccctgcatctaacagaggtttgaagaagtgatgggacaccaaattggacactgaggacacaccccaatgcacacaaaacaagaatataatgcacgctctgcactctgaacattaagcaggcc

SEQ ID NO: 565888 - DNA, 509 bp, Homo sapiens
aattgaataaaaatgtattttttttgattggcagctkctgtttgtgtagctagattttaagatattattcagggaattcagacatgtcatcaccgtgaccttggtgtctgtcctcttacttgaaaaggttgattgaacgggaaatgtttcaattagaagaacggatttggatggaagtacgattaaagaatctagtgtttgagtgggaagaataacttttctgctcaatcatgaatcatgaatcctgcttttcatcacttaaaaaaaataggaaagggcaaggtgtcttacccagaagtaatatattatttatgtagtccttgatgtatgacccagagttagtagttaatattccatgagctgacctaaccagttgtacaatggtttggttcagtaatgcacatagtgtgcccttaccaacatgcattgccatcttccctgtaaacaaaacgactgcatcatggtatgacgaatgcaaaggaatttatctttgccacagggttgcaaat

SEQ ID NO: 565889 - DNA, 485 bp, Homo sapiens
acaccactgtactccagcctgggagatagagctagactctgtctcaaaaaaaaagaaaagaaaagaaatgcttctgatttttaagttgattttgtatccttcaaaattactgaatttctttatgatatctaagagtcttttggtggagtctttagatttttctaaatataagatcaygtgatctgcaaagagcaataattagatttcctattttctaatttgggtaactttttttcttattttgcctgattgctctggctagggatgccagtactctgcttaagaggagtggtaaaagtggccattcttatcctgttccagttcttagagcaaatgctttcaggttttctacattcagtatgatccaagatgtgtgtttgtcatatatgccctttattacattgtggtgtgttccttctatgtctagtttgttgacagcttttatcgttgtattagtctgttctcacactcctatgaagaaatac

SEQ ID NO: 565890 - DNA, 588 bp, Homo sapiens
ttgatttgtatttaagcttaaggaacttttttttcatttctaaaggtcaattaccctacaaatagattctcacactagaggaaaaatttcagatttaatagacataatcttcaatagagttctacttctatcttgaaagatttatagttaaagtcaacaaaattatacactggggaaataacatcctattcaataaatagtgctgggaaaattgcagccatatgcagaagaataaaagtggactcataactttcaccatatacaaaaattaactcaagatggattaaagacctaaatgtgagaccttaaactacaaaaactcttgaagaaaaactaggaaactcttctggacattggcctgggcaaagaatttatgatcaagtsttcataagaaaatgcaacaaaaagaaaaatagtttaatagacttaattaaactataaagcttctgcacagcaaatgaaacaatcaacagagtgaacagacaacctaaagaatgttaagaaatatttgcaaactacgtatttgacaaagagctaacatcctgaatctataaggaactgaaacaactcaacaggaaaaaacctaat

SEQ ID NO: 565891 - DNA, 611 bp, Homo sapiens
tgttttctttgaaaattttgaaatcaagcactgtggttcttctatttgtctagaatctccttcatcttgcatatctcatgtcagaggyctgaatagtgacaactgatattcagaacaacgataatgactcgcaagagcatcaggcagaaaataaatactcaatttcttcattagactccacttaataaagtgtaaagtggattaagacattttaagactttctacaaaagttgatatgtacaaaatattagtatctctctattatcaaaaaaagtccaagaataccattgaattatttccacttgtgcagcagacttcttccccaagtctcacacttcaaacaaatagctccaccaatttagtatcacctttctttcattcaataaggagtcctctttccctcacattccacgtccagttcaaattccatggctcttctctgcaaatatattctgagctaatccttttcttaccatatcttgcagcagtagtgctgcaaagaatattcttaactatctaatatttacacatgtgtgagtattgcttttttagtttccaaagagtgttagatcaaaagttgttagatcaaaattttcaaagaaaacaatatg

SEQ ID NO: 565892 - DNA, 417 bp, Homo sapiens
gacagccttttacaccctgccctctagatattcaggtccttgtccggcatccaggaagaattaggtcacctggacttaaaggatggtgaatgctgagatttcactgagtgatgaaggtgtttctcagtgggatggatggggagctggaacagggttggagtggaacgatgatctccccttggagttcagccgtcccgcatccagtctcctctcagaccatccccagccgaactcctctcgatgttcargtgctccttctcttctctccttctctgacatgccactctgcagctcctctgctcttctgtacctctgctcgtggagcttggggtttatgtgggcacagcataggggtgtggcaggccagagtggtctaagaaaaggcaacctttgggtgctaaaacaggaatgcctgtt

SEQ ID NO: 565893 - DNA, 611 bp, Homo sapiens
tgttttctttgaaaattttgaaatcaagcactgtggttcttctatttgtctagaatctccttcatcttgcatatctcatgtcagaggcctgaatagtgacaactgatattcagaacaacgataatgactcgcaagagcatcaggcagaaaataaatactcaatttcttcattagactccacttaataaagtgtaaagtggattaagacattttaagactttctacaaaagttgatatgtacaaaatattagtatctctctattatcaaaaaaagtccaagaataccattgaattatttccacttgtgcagcagacttcttccccaagtctcacacttcaaacaaatagctccaccaatttagtatcacctttctttcattcaataaggagtcctctttccctcacattccacgtccagttcaaattccatggstcttctctgcaaatatattctgagctaatccttttcttaccatatcttgcagcagtagtgctgcaaagaatattcttaactatctaatatttacacatgtgtgagtattgcttttttagtttccaaagagtgttagatcaaaagttgttagatcaaaattttcaaagaaaacaatatg

SEQ ID NO: 565894 - DNA, 611 bp, Homo sapiens
tgttttctttgaaaattttgaaatcaagcactgtggttcttctatttgtctagaatctccttcatcttgcatatctcatgtcagaggcctgaatagtgacaactgatattcagaacaacgataatgactcgcaagagcatcaggcagaaaataaatactcaatttcttcattagactccacttaataaagtgtaaagtggattaagacattttaagactttctacaaaagttgatatgtacaaaatattagtatctctctattatcaaaaaaagtccaagaataccattgaattatttccacttgtgcagcagacttcttccccaagtctcacacttcaaacaaatagctccaccaatttagtatcacctttctttcattcaataaggagtcctctttccctcacattccacgtccagttcaaattccatggctcttctctgcaaatatattctgagctratccttttcttaccatatcttgcagcagtagtgctgcaaagaatattcttaactatctaatatttacacatgtgtgagtattgcttttttagtttccaaagagtgttagatcaaaagttgttagatcaaaattttcaaagaaaacaatatg

SEQ ID NO: 565895 - DNA, 611 bp, Homo sapiens
tgttttctttgaaaattttgaaatcaagcactgtggttcttctatttgtctagaatctccttcatcttgcatatctcatgtcagaggcctgaatagtgacaactgatattcagaacaacgataatgactcgcaagagcatcaggcagaaaataaatactcaatttcttcattagactccacttaataaagtgtaaagtggattaagacattttaagactttctacaaaagttgatatgtacaaaatattagtatctctctattatcaaaaaaagtccaagaataccattgaattatttccacttgtgcagcagacttcttccccaagtctcacacttcaaacaaatagctccaccaatttagtatcacctttctttcattcaataaggagtcctctttccctcacattccacgtccagttcaaattccatggctcttctctgcaaatatattctgagctaatccttttcttaccatatcttgcagcagtagtgctgcaaagaatattcttaactatctaatatttacacatgtgtgagtattrcttttttagtttccaaagagtgttagatcaaaagttgttagatcaaaattttcaaagaaaacaatatg

SEQ ID NO: 565896 - DNA, 601 bp, Homo sapiens
tttattcctagaaaaccccaaagagtctgtcaaatgggtcctggaactgataaatgacttcaacaaagttttaggatataaaatcaatgtacaaaaatcagtagcatttttatatatcaataactgagagccaaatgaagaatgcaatccaatttacagtagccacaaacaaatacaaaatacctagcaatacattcaaccaatgaagtgaaggatctctacaagaagaactacaaaacactgctaaaagaaatcagagatgacacaaacaaatggaaggaaattccatcctcatggattggaaaactcagtatcggtaaaatggccatactgtctaaaacaatctacggaatcaatggtatttctatcaaactactatcacattttgcagaattagaaaamaactattctaaaattcataaggaatcataaaaaatcccaaatagccaaagcatttctaagcaaaaacaaagatggaggcatcacattacctgacttccaactatactattaatataaggctacagtaaccaaacagtgtgatactggtgcaaaaacagacacatagactaatggaacagaatagagaccccataaataa

SEQ ID NO: 565897 - DNA, 585 bp, Homo sapiens
  misc_feature 582, 583, 584, 585: n = A,T,C or G
caacacaatccccatgaaaatactactatcattcttcacagaattagagaaaacaattctaaaattcatatgaaaccaaaaaagaggctgtatagccaaagyaagactcagccaaaagaacaaatctggaggcatcacactacctgatttcaaactatactataaggccatagtcaccaaaacatcatggtactggtataaaaataggcacatagaccaatggaatacaatagagatcccagaaataaacccaaatacctacaaccaaatgatcttcgacaaagcaaacaaaaacataaagttgggaaagggcacccctttcaacaaatggtgctgtgataattggcaagccacatgtagaataatgaaactggattcttgtctctcaccttatacaaaaatcaactcaagatggattaaggacttaaatctaagacctgaaactataaaaattctagaagataacattggaaaaaccattctagacattggcttagggaaagatttcatgatcaataaccaaaaagtgaatgcaataaaaacaaagataaatagctgggacctaattaaactaaagaggtnnnn

SEQ ID NO: 565898 - DNA, 420 bp, Homo sapiens
tgtctgttcctttgcttccctgtattctttccaattatatctccctgcttatatcaaagcaaatagtgaagtaggtatagaytaatgaatatttattttgtttgtattcagtggctataatacaaattatttcaaatagcaggcatccatatagtattgcattaggactttataacttaaactatctggaacagtaaaatattacgtaaaaaacgtgaaaatagttgatgattcaaaagcaagatgaattagttcattctcatgcgctaataaagacataccaagactgggtaatttataaagaaaagaggcttaactgactcacagttctacaggggtggggaggccgcaggaaacctataatcatgacagaagggaaagcaaacatgtccttctgcacatgacggcatgaaggagaag

SEQ ID NO: 565899 - DNA, 534 bp, Homo sapiens
tcgcatgttcttgcttatttgtgggatctaaaaatcaaatgaattgaactcatggacatagtagaagtatggttaccagaggctgggaagggtaatggatggttgggaggaaggtggggatggttaatgggtatcaaaaaaaaaaaaaaaatagaaagagcaaataagacctgctctttggtagcacagtagggtgaccatagtcaataataacttaattgtatatgttaaaataaagaaagtaattggattgtttgtaactcaaaggataaatactccattctccataatgtgcttatttcacattgcatgcttgtatcaaaacatctcatgtaccccacaaacatacacatctacatacccacaaaaaatttttgaaaattaaaaattaaaaaatgatactttctgcatagmgtaattgtaagaattaaatgataaaatatactatagataaagcattttgcacagtgcctgtcactgagaaaaattttcataaacactgtctattattattattattcttatattttgttt

SEQ ID NO: 565900 - DNA, 534 bp, Homo sapiens
tcgcatgttcttgcttatttgtgggatctaaaaatcaaatgaattgaactcatggacatagtagaagtatggttaccagaggctgggaagggtaatggatggttgggaggaaggtggggatggttaatgggtatcaaaaaaaaaaaaaaaatagaaagagcaaataagacctgctctttggtagcacagtagggtgaccatagtcaataataacttaattgtatatgttaaaataaagaaagtaattggattgtttgtaactcaaaggataaatactccattctccataatgtgcttatttcacattgcatgcttgtatcaaaacatctcatgtaccccacaaacatacacatctacatacccacaaaaaatttttgaaaattaaaaattaaaaaatgatactttctgcatagcrtaattgtaagaattaaatgataaaatatactatagataaagcattttgcacagtgcctgtcactgagaaaaattttcataaacactgtctattattattattattcttatattttgttt

SEQ ID NO: 565901 - DNA, 600 bp, Homo sapiens
tatgcaaaagaatgaagtcaaacccttactccacatcatatgtaaaaattaactcaaaattggtcaaagacctaaattgagagttaaaactataaactcttagaagaaacattgttataaatatttgtggccttgaattaggcaatggtttctgagctaagacacttaaaccacaagctacagaagaaaaaaatagataaatataacctcatcagaactaaaaactgtccttcacaaaggacacaagaaagtgaaaaaaatgacccacagaatggaagaaaatatttgcaaagcatgtatctgataagattctagtacccagaatatataaataattcttataattcaacaataaaaagacaaatacaccaycaaaaatggtgtatttttaattttaatttgtggggaaattttcaatggacatttttttcaaagaaaatatacaaaaagtcaataaggacatgaaaaaaatgctcaatattcgtgaaatgcaattcaaaaccacaatgagctattacttcacactcagaaggatagctattatataatatataatttatacgtaaataatatataatatataaacaatattaaaataat

SEQ ID NO: 565902 - DNA, 600 bp, Homo sapiens
tatgcaaaagaatgaagtcaaacccttactccacatcatatgtaaaaattaactcaaaattggtcaaagacctaaattgagagttaaaactataaactcttagaagaaacattgttataaatatttgtggccttgaattaggcaatggtttctgagctaagacacttaaaccacaagctacagaagaaaaaaatagataaatataacctcatcagaactaaaaactgtccttcacaaaggacacaagaaagtgaaaaaaatgacccacagaatggaagaaaatatttgcaaagcatgtatctgataagattctagtacccagaatatataaataattcttataattcaacaataaaaagacaaatacaccaccaaaaatggtgtatttttaattttaatttgtggggaaattttcaatggacatttttttcaaagaaaatatacaaaaagtcaataaggacatgaaaaaaatgctcaatattygtgaaatgcaattcaaaaccacaatgagctattacttcacactcagaaggatagctattatataatatataatttatacgtaaataatatataatatataaacaatattaaaataat

SEQ ID NO: 565903 - DNA, 600 bp, Homo sapiens
tatgcaaaagaatgaagtcaaacccttactccacatcatatgtaaaaattaactcaaaattggtcaaagacctaaattgagagttaaaactataaactcttagaagaaacattgttataaatatttgtggccttgaattaggcaatggtttctgagctaagacacttaaaccacaagctacagaagaaaaaaatagataaatataacctcatcagaactaaaaactgtccttcacaaaggacacaagaaagtgaaaaaaatgacccacagaatggaagaaaatatttgcaaagcatgtatctgataagattctagtacccagaatatataaataattcttataattcaacaataaaaagacaaatacaccaccaaaaatggtgtatttttaattttaatttgtggggaaattttcaatggacatttttttcaaagaaaatatacaaaaagtcaataaggacatgaaaaaaatgctcaatattcgtgaaaygcaattcaaaaccacaatgagctattacttcacactcagaaggatagctattatataatatataatttatacgtaaataatatataatatataaacaatattaaaataat

SEQ ID NO: 565904 - DNA, 384 bp, Homo sapiens
agtaagcatcagagatggtctcactcctaatccaagcacttccgtctataccacatgatctgttaaaaagtaatttggsctggatgcagtggctcacacctgtaatcccagcactttgggaggctgaggcgggtggatcacttgaggccaggagttcaagaacagcctggccaacatggcaaaacgccacttatactaaaaataacaatattacctaggcgtggtggcccacgcctgtaatcccagctactggggaggctgaggcatgagaatcacttgaacctggaaggtggacgttgcagtgagctgagctcacgctactgcactccagcctgggcaacagagtgaaactctgtctgaaaaaaaaaaaaaaaaaagcaattt

SEQ ID NO: 565905 - DNA, 384 bp, Homo sapiens
agtaagcatcagagatggtctcactcctaatccaagcacttccgtctataccacatgatctgttaaaaagtaatttgggctggatgcagtggctcacacctgtaatcccagcactttgggaggctgaggcgggtggatcacttgaggccaggagttcaagaacagcctggccaacatggcaaaacsccacttatactaaaaataacaatattacctaggcgtggtggcccacgcctgtaatcccagctactggggaggctgaggcatgagaatcacttgaacctggaaggtggacgttgcagtgagctgagctcacgctactgcactccagcctgggcaacagagtgaaactctgtctgaaaaaaaaaaaaaaaaaagcaattt

SEQ ID NO: 565906 - DNA, 534 bp, Homo sapiens
ttaacttcctaaaataaaatcccatctataaattaaacagaagataaaattaagcaagtaagaatagtgccatttctggggatttctgtgtgaatgcctttggcatttagaatatacttatctaggtgttctttgagttatcttttaaaggcagaaatttctctgttgtcartactttttaaatcttttcgcctggttacttatttagcatttgccttctgagtatattgtatcatatgtgtcttgtggtctctggacaggattaattttccaagtgtctgaccacaattgtacactcttttctgctataaatttgttttctcttttctctcctcccctcctctcttcttttcttttctttttgatggagtcttgctctgtcgcccaggctggagtgcagtggcgggatctcagttcactgcaacctctgcctcctgggttcaagcaattgtcctgcctcagcctcccaagtagctggcactacaggtgcctgccaccatgcctggctaatttttgtatttttagttctgacct

SEQ ID NO: 565907 - DNA, 588 bp, Homo sapiens
ggcagagggatgccaccaccactctgcggaggtccaggaggcccaggaagtcctgggggacccatgggtcacatgggaggccgtggaggagatagaggaggcctccctccaagaggaccccagggttcccgagggaacacctctggaggaggaaacgtccagcaccaagctggagacaggcagtgtcccaatccgggttgtggaaaccagaacttcgcctggagaacagagagcaacaagtgtaaggctccaaagcctgaaggcttcctcccgccacccytcccacccccgggtggtgatcatggcagaggtggccctggtggcatgtggggaggaagaggtggcctcatggatcatggtggtcccggtggaatgttcagaggtggctgtggtagagacagaagtggcttctgtggtggctgggcatggaccgaggtggctttggtggaggaagacaaggtggccctggggggcccccggacctttgatgtaaccaatgggaggaagaagaggaggacgtgaaggacctggaaaaacggataaaggcgagcactgtcaggagcgcagagatcagccctactagatgca

SEQ ID NO: 565908 - DNA, 588 bp, Homo sapiens
ggcagagggatgccaccaccactctgcggaggtccaggaggcccaggaagtcctgggggacccatgggtcacatgggaggccgtggaggagatagaggaggcctccctccaagaggaccccagggttcccgagggaacacctctggaggaggaaacgtccagcaccaagctggagacaggcagtgtcccaatccgggttgtggaaaccagaacttcgcctggagaacagagagcaacaagtgtaaggctccaaagcctgaaggcttcctcccgccacccttcccacccccgggtggtgatcatggcagaggtggccctggtggcatgtggggaggaagaggtggcctcatggatcatggtggtcccggtggaatgttcagaggtggctgtggtagagacagaagtggcttctgtggtggctgggcatggaccgaggtggctttggtggaggaagacaaggtggccctggggggcccccggacctttgatgtaaccaatgggaggaagaagaggaggacgtgraggacctggaaaaacggataaaggcgagcactgtcaggagcgcagagatcagccctactagatgca

SEQ ID NO: 565909 - DNA, 652 bp, Homo sapiens
aaattagcacaaacacaattttagctcttttatacgtgaatatgtccaatagagactattttatcctttttctttttattcaagttcaccaaaatatttgtagggtttttttatataataagtgaaagttggccgggcacggtggctcacgcctgtaatcccagcactttgggaggccgaggcgggcagatcacaaggtcaggagatcgagaccatcctggttaacacggtgaaaccccgtctctactaaaaatacaaaaaaattagccgggggtggtggtgggcacctgtagtcccagctactcgggaggctgaggcaggagaatggcgtgaacccgggaggcggagcttgcagtgaaccgagatggcgccactgcactccaggctgggagacagcgagactcagtctcaaaaaaaaaaaaaaaaaaaaaaaaaaaagaagtgaaagcttagctagattgaacaatawtttaaagataaacactattttaaaaataaaaggaggctgaggtgggaggattgcctgagcccgggaggttgaggctgtattgagctgtgatggcaccactgcactaggcctgggtgacaaagtgagaccctgtctcaaaaaaaataaaaataaaaaattttgaaagaaaataccaaattaaaa

SEQ ID NO: 565910 - DNA, 652 bp, Homo sapiens
aaattagcacaaacacaattttagctcttttatacgtgaatatgtccaatagagactattttatcctttttctttttattcaagttcaccaaaatatttgtagggtttttttatataataagtgaaagttggccgggcacggtggctcacgcctgtaatcccagcactttgggaggccgaggcgggcagatcacaaggtcaggagatcgagaccatcctggttaacacggtgaaaccccgtctctactaaaaatacaaaaaaattagccgggggtggtggtgggcacctgtagtcccagctactcgggaggctgaggcaggagaatggcgtgaacccgggaggcggagcttgcagtgaaccgagatggcgccactgcactccaggctgggagacagcgagactcagtctcaaaaaaaaaaaaaaaaaaaaaaaaaaaagaagtgaaagcttagctagattgaacaatattttaaagataaacamtattttaaaaataaaaggaggctgaggtgggaggattgcctgagcccgggaggttgaggctgtattgagctgtgatggcaccactgcactaggcctgggtgacaaagtgagaccctgtctcaaaaaaaataaaaataaaaaattttgaaagaaaataccaaattaaaa

SEQ ID NO: 565911 - DNA, 652 bp, Homo sapiens
aaattagcacaaacacaattttagctcttttatacgtgaatatgtccaatagagactattttatcctttttctttttattcaagttcaccaaaatatttgtagggtttttttatataataagtgaaagttggccgggcacggtggctcacgcctgtaatcccagcactttgggaggccgaggcgggcagatcacaaggtcaggagatcgagaccatcctggttaacacggtgaaaccccgtctctactaaaaatacaaaaaaattagccgggggtggtggtgggcacctgtagtcccagctactcgggaggctgaggcaggagaatggcgtgaacccgggaggcggagcttgcagtgaaccgagatggcgccactgcactccaggctgggagacagcgagactcagtctcaaaaaaaaaaaaaaaaaaaaaaaaaaaagaagtgaaagcttagctagattgaacaatattttaaagataaacactawtttaaaaataaaaggaggctgaggtgggaggattgcctgagcccgggaggttgaggctgtattgagctgtgatggcaccactgcactaggcctgggtgacaaagtgagaccctgtctcaaaaaaaataaaaataaaaaattttgaaagaaaataccaaattaaaa

SEQ ID NO: 565912 - DNA, 505 bp, Homo sapiens
tccctttctttttcaaaaaatatcattccaagaatgaaattggccacatctgttatactgctctctaccactttaagttaggggaagaaaatgaccttttttcttctttaaaaagaaaacaaacaaaaaagaagtcaatcaaatatctccccatctgtttaccaattatacataatggtgagtcattttttttcctgtgaacaacataattaccaatgcgtaaacacaaaatatgtctgcttttaatcaagaatctgaactctgccagaatattctcagatatcttttttattaatgctatgaccaggctttttaaagagtttaggagatatatatagatagatagatatagatatagatatagatatagatatagatatagatatagatatatatatatatataatcctagtttttctttttagaatcagatttgaaaatattagtttagatgtcagacactaaaagagatttaytatgtgcatgactatcataatccatattt

SEQ ID NO: 565913 - DNA, 589 bp, Homo sapiens
catgttatccacaaaacggagaaggatgagttgcctatatcaagaatgctaaacggacaagggcctaagtaagtcataccatgttttagaagtggtgggaaagttaacccaaaccaagcaaagaaaccagactttaggtatagggctagaattcagaacaagaccctactactgagcatgagtctttgtaattactcaagtgggtgtatggaagaaaaaaataaataaaattcactaaacgcaaaaagtacactgagcataatttaaactttcattcataattaatggcctccgtatcttcaatatgagcatcaattcttactggtttggcaaactaatagtacacacttyaaggtggtaaaataaaagatatatttccattctccaatctgcctctttccataatgtatccatgtaacaaatgcctgtatacaacagaagaatcataagttctttaaatctgtagatgagaggactgaaggataatgtgaaaatgtgaacaactggttcataatgttaatgcatttttcctgtctaatattgaaaggggacaggaggttgggcacagtggctcacacctgtaatccca

SEQ ID NO: 565914 - DNA, 587 bp, Homo sapiens
aatgatttctatatttccgaaacctttctttctgatcccagcattctccagtctccaaatgctcattgaacaattgtattcatggattaatacagcgtgtcttcaattttaatgtgcatatgagctgcctatggattttgttaaaatataggtgctaattcagtaggtccagtggggcccaaaatcctgcatttttaggatgttcctggatgctgctgctggaatatacaccacacccttagtagtgatacattagtacaataattgttagagcctttctctgtgtcagaagaaaacattctgagaagactgtattcttcccattctatccccatctccaaaaacatgaattyttattttttcacattggcatacatttattgattttttttttttttttttgagatggagtcttgctctgtctccaggctggagtgcagtggtgcgatctcgcctcactacaacctccgcctcctgggttcaagtgattccactgcctcagcctccagagtagctggggccacaggcatgccactacacccagctattttttttttttttcgcatttcagtagagacggggtttcg

SEQ ID NO: 565915 - DNA, 628 bp, Homo sapiens
agttgtgatgatactatcatttctttacatttgtatttactaatggaatagcatcagttcctaaactgtaattttctcaaatgatacttacttgacactgtctttttaaagaatagtgattttttaaacatgcttatttgggttcacagccacaaactcaatgaggcatctgtcttggggcatttttttgttctttgcttattgaaacctttagaatgatagctaytatttgtatctaagttgaaaaaaggaatatcttgcttttattggggccaagtgacaaatgtctgttttgtgattttgctaaggtaataagaatatttaaattttgttttttgtttttttttttttttgagacggagtcttgctctgttgcccaggctggagtgcagtggcgcgatctcggctcactgcaagctccgcctcccgggttcacgccattctcctgcctcagcctcccgaatagctgagactacaggcgcctgccactgcgcccggctaatttttttgtatttttagtagagacggggtttcaccatgttagccaggatggtctcgatctcctgacctcgtgatccgccctcctcagcctcccaaagtgctgggattacaggcttgagccaccgcg

SEQ ID NO: 565916 - DNA, 443 bp, Homo sapiens
gagaccagcctggccaacatggtgaaaccccatctctactaaaaatgcaaaaaatttgccatgcataggggtgcacgcttgtaatcccagctgcttgtgtggctgagtcaggagaatcgcttgagcctgggaggcagaggttgcggtgagccgagatcgtgccactgcactacagcctggacgacagagtgagactcccatctcaaacaaacaaacaaacaacaccttaatgtcactgattaacctgctgctgggggttyttctgcttacagcttctgtctcttacttaaccttgatctttataagtcaaacactcgaggtaagcttgccttactatgactcttgtgaatgccatgttaccttattgattccaacaggaaatttgaaaaaagtaaacactttagggcagaaagataataaaaggaaaaaaagatggttagaac

SEQ ID NO: 565917 - DNA, 526 bp, Homo sapiens
acaatagcaaagacttgcaaccaacccaaatgtccatcaatgatagattggataaagaaaatgtgacacatatacaccatggaatactatgtagccataaaaaacaaggacttttttgaagagaacccctattttgaataaagttcagtaaagcaaaatgtgtccttaagtattgtcccttcaacttggaagggaatgtttttttttactctgagttttcctaaaacgtattgctctggaacttgstggattaatcgatgtggaaattgttccaggaaaggatacctgggaaactaagggtgcttctgttgctgacttagtatttcaaatactttggtattggtcaaatacatttagattttaataagatattagtgctggtaaggaaaagattatgttctctaatatctgcatggaccagtggtctggataatatagcttcggggatagtaaaatatttagaattcttaccacatagatcaggaactgccatccgacaaggtaatactgtactgttcttgctgag

SEQ ID NO: 565918 - DNA, 577 bp, Homo sapiens
tggctctgtcttcaaaccataaattcaaaatcagatcccagtggagctagtacatggcagaaaagcaccacagattctgagctcgttttgaacacagtaatggttgtatgcaacccacaactggaataaygctttgtatgcaactcacaactggaataatgctatctcttgttcctggcaataaaacatgcatgaactggaaatgagatctagtgtcttgtatcagcaatagtacagattgagtgatttaggtcaactaattactgcagaaatgactgtaatggcctgtacacaccaggggacgtgtctgagacatgggtgttcagctcaccccatttcatggtgaactcttaggaatgagctggagttgttttgcatttgtacccagtagacaggtaggcacatgatatctctccaggacagttaggacaggacaagaagacatccaaactcttagagatacatctttaagcatttaggggtaaagatttataacatgtgcctctgactttcaaatagtccattactatatatatatatatatatatagagagagagagagagagagagagagaga

SEQ ID NO: 565919 - DNA, 565 bp, Homo sapiens
ttcatttgcttgaaacagagaaaaataaatgattttcctttacacattttgataatttaatttttagcatgttcatatgttaatctttaaaaaacaccactaactactcttttacctgtttggttttagtccctataaagaaaaagatgctttttttaaaaaaattttkttttgcttttagcagaaaaagctacattttctcaaggcaacggcaacaaaggctcaaagaaaatacatgtgacttgacacatttctgagaggggttggggaaaagtccttccttggacttccgtaaatatgaagtgggttacgacatctcagatgatgataatcttaggatatcgcttgttggaggcaagggtatagaataggtgactaaatccttttttcattcctatgacactagattaaaggcaaaaattggtcacgtttaattatggtatgaaataaatgtgacttatgagttacatagccctactccaaaagcattaagttaggtaggaaaaaacaaaacagagcacccaatcagagttgtgggaaaggttacctggattactaaagtttg

SEQ ID NO: 565920 - DNA, 577 bp, Homo sapiens
tggctctgtcttcaaaccataaattcaaaatcagatcccagtggagctagtacatggcagaaaagcaccacagattctgagctcgttttgaacacagtaatggttgtatgcaacccacaactggaataacgctttgtatgcaactcacaactggaataatgctatctcttgttcctggcaataaaacatgcatgaactggaaatgagatctagtgtcttgtatcagcaatagtacagattgagtgatttaggtcaactaattactgcagaaatgacygtaatggcctgtacacaccaggggacgtgtctgagacatgggtgttcagctcaccccatttcatggtgaactcttaggaatgagctggagttgttttgcatttgtacccagtagacaggtaggcacatgatatctctccaggacagttaggacaggacaagaagacatccaaactcttagagatacatctttaagcatttaggggtaaagatttataacatgtgcctctgactttcaaatagtccattactatatatatatatatatatatagagagagagagagagagagagagagaga

SEQ ID NO: 565921 - DNA, 577 bp, Homo sapiens
tggctctgtcttcaaaccataaattcaaaatcagatcccagtggagctagtacatggcagaaaagcaccacagattctgagctcgttttgaacacagtaatggttgtatgcaacccacaactggaataacgctttgtatgcaactcacaactggaataatgctatctcttgttcctggcaataaaacatgcatgaactggaaatgagatctagtgtcttgtatcagcaatagtacagattgagtgatttaggtcaactaattactgcagaaatgactgtaatggcctgtacacaccaggggacgtgtctgagacatgggtgttcagctcaccccatttcatggtgaactcttaggaatgagctggagttgttttgcatttgtacccagtagacaggtaggcacatgatatctctccaggacagttaggacaggacaagaagacatccaaactcttagagatacatctttaagcatttaggggtaaagatktataacatgtgcctctgactttcaaatagtccattactatatatatatatatatatatagagagagagagagagagagagagagaga

SEQ ID NO: 565922 - DNA, 537 bp, Homo sapiens
ggctgccaagttctcatttttagagagtcagtgtggtaactgcccaaccatcacttgctggtcgcctgaccttcctggtgggttgggggtagagccctctcctgcctggttcatstctgtctaactacctgtaacactcccatttggagtccaggagcaacttgagcgtcagtgataaagattcggtgttagcaggcccagcagtcagcaatgatcagtcagaagaaactgaacacttaccagtgacatgcagaggggaggggagaaagatgacaacttggatgaaaagtaaattctattaaaaaaaatgtgaggggccaacactttctgagaccaaaacacgatttctcttatcaacaatttagtgagtgaattgagatccaaatttgatttgacaaatacttcaaaacaaaaagcagaaatataagaaaccacgagaaaaaagaagggatgtggcagataaatcaagaataacaaaatgtaaattactagaatttcacaaggagtaaaaggtattcgtggaagtaagacaataat

SEQ ID NO: 565923 - DNA, 314 bp, Homo sapiens
tagctttttccctaatttgaataatttcacaattattgcctcaaaaacaaaaatcagtcccattctttctctcatttcattttgagacccaaactacacatctgktagaccttttgatattgttcctccagtacctgaggatctctttcttttctttttgttctttttttctcacttcttcagttggataattctgctgatagaccttatggttaatttttagaagtaggattactgtggtcaaagagacgtataggccagaagcagcagctcatgcctataatcccagcaccttgagaggctgaggcaggaga

SEQ ID NO: 565924 - DNA, 314 bp, Homo sapiens
tagctttttccctaatttgaataatttcacaattattgcctcaaaaacaaaaatcagtcccattctttctctcatttcattttgagacccaaactacacatctgttagaccttttgatattgttcctcmagtacctgaggatctctttcttttctttttgttctttttttctcacttcttcagttggataattctgctgatagaccttatggttaatttttagaagtaggattactgtggtcaaagagacgtataggccagaagcagcagctcatgcctataatcccagcaccttgagaggctgaggcaggaga

SEQ ID NO: 565925 - DNA, 314 bp, Homo sapiens
tagctttttccctaatttgaataatttcacaattattgcctcaaaaacaaaaatcagtcccattctttctctcatttcattttgagacccaaactacacatctgttagaccttttgatattgttcctccagtacctgaggatctctttcttttctttttgttctttttttctcacttcttcagttggataattctgctgatagaccttatggttaatttttagaagtaggattactgtggtcaaagagaygtataggccagaagcagcagctcatgcctataatcccagcaccttgagaggctgaggcaggaga

SEQ ID NO: 565926 - DNA, 584 bp, Homo sapiens
gtaattaatatgattttcaggccgggcatggtggctcatgcctgtaatcccagcattttggaaagccaagatgagaggatcacttgaggccaggaaattaagaccagcctgggcaacatagggacaccccatctctacaaaaaaaattaaaatatgtaaaattttcaaaagaaaattaatcccagatcccataaaatggaaacaggaataattgttgtagcaatgctaacactcttttgttaggaataagtacatgagcatacwtaagaagggatggagatttagagaaaaaggtggactaggcaggcttggagagccataatgacttggccaacatgtacggaattgaggagatgttgaaaagatggttctatatttgggctccctggaataatagcagcccctcaggctttcaggccaacacataaaatctcagttccctgtcacccatcattctgacagccttgttgtcactcaccccattctagcccaagagaactccatttaaaacaggtaagtgattttttttattgctgtgagtaaaattacagtctagataggaaaggccccatctagactagatg

SEQ ID NO: 565927 - DNA, 584 bp, Homo sapiens
gtaattaatatgattttcaggccgggcatggtggctcatgcctgtaatcccagcattttggaaagccaagatgagaggatcacttgaggccaggaaattaagaccagcctgggcaacatagggacaccccatctctacaaaaaaaattaaaatatgtaaaattttcaaaagaaaattaatcccagatcccataaaatggaaacaggaataattgttgtagcaatgctaacactcttttgttaggaataagtacatgagcatacataagaagggatggagatttagagaaaaaggtggactaggcaggcttggagagccataatgacttggccaacatgtacggaattgaggagatgttgaaaagatggttctatatttgggctccctggaataatagcagcccctcaggctttcaggccaacasataaaatctcagttccctgtcacccatcattctgacagccttgttgtcactcaccccattctagcccaagagaactccatttaaaacaggtaagtgattttttttattgctgtgagtaaaattacagtctagataggaaaggccccatctagactagatg

SEQ ID NO: 565928 - DNA, 584 bp, Homo sapiens
gtaattaatatgattttcaggccgggcatggtggctcatgcctgtaatcccagcattttggaaagccaagatgagaggatcacttgaggccaggaaattaagaccagcctgggcaacatagggacaccccatctctacaaaaaaaattaaaatatgtaaaattttcaaaagaaaattaatcccagatcccataaaatggaaacaggaataattgttgtagcaatgctaacactcttttgttaggaataagtacatgagcatacataagaagggatggagatttagagaaaaaggtggactaggcaggcttggagagccataatgacttggccaacatgtacggaattgaggagatgttgaaaagatggttctatatttgggctccctggaataatagcagcccctcaggctttcaggccaacacataaaatctcagttccctgtcacccatcaytctgacagccttgttgtcactcaccccattctagcccaagagaactccatttaaaacaggtaagtgattttttttattgctgtgagtaaaattacagtctagataggaaaggccccatctagactagatg

SEQ ID NO: 565929 - DNA, 584 bp, Homo sapiens
gtaattaatatgattttcaggccgggcatggtggctcatgcctgtaatcccagcattttggaaagccaagatgagaggatcacttgaggccaggaaattaagaccagcctgggcaacatagggacaccccatctctacaaaaaaaattaaaatatgtaaaattttcaaaagaaaattaatcccagatcccataaaatggaaacaggaataattgttgtagcaatgctaacactcttttgttaggaataagtacatgagcatacataagaagggatggagatttagagaaaaaggtggactaggcaggcttggagagccataatgacttggccaacatgtacggaattgaggagatgttgaaaagatggttctatatttgggctccctggaataatagcagcccctcaggctttcaggccaacacataaaatctcagttccctgtcacccatcattctgacagcctygttgtcactcaccccattctagcccaagagaactccatttaaaacaggtaagtgattttttttattgctgtgagtaaaattacagtctagataggaaaggccccatctagactagatg

SEQ ID NO: 565930 - DNA, 530 bp, Homo sapiens
gaccaggagattcccttggatgcctacaccaccaggaccctgggtttgaagcacaaaactgggtggctgtttgggcagacactgagctagcggcaggatttttcatgccccagtggcgtctggaacaccagcaagacagaactgttcactcccttggaaagggggctgaagccagggagccaagtggtctagctcagtggatcccacccccatggagcccagcaagctaagatccacgggtttgaaattcttgctgccagtgcagcaatctgaaattgacctgagatgcttgagcttggtggagtgaggggcatccaccattactgaggcttgagtaggcggttttcccctcacagtgtaaacaaaactgctgggaagttcgaattgggtggagcccaccaaagctycgcaaacctgctgtagccagactgcctctctagattcctcctctctgggcatgacatcttgaaagaaaggcagcagccccagtcaggggcttatagctaaaactcccatctccctgggacaga

SEQ ID NO: 565931 - DNA, 669 bp, Homo sapiens
tcagtggggggaaaaatggttttttcaacaaatggcactaggtattcatgtgtaaaagtgggccaggtacggtggctcatgcctgtaatcctagcactttgggagggtgaggcaggaagattgcttgaggccaggagttcaagaccagcttgggcaacacagtgggacctcatctccacaaaacgtttaaacattaactcagcatggtggcgcatgccagtagtcccagctacttgggaggctgtggtgggaggatcacytgagctcaggagttggaggctgcagtgagctttgattgtgccactgcactccagcctgggagatagagtgagaccctgtctcaaaaaaaagaagaaaagaagaaaaagaaccttggccctcacctcacaccagatacaattagcttataattatagatccaagtgtaaaagctgaaattatacaactcctagaagaaaatacaggtgaaaatctttgtgactttggaacagtattatttcaaattaggacacaaagaacacaaaacattaaaaaatcaactggatttcatcaaacttttgcttcttgaacatcactattaaggaaatataaaaccaaactatagactgggagaaaataatcgcgggacacatatttggtaaatggctttgtatacagaatttataaaga

SEQ ID NO: 565932 - DNA, 637 bp, Homo sapiens
aaagcaagcttagatcgtttctgggagagcgagggaatttttcagatgcccccagaaaactgttttttgtgtcctgtaggttctgagttatgtgcccatccattaatttaaaactatgctttgtgagtgtaattatggttcacttagcctgaacatatgcctgactactagaagtagtgatggagttggcttctcccaaaatacatgtgctacatatgggtggtgtagttatctaaacaaaactagggataattatgaagagtcagaagaccaactatagtgtctgcctcacttgctaagccaagcaactttccaacctaccttcttgaatctttctttaattattttattttattttttcagagatagttgtccaggctggtcttgaactcctgggctcaagcagttctccaagctcagcttcccaaagtactgggattacaggtgtgagccgtcacatcctgccccaaccttcctgaatcttgacaaacatattcaagttgctccttagtctttgttctttctttgacacagcaaatcyctcatcccagggcctcctacttagtgtcatatctgctctaagagcctaagttgaactttaaggtagttttactaggcaaaacaacttagtgaactg

SEQ ID NO: 565933 - DNA, 485 bp, Homo sapiens
acatttaggttggttccaagtctttgctattgtgagtagtgccgctataaacatacgtgtgcatgtgtctttatagcagcatgatttataatcctttaggtatatatccagtaatgggatggctgggtcaaatggtatttctagttgtagatccctgaggaatcgccacactgactttcacaatggttccttttcaattttaattctatctcccctcagaaaacttactttcaatccctattcagtaattttctgctccacagggcaggttctatattacttatgctmgttcctctacctgaaatgtccaaccctcaacagtatttatccaaattctctcttgtttggaccaaattccatcttctgcaagttttcttttcttctttaaacagaagtatgtgttaactggtataagaaatccacagtacttttatttgtatacttcaaatgtctctcctgcctatagacgtgtccacagttagaaa

SEQ ID NO: 565934 - DNA, 485 bp, Homo sapiens
acatttaggttggttccaagtctttgctattgtgagtagtgccgctataaacatacgtgtgcatgtgtctttatagcagcatgatttataatcctttaggtatatatccagtaatgggatggctgggtcaaatggtatttctagttgtagatccctgaggaatcgccacactgactttcacaatggttccttttcaattttaattctatctcccctcagaaaacttactttcaatccctattcagtaattttctgctccacagggcaggttctatattacttatgctarttcctctacctgaaatgtccaaccctcaacagtatttatccaaattctctcttgtttggaccaaattccatcttctgcaagttttcttttcttctttaaacagaagtatgtgttaactggtataagaaatccacagtacttttatttgtatacttcaaatgtctctcctgcctatagacgtgtccacagttagaaa

SEQ ID NO: 565935 - DNA, 606 bp, Homo sapiens
tgcttgaatctgggaggcgggggttgcagtgatcgccccactgcactccagccagggcaacaagaacaaaacttcatctcaaaaaaaaaaaaaaaaaaaaaaagatggtggcaccaaaccagcacttgctgttgtgttgaatgagttgatatagaagctttgacttctaaggacttacccaaggaaattacttttgtcacttaraaactcatattttctgggcattctctgaaaagccctcatcacttatatatgaggatttgaattttgtaacacctgatagaatatttcattgctattaagtaagggaagaaaccagggtttaaaacttatgttaagagcaaatgacatttgtgatcaaagaatgatgattagagacatcaatctgtccaatctctgttgaaaattactttgattattctttctccctaataacacttgctctagtgtcatttaaggaattggtagcaaatgagcagctccaataagacagtgtacagataaaagagtaagactggatgtcagattttgttaacaagaactgctttaatgttctaaagcagattttttactatccgtgcaggtaatttttcttttaaccttgaa

SEQ ID NO: 565936 - DNA, 606 bp, Homo sapiens
tgcttgaatctgggaggcgggggttgcagtgatcgccccactgcactccagccagggcaacaagaacaaaacttcatctcaaaaaaaaaaaaaaaaaaaaaaagatggtggcaccaaaccagcacttgctgttgtgttgaatgagttgatatagaagctttgacttctaaggacttacccaaggaaattacttttgtcacttagaaactcatattttctggrcattctctgaaaagccctcatcacttatatatgaggatttgaattttgtaacacctgatagaatatttcattgctattaagtaagggaagaaaccagggtttaaaacttatgttaagagcaaatgacatttgtgatcaaagaatgatgattagagacatcaatctgtccaatctctgttgaaaattactttgattattctttctccctaataacacttgctctagtgtcatttaaggaattggtagcaaatgagcagctccaataagacagtgtacagataaaagagtaagactggatgtcagattttgttaacaagaactgctttaatgttctaaagcagattttttactatccgtgcaggtaatttttcttttaaccttgaa

SEQ ID NO: 565937 - DNA, 542 bp, Homo sapiens
ccacctcggcctcccaaagtgctgggattacaggtgtgagccacggtgcctggccttctttttattttttacatatttttttgaaacagagatggaggtctcactatgttgcccaggctggtttcaaactcctgggctcaagtgatctttccaccttgtcctcccaaagtgttaggaatacaggcatgagccaccacrcctggccagattaaattttgtcttaaaagcataggcaagctggcaagaaaataaggaacattcaggctaaaaccctaaggaggagaaacagggaggtaagttaacactgaagcttttatctagatggcatttgcagaactaggcaaacctgagcttcagttttcaaagcctcaaaaggtcacagaagcacggcccagagcccagccacggtgggaaatctaaagagatcttacccccagtgaagttgggacttccaaaggatactcccttaacgtaacagtgaaccaccaagaaacttgatgtacccttccctgtccccaagagctacctgcaagaaaaatcaa

SEQ ID NO: 565938 - DNA, 541 bp, Homo sapiens
tgaagaatttcacataactggccccaataagcccatgtaagttgctcctgcaccagtctggcttggtgactggtgacaattttcacttcaggtttcctctggagacaactttcatgtggattcaatytttaagctttaggttgtgtaaacagaagtactatgtgtttaaatttcccaaaaacctatacgtctgtatgctaatccattcttcctacacttcctaatatcttagagatacaaacatataaactccataaaaatagaaacagaactaatatacaggggagataaaaatgtttgaataaagaagatgaaaggtgttctgacattgtctgagctaattgaaccagaatttaatagaccattgacctaaaatatattattattttagtcagaatgaactaggatatctgaaagctgttttctgctgcaaaatgaaaataggccacataaaacaaattcagaggtattagttaaatagtgttattgtgcattatctgagctgtgactatgcaggttttacctattatgtgcgacttgt

SEQ ID NO: 565939 - DNA, 567 bp, Homo sapiens
aaaggtcacagattgttatatgtacrttactcatccccaccaataaactatcagtgttataattcttcatagatcatttgcatgtcttgggtttcccaggacagtcagggtttatatttattgttctggcattctgtttggctgagcttttcccagatttatcattttttaatacataatattattaatggttatgttaatataagttaagtagtttgacttaaactagaaatactcctttatatttatgcatatttgcatttctagtttaagtcaaggtctcatttagtagtacatgagatacagtgcagtgaatattttcttggtttaaccagttgttacatctgaaagatgagcaacaaaaatgggtttctccttctatcttctaggaaaagcaatcaacaacacttcaattttaggaacaacatgctgataaaatcaagggtgctccagcaaagaccaattaaaagagttaactttttctggcatgtggggttgggaagttttggacggtgttgtttctgctggcaacttgatttactactctggtgcagtcagatttaccat

SEQ ID NO: 565940 - DNA, 643 bp, Homo sapiens
aagttagcagttcacttttcacctaaaatgataaaagccatgaagcattgcctaaagttcatcaacagattaatgtataaagaaaatgtgatatataccacaatagtattatacacaatggaatactatttattcataaaacaataaaatcctgccattcatggcgacatgagtgacccaggagggcattatgttaagtgaaataagtcaggcacagaaaaataaataccacagattctcactcatatgtgggagctaaaaaaygttgaactcatagaagtagagaatataattgtggttcttagaggctaagaaggttagggagaagggaggttagaaagggtttgcttaatgaaaacaaaattatagctagataggaggaataaattctagtgttccgtagtactgtaatattaatataatgaacaataatttattgtctattttcaatagctagacgagaggactttgaatcttaccaacacaaataaatgataactatttaaggtgataaatatgctaatcactctgatttgattattacatatcgtatttgtatatatcacaacatcacatggatgtcataaatatgtaaaattattagatgtaaaccaaaaatgaaagaaaaaatatgtaacataaa

SEQ ID NO: 565941 - DNA, 643 bp, Homo sapiens
aagttagcagttcacttttcacctaaaatgataaaagccatgaagcattgcctaaagttcatcaacagattaatgtataaagaaaatgtgatatataccacaatagtattatacacaatggaatactatttattcataaaacaataaaatcctgccattcatggcgacatgagtgacccaggagggcattatgttaagtgaaataagtcaggcacagaaaaataaataccacagattctcactcatatgtgggagctaaaaaacgttgaactcatagaagtagagaatataattgtggttcttagaggctaagaaggttagggagaagggaggttagaaagggtttgcttaatgaaaacaaaattatagctagataggaggaataaattctagtgttccgtagtactgtaatattaatataatkaacaataatttattgtctattttcaatagctagacgagaggactttgaatcttaccaacacaaataaatgataactatttaaggtgataaatatgctaatcactctgatttgattattacatatcgtatttgtatatatcacaacatcacatggatgtcataaatatgtaaaattattagatgtaaaccaaaaatgaaagaaaaaatatgtaacataaa

SEQ ID NO: 565942 - DNA, 593 bp, Homo sapiens
tatatacatataaaatatacatattatatattatattatatatatatatatatatatatatatatmgtgagagagagagaaggaggggagagagagagagagaatatgacatggagagagagaattaaggcacactaatgtctccatcaccaaaatggagagatcattggttttgtgaactatctcagattggctgccctctgacattaaggatgcctctaggctgacccttccaataacttccaactctcagtttaacatatactcagaaaacacaaaataattttaatattattcttaaaaaaaattaggaagctatatattctttaaaaaatattgtaacatattccaaagccaaatattgatgtccactaaaagagtttactagtgtttctttgagcaacttaggtaaaaaagagttaactaaatatatctaaaaagaaatttcttgttagcttcatggatgattcccatactgtcaccctatcaattggcagtatctccgttttcctaagctacacacactacttcagctttaattaaaaggcccgttgccatagtttctcggcgaacagctcaaggcatgcttgagt

SEQ ID NO: 565943 - DNA, 528 bp, Homo sapiens
aaccaagttcacctcttcccatctttaatattgcgacaatgtatctgaacctatcttttggcacttacctctttttcactagtattaagtagtattatgtgtatatcaattcctctgatacagtttgactgactgtcttcatgtctgcatgagtgtgtatttatacttgtttatttatataccattgatttccaaaagaagaaatattggcagcagtttgcaaaggaactactatactggttaacatagatgttgtgactgagttaaatttgagtttctgaggtaaaagttataagttacatagttgtttttatttttattttttgagacggagtctcactctgtcacacaggctggagtgcagtggtgtgatctcagctcactgcaacctctgcctttcgggttcaagcaatyctcctgcctcagcctccccagtagctgggattacagatgcctgccaccacgcccagctaacttgggtatttttagtagagacagggtttcaccatgttggacaggctgttctca

SEQ ID NO: 565944 - DNA, 532 bp, Homo sapiens
ggtaaggttatagattaacagcatcccaaggcagaatttttcttagtacagaacaaaatggagtctcttatgtctacttctttctacacagacacagtaacaatctgatctctctttgttttccccacatttcccccttttcttttcgacaaaaccgccatcatcatcatggcccgttctcgatggtcgctgtctctttggagctgttgggtacacctcccagacggggcggccgggcagaggcactcctcacttcccagatggggcagcagggcagaggcgctcctcacatcccagacgatgggtggccaggcagaggcgctcctcacctcccagacggggcagccrggcagaggggctcgcttcctagacggggcggctgggcagaggcgctcctcacatcccagacaatgggcggccaggtctatgcacttctgttggcaggttttatatcgggccatgcagtttgacctacagactagtacatggcacttataggtaagagctggctgcaaccaaagtggctgggtat

SEQ ID NO: 565945 - DNA, 595 bp, Homo sapiens
cttaaccttggtatcagtgactgacaatataaaactgtggattttcaatcacaggccatgattactctttaaccatgaatccagctcagggaatcagtgttacattgttcataattcctattgcttaataatatgattcaatcattgatgttactttctttatcatgttagggtgttgtaaaaataaaagaacaaacaaagttctgaaatttgtttttgcctctattccaaaaggagagattagctataagctaatcaagaaggcagataagaatattttwaaataagagtattttaaattttatagtgggttatgttgaagttaaatatcaaatattaaattagaatctattgattcttctgttaataaggttgctgattttattacaataaattttaagaatctattaaaatttttttttttttttttttcacatggagtctcgctctgtcacccaggctggagtgtagtggtggatgtcggctcactgcaagctccctctcctgggttcatgccattctcctgcctcagcctcccgagtagctgggactacaggcacccaccaccacgcccagctaagtttttgtattttta

SEQ ID NO: 565946 - DNA, 595 bp, Homo sapiens
cttaaccttggtatcagtgactgacaatataaaactgtggattttcaatcacaggccatgattactctttaaccatgaatccagctcagggaatcagtgttacattgttcataattcctattgcttaataatatgattcaatcattgatgttactttctttatcatgttagggtgttgtaaaaataaaagaacaaacaaagttctgaaatttgtttttgcctctattccaaaaggagagattagctataagctaatcaagaaggcagataagaatattttaaaataagagtattttaaattttatagtgggttatgttgaagttaaatatcaaatattaaattagaatctattgattcttctgttaataaggttgctgattttattacaataaattttaagaatctattaaaatttttttttttttttttttcacatggagtctcgctctgtcacccaggctggagtgtagtggtggatgtcggctcactkcaagctccctctcctgggttcatgccattctcctgcctcagcctcccgagtagctgggactacaggcacccaccaccacgcccagctaagtttttgtattttta

SEQ ID NO: 565947 - DNA, 595 bp, Homo sapiens
cttaaccttggtatcagtgactgacaatataaaactgtggattttcaatcacaggccatgattactctttaaccatgaatccagctcagggaatcagtgttacattgttcataattcctattgcttaataatatgattcaatcattgatgttactttctttatcatgttagggtgttgtaaaaataaaagaacaaacaaagttctgaaatttgtttttgcctctattccaaaaggagagattagctataagctaatcaagaaggcagataagaatattttaaaataagagtattttaaattttatagtgggttatgttgaagttaaatatcaaatattaaattagaatctattgattcttctgttaataaggttgctgattttattacaataaattttaagaatctattaaaatttttttttttttttttttcacatggagtctcgctctgtcacccaggctggagtgtagtggtggatgtcggctcactgyaagctccctctcctgggttcatgccattctcctgcctcagcctcccgagtagctgggactacaggcacccaccaccacgcccagctaagtttttgtattttta

SEQ ID NO: 565948 - DNA, 553 bp, Homo sapiens
tgaacattaatgttcaaaagtggtcccgggtcctatctgcatttagatatagatcatttcaatgccaaaaccaatattcctagtgaacaattattcattaagacaaggtgacagatagctcatgtggacacagctgagatgatacaatgtagcaaattctaaacaattctcatgaacacttggaaagtcagttctataataaagtcatacaaattataataaatcagtaaatatttggtttcggaagatgctttgtaaagttataatgcatatgaatacaattaacagtcgtgaattcagagctgtgaaaataaatcaaagaaaccacattgtgtttgagtcagcaatctttagatttctatccagtcttcccatccagtccataaattctaagtataatcctggtactcactctcaagtttacgttaaatactatcccattacaaaaaaacactctttctcttacttcttttcattatgtcctgctaaaaagattctgattggctgcaggcggcaagagggaaaaacamaaagcacattttgcagaaaatga

SEQ ID NO: 565949 - DNA, 572 bp, Homo sapiens
aatattattaaagcaaagaaaacaacattaaatcaaaaatttaaayttaaaattttccatgcctctggctggctattttcactgcctttgaacctttgtgactcttcctctgatgtcagctttaagtcttgttctgttgagaaatccatatattcagttaaaatgaaccacttagaacagttaaaaactattgcctttataaaaatagatttaagacaacattttatttcataaattgagtgtttagtttttcatgaaatagttatttaggaaataattctcccaaacttcaacaaaccacttggggagacacctgatgtcattcactcacaaattcatccacccaacataaatgaacaaaaccaccagaaacacaactttaaaatacagtagaagcatctaaggtaacacagtatgttgttctccacttcctaatagtgaagcagtaaatgtaaagaaaaggaaatttagttttaaagagaaacaagttttcccgcacttagctagtctgactctaaggatagtaacaagcagggcccaggaaaggtcgtggtgaccctgcctgagaagcc

SEQ ID NO: 565950 - DNA, 572 bp, Homo sapiens
aatattattaaagcaaagaaaacaacattaaatcaaaaatttaaatttaaaattttccatgcctctggctggctattttcactgmctttgaacctttgtgactcttcctctgatgtcagctttaagtcttgttctgttgagaaatccatatattcagttaaaatgaaccacttagaacagttaaaaactattgcctttataaaaatagatttaagacaacattttatttcataaattgagtgtttagtttttcatgaaatagttatttaggaaataattctcccaaacttcaacaaaccacttggggagacacctgatgtcattcactcacaaattcatccacccaacataaatgaacaaaaccaccagaaacacaactttaaaatacagtagaagcatctaaggtaacacagtatgttgttctccacttcctaatagtgaagcagtaaatgtaaagaaaaggaaatttagttttaaagagaaacaagttttcccgcacttagctagtctgactctaaggatagtaacaagcagggcccaggaaaggtcgtggtgaccctgcctgagaagcc

SEQ ID NO: 565951 - DNA, 572 bp, Homo sapiens
aatattattaaagcaaagaaaacaacattaaatcaaaaatttaaatttaaaattttccatgcctctggctggctattttcactgcctttgarcctttgtgactcttcctctgatgtcagctttaagtcttgttctgttgagaaatccatatattcagttaaaatgaaccacttagaacagttaaaaactattgcctttataaaaatagatttaagacaacattttatttcataaattgagtgtttagtttttcatgaaatagttatttaggaaataattctcccaaacttcaacaaaccacttggggagacacctgatgtcattcactcacaaattcatccacccaacataaatgaacaaaaccaccagaaacacaactttaaaatacagtagaagcatctaaggtaacacagtatgttgttctccacttcctaatagtgaagcagtaaatgtaaagaaaaggaaatttagttttaaagagaaacaagttttcccgcacttagctagtctgactctaaggatagtaacaagcagggcccaggaaaggtcgtggtgaccctgcctgagaagcc

SEQ ID NO: 565952 - DNA, 455 bp, Homo sapiens
gatgttcaattccagctgacatgggagaccaaaagtctacttttattttttttttagtttccacggagaagtagcaagctgacattctgtaattttcgacatacatactaacaatatattttgcacggaacatgttattcagctcaaagtcatctcatagaccatcttacatgactatttttgcagcacaaatcacaatttcaatatttgggtggcacccattttgctttgattcacactatttcctcagagctagtcagcaaaaatagtcaaatgaccttccagtgactgcacaaaatatggaatgcttcaaagatctgtcctgcctccttatgcagaagccacgctaactttccccgtattgttccaattttaggatatgtgccgccgaagcaagcacaaagccctacttttacayatgattagtgatgcgtcatggacaaggcttggctctg

SEQ ID NO: 565953 - DNA, 606 bp, Homo sapiens
cttatggacttacacgcatagaagtaataaaatgtagtcacttccttctcactcttctgtgctttcccacacgctgctccttcccttggaaacaccccttctctgcctcaccacagtaactctaatcatctcaaaaactcactttaaacatttactgcttccaaggctctttgcttctaaaccagcatttggcwtggtgttattggatgataatatttttcccatctaaacaaaaagcttcttgagggcaggggctgtatcttttgtctctatatcctcaaccctaagacaaattgtgtataaagcaagaatctgcatgtaaaatatttctttagtttcatgttttaccaaaagttcaacctccaacatgcaacaaaaattgctattaaaactcatactgcccatttgaaaaaattttccaacatttatttatttaaaatctatttgtatttaattttcccagattgttaactaaaccatcagttcataggactactgaaactaaattaacagaattcctatctgtattcttaataactccatggtttttagtgtttaaaactgccatgctgattatgccaaagctctacatacttaagagacaca

SEQ ID NO: 565954 - DNA, 595 bp, Homo sapiens
agaattcattgaaaatctctggaaataattagcaatttgttatcatagactctaaacagaccttcaaaatgcattacatagatttggtaaaacagattgtcagtctgccaaaagtaatcactttggtttgatttgcattgaatgaaaattttaaaatgtaaagctaaactcttcaggatcactgcactgggtttctataggacaacactgaacagggctgccactgaaacaccttggakgagagcctcaaactccctgaacacagcttccagcacactactgggagaatgattgggactcaaaaatatgtgcaatgaatgtacttacgaccttgttggaaaggaagtaaagaggttgtatgtaattacctcaaattaatactgctacagataaagtagtaattagcactgacaaagtaatagtagcgctaaagtagtattaatagccctacactagtagtagtaataaagtggcatcgctattgattctatccgtctacctacctacctgtctggataggagggcataggatttgactgtaagattgggcttagcagtgaaaacaaaagagctcatgcatgctttggacaggtat

SEQ ID NO: 565955 - DNA, 553 bp, Homo sapiens
catacacagaagcaggtcttgcagtttttagtctaaaattttagccatatgcctgatacagtaacacacaaaactcactagttcataaaaacacatgcaaatctggatcagaattatatttgtagctaatggaacaagattattcacccagatggctaaaacagacttttaagattttttatttgtcacttttccaattgtcgttgccctcttcctttttagacaacaaatcttccaaatttccatttcacttctctatcaaactatttctctgacgaggctatttctgcccattgttggacattatggrctgtatagactttccttagtctgaggaaatgtgacatggcagctttagttaatgtccctcaaatagaaattctccagttcgaaacccatcaatctttatatttttatgttctctcaatcaaattgtagcccaagtgagggctttaccaatagattttggcaccacagcacatgaggctcccataccaaggagtctggaaatttcttttgccctgatcattttacctactcttatgcaaaagac

SEQ ID NO: 565956 - DNA, 488 bp, Homo sapiens
tggtacaggcatacaatgtgtaatgattaaattaggataattggaatatccatcacctcaagcctttatcatttctttgcattaggaacatttcaattccactcacatatttcaacatatacagtaagtgttgttaactgaagtaacactattgtcctagaaatactagaccttattctatttaattgtgtttctctactcattaaaccatctcctctttatcccccactttgtactacccttcccagcctctggtaatgaccaaatttcataatttgacactatgtttttctatgcatttatctttagatattatcttttgtgaatataaatatgactgtaattgttgttagacatagctaacaaattcctggggcawttttttttctttgtctgaggccaccaaatgagtcatccatttacataccgataaaacttcagattttatttttcataattttcttacatttataatgagttagaccaac

SEQ ID NO: 565957 - DNA, 522 bp, Homo sapiens
gtgaatgagagttcttgtggcttgacatactcaccagcatttggtgttttcagcgattgggattttaagcattctaattatttagtggtaactcaatgttgttttaatttgcagctctctaatgacatatgatgttgagcatcttttattacacttttttgaaatatgtatatcttctatgatgaagcatcttaatcttttgcctgtttttttaaaaatatatcctccattatccccttcccctagcccctggtatccactattctacttgaggtttatatgaattgactactctagatacctcatataattggtattatacaatatttgtccttttgtgactagcttatttcacttagcatgatattttcaagctccatccaygttgtatcatgtagcaaaatttcattctttttaagctgaaaactatatcattgtatgtatataccacattttgttcatccattgatttgcctctaccttctggctgttgtaaataatattgctatgaacattggtata

SEQ ID NO: 565958 - DNA, 576 bp, Homo sapiens
tgaacccatctagatatttcaggaaaaattctccatctcaaaatcctcaacttaacacatctgcaaagcctcttttgccatgtaaagtgatgtattcacagggatgtagatttcttcaggggaccattattcaggttgcccaaaccctacctcatcattcattcttcccttctatttctagtgaagaaatgcctcttgcatttgccaaggcttacatcataactttcccatgttctgtcctttacctcctcccacacagtgtgctcctcctctcagcaactaattcccctcattgtcttcaaatggagttatcaagttctctgagtttgcattcccagctctgctactttgatgctgtwaagtagtcacagagctttgactctctggttgcctttaagttgccttacagataacaactatctgtaaggcagatatttgggactatctggaggattaactcaaataatgaatgaaaatctctctcccagagcatggctggtggaaagcattccacacatgtaggttgttggattcattaccttcaatatcgccctctttcttctgtcctatcctggg

SEQ ID NO: 565959 - DNA, 596 bp, Homo sapiens
tttttgtggcgacagggtctcactattgcccaggctggttttgaactcctggcctcaagtgatcctcctgcctcagccttctaaagtgctaggattgtaggcataagccaccacacccagcctgctcaagctattctgaaacaaaaactttatgattctaatatgagagatcccatctatagaaataatggggacgcaaatggtcagtatctagtgttacgtgacttttggctacaagggagtaggttgaagttcagcctgattaatgcttaattgtaactatacttctttccataattccgtttaacgcggcgaggatggctgtaggctgagtccctcctttctcccagcctctctcctcctgtccttccccacccttccctwtaacctttacccctcccccgacccccaacaaagcagccctgcacgtattagttaggagtcaacaaaaaccacattggaggatgtcgggcaaagtaagtaaccactgatttacagaattaaaaaatgttagaatgagaaagagtctctgagagcatgtttggaaggccctcattttacaaaggactctgaggcccgaggaggtcatgcccaag

SEQ ID NO: 565960 - DNA, 513 bp, Homo sapiens
aagtcgcatataaaggtatttttttcaaatcccaaattattcaccatattactgaaatatgaaactgaatcattaataaaattgtcaacattttgaaggggctatgaaatacccttactacctctggttttctgcctgctaacagagcaggcttccctgtttttcctctttctaggtctgcataaagctgrcaagatccatctttcattccctcataactttgggatttacaggataagatgctgccatacacattctacagccatggcttccagcccctgcacttgatggtaagaagtagacttttaaaaaaaatgcattcctgaatacgttactatttttcctgatatataggttgccaaaaaagtttaaaagatttttccagtgggacaagtttaggaaactgtttgtagcctctgtagacttggaacttgagaattaccctgatttaattctaaagactttttaagttagtgacagcacgactaacatagttcaaagaaagttgatgaa

SEQ ID NO: 565961 - DNA, 529 bp, Homo sapiens
tgtttttcctctttctaggtctgcataaagctggcaagatccatctttcattccctcataactttgggatttacaggataagatgctgccatacacattctacagccatggcttccagcccctgcacttgatggtaagaagtagacttttaaaaaaaatgcattcctgaatacgttactatttttcctgatatataggttgccaaaaaagtttaaaagatttttccagtgggacaagtttaggaaactgtttgtagcctctgtagactkggaacttgagaattaccctgatttaattctaaagactttttaagttagtgacagcacgactaacatagttcaaagaaagttgatgaacatgattctctgtgactgaatcagagagagctacaaaggagttaaagagccatagttatgatccttcattgtcaagggaggctgaatatgactgggattccccaggcagataacgatgtccacatagccccatcacagtgctgcaagcacctctgccactctatatgtaggac

SEQ ID NO: 565962 - DNA, 535 bp, Homo sapiens
agctatgaggatgcaaagggcatgaggatgacacaatggactttggagactcgggaggagagggtgggaagagaatgagggataaaagactacaaattgggttcagtgtatactgctcaggtgatgggtgcaccaaaatctcacaaatcaccacyaaagaacttactcatgaagccaaataccacctattccacaaaaaactatggaaagaaaaaattaaaatagataaaatagagaaattcctctaaccaaagtgaaatgacattttttcaaggaattcagtgacactggtttaggtatgtatctctggtactttccaaagctgcagtgtttctggccatgctgctgaaagtaaaactggtaggagactgcttccattactcagtgatacgttgttagtattgaaaagccctctttagaaggctgaggtctattagcagtaaactggtgcctttcaaaatcaacagccaactcagaacagctgggaaattcatatgttttgccagatttcactgtgttattaggtgacatttag

SEQ ID NO: 565963 - DNA, 622 bp, Homo sapiens
aaggaggagagtgtggaaatgagaacctaccagctgaattgtttttatttttggcagtgagggacaaaatttaacgtgtattaaaatcatctaggaagcttgctaagatgtggactttcagacccaaccccctgtggctctgtatacagacagaaaccaggaatctggtcattctgatacaggagagccatagaacacactttgggaaacattgatttactactttcaaccaaacaagtgcaggggctctgtttttttcacgaatgcatcccaaatgcccctagcacatggtctggatgcaatgagtaacttgtaggtgtagacgatggatacgtggatagatggatgagtggatggatatgtacattcagggatttaaagagaggatgaacaagagtagagaagagaattgtaaagtttccagggtttcaaagattctttgaacttattcttaagtgtttgatagatacgttgcatttgccccctgattttgtgtgacctttatttaaataccatctccccttggcaacagagtagttttgtcacttgagattaaaagtgattttgtktgtaaaatggcaaaccatcttgacatttcatctacaaaccacttaacaaattt

SEQ ID NO: 565964 - DNA, 523 bp, Homo sapiens
agcgggtggaagaggggcagccaggatacgagaactgattcttatctaagcaatcaacgcaccctggctagcaataggcacacgcagctcaaagtcataagcataacctctactttaaagtggtctacaatccacattggcctaaattatctggttaatttccatatcattaaacattaattgagcaccatctagaatattagagttggaagaaaccttaggagcatctartttatcccagttatacaaatgcaaacaggcctaacaggttaagggttcctcctagtggccgagccaggatttcagccccattgattaatttccagacacttgcgctttctcctctcctcactagaaattggattctccctttttatgaagagcctcaaagcatcatgaaatgagttttcagtgtcagttccatgtactagcattgcctaactgttagtctaaaagtgtgacccctgaagtcagagttcatgtcctctggtagaagggaaaatggactcataatgtcatccca

SEQ ID NO: 565965 - DNA, 337 bp, Homo sapiens
aaactcactccccagttttctttcttctgaggtctcaatgtttccactcttttcttctctcagtacacaggcaggactgttttgtcctgccctttgggtaggtatatgaaacaacagctttggggcaagtcactcatacagtaagtgattctccaggtacaaatctctctccatcatattttgtactacaattwaaaaaaaccaattgttccttccagagctgtgactcagaaaacaaaatggctttgacttaataggcaaaaactgttctctgctttaggcccgtccagaaggtcttgtacctcaccctacccctataatcctttcagtctcccta

SEQ ID NO: 565966 - DNA, 337 bp, Homo sapiens
aaactcactccccagttttctttcttctgaggtctcaatgtttccactcttttcttctctcagtacacaggcaggactgttttgtcctgccctttgggtaggtatatgaaacaacagctttggggcaagtcactcatacagtaagtgattctccaggtacaaatctctctccatcatattttgtactacaatttaaaaaaaccaattgttccttccagagctgtgactcagaaaacaaaatggctttgacttaataggcaaaaactgttctctgctttaggcccgtccaraaggtcttgtacctcaccctacccctataatcctttcagtctcccta

SEQ ID NO: 565967 - DNA, 543 bp, Homo sapiens
ccagctgccccttccccaaaggtaccccaaatacaaattttacagatataactctgtgcttgtgacacttgtcttttctccttttcatgcaatgtgtgaataaaagcaactttagaagacatggccttttcaaaatcagtaatgtacaccttaagtaaaaaccagtggctggacgtggtggctcacacctgtaattccagcactttgggaggccaaggcaggaggatcccttgaggccaggagttcaacaacagcctgggcaacactttcaagttgcccaagaccttgtctctacaaaaaattaaaattagccaggcatggtggcacatgcctatagccccagctactggggaggctgaagtgggagtatcacacttgagcccaggagttcaaggttgcagtgagctatgattacgtcactactctccagcttgggcatcagagtgagacccttttttttgttgttttttttttgagacagggtttccctctgtcacccagrctggagtgcaatggtgtgatctcggttcactgcaacctcca

SEQ ID NO: 565968 - DNA, 556 bp, Homo sapiens
ctgcactccagcctggatgacacagcaagactccatctcaaaataaaataaaataaaataaaaatacaaaaattagctgggtgtggtggcgcctgcctgtagtctcagctacttgggaggctgaggcaggagaacctcttgaacccaggaggaggaggttgcagtgagccgagatcgcaccactgcactccagcctgggcgacaaagccacactcatctcaaataaataaataaataaatgaaaccataaagatcagaaagaaatgycacaatatttttatgtactgtaagaaatgagctgttaactgcaaattgtatattcagttgaaatattcttcaaaatgaaggagaaataaagatagtgtcaactgaaagaaaactaaaaatttgctatcaaacttaactttaaagaatgactaaagggactttttctaacaaaataaaaggaagcaataaagaataagtcttaacagcttcagatagaaaggaacatcacaatgggttaaagaaaaagtagataaatagaatatgctatttctaatgagatttttaaaca

SEQ ID NO: 565969 - DNA, 600 bp, Homo sapiens
tttgggggacaacagtcagatcataacactccccccaaaaattggtatgttgaaatcctaactcccaatgtgatggtattaggaggtcgggcctttgggagataattaaattattaaggtaaagacctcatgaatgggattggtgtccttacataagagatcttagagagcctctgaccattatttttccctgccatgtcgggatacaaagaaaagtcagcagtctacaacctggaaaagagccytcaataaacacataatctgccagtaccttgatcttgaacttcccagcctgcaaaactgtgagaaataaatttctgatgtttataagccaaccagtctatgacattttaattttttatagcagcccaaactgactaagacagtggtgaaccaaagagggccccagaaatccatatggggtctcccccatgtttgttgctgagggctatattgtgtatgtacagaatggattacctgagccttaccagagtaaacttctgtagatttgaaagcaggggagatattagtcatcaggcagtgcttagagaagggtaatgggaaaggacatgggatcctgtccctggcagagtggacagg

SEQ ID NO: 565970 - DNA, 600 bp, Homo sapiens
tttgggggacaacagtcagatcataacactccccccaaaaattggtatgttgaaatcctaactcccaatgtgatggtattaggaggtcgggcctttgggagataattaaattattaaggtaaagacctcatgaatgggattggtgtccttacataagagatcttagagagcctctgaccattatttttccctgccatgtcgggatacaaagaaaagtcagcagtctacaacctggaaaagagccttcaataaacacataatctgccagtaccttgatcttgaacttcccagcctgcaaaactgtgagaaataaatttctgatgtttataagccaaccagtctatgacattttaattttttatagcagcccaaactgactaagacagtggtgaaccaaagagggccccagaaatccatatggggtctcccccatgtttgttgctgagggctayattgtgtatgtacagaatggattacctgagccttaccagagtaaacttctgtagatttgaaagcaggggagatattagtcatcaggcagtgcttagagaagggtaatgggaaaggacatgggatcctgtccctggcagagtggacagg

SEQ ID NO: 565971 - DNA, 581 bp, Homo sapiens
tggtgggagagatgaaattatataaagaagtcagcatttgtaatgcatagartcaaaaaggggtgatgcatactttaataacagtaaaactgccacgctcttctgctttgttgagaatttttttcaaagagaaaactcttatttatttctaacaacctagcttatatatatatcttcatatataatgctttccctgaacatatgttctagtctaacttaaatgcctttctctctcatttcctgagatttcctctacttaggttctaacattcagttagaagttagcactctgggctggatgcagtggctcaggcctctaatcccagcactttggaaggccgaggcaggcaggtcacctgaggtcaagagtttgagaccagcctggccaaaatggcgaaactccatctgtactaaatatacaaaaatcagccgggcatggtggcaggtgcttgtaatcccagctactcgggaggctgagacatgataatcgcttgcacctggtaggtggaggttgcagtgatctgagatcacgccaatgcactccagcccgggggatggggccagactctgtctcaaaaaaa

SEQ ID NO: 565972 - DNA, 590 bp, Homo sapiens
aaccttcactaaagaaaaataggaaggtaggaaagaaagacgagcagaccacaacataaccagaaaacaaataacaaaatgacaaaagtaagtcctaactaccaatactaacattgaatgtaaatggrctaaactctccaatcaaaagacatagtctggctaaatggaaaaacaaacaaacaaacaaaacaccaatctgttgcctctaagaaacacactttgtctataaagacatgcacagaaagaaaacaacgggatggaaaaagataattcatggcaatggaagccaaaaaaagtggagtacctatacaagtattagacaaaatagagttcaagacaaaaactatgaggagataaaggtcaccatataatgataaaggggtcaattcatcaaaatgatattgcaattgtaaatatatatgcactcaacactggagcacccagatatataaagcaaatactattagaccaaagcaaagagaaagcctcaatacaataatagatggagacttcaacactccactttcagcatcagacagatcctccagacagaaaatcaacaaagaaacatcagacttaatctgcagtat

SEQ ID NO: 565973 - DNA, 590 bp, Homo sapiens
aaccttcactaaagaaaaataggaaggtaggaaagaaagacgagcagaccacaacataaccagaaaacaaataacaaaatgacaaaagtaagtcctaactaccaatactaacattgaatgtaaatggactaaactctccaatcaaaagacatagtctggctaaatggaaaaacaaacaaacaaacaaaacaccaatctgttgcctctaagaaacacactttgtctataaagacatgcacagaaagaaaacaacgggatggaaaaagataattcatggcaatggaagccaaaaaaagtggagtacctatacaagtattagacaaaatagagttcargacaaaaactatgaggagataaaggtcaccatataatgataaaggggtcaattcatcaaaatgatattgcaattgtaaatatatatgcactcaacactggagcacccagatatataaagcaaatactattagaccaaagcaaagagaaagcctcaatacaataatagatggagacttcaacactccactttcagcatcagacagatcctccagacagaaaatcaacaaagaaacatcagacttaatctgcagtat

SEQ ID NO: 565974 - DNA, 590 bp, Homo sapiens
caagcagaatccttcctcagaggaaaagtttggctattccacaattttaggggaaatatcacaataatatagtcttgatgcagctgtatcaggtgtctgaattggagacaaggtagaacatcaaaattagatgccactattacaatattttaaaaaagcatataaaagactttggtctatttgcgtatgtatttttttctattgtgaattatatatttgtattatgatattttctagttgattatcatataaaaatggcatttcatttcaaaaaattgagttagtaaccagctactttactaaaatgtttttaacgtaatacctgatattaaagtgatgacatttatmtggaaggccaattcaagacaaaaatggcagggacatgtggaaattgagacaagaacggatgtgaaacaatgtgtggtgatgtctggtatgactctgctggcagccacttcacagtgaggtgagagagacagcatggtggtcatcagatgcatgcacttgactcccagaacttttccagaagggctacaaagggaaacgacagctggcattagtccatggaagagagagagaggagggagaat

SEQ ID NO: 565975 - DNA, 604 bp, Homo sapiens
aaaaaatacactatacaacccttgaatcatgctatctgtaaatatgatatgaatcaatgactatgattttctaataataaaatgtgaaatattgtaaagcaccttgagatttcctttttaccagaatagggaagtaaaccagtggatgttatagtgcataaaagttttatggaaagaacacagataagttgtaacctttgaggtctgtacattctggagcacaagtaggagtttgaaatatctgggttctagattcaaaaattaacttttcagaagtgctaacctaaattatatatattagtttttctagccctttcgtaacaatataacacaaatgaagtggcaaaaacagcataaagttgttatctcacaggatgccagagatctgaaattaaaatgagaacatgattggttccttctcaggactgtcagagagagtctgttccacgtctcttttcctagcttctggtgggttgataattgttggcatttcttgatttgtggaatcatccatccctcaacgtctgccttcatcttcacatggtattttccctgtgtgtgtttgtctrtactcaaatttcctctttttataaggacaccagtc

SEQ ID NO: 565976 - DNA, 560 bp, Homo sapiens
ttagaaaattggctatccctgatgacctcacggaaggtttttgggggaagtgataaggagaaagcttgattgaaagggatttctaacaaagtagtgggattgaatgcagtaagtataggaaacaatttcaagatgcttcactcaaaaaaggaatggagaaaaggtaaatagttacagaggaagtagagtcaagatagttgtgcttaatgttttctaagatggaaaaaaaataataacatgtttgcatgccaatggaaatggtccaaagaaagggcaaaattaataatgtaggaaatacaaagaagtatttctggaataatgttctcggataggaaattaggaaaaagaaatattggctttagatgatagaccattctgttcatccacagtgactggcatatgagtatatgagcacaaatgcaaatggatgaacagacgtgttcaggccaactcttaatattgttttcataaamtaaaggcaagatagtactttttcaccatttaaaaatgtacaatagttcacaatgtcatgtagaattagtggaattgtggaaatactc

SEQ ID NO: 565977 - DNA, 519 bp, Homo sapiens
ttttattcaacattcgctatcatgaagaaagaattaaaatgcaacaggttgctaagcttattggaataggcataatagctttacccactaaagagtcaatggggctaagatttctgcataatgaatatctttaacaattaagctggtgaaaaakaaatgaattaagtgttatcatttaataatacataaatgtcacaatgaggtttctagttcctatttctaaccattgaaatctggggagtgggggaggagaggcccttgaagtgaatgaatttaaagtgggtactgttctgatgactagggcagtcaatattcaagtttgtctttttgtgttaccaattatctttataatttgtctcattgtttttattttaacacatgatcacaaattactacttatttttcctgagtatatatttatggagactgacatcctagattatttagaggattcagccataaacaattgggttagtttggtggaaattatgaggataattctgctacctgtaagaattc

SEQ ID NO: 565978 - DNA, 576 bp, Homo sapiens
tttgtatttttagtagagacggggtttcaccatgttagtcaggctggtcttgaacccctgacctcaggtgatctgcccgccttggcctcctaaagtgctgggattacaggcatgagccaccacgcccgaccagactgcttctttaartgggactgcaatccacttctcctcatggggaaggtcctcccagctggggcctctggccacccctgtccgtgttctatggccaacaaaggtataatttttccctaggacagagtgcctgagggacagggcaggctgttgccttggctcttcaggcttctcagctcgtccagtctgtgggccttggagagcccaaacatcaaggactgaagggactgctaacacagtacacctcctctaccaaaaagcagtcagactgctgctttaacaggtccctgatcccattcttcctcactgggtgagacctccaaactggggtctccagccacctcttacagatgcatagaggttggcaataggtcagtacccgcctgggatggagcttccagaggaaagggcaggctaccatctttgctgtttcacagccttaac

SEQ ID NO: 565979 - DNA, 566 bp, Homo sapiens
attctgtgatctgagagactgttatgatttcacttcttttacattttctgagaaatgttttactttcaagtatatgatcaattttagagtaagtgccatgtagcaccaagaagaatgtatattctattgtttttaggtagagagttctgtagatacttaccaagtgcactcaatttagagctgagttcaggtcctgaatatgtttgttaattttctgttttgatgatctgtctaatttggacggtgtggtgtcaaagtctcccactattattgtgtgggagcctaagtctctttgcaggtctctaagaacttgttataaatctggctgctcctgtattgggtgcatatatatttaggttagttagctcttcttgaattgaaccctttaccattacgtaattccttccttttcttttctgatctttgtctgtttgaagtcttactggagttccctggatttcctgartttgaatattggcctgtcttgctagattggggacattctcctggacattttccaacttggttccattctccccgtctctttcaggtaccccaatcagttg

SEQ ID NO: 565980 - DNA, 579 bp, Homo sapiens
atatgtaccctaaaacttgaagtataataataaaaataataataataataataataataaaggctgcaaagccagcaaagggaaatagataaattggattacatcaaaatctaaaactgttatgtacgaaggacactatcaatagagtgagaaggtaacccatggaaaggaaaaaaatatatatctgaggctaggatgatgtgtcatgcctgtaatcttggcactttgggaggccagagtgggaagattacttgaggtcaggagttgaagtttgcagggagctgtgcatcacacaactggactccaagcttggaaaacagggcaagatcctgtctcaaaaataaaataaatatatatatatgyacataatattatatatatatatgataaggggttttatatatatatatgagaaggggttaatattcagataatacaaagaactcactcctacaactcaactcaacaacaagaaaaacaacaaattaaaaatgggcacaggagttgaatagacgtttttctaaagaagacatgcaaatggccaataagcacatgaaaaagtgctcaacatcactaatc

SEQ ID NO: 565981 - DNA, 612 bp, Homo sapiens
tctataatccatgactccctgacctttactaatatattcatacaatattgacgtttggtgaagcttaaaaatggatggcaggagtgggatgagacaaatctgaggcatgtattagacttctccaaaacttcctcatgagaaaggccaaaaggagctagaaaaattgctgaaaaccatttatatttaattcctaagattttcccaacaaaggttgattggttcatcatacagtcttgcagacaaaaaaaaggatgaatcattttctgattacagaacttacttagaaatgckgtttgtaaaatattctggactccaaatacagcaagaagtatttcctgcagggactgaaatgatattaattcctctatttgtaaatggacttcatcctgaacttacctgtttaattaagaaacacaaacctggatggagagttacaggtatgaactggtggcctcagctgaacattttgagaggactctggagcaaaaaaaaaaaatatccaaaatgctaacaattatgactcgtcaattacaacagttacaggggctgaggctaaaggcaccttctcatttttattttaaatcacaacaaacaggtcctagaacaagaaat

SEQ ID NO: 565982 - DNA, 598 bp, Homo sapiens
acaaactcccatgaggccaccaccactatgattgtactgggtcagtcctgaaggcagcacagcactgggtctcaccgaaggcctactgtaacyactccctggctaccacttatgttcacttaaggccctgggactctactgtcagcaggtggtaaagccagagaggcttgtgtccttcccttcagggtggcgagttccctgaggccctacgcattttcagaggtgctgtctagaagtcagggactagagtcaaaaaccttagaagtttacctggtgtcctattgttgtgcagctgagctggcactcaaaccacaagatgcagtctttcccactcttctctcccctttccaaaggaagaggagccacaccccatggtgtgagtggcagtgggatgttcttttatagccaattgcatgttactcttttatagccacatttgcttttctctcactctcaccccctttttcaccactggcaaccattaattgatttttcatttttatactttccttattccaggaatgttttataagtggaattacacggtatataacattttggcattgacttttttcccccctctctgcgtaattctctg

SEQ ID NO: 565983 - DNA, 598 bp, Homo sapiens
acaaactcccatgaggccaccaccactatgattgtactgggtcagtcctgaaggcagcacagcactgggtctcaccgaaggcctactgtaactactccctggctaccacttatgttcacttaaggccctgggactctactgtcagcaggtggtaaagccagagaggcttgtgtccttcccttcagggtggcgagttccctgaggccctacgcattttcagaggtgctgtcyagaagtcagggactagagtcaaaaaccttagaagtttacctggtgtcctattgttgtgcagctgagctggcactcaaaccacaagatgcagtctttcccactcttctctcccctttccaaaggaagaggagccacaccccatggtgtgagtggcagtgggatgttcttttatagccaattgcatgttactcttttatagccacatttgcttttctctcactctcaccccctttttcaccactggcaaccattaattgatttttcatttttatactttccttattccaggaatgttttataagtggaattacacggtatataacattttggcattgacttttttcccccctctctgcgtaattctctg

SEQ ID NO: 565984 - DNA, 598 bp, Homo sapiens
acaaactcccatgaggccaccaccactatgattgtactgggtcagtcctgaaggcagcacagcactgggtctcaccgaaggcctactgtaactactccctggctaccacttatgttcacttaaggccctgggactctactgtcagcaggtggtaaagccagagaggcttgtgtccttcccttcagggtggcgagttccctgaggccctacgcattttcagaggtgctgtctagaagtcagggactagagtcaaaaaccttagaagtttacctggtgtcctattgttgtgcagctgagctggcactcaaaccacaagatgcagtctttcccactcttctctcccctttccaaaggaagaggagccacaccccatggtgtgagtggcagtgggatgytcttttatagccaattgcatgttactcttttatagccacatttgcttttctctcactctcaccccctttttcaccactggcaaccattaattgatttttcatttttatactttccttattccaggaatgttttataagtggaattacacggtatataacattttggcattgacttttttcccccctctctgcgtaattctctg

SEQ ID NO: 565985 - DNA, 598 bp, Homo sapiens
acaaactcccatgaggccaccaccactatgattgtactgggtcagtcctgaaggcagcacagcactgggtctcaccgaaggcctactgtaactactccctggctaccacttatgttcacttaaggccctgggactctactgtcagcaggtggtaaagccagagaggcttgtgtccttcccttcagggtggcgagttccctgaggccctacgcattttcagaggtgctgtctagaagtcagggactagagtcaaaaaccttagaagtttacctggtgtcctattgttgtgcagctgagctggcactcaaaccacaagatgcagtctttcccactcttctctcccctttccaaaggaagaggagccacaccccatggtgtgagtggcagtgggatgttcttttatagccaattgcatgttrctcttttatagccacatttgcttttctctcactctcaccccctttttcaccactggcaaccattaattgatttttcatttttatactttccttattccaggaatgttttataagtggaattacacggtatataacattttggcattgacttttttcccccctctctgcgtaattctctg

SEQ ID NO: 565986 - DNA, 584 bp, Homo sapiens
aatgctacaggatattgaatttggcaatgatttcttagatatgacatcaaagcacagaccaaaaagcaaaacagacaaataggactatgtcacaatttaaaacaatttctcatcaaaagaataatcaacagatagaaaaggaaagttagggaacaggagaaaatattcacaaattgttttctgaaaaggggttaataaccagaatatataaagaacttctacaactcaacaaaaaaaaaaaaaacaaataacctgatttaaaaattgataaataacttgaatagataattctccaaagaaaatatacaaatggccaactagcatatgaaaagatcaataatcacaagagaaatgcacattaaaaccacagtgaaataccctcaccccctgttaagatggctattatcaaaataatgaaaaaaaaaaagtcttggtgaggatgtggagaaatggaacacctttgcaacttggctgggattgtaaaacaatgcagccactgtggcaagaagtgtaaaggttccttaaaaaattaaaaataattaccatatgwtacagcaatcccacttttgggtatatatctaaaa

SEQ ID NO: 565987 - DNA, 531 bp, Homo sapiens
tcacttgagcccaagagttcaagaccagcctgggcaatatggcgagaccccatctctacaagttacctgtagtccmagcaacttgggaggctgaggtgggagaatcacttgagcctgggaggttgaggctgcagtgagctgtggtcatttcctgtagtcccagcaacttgggaggctgaggtgggaggatcacttgagcctgggaggttgaggctgcagtgagctgtgatcgtgccactgcaccccagcctgggcaaaagagtgaaaccctgtctcaaaaaaaaaagaacaactacaaaaaacctacatctaatatcatgcttaatggtgaaagacggaatgctcgtcccttaagattaggaacaagacaagaatatctgctctcattactcttactcaacctagcattagaagttccagccactgcaataggcaagaaaaagaaatacacggcactcagattagaaaggaagaaggaaaactatctctatttgcagatgtcatgatcatcttgggattttctacataaaa

SEQ ID NO: 565988 - DNA, 531 bp, Homo sapiens
tcacttgagcccaagagttcaagaccagcctgggcaatatggcgagaccccatctctacaagttacctgtagtccaagcaacttgggaggctgaggtgggagaatcacttgagcctgggaggttgaggctgcagtgagctgtggtcatttcctgtagtcccagcaacttgggaggctgaggtgggaggatcacttgagcctgggaggttgaggctgcagtgagctgtgatcgtgccactgcaccccagcctgggcaaaagagtgaaaccctgtctcaaaaaaaaaagaacaactacaaaaaacctacatctaatatcatgcttaatggtgaaagacggaatgctygtcccttaagattaggaacaagacaagaatatctgctctcattactcttactcaacctagcattagaagttccagccactgcaataggcaagaaaaagaaatacacggcactcagattagaaaggaagaaggaaaactatctctatttgcagatgtcatgatcatcttgggattttctacataaaa

SEQ ID NO: 565989 - DNA, 392 bp, Homo sapiens
cgctcacgctgggagctgtagaccggagctgttcctattcggccatcttggctcctcccctgccagatactgttttctactgtgaaatctgtcactgcagaatattaagggccaattcctcaatctgggtgaccacactgggggccactttctccctcacaactccttggcatctcacccaagttcagaagtcaaagaggaggccttcagagacaaagaactattcttagggcttaaccaatttcgcttactgacatagatatttcccaaggtgctgtgaacttcagaagttatttcaaaacccagttcaatcttatttacattttcatccattgctttttgaatagtttcagattyacagaagagttagaaaaatagaattgagagtttga

SEQ ID NO: 565990 - DNA, 593 bp, Homo sapiens
ccgaaaacctgggctgaattttaaaagaaagcatttgggatctattgtattaaaggtgcttctgagctaagtgcattctaaatacactgtacaatcaaaaataatgctggactttggrcactatgctaaattttttaaaaaaggaaaaaaatacacaaatgatacctttttgaacttgcttttcctgagaactgaaaagatatatcatggactttttttttttcagttaccctttgttttttccccttccaatttgccttctgtcatcttctgcccactagcctagtaagtcaaaacaactctaaaaggaaagtgtcttgaataggaagcttattcagaaagcatttgtagtagaggcagaatctactccaagaagaaaccagtaaggtacttttaaaacttcatttcttggtgtaaagattctgttgctggatgaagatctatataaaatatattacaatgtactccaaatttaacaaattaaaactactgccacacaaaattttttttaagtgtgacaagaagcattaatttctgtatatccttgctaataaaaagatcaataaacataattttttaaaaaatgaagaaaa

SEQ ID NO: 565991 - DNA, 595 bp, Homo sapiens
tggttataaatgatagcagagttttaactaaatataaatattgaagttcattaaacaactaagatttcatccaaaaacaaaaacaaaacagtagaaaactggggcttatgtcgcatctaagcaaatgaaagcagggtaaaaattggtttaagttaaagaaaataatatttawatgttgcttggaagttgatttaaaaaacaaagtaaacctaaagacttgaataaagatgaaaatgacctttaaattatttttactttattgcaaatagaattaaaactagttattggcccggcacggtggctcacgcctgtaatcccagcactttgggagactgaggcaggcagatcacctgaggtcaggagttcgagacccacctggctaacatggtgaaagcccatttctgctaaaaatatagaaaaaaaaattagctgagcatggtggcatgcgcctgtaatcccagctactctggaggctgaggcatgagaattgcttaaacctatgaggcagaggttgcagtgagctaagatcacgacattgcactccagcttgggcaacatgagtgataaactccacctcaaaaaactagctatctac

SEQ ID NO: 565992 - DNA, 595 bp, Homo sapiens
tggttataaatgatagcagagttttaactaaatataaatattgaagttcattaaacaactaagatttcatccaaaaacaaaaacaaaacagtagaaaactggggcttatgtcgcatctaagcaaatgaaagcagggtaaaaattggtttaagttaaagaaaataatatttaaatgttgcttggaagttgatttaaaaaacaaagtaaacctaaagacttgaataaagatgaaaatgacctttaaattatttttactttattgcaaatagaattaaaactagttattggcccggcacgrtggctcacgcctgtaatcccagcactttgggagactgaggcaggcagatcacctgaggtcaggagttcgagacccacctggctaacatggtgaaagcccatttctgctaaaaatatagaaaaaaaaattagctgagcatggtggcatgcgcctgtaatcccagctactctggaggctgaggcatgagaattgcttaaacctatgaggcagaggttgcagtgagctaagatcacgacattgcactccagcttgggcaacatgagtgataaactccacctcaaaaaactagctatctac

SEQ ID NO: 565993 - DNA, 418 bp, Homo sapiens
tactgatttcctttcttttgggtataaacctataagtgagattgctggatcatatggtagctctatttttagttttttgaatttattttatttagtttattttaacaaaaataacaaaattggaggaatcacattacctgacttcaaattataytacagagctatagtaactgaaacagcgtggcactggcataaaaacagacacatagattaatggaacagcataaagaacccagaaataaattcaaaccgttctccatagtggttgtaatgatttacgtttccaccaacagtgtacagggtttcccttttctctacacccttgccagcatttgctattgcctgttttttggatataagccattttaactgaggtgagatcatatcttattgtagttttggtttgcatttctctgat

SEQ ID NO: 565994 - DNA, 418 bp, Homo sapiens
tactgatttcctttcttttgggtataaacctataagtgagattgctggatcatatggtagctctatttttagttttttgaatttattttatttagtttattttaacaaaaataacaaaattggaggaatcacattacctgacttcaaattatactacagagctatagtaactgaaacagcgtggcactggcataaaaacagacacatagattaatggaacagcataaagaacccagaaataaattcaaaccgttctccatagtggttgtaatgatttaygtttccaccaacagtgtacagggtttcccttttctctacacccttgccagcatttgctattgcctgttttttggatataagccattttaactgaggtgagatcatatcttattgtagttttggtttgcatttctctgat

SEQ ID NO: 565995 - DNA, 504 bp, Homo sapiens
ctatcctccctcccttccttctatccttyctccctcccttccttctttccttccttccctctttccttttttccttcctccctcccacccatcctcactcccttctttcctccctcctttcctccctccctctctccctccctccttctgtctttccttccttctttcctttttccttccttcctttcttccttccttccttcttctttcccttcctctccccatcctctttcctttactcacttctttcttttctaactttccttctcccttttttcttctacttattaattcaagagatatttattgagcttctaccctgtgtttggccttgtgttaggtgtggactatactggtgagcaaaaacagacagacacattctctgtcttcctgggtgcttaccttacagtgcaatgaagagaggtgtgcctttatcaaacaattgtccacataaatgttaaattgcaactgcgataagtgatacgaaggagcacactagccatg

SEQ ID NO: 565996 - DNA, 583 bp, Homo sapiens
tgggtggggacacagagccaaaccatatcatttcacctctggtccctccaaatctcatcacatcttaaaaccaatcatgcctttccaacaggcagctcaaagtgagctgccttttactctcattccacttggatttttccactgttcactacaggtagacacamtgaaaaagattaaaacagggtcacacatattggcagaatcctaagaaagcatttgatcaaacgatagtttcacaaaacaaattaaagtgtattgtatgactgctactctcttgtgtgtagtctctagcctacgaattcatgtgataaatatttcataaacatgaagaatcaattctttccttaaagtgtgatgtaaaagctctaaatatattcttattagctaagttggtatttcctaggccatttcaaataagtcttgggttattgaaataggcttattttttttttttttttcagacagtctcactctactgcccagactggagtaaagtgttgcaatcttgactcactgcaacctctgcctcccaggtttaagtgattctcctgcctcagcctcccaagcagctgggactacaggc

SEQ ID NO: 565997 - DNA, 556 bp, Homo sapiens
aaatgcctactattttaaagtattttcccrtccattcagactttagctgtggccaggactgtttcaatatgtgttttgacctctacgtacattgatagtcattttcctatattaatttcttcattcagtaaaccatccaatgtctccttcattcagtaaacatttattcttggacagctgtgagttgaacaatgtgaaggtgttgaagatgaaggagaagcagcagttcctgctcttggtctaattacttgtttaaataaaactaattcaaatataagagatactttcattttagggcacggtagctcacgcctataatcctagcactttgagaggctgaggcaggtggatcacttgaggtcaggagttcgagaccagcctggccaacatggtgaaaccccatttctactaaaaatacaaaaattagccaggtgtggtggcacacacctgtaatcccagctacttgggaggctaaggcaggagaatctcttgaacctaggaggcagaggtttagtgagccaagatcgcgcaccactgcactccagcctggggcaac

SEQ ID NO: 565998 - DNA, 607 bp, Homo sapiens
tctacaatatgttactattatttttatatattatctttataaatctaaaaataaataccatcataggccttcaatctctcatctacatatctgaaatctaaaattactgaaaactaaaagttttccgtaatattggtactcccttatttgtctgcaaaatctggcctaacctgaaaagaagctctttgtagtctctgtcctccttgtgagaattctgatatgttcctctgcggaaacactaatttgcttctttatggggttctataacaaagggatctattttttcaaaaaaactcatctgagacataaatgtggcatatgtcagagcaaagagagtgaactataatatataaaacaatcaatttgttcattataaattatacctaattattaactgaatggctacttaaatccaacctagctttctcccttatgttgatttatcaaggtgatttcctttcctttggcgcagttacacctaatactctctattcccccaacaaacaaagtgttaatcaagtactcagataaaggttttagatttcaaacatcccacttatctaaacagtttcccacctaycttgataatttatcaaaggaataaaat

SEQ ID NO: 565999 - DNA, 585 bp, Homo sapiens
ttacaattgtgattatataatagttgattttgaggatgaagagtggataaagacacagatgaaacaggaatggcatgaggctgataactattgaaggtgatggatattgtactgactttgatatatagtgattatatatatactgcatgtgtgtgtgtgtgtgtgtrtatgtgtgtgtgtattcctcacagacagcaagagggtgtcttgagagaggaaaccttttataagtcatacagtaacacaatattggagaatggtggttcttaactatgcttagatagtgaaatacattatccattttgtctttatagcagtgctttataaaggaatattatcttcatttcatagacacagaaattgagagttacacagattgaaatgtgtccaagatcacaagctagtcactgacaagtcaagtaagtagtattcattctacctccttctagggccaatactttttttttaacttttttcccagaaattttatatatacacagtcaatacaatatccatcaccttcagtagttatcaacctcatgacattcttctttcatctgtatctttattccattcctcatcttc

SEQ ID NO: 566000 - DNA, 608 bp, Homo sapiens
aagtcatacagtaacacaatattggagaatggtggttcttaactatgcttagatagtgaaatacattatccattttgtctttatagcagtgctttataaaggaatattatcttcatttcatagacacagaaattgagagttayacagattgaaatgtgtccaagatcacaagctagtcactgacaagtcaagtaagtagtattcattctacctccttctagggccaatactttttttttaacttttttcccagaaattttatatatacacagtcaatacaatatccatcaccttcagtagttatcaacctcatgacattcttctttcatctgtatctttattccattcctcatcttcaaaatcaactattttataatcacactgttttacggttgtttttgcattgtgcagaaactcaggattctggaactaatcacatttttaaaataaatatgattagtgtaaagcaggttaactgtgcattggttacccacgtcatagtctggtgagacagaactactcataggcaataaattacattgggtgtacttattatttatacacaggcagcagagaccaaaaaaaaagcacttttttaacaagccaag

SEQ ID NO: 566001 - DNA, 608 bp, Homo sapiens
aagtcatacagtaacacaatattggagaatggtggttcttaactatgcttagatagtgaaatacattatccattttgtctttatagcagtgctttataaaggaatattatcttcatttcatagacacagaaattgagagttacacagattgaaatgtgtccaagatcacaagctagtcactgacaagtcaagtaagtagtattcattctacctccttctagggccaatactttttttttaacttttttcccagaaattttatatatacacagtcaatacaatatccatcaccttcartagttatcaacctcatgacattcttctttcatctgtatctttattccattcctcatcttcaaaatcaactattttataatcacactgttttacggttgtttttgcattgtgcagaaactcaggattctggaactaatcacatttttaaaataaatatgattagtgtaaagcaggttaactgtgcattggttacccacgtcatagtctggtgagacagaactactcataggcaataaattacattgggtgtacttattatttatacacaggcagcagagaccaaaaaaaaagcacttttttaacaagccaag

SEQ ID NO: 566002 - DNA, 442 bp, Homo sapiens
aatcccagctacttgagaggctgaggcaggagaattgtttgaacctgggagacggaggttgcagtgagctgagatcacgccacttcactccagcctaggtgacagagcgagactctgtctcaaaaaaaaaaaaaaaaaaaaaaaaggaagaaaaaaaaattgtactaagggrttggggaagaacaaagacatgcttaaactattaaattgcaaaaagaaagaataaaataccttgaggtctgggatcatgtgaactacactggcagtatctgttacataatttcgctctgctttagaggatatttcaacattgctacagagttttatttcaaataaaatgcaaaagtttattttgtattgttttaaggtttttttgcatattttgttattgtgatggtgaagacttaaataatcggtcactctcactaccatatgtatgggt

SEQ ID NO: 566003 - DNA, 486 bp, Homo sapiens
tttataagtgaaggagaagtaaaatccatctcagacaagcaaacactaagggaatgcatgttaagtagactaccttacaagaggtccttaagggartgctaaacatggaaccaaaagaatgacacctgctaccaaaaatatacttaagcacatagctcacagacactaaaaagaagtcacaaaatgaagtttatagaagaaccacctagtaacatgataataggatcaaaatcttatgtatcactactaactcagaatgcaaatgggctcaacatcccacttaaaagagacaaagtggcaagctgacaaaacctaaccacatgctgtctttaagagagccttctcacatgtaacaaaacaaacaggctcaaagtaaagggatggagtaagagctaccatgcaaatggaaaacataaaagagcaggagttgccattcttatatcaatgaaacaaattttaaaccaataaaaattaagaaggacgaag

SEQ ID NO: 566004 - DNA, 600 bp, Homo sapiens
tttgttcatttttctcagcaatgtttcaaagtgttaggttagtagagatcttgcttaccttttattacacttattcttcttttcttataattttgatgctgttgtaaatgtaaaatttaacataatttttgackgctagtatatggaaataaattttaattttgtatattgagcttttatcctaaaaatgtgctaaattaatttgattgcatagactttttgtagattcttcattattttctatgtagatgatcatgtcatctacaaataaagacagttttacttacgtttttctgataaatatgccttttatttcctcctctcccattgcactggctatgactgtcatgacaatgttgaatagaaattgtgagcacagacattctgtcttttctctcatcttatggggaaagaattcattattttacaattaagcatgatgttacctgtaattttttttgtagctgctttttattagattgaggaagttttcttttattcctagactgctgagagtttttaaccaaaaatgggcattgaaatctgataaacatttttctgcttttgtcgagatgatcatatattttttctccttttttc

SEQ ID NO: 566005 - DNA, 600 bp, Homo sapiens
tttgttcatttttctcagcaatgtttcaaagtgttaggttagtagagatcttgcttaccttttattacacttattcttcttttcttataattttgatgctgttgtaaatgtaaaatttaacataatttttgactgctagtatatggaaataaattttaattttgtatattgagcttttatcctaaaaatgtgctaaattaatttgattgcatagactttttgtagattcttcattattttctatgtaratgatcatgtcatctacaaataaagacagttttacttacgtttttctgataaatatgccttttatttcctcctctcccattgcactggctatgactgtcatgacaatgttgaatagaaattgtgagcacagacattctgtcttttctctcatcttatggggaaagaattcattattttacaattaagcatgatgttacctgtaattttttttgtagctgctttttattagattgaggaagttttcttttattcctagactgctgagagtttttaaccaaaaatgggcattgaaatctgataaacatttttctgcttttgtcgagatgatcatatattttttctccttttttc

SEQ ID NO: 566006 - DNA, 600 bp, Homo sapiens
tttgttcatttttctcagcaatgtttcaaagtgttaggttagtagagatcttgcttaccttttattacacttattcttcttttcttataattttgatgctgttgtaaatgtaaaatttaacataatttttgactgctagtatatggaaataaattttaattttgtatattgagcttttatcctaaaaatgtgctaaattaatttgattgcatagactttttgtagattcttcattattttctatgtagatgatcatgtcatctacaaataaagacagttttacttacgtttttctgataaatatgccttttatttcctcctctcccattgcactggctaygactgtcatgacaatgttgaatagaaattgtgagcacagacattctgtcttttctctcatcttatggggaaagaattcattattttacaattaagcatgatgttacctgtaattttttttgtagctgctttttattagattgaggaagttttcttttattcctagactgctgagagtttttaaccaaaaatgggcattgaaatctgataaacatttttctgcttttgtcgagatgatcatatattttttctccttttttc

SEQ ID NO: 566007 - DNA, 566 bp, Homo sapiens
cactgttggtgagaacgtaaattccactgttggtaggactattggtggaaatgtacaaccactgtggaaagcagtgtggagatttctcaaagaactaaaaatagaactactgttagttctatttaccaatagaattgctatctatcaatagattactatttgccaatagtaatcttactattgtgtatctgtccaaaggaaaagaaatcattgtatcgaagtggtaccggcactcatatgttgattacaacactattcacaatagcaaatatgtggaataaacttgtatctgtcagtggatgactggatgatgaaaatgtgagacatatataggaatactattcagccatcaaaamgaatgaaataaagtatcttgcagcaacatggatggaactggaggctattatcttaagtgaaacaactcagaaacataaggtcaaataccacttattctcacttataagtgagagctaaataatgtgtacatacagacatagaatgtagaggccgggtgcaatggcttacacctgtaatcccagcactttgggaggctgaggcaggtagat

SEQ ID NO: 566008 - DNA, 609 bp, Homo sapiens
aaggcaccaggtttgcagtgctatgaaatgtgtacagtgaagcaaatgattttacactgaggtgcaaagcagccggagtgtgagatagtggcaaggatctgggcttttgcagttggactgtgctgggtttgagtcccaactcagccactcattagccttgtgaccttgagcagtttacttaactactttaaacctcgtttttctcatctgttaaaccaagattaaaatagggcaggatttctcaacctcagcactattgacctgttggactggataatttaaaagcccccaattcaatgtaggggctgtcctgtgcattgaagaatgtttatcagcatccctggcttctacctctcaatygtcaatagaacaaccattgcccacaagttctcacaaccaaaacaaaacaaaacatgactccagacattgccgaatatccccagtgggcaatatggacatcgctgaaaacaactacaatagttttaaggtgggaataatgaagttctatgcaaagcactcggcatagtatctagcatataatgattgctaaatagatatttgggtttttttttttttacccatttataaaaatatgagaagtatttttta

SEQ ID NO: 566009 - DNA, 505 bp, Homo sapiens
ctaaaataatgacagggtctgygagctggtaaactggggcagcatttaaagctgttttttgatatgaaaactttaagacatgctttatagttataaaagatgaataaccaaattggagagcattcttcttatttttcctgtgaccccaacttcagcctgtattccttttcataattattgcaaaagatgatgttccctttctgtttgtttgtaacccccaagtatctgccatgacaggacctagcatctattaaggaatagcattggttggaaaggtggcatgggaaggctaacaggaagagggagggagacaaacctggggagggagagagactctgacatccaccagaaaagggaacatcagggcgcaaccttccacagcctgaaggcaagcaagcaagggttgcagaaagcggaatgctggagcggcatggacagttgtgctgcatagccaggcaggtggtgaacaagctaggtttcaattattctgaaactcaatagaatt

SEQ ID NO: 566010 - DNA, 483 bp, Homo sapiens
tcttccatcactggctgcagacgtatctggaaataatatacaaagtgttcatccttttagtatcaatcattcttaaagaaaaagtgtcaaagcagagtttcgtgggacaggaatccatctaagagtgccaattccttctgctaccattcccctttctctgtgaagagagcctcctgatctgtactcttttttttttttttttgaggaggttttgaactgtcctctacctccacagtcctcaatagctggcagcaaatatatacaccccaaattactctttcatccagtcccaaggtactttaagctacttaaaagttayattgccactgtagggtcctctctactaaatagagcacatcctgttaacactattcctgctttaacctcccatgatgcagactaaatctggcccaattttgtaccgttaaagttcaaatgctacattcatgtaactatcagatttagttatgtttctattattta

SEQ ID NO: 566011 - DNA, 599 bp, Homo sapiens
acaataccatacttgtcaaaacacagaactgtataccagaaagagtgaattttgccatacataaattagaaaacaaattaattaagcaaattttcaatcagaagtggtcacttcacagtaaggcacattttctttctctacagttttgcaggtttgatgatatctcttccacagacatgaaaactacctctctgtaattttgcccatttatcatttctacttataggagccacaacatgacattcaaacttaggtaacatttcaggcagccctcagaatgtttttacattcatttgaaaatgtgaggaaacatttttcaaataaacattttgattaaatayaaatataactaaaacaggagatttggcagtgctattttatccccattatcctttttgtctcattgctcataaactcacaaactataaggatggcatattcatactcggattgcactcctttggacaaatccaattccataaccattctaaatatggcctgaggcagcgaaggaccttcctacacgatccttaaaatcaacagcaattttctaattaaaataaacgaattaatccctaagtatttttggaaaattccaa

SEQ ID NO: 566012 - DNA, 599 bp, Homo sapiens
acaataccatacttgtcaaaacacagaactgtataccagaaagagtgaattttgccatacataaattagaaaacaaattaattaagcaaattttcaatcagaagtggtcacttcacagtaaggcacattttctttctctacagttttgcaggtttgatgatatctcttccacagacatgaaaactacctctctgtaattttgcccatttatcatttctacttataggagccacaacatgacattcaaacttaggtaacatttcaggcagccctcagaatgtttttacattcatttgaaaatgtgaggaaacatttttcaaataaacattttgattaaatataaatataactaaaacaggagatttggcagtgctattttatccccattatcctttttgtctcattgctcataaactcacaaactataaggatggcatattcatactcggattgcactcctttggacaaatccaattccataaccattctaaatatggcctsaggcagcgaaggaccttcctacacgatccttaaaatcaacagcaattttctaattaaaataaacgaattaatccctaagtatttttggaaaattccaa

SEQ ID NO: 566013 - DNA, 540 bp, Homo sapiens
gatgtaaaattattagctttcattatgatactactgataagggtatatagctttaaattctcatttgcagtttgccaaaacttaaaccattaaaattgctaaagtaatttcaagaaaaacaggtaatctaaattatctaaatttcaaaaaatataggttatccaaactaaagtgacagtgtagtgtaataaaaaaatgagggtgcatttatgtttatttatatgtgtgtgtgtgtaaatttgagccrgactaaaataggtttatttttagctctggaatttatttggtggcattgtgaaagttacttaatttctttcagacaaagttttcttttctctaaactagtattgtgacatggattggctgtgtccccacccaaatctcatattgaattgtagctcccataatccccgtgtctcgtgagagggaccaggtggacctaagtgaatcatgaggcaatatccctgcatcctgttctcgtgatagtgagttagttctcatgagatatgatggttttataaggcgcttccccctattgcc

SEQ ID NO: 566014 - DNA, 578 bp, Homo sapiens
agttactgtaattggtaacagtctygtctaattttaatgatttttatacagctattgcctataccgtatatttaaatcagtaaaatgttttaaaaattggaaaataatgaattttaggttatacatttattaatttaaacccagctgttgtgaggaaaacacacacttttttgtttctttgttactattgttccagatcaataatcaagtttatttgaaatattttccttcatacaaagttttattcaatatcaatggtaatagtctcaaacatttgactaaactttattacatgtttttactgtcctcttgatttttgaagtgacagacttttcattttaacttggattggattataatgaaatacaatttctgatgtctctgctaactattgcagggaacactatttcttgagaatgtctgcttttattttggaaaatcctatataccttgatgagaaaatttaaagctttccattttttcattgcataaggtaacattcagatttgtttattggcatattactgagtttaaaatattaaatataaagccaatattattacaaatctttgacatag

SEQ ID NO: 566015 - DNA, 544 bp, Homo sapiens
tccaaaccttcacccttttctcatgttcaaccttttgctgaaatcttccttctttattcccaccctcactgatcactgttttctgatttctccaatgggggaacccctctgtaaaaatcaataggtgtttaataaatcatgcttttcagttacctcacttgaacattcgcttttttctctactggtgtacaaatgctgaaaatagtcaagtatatgagattgggagataatcagcagtggctggatggtagatactgacttaagaacctccatgcagacggctcaatagggcagggtgcacttggcagcctcttcatttgtttacatcctcattagtgatcagtgacgttggttgtataggaaaggtaaaaagaatattytgtgccctagcctggataaatcacccaggctcagctggaattttttgtttccaatcatttgaacacaagtgggtgccaggcagagtcatcaccatttaggaagtcagcaaagaactgaacaagagggtgagatctcaggaagctaagtgctttggaaactggtg

SEQ ID NO: 566016 - DNA, 415 bp, Homo sapiens
ccattgcattccagcctgggcaacaaggagagaccctgtctcaaaaaaaaaaaaaaaaaaaaaraaagaaagaaagaaagaaagaaagaaagaaaaaacatggggatttttggtttacaagattccccaaacaaagtatttactaatattcctgtccccttgttcgtagtagtgagacccccttcagagaaggggctcttgtcctgccctccctgttcttagctaattggaaaaatgttcatcatagccaccactactaccagtggagaccatggcattttagtttcctattgctgctgtaacaaattagcacaaacttagtggcttaagacaatataaatctattggctttcagttctggaggtcagaggtccaaaatcagcctcactgaactgagtcaagatgttggcatggc

SEQ ID NO: 566017 - DNA, 596 bp, Homo sapiens
gattcttatgcattgcatgcctgtatcaaaccgtcatacatagataaacctattatgtactcatacaaattaaaagtaacttgggcaagattgcaaagtggccaactgaactagatggctctctgccacccatagcacccaaacattagtctgtcaagtggttttccccagcctttgggaaaaagagaataaaaaataatacagacttaaaaaaaataaaattttaagtattcattttaaagtatcaaaacctattttaagatttttaccatttattgtttggcattaaaatattcttgtgtgtgtgtgcagtaatgataacagaagacaccattggtccaagggtgtatgctggctttttttttttaattttgtcagaaaatttcaagctctagagccccttatctatagtgcacaactgaattgggtatcttcttccttttttttgtgaagatgacatatctatgtgtrtgtatatatacaaatgtgtatacaattctgggtgataacagatagtgtgtatcatctatctatggataaatgtgcaaacatgaacaaattttaaagaagtagttctgggttccttttgtgaattc

SEQ ID NO: 566018 - DNA, 499 bp, Homo sapiens
ctcatacaaattaaaagtaacttgggcaagattgcaaagtggccaactgaactagatggctctctgccacccatagcacccaaacattagtctgtcaagtggttttccccagcctttgggaaaaagagaataaaaaataatacagacttaaaaaaaataaaattttaagtattcattttaaagtatcaaaacctattttaagatttttaccatttattgtttggcattaaaatattcttgtgtgtgtgtgcagtaatgataacagaagacaccattggtccaagggtgtatgctggctttttttttttaattttgtcagaaaatttcaagctctagagccccttatctatagtgcacaactgaattgggtatcttcttccttttttttgtgaagatgacatatctatgtgtatgtatatatacaaatgtgtatacaattctgggtgataacagatagtgtrtatcatctatctatggataaatgtgcaaacatgaacaa

SEQ ID NO: 566019 - DNA, 579 bp, Homo sapiens
agtgtgatgaagccaggtgccaacagcgacagttgttaaaatgttctccaagctgtttttagacgaccaggattttcagactatactttcccttctgcctctgacaaatacctagacccagaagtcctctccccctccttmctggaaacacgtgggtctgtgtttccaatgcagtggaagatgcttaaattatccatttggaaagagcaagagagagcagcagctcccctggcagcagaaaggggcagctgttttctgaggcacgtgacttcagttggcaaacacattcactcagcaggaagggaaacccggccatccaagttctttatgggcccaacttcagctcactgtttatttgggctcttagtttaatgttgatcatcagtatctaaataaatgatcattgctccacctgacaagaagccctactttattttccaagggtggtaggaagtcccttccctctccccgcactcactggttcctggcttaattacagcttctctgcagtgtggactccagcagaagaatgacacagatttggacatacatgcacccaacactcacacacactcatat

SEQ ID NO: 566020 - DNA, 521 bp, Homo sapiens
agtcttccttactctaaactcagtaggaawgtgccatgaagaaagggaaaacttttaagctacatttatattgaatatctgaaattatcacagcccaccccacaactcttctctgactagcaaactttctcttcctcctgtttcctattgtaataagctaatttcagccacttctccaagccaggattccaagaatcatctgtgatttccctccttctagccccttcatctgtttgacatccaggctatatcttctaatgccttaattgttctcaaatatacccccattgccaatgcccaggttcagctctttgtcatatttaatctaaattagtctgaccaatctccctacctccaatcatcctatctacaatccattttccatttaactccactatcacattcaaaatcattttcaagttccctcagcaaagtgccttcatgtggtacccaaaaccctcctgacctgaaccagtctttctacctccatccttttcactcatttctcctgctcacattct

SEQ ID NO: 566021 - DNA, 338 bp, Homo sapiens
aaagtctaaacagacctatatctagtatggagagtgaatcagtaatcacaatctcctaacaaagaaaagttcaggaccagatgactgaactgatgaatactaccaaactttaaagtattaattccaaactttctcaaactctttcaaaaaactgaagaggaaagaatacttccaaactgatttttatgaggccagcattaccctgataccaaagccagagaaagacawcacaaaaaaagaaaattgcaggccactatccttaataaatataaatgcaaaagtcctgaacaaaataccagcaaaccaaatccaacagcacattaaaaagatcataggcc

SEQ ID NO: 566022 - DNA, 437 bp, Homo sapiens
aggagcaactactggagacattttcagaaatcaggagaatgagaaatctgagtgggagagcatggcctgaaggaaatagtctcttgatctgacaagtccacaagactactcaggaatggcttagtgactcaccttttcacaaaagttgtggaaggcacctgataagtatacaaagtttggttcttatagtcacatactaaaatacaaagatggagattcactcatgtaattcctaatcaggaaagacagaatcgggaatatcaagttctcaaaatttaatagggaaaaaatatgtattacwtattaaatatagcaagtgatagtcccaaggcaacggaagagggtgtagtgtgttgagttagatagttattaattccttaagaaagaacacagagttctcataaacaatttcccactgcctccaaatgtagtcacgt

SEQ ID NO: 566023 - DNA, 437 bp, Homo sapiens
aggagcaactactggagacattttcagaaatcaggagaatgagaaatctgagtgggagagcatggcctgaaggaaatagtctcttgatctgacaagtccacaagactactcaggaatggcttagtgactcaccttttcacaaaagttgtggaaggcacctgataagtatacaaagtttggttcttatagtcacatactaaaatacaaagatggagattcactcatgtaattcctaatcaggaaagacagaatcgggaatatcaagttctcaaaatttaatagggaaaaaatatgtattacttattaaatatagcaagtgatagtcccaaggcaacggaagagggtgtagtgtgttgagttagatagttattmattccttaagaaagaacacagagttctcataaacaatttcccactgcctccaaatgtagtcacgt

SEQ ID NO: 566024 - DNA, 615 bp, Homo sapiens
gcaattcaactgagttaaccactctaattcaatcaaagctgctgttggctgagagcttcaattatwggcaaacattgaccatcattcaatcatttggttctttccttgggttcaactcctacattgtgaaagaggaaattaaaggaaattatttacttccatagctagtgcacatcatggcaattttatgaagaaatagtctcccaaatgcagcaacttcctcaatattttgagtgattgcactctgctgtgaaattattcacttctcctagtctgctcactctccacacaaacactacacacatgctgatgtagtcaaccaagtaaggccagggtagacatttttcctagagatgaaattatattaaatcaatataagccttaaggcccatattgagaatttgtttctggtttagtttctcttttttgatgtggtttcaagttagaatgaaacactagactaggaccaaggagtgatataggatgtcaagagagaacagagcctcgtacatacttaggagagactgaactttccaccctatgactgaacactctccatcagctttaccttagacacccactgagatccagtacaggtctgcgatagattcagga

SEQ ID NO: 566025 - DNA, 429 bp, Homo sapiens
taatctaggctctgagattatgtcattcccaggggatccttcaattgctagctttcctccactctgtcagatttgctgttagacatttcttcttacggattttcaaatgttttaatgttatctccctctccctgttcaaacacacaacatacaccttaaaagaagaaaaagagagcacattaaaagttaatggatgaaatgctgctatagattctatagttaaacagacctgagttcagctcctgactctaccaccaagctatttgaccttgggcaagttattcaacctctcagagcctaaaatgcctcgtggaaaaacaaasaaacaaacaaaaaaaaaaaaaaaccatcttttgaggagaaaattaggcaaaaaacacaacatggtaatggtaaacactaacacagtagctattattatgatttgct

SEQ ID NO: 566026 - DNA, 287 bp, Homo sapiens
aacttattttttattatcaaaaagtcactactattaccaaatatcactgttcaatgactataatgttacatagaatttcaacctgacagaatccaaagacttgaaaattttaaccaaacatatggcatgggtggagcgttgtccaattacgagagaaatattctattatctaagatttttgtcctaacagcaaaaattactaccttgtgtataccttctttatactcttcatccctgcagaattagttttctcctacttcttcraaacacttatctatagacccaca

SEQ ID NO: 566027 - DNA, 608 bp, Homo sapiens
tggactcttcccagcaggtctctcacacagagggtacagagctgaggcagctctttctgaaatctcttttatttaaggtttctttcattgactcaggacaaacttaatgggtaaaactttgctgttgcaagtttccttaaaatatccccttctgggcctaccaccgtttatcttggcagcaggtagcttggagaattttggaaagtctcagcttggcatagcctcagagctactggcacattaaagattaataaagcacatttaactgagctcaggacgctgcaatgtgatccttcaccgtgaaatgtgcaagattctttgtttgcaatgaacaaaattggagccagaaarggcctaccgtgacaagctaagatagggaacaatcaggaactttgtatgtctttcattgatcaattgatggttaggaatcaatgcccctgctcagccatactccaacttagcattcttaggaatttaagataggtgtctgagtatgatccaagagctgggtatttactgaacttgcagcaccacagaaatcatgcaactgcacctgcctccttaaaatattagaaaaggatgattcagagcgaattcccaagttagca

SEQ ID NO: 566028 - DNA, 609 bp, Homo sapiens
gcaccacattgggcaaccagcccaacacacagagtttcaagaggcaaggagagaaaactgacaccctgacaaacatgcttccctcttttgtgtcctgtaaggtggtgctcaaagtgtcatctttgattctgacggggactaaagatagcctctttttatgactttctctactgcccccgaacgaatgccttgctgggctgctggatctgggttccgcaaagtttgttttttgtctcactgccctgaagttcgccgcacaatcgcrtggtttgcctctccaccagctgcactttaaatgtattttaattggctggaatgtcgaaagaatccatttggcagtcgtttacatgtgaagcacgcccagggcagctgaaagaggccccagaagcagccgattacttcatcaaaagctgcagtttgaataccattgactcctacataactacagtgaactcaattctataggcaagaaggagtaattaataatttgctgagaaaattcttcattcatctaaatgtcaaaaaagcaaaggaaaaaaaatccctgcagacacaacagttcttctgaaaggcttgatttatagccgccagttctactcttcacaaaca

SEQ ID NO: 566029 - DNA, 607 bp, Homo sapiens
aataaaacaatatgtccaggttgcatacttgcttttgtcacacatgttcctactttcaactgcccaagtgattccccattctgacttgcctagtgactctgaggtattttcctggctccagtctacttttatacttccagaggtatttcaagtgcccaagttctaattccttgtcttacccttataagccactttcacrcacagtactgagcatgctgcaccaagaggaaatctattgttacacaggacacatggcttagccatcattgatcaaggacacctaagaattcttagatcccaggacaaaaactcctctctgccacttacagacctttagtatgcatcctggtaatcttgttacacaggagaggcaggtgtgagcagctcacaatatccaggaaatagcaaagtgatcccgttttttgttgttgttgttgttgttttgttttgttttgtttttgagatggagtttcactcttgtcacccaggctggagtgcaatggcacaatctcggctcactgcaacctccgcctcccgggtttaaccaattctcctgcctcagcctcccgggattacagtcccctgcctcagctgggattatggtgct

SEQ ID NO: 566030 - DNA, 638 bp, Homo sapiens
cattatgatttcagagcccaagctcttaacctgacatttagctgcctttctggaagccaggtatgttgwtacatttgattagcatgattcctaaaacacctagttcccagaatcagtatatcatgctctctgagctcctgggacatggccatgatagttccaacttatctagcatgtattgagcatctacggaagaggccaaacttttctgcttgctggtgattttgcccaaagatgacaagggtagtctcaggggtaaagtaaattgatcactaagtttcagagaaagatgagccctaaagaattgagctaatgacttcatctctactgaggagcttcccatggctaggaagagaggctgaaggctgatgggaaaattttaggttgatgttcaaaattctgggacctaaggtatgctttcctgatacaagccctagatgctataatttagaatcacacaagaagccctgggcaaatagaagatcacatatgaggaaggaagagagggaaagaaggaagggaggaaaaaagggaagaaaaggaggagacaaggtaaaaagcatttgactaacacctgccatgtggcaggtattattttagacactacttgtattgccttttttaatcctcacaaaatg

SEQ ID NO: 566031 - DNA, 638 bp, Homo sapiens
cattatgatttcagagcccaagctcttaacctgacatttagctgcctttctggaagccaggtatgttgttacatttgattagcatgattcctaaaacacctagttcccagaatcagtatatcatgctctctgagctcctgggacatggccatgatagttccaacttatctagcatgtattgagcatctacggaagaggccaaacttttctgcttgctggtgattttgcccaaagatgacaagggtagtctcaggggtaaagtaaattgatcactaagtttcagagaaagatgagccctaaagaaytgagctaatgacttcatctctactgaggagcttcccatggctaggaagagaggctgaaggctgatgggaaaattttaggttgatgttcaaaattctgggacctaaggtatgctttcctgatacaagccctagatgctataatttagaatcacacaagaagccctgggcaaatagaagatcacatatgaggaaggaagagagggaaagaaggaagggaggaaaaaagggaagaaaaggaggagacaaggtaaaaagcatttgactaacacctgccatgtggcaggtattattttagacactacttgtattgccttttttaatcctcacaaaatg

SEQ ID NO: 566032 - DNA, 571 bp, Homo sapiens
cactaagtttcagagaaagatgagccctaaagaattgagctaatgacttcatctctactgaggagcttcccatggctaggaagagaggctgaaggctgatgggaaaattttaggttgatgttcaaaattctgggacctaaggtatgctttcctgatacaagccctagatgctataatttagaatcacacaagaagccctgggcaaatagaagatcacatatgaggaaggaagagagggaaagaaggaagggaggaaaaaagggaagaaaaggaggagacaaggtaaaaagcatttgactaacacctgccatgtggcaggtattattttagacactacttgtattgccttttttaatcctcacaaaatgctatgcagtcaattttatttatcctcattttaccaatgtataaactgaggctcagatgagtcaaaacttttgctcacattgtcacagccagaaattgacaaggccaagatttaaactctgctctatctatgttttccttaaacctccctgccaamccttatttttccttaaaccttcttgccaactctgaattaaacaacaca

SEQ ID NO: 566033 - DNA, 599 bp, Homo sapiens
ttcctttcccttccttatcatccctggataaaagctactaacacaaagacaactggatcattcttactcacagacttctcaagtactctggctttgaatacattataaccagacattgaggctcctactaacattatctttagaagcataaacaaaattggttgctaagagaagccctatgtaatggtaaatagcatcatttagttgttctctagggtttctgaataacatgtagctgaatttcaattgcacctgaaaccagaaaacaaccagcttaccagccaatatgttcctcggacttacccagtgtaataaacctttaaactgacataataacaagggtatacataattatttaatagttttaataatcatttcaaagagaactcttaccctatgcttttaaagcagcaaaaacagtaatagtttcatacgtatggtcacacttgaaaagttaatctttcaaagtcaccacatgtaaagggcatttttcttatgctccccattggccatttttcaatgtcttccctcrtttttacttttgtcccttttcattaaattatggaaaaggcatttaagaaaagcagactaggacactt

SEQ ID NO: 566034 - DNA, 633 bp, Homo sapiens
tttaggaaatggcagtttcaggtccagcaaagacatctggaagaaataaataaataaatagtttcttatttatctgttttaactcagaaaatggcttgaacaatgtatgagaagaaggaaaaaattataatagcaatcgagtacaggagtctggcaagatgtgtgcaaaatgatgatatatgggaacaaaaaactttcaaagaggaaatcaataaatgaccaaaagggaagccatttacttcaaagccaaagatcaaaatagtgagaaagtaattagaggatattcttctagggctgagtccctttattcttcacctttagaagaatactgacccaaatgcacatatgttagaagctttttatttaacattgatagaacatcttggaaatgaacaatggggagatawcaaaggcttttgtcccaaatgtcgtagagttcctggtttggggaacctgtatagaaattacatccacttaggaaaaagcaagatggaaatagtaaaggccttgtgctctgaagtgccagatgagattgtggggttcactttaacctacagactcaattctaactctatgtctcatgtcaggctgtacatactcagtcctccagctaccctttgttgccttgttttc

SEQ ID NO: 566035 - DNA, 560 bp, Homo sapiens
gctgggattttctcatgaatacatttcctctgtccatttacaattgattataagctctttaaggtaaagggtgtaatcgtgtacctctttgaattccagatttctgtatcttgcacagggaaagtgagcagcagctctccactgagtgtattggtgccctttctgacattaggagtcaggttaaaatctgttccaacaaaaagaaaaaagcaggtccttgaggattgtttgtctcgatcagtctccaatgagactatgccaaggatgagaccaggaaagatgcaatcacagtggaccatcagtggcccaggagagggtcggtttcttcataggatagaacagctaacctgaagtcagtatgctgagtcccaccgtctgatgttgagcaagtgtttttaaacttttttgtgtctcggtttccccatttgtaaaatrgggattgtaatagtaatcaaagtcaacagttacggagtggtacttaagcctttagcaaataacaattcattcagtccttaataacaacactatgaggtaggatctagtattactattcaaatttt

SEQ ID NO: 566036 - DNA, 608 bp, Homo sapiens
tcttgcacagggaaagtgagcagcagctctccactgagtgtattggtgccctttctgacattaggagtcaggttaaaatctgttccaacaaaaagaaaaaagcaggtccttgaggattgtttgtctcgatcagtctccaatgagactatgccaaggatgagaccaggaaagatgcaatcacagtggaccatcagtggcccaggagagggtcggtttcttcataggatagaacagctaacctgaagtcagtatgctgagtcccaccgtctgatgttgagcaagtgtttttaaacttttttgtgtctcggtttccccatttgtaaaatggggattgtaatagtaatcaaagtcaacagttacggagtggtacttaagcctttagcaaataacaattcattcagtccttaataacaacactatgaggtaggatctagtattactattcaaattttacagatraggaacctgaggtacagagaggatacatttcttacacaagttgttgggaggacaaaatgagatgactgtgtgaagcaatcagcacagagcttgactcctagtgtgagcacattgagtttggggccattattatcatgatgatgatgatg

SEQ ID NO: 566037 - DNA, 602 bp, Homo sapiens
gaacccttaaaacctgatttctctctgccatggttcctttgaaagcacatgttgagatagtgcctccatcagcctggcttcctaggtagctatcattagcggagctgctctgctgaactacattgaacttacatgtgaatgagaaggtgttgaggtttgctactgcagcatagcttctcctatccaaaccgatgcaaagagtttgcctgtgtgtgtgtggacaagaatgtgtgtctgtatgagggtagggrggataaagatgaatttgggtattagggatacaacagtgaataaaacagacaaatttccttgaccttacactgtacgatagaaaagcaataaccctgcgacttttcctgtcatgtgacttagaaatttcattatcagttttatttatagtgggatttatctaaaaaagcccaatgttggacaatgtcctcttcccctcagccaggcaggggtaaggaaaaggcactgtgttattctctgccttgagtctatctattctaaaacatgcccctggggataggggtcatccactctttccttagcaacatccagggctgctgccatttgctccaccccgaatccctctccaacta

SEQ ID NO: 566038 - DNA, 598 bp, Homo sapiens
  misc_feature 574, 575, 576, 577, 578, 579, 580, 581, 582, 583, 584, 585,586, 587, 588, 589, 590, 591, 592, 593, 594, 595, 596, 597,598: n = A,T,C or G
ctaaagaaaataaaaattcagtaagagttcaggaatgggaatctgtcagctgtaacaaatagctacataatttttcttctatggtgatctttaatgaagtgtccgttgaaaagaaggatttaggggatcaaattttcactgctattgaatagtgtgagtggcatgaagaatttaaagacactaggatgaggtggatacttctaatgggactggacagctstaagaaatagatgacaggttgaagtctctatattttagatctaggcatagacccatggactttctctgcttgtgataagtatctacaaaaatgtcaaagtcaaatgcaaagtttaaattctgtgggtttctgaataaggtctgtggaattgctagtgtcaccaggtgacttatgtgaaagtgacagcaatgatcaggaaataatgggaaattgaatgtaggtaagaatacggaggcctgggagtacctccaaaccatgtctacactaagccttgcttgacagccaaagacctgcagcctttcgtcttgcatcttcatcatcctacctcagggctgagcagttctctatctgtannnnnnnnnnnnnnnnnnnnnnnnn

SEQ ID NO: 566039 - DNA, 503 bp, Homo sapiens
tcattactatccatactttcaggtatccactatgagtcttagaatgtagcccctttagataagggatgactactgtataggcattttaatgstataagttttcctcaaatactgctttagctgcataccacacattttaatatgtcacattttcattgttactatttttgctttagatggtcagttatctcctcgtacatctatttatttttaaaaaataaattttattttacttatattttacttctaggttctttatttgtgtgaatctaggttcacacttagtgtcagaatcttttgaggcttttttatagagtagctgtgctggcaataactttcctctgcttttgttgttttaagaaaatctttgtttctccttatttttgaaagatgttttcactgggaacagaattttttctggcagtggtatttttgttggtttgtttgctgctttaaaatgccatttcattgtcctcttatttattatagttctagtgataagc

SEQ ID NO: 566040 - DNA, 503 bp, Homo sapiens
tcattactatccatactttcaggtatccactatgagtcttagaatgtagcccctttagataagggatgactactgtataggcattttaatgctataagttttcctcaaatactgctttagctgcataccacacattttaatatgtcayattttcattgttactatttttgctttagatggtcagttatctcctcgtacatctatttatttttaaaaaataaattttattttacttatattttacttctaggttctttatttgtgtgaatctaggttcacacttagtgtcagaatcttttgaggcttttttatagagtagctgtgctggcaataactttcctctgcttttgttgttttaagaaaatctttgtttctccttatttttgaaagatgttttcactgggaacagaattttttctggcagtggtatttttgttggtttgtttgctgctttaaaatgccatttcattgtcctcttatttattatagttctagtgataagc

SEQ ID NO: 566041 - DNA, 533 bp, Homo sapiens
cgaatcccaccaacacaattaggaatgaaaatactgagataccaagttacagaagaatacatactatataatattgcttgtataaggtttaaaaatatagaaaacaatgtgacataatgattagccatgcatatatatttagtcccactataaataatgtaaggacatgataatgatcaaatccaaatttaaggtagtgattgtaccattggatatttgaagaagtgagatgtgactggggatggatacacaggaacatcaattttactagtaatgttttatgtattaagctaaatggtggtgcatgggcctttactatattattctatacactttttgtcctagtaagtgttttaaatgaatggatatgaaaaagcagagtcagcacaagtcaatcttgttaaacaggaaattcwcatgagtagggaaggtttctcttaggttagagaggtataggaccctttgaaggttacccaagtgggattcaaaagaagggagacaatctccacagtgatctggagtcattctagagg

SEQ ID NO: 566042 - DNA, 561 bp, Homo sapiens
ctgttgtgtaactggaacatctattatcctattatagcaaagtgcctctctccattgaatgatcaatatatctaccctggtgtcttagtttatttcatgttcctatagaaggataccttaggctgggtagtttattgagaaaagaggtttatttggctcatgattttagtggctggatagtacaagattgggcagctgtgtctagtgagggcctcttgctgcttcaattcatggcagaaaagggaaaggaaatagctgtgtgcaaagagatcacgtggcaagagaggaygcaagagagagaaactgagaaagccagattcttttaaacaactttctcttgagcgaatgaatctattcccacaagagctgaaactcaccccctgcaggatggcattaatctactcatacaggatcacctccatgacacaaacaccccccagtaggcaccacctcccaatactgcacactggagatcaaatttcaacctgagtttttgcagagacaagtaacatccaaaccatagcacctggtttaacctttattagtagatcagcccaagtc

SEQ ID NO: 566043 - DNA, 609 bp, Homo sapiens
tagaccttaatctacagatctcctccaatgtcacgtgagaagattaggcttttctatccaggagytacaccttttgcaaaaaactcacagaataacatcacatctctttaaggacaagcaatgatttgaaggtacatggccatttaaatccaggataatagaagaaacattctctaaagaaagcaatctttggaggtatagttttaaaatgcagctgttttacatttattaaacagaacatcccagtcagaaccttccacatgtagattgcttcaatgcatttacgtatttgctcttgctttacactgcataagttaaagagaccaccagagaaactggggaaggtcttcccagagaagaagtgagacactgtgtgcaaattttaaaacagtggtttttaaaataagtcttcaggtcaatctccatttgtgatataacccatatacacatttgtataattgagaatcatactttacgtatgtttctattatgtgctttttagatttgattttccattgtgaacatttttgatagcatcaaaatattttgagaacatgatttttcatgattttatgatcttcaaatctatagttgttaatctaattaacc

SEQ ID NO: 566044 - DNA, 589 bp, Homo sapiens
tttgtcaatcaactatggtgctctctcaccaaacccagaacggccgcttggcctttctaaacacattacttcaggcagcagtgctggccaactggggtgggcatgagagaggaaagtctgctatttctagcctagggcagatgtgctccctcaactgcagggtaccttgaaaagagagtgtctcggaagagtcaagaatgccagcaggaaatgtttggctttgtgaggacatgcagcatcctgaagtcaggctggctcacgctgaaaagtgaatatgagacagcacacagatagggaggtatgaaggtagccttcatgaagcggttaacaaatgccaaacagtttgcatctaataagcccagtgcrtctacatcccaacgcttagagatggacagtatcggcttcattttatagatgaatgaactgaagctcagaaattttatgtcattgctcaaggggcatagggctgagggggatttgaacccaagttagctggattagaaaactcatgtactttcaatgatactaaatagcaggcatctaaaagataaatagagcatgattgatggggctcatggatagatccatc

SEQ ID NO: 566045 - DNA, 476 bp, Homo sapiens
ttatattttataccttcaacaatgttagcataattttaaaaggcaatagtagagtagtgccttcaaaagggtttgcatggagtccccttaaagtaaaattaaaatgtggctttatggtgcaatggtttrttcgttttggcagtcaatggaaattattcctttaatggaatgaaatgcaaatattaagcaacaagcttgaaatgatgagggtatttatgttttggtctcttaataactgtgtttttctgaggttataggagttaaatgcagtttgcttgttgatggagttgcatgcattgtcagcaaatgtgggcagctaagatattgttagttttgtacatttaggaagtgtttaatgagtgctggtgaaagatgatggaagtcttataatttattctaagtgatttaattgaggaggctaagcatctcaatttgtttaattcagatatactgtatacaaccctatgagtcttttc

SEQ ID NO: 566046 - DNA, 596 bp, Homo sapiens
caaataaattttataatttatagtatctattattcacaggagaacttcttcaaagagtctctcttcctcagtctctttcaactcccaccacttccaaatcttaatccagtgttgtctcagcttgtttgattttggcaaatatgcagacctaattgattcttgagtgagagtcaatttctctaacagagcagggatgggtgactggttaaagtttgtgagctggacgcatactagactgaagataaagaaatrcaatgttattccatccaagtggagacactctacctgggtccagtggggagctcccatgtctgacagtagactgggaagggagcaacaaactcacctccactatctagagcatggtgtaaatcttttaattacttgataagccattttctaaaaaaggcaacctggaaacgactctttggcatttgctcttgagtcagttattacaaattaaaaagagttggaggtaatgaaggctttttatgtggtacacatactgatgtaataaattgtaagagccattagaaagattgtagattttggtatatttcaggctcactttcggagatttttttaaaaggattaat

SEQ ID NO: 566047 - DNA, 510 bp, Homo sapiens
gctctttgacagtggccctcaaataaagatctacagccccccacagagatgcacagacacttggggatctgcaaaactgagctattcttataataataagatgttacttataataataagatgttatattattcttataataataagatgttaccattcatgatgttaccaaatcataaatggtaaaagatctattcaaagtgtgaggtggatttatggatttaatgtgacatatgaaaagttattgatacaatttgaaatttctcattccaaccaacatttaagaaattaccacttytaagctttggtgtagtatcaaagaatatccacaattatctggaaaggagcatctaaaatactcttccctataccaactacatagctagtacggatggattttttcatgcacttcagcaaaaacaacagatggaatgcagaaggagagatgagaatccacttggcttctgttgaaccagatattcaagatattttattgctttaaatgaattc

SEQ ID NO: 566048 - DNA, 475 bp, Homo sapiens
ttctgtggcagccagtgctgccattaatccaatatcctttgctcctaatcttggagccttttcgatatcttaatatcttctgaggaagagacatttttattttaatggaattcagtatgtcattattttttctcttatggttaatgctttttgttgcctaagcagtattttccctgcccaaaagtcctgaagattttctcctacttttttttctaaaaaatttaatttttttctttttaatttaagactcttatccaattcragataacttttgtgctgattgttttcccatctgaataaccagtttttgtaaagccgtttgttgaaaaaatgattcattcccccactaaattatcttggcacctttgttgaaaatctacatctctatgttggtttatttctggacactcattctgttccactgatctacatgtgtattcttacagcagtaccacgctgtcttgcttacatagct

SEQ ID NO: 566049 - DNA, 575 bp, Homo sapiens
actttattgacccatgggtggctgtcagcggaaagggaggctggaaaggggatgggaaggtctttctctgatgcctaatcgggctcctcttggaagccgcatcgtctgaagttagccgcgtctatccttagtgtcgactgttaagttgcttccctagcttgcggctcagccgctcgatcctcgacactcagccgcttgtgttgctctgccagctgaagtctttcatgggcaaaggttaggggtggggcaagccaaaaaggcaacatttgggtactgttttcacttagggccgcggttccaggcttaagggtggagtttagccaggagcccagcccttctgtatcaatacaatggaatcatcaataaaactcctcaataaaggaaaccctcctgatacagcaacgcgawtttgaaaacactgttctaagtgaaagaagccagatatgaaagacttcattcttacgattccatccatatgaaattctggaaaaggcaaaactatagttggtagagaaagtaagacagcggttgccagagcctgagggggtggagaagggaatcactacaaagggaag

SEQ ID NO: 566050 - DNA, 575 bp, Homo sapiens
actttattgacccatgggtggctgtcagcggaaagggaggctggaaaggggatgggaaggtctttctctgatgcctaatcgggctcctcttggaagccgcatcgtctgaagttagccgcgtctatccttagtgtcgactgttaagttgcttccctagcttgcggctcagccgctcgatcctcgacactcagccgcttgtgttgctctgccagctgaagtctttcatgggcaaaggttaggggtggggcaagccaaaaaggcaacatttgggtactgttttcacttagggccgcggttccaggcttaagggtggagtttagccaggagcccagcccttctgtatcaatacaatggaatcatcaataaaactcctcaataaaggaaaccctcctgatacagcaacgcgaatttgaaaacactgttctaagtgaaagaagccagatatgaaagacttcattcttacgattccatccatatgaaattctggaaaaggcaaaactatagttggtagagaaagtaagacagcrgttgccagagcctgagggggtggagaagggaatcactacaaagggaag

SEQ ID NO: 566051 - DNA, 574 bp, Homo sapiens
  misc_feature 137: n = A,T,C or G
cctgttggagggatcatccagccttgagcagtttcagtgctggtgaacttgcttctgctcagagaaattcaccctgtctttggacagttctggccggcagaaagctcttcctcatatgggaccagaaatctcacttnctgcacacctgtccactgacctcacttctccacctggggccattcatggctagtgtgatgcctctacagtgtggtaactctccaaggatttgaaggagatggtcctacccccyaagctgcctcctccttggtgcatcagccaaggtcatggtaggacctcttaccctttctgtcactgagtgattttctgagcagttttgttccatctcatttaaaatgcaaggtttccaatgtggactgtccagcattcaagatgttctgcttctgttgatggcagtggacacaagaacctcttagctcacagagacctcccccttaaccctaccttggggtcatttcaggtgcttctcccaaattacctctcctggttcctacacaacactctaaagttcagggaactctaaaatgttggccatgtgacctatttcttgcaaacc

SEQ ID NO: 566052 - DNA, 574 bp, Homo sapiens
  misc_feature 137: n = A,T,C or G
cctgttggagggatcatccagccttgagcagtttcagtgctggtgaacttgcttctgctcagagaaattcaccctgtctttggacagttctggccggcagaaagctcttcctcatatgggaccagaaatctcacttnctgcacacctgtccactgacctcacttctccacctggggccattcatggctagtgtgatgcctctacagtgtggtaactctccaaggatttgaaggagatggtcctaccccctaagctgcctcctccttggtgcatcagccaaggtcatggtaggacctcttaccctttctgtcactgagtgattttctgagcagttttgttccatctcatttaaaatgcaaggtttccaatgtggactgtccagcattcaagatgttctgcttctgttgatggcagtggacacaagaacctcttagctcacagagacctcccccttaaccctaccttggggtcatttcaggtgcttctcccaaattacctctcctggttcctacrcaacactctaaagttcagggaactctaaaatgttggccatgtgacctatttcttgcaaacc

SEQ ID NO: 566053 - DNA, 389 bp, Homo sapiens
ttcctcttgacagcccttcagatgtttgaagacgagcagtcagtccagtccttggactctgctcttctaggcttgacgtccccagcatgggttccccgggactcagtcttctctttaaaaagatggcggtagggatagcaatgcctgttcacacgccgtctttctgtctttaatctgtggctcttggtcagtatattacagtaggggtttttgtcctctgttgaagaatcagctttatataaaatgtctggtttacaaaatgctggtcagtaattctgatccacagaagaatacagtgctgcttgttaaaaatgggcccttaggggagcaggtgatatgatttgaaaagctcayggccaagggtctctggccaagcttcaatgaactac

SEQ ID NO: 566054 - DNA, 406 bp, Homo sapiens
agatccttcctttgtgtagtcaggatccattcgacacgtattaaagctcacttactctgacagactctataatatgctctgaaagttttatagtgagcagaaacaggtgtgagcttttcctggggttcacagtctagcagagtttgctgaagtgcagagcaagggagattgaaaacaggaatattaagaggtagggagggggccaggtctcataaacacatcaaggkttttcatctttatcctaagaataactggaaactttcactctggatatattacaagaactggaatggaaatccctttaaataaggggtctcatgaacttgaatgggaaaaaaaatgaacctttttgtttctactaacccctaactcaaatttagccttttcttcaatgataaatgtagac

SEQ ID NO: 566055 - DNA, 547 bp, Homo sapiens
acagagaaatgcaagagggaataagaactgctctcaacacacttcagatctttaatatagtggatgacttcctagaaagacagaacttagcaaaaccaactcaaggagaaacacaaaatcagaatcatcctttacctgtaagagaaatacaaccaacagtcaaaattttttccataragaaaccaagtcgaaatggctcaatctgaatgctactaaacattcaggaaacaacaatttcattctcaccattcttacacagacaatagaaaacaaaacactctcaattcattttatgaggccaatataaccttgataccaaaactgcaagaacacaaccagacagacaactacaggccaattcaatctcactttatgaacatggatgcaaaaattctgaacaaatattaccaaaccagatccagcaatgaaaaataaaagatgatacatcatgatcaagttgggtttattccagcaatttgactattagaattgttattaataaaattcaccttagtaacagatttaaaaagaaaacttagtaaagaaa

SEQ ID NO: 566056 - DNA, 542 bp, Homo sapiens
tttcattcactcaggttgtttacaatgcaaagaatattcttaaatatgtcttaaattcatggaacaaggttttattttttagataactgtggctctgaaatcaaccaaatttcaggtttttttctgttgcccttcatttcctggatggtaacattaaacaggtccagctgtagctcagaaccagaagggttttctgtcaaatgattggaatcctccacgttctgtaaccacagattattttcaactagcttttcttgctgatcgtgtgccttgcatttcatgtagactgtgttctaacaaactgaagacctctcactcagtcctgtggtctgcctgggtggtggtgaggaatctcacggtgataacagagaggtgcctctcagacgcaacttcaaaacatcaagggaacgaraaatgtcaccagcttaatttgcacccaaatgaattctaagacttttctttttaacaaaatgctttatttctatttttaaatgagaggcattcccatgaaatatcaaaaggcatttacatgtgttgtttta

SEQ ID NO: 566057 - DNA, 614 bp, Homo sapiens
cctattctcctgcctcaggatgaggaattagatcagatattgacagtgatcagatattgaggtggggaattcttgcttaaatgacttagtagacttctcactaaaattgagctgtgtaggcawgaagtgaaggcccaacaatgagggttaaatgaggcacagaggagctgactaaagtttggtgaaggagagaatctttgtcaccttcttctttctcaatcaagttcatcactgccaacaaagtcatagggagttttctccccaactccagcccccaaaaggaatatgtattctggcaacaaagctgctgatttttgcaaccatcacaacaatggtcaaactaccacttttgctaacaaagctatggacaagggggtagggaagcagccccaggcaacaaggccacagactcttacacaagctctagcacttttattaagaatgtgtcttcaggcctggtggagtggctcattcctgtaatcccagcactttgggagggcaaggtgggtggatcatctgaagtcaggattttgagaccagcctggccaacatgggtgaaaccccatttctattaaaatacagaaaattagctgggcataggcatgtgcctgtaa

SEQ ID NO: 566058 - DNA, 486 bp, Homo sapiens
gggtggatcatctgaagtcaggattttgagaccagcctggccaacatgggtgaaaccccatttctattaaaatacagaaaattagctgggcataggcatgtgcctgtaatccyaactactcaggaggctgaggcgggagaattgcttgaacccgggaggcagaggttgcagtgagccgaggctgtgccattgccctctagcctgggggacagagtgagactctgtctaaaacaaacaaacaaacaaaaaagaatgagtctttactcgttgtccatctttgtttgacttttagtaccctaagggtgttatttcagacaatcctgtgcagtattatatgcattcttacagacaaggattgctgacctcttcacgctgccatgattggaagaccctctaaaggctcttggtcagagtcttttacatatcaaagcatgttgtgaataaccaactgggcaacacagaattcagtgttttgaaaccgctgtg

SEQ ID NO: 566059 - DNA, 486 bp, Homo sapiens
gggtggatcatctgaagtcaggattttgagaccagcctggccaacatgggtgaaaccccatttctattaaaatacagaaaattagctgggcataggcatgtgcctgtaatcctaactactcaggaggctgaggcrggagaattgcttgaacccgggaggcagaggttgcagtgagccgaggctgtgccattgccctctagcctgggggacagagtgagactctgtctaaaacaaacaaacaaacaaaaaagaatgagtctttactcgttgtccatctttgtttgacttttagtaccctaagggtgttatttcagacaatcctgtgcagtattatatgcattcttacagacaaggattgctgacctcttcacgctgccatgattggaagaccctctaaaggctcttggtcagagtcttttacatatcaaagcatgttgtgaataaccaactgggcaacacagaattcagtgttttgaaaccgctgtg

SEQ ID NO: 566060 - DNA, 486 bp, Homo sapiens
gggtggatcatctgaagtcaggattttgagaccagcctggccaacatgggtgaaaccccatttctattaaaatacagaaaattagctgggcataggcatgtgcctgtaatcctaactactcaggaggctgaggcgggagaattgcttgaacccrggaggcagaggttgcagtgagccgaggctgtgccattgccctctagcctgggggacagagtgagactctgtctaaaacaaacaaacaaacaaaaaagaatgagtctttactcgttgtccatctttgtttgacttttagtaccctaagggtgttatttcagacaatcctgtgcagtattatatgcattcttacagacaaggattgctgacctcttcacgctgccatgattggaagaccctctaaaggctcttggtcagagtcttttacatatcaaagcatgttgtgaataaccaactgggcaacacagaattcagtgttttgaaaccgctgtg

SEQ ID NO: 566061 - DNA, 486 bp, Homo sapiens
gggtggatcatctgaagtcaggattttgagaccagcctggccaacatgggtgaaaccccatttctattaaaatacagaaaattagctgggcataggcatgtgcctgtaatcctaactactcaggaggctgaggcgggagaattgcttgaacccgggaggcagaggttgcagtgagccgaggctgtgccattgccctctagcctgggggacagagtgagactctgtctaaaacaaacaaacaaacaaaaaagaatgagtctttactcrttgtccatctttgtttgacttttagtaccctaagggtgttatttcagacaatcctgtgcagtattatatgcattcttacagacaaggattgctgacctcttcacgctgccatgattggaagaccctctaaaggctcttggtcagagtcttttacatatcaaagcatgttgtgaataaccaactgggcaacacagaattcagtgttttgaaaccgctgtg

SEQ ID NO: 566062 - DNA, 594 bp, Homo sapiens
aaattgtccacgagcctaatttttcatggtcatgtgacaaggaccccatctttagctgaactaaggaaaagtcctacaacataagcaggaggaataagtggatcactttccagccatggcagtggggagcccgtgtgcagttcttcaatctcttgccttccctttggtgtgaagggtggtggcctcgtcatataaagatggcagagctctggctttgacaaaagtctgtattctgaagactcacatagtcaacagctgcctgtggaggataaagggctttgggggagcaagaaataagcttttagtgctaagccattgagatttggagttttgtgttaccacatcataaatctagcctattttgagttaggggtaatagaaagggcaacagtgaaattaccttctgaagtagctcaaaggattgaggaaagaaaatataattaacaggaaacctacagtctcaaaaatgaaagcttggcataagccagcgtcatttgatcccactctttccatggtgaggtaatagtcgcaatccacaggcctttcctgcagttgttaaggtctgaccttttaartggaaaacaataccttagg

SEQ ID NO: 566063 - DNA, 533 bp, Homo sapiens
tccctgtcctccatgagtgatctcttttccaatacatgatcacaattttaattgttttaattgttaaccttgaaaaggcttctgtactartcgacttccctttagagtataaacgccttaagagtctcctctgcaaaactatctacagattctcaaaagctagtgtaaagaagtagagaatcttgcctataagaaattatcctgttggctcttccagagctttttaccatccaaagctgcttgacacagttcaattagagaagaggaagtctcagtaccaaccacaggactatgagacacagaaggaggaggaaagagaagacccactaggcctggtttctgagagagccagtcataggacattacagtgaaagacttagggagtgagaaaccctggagcagcttcagggggcaggaaaactgcagaagaaaggaaatttataaaattgttgtcgtgcaaaataagttgggtcatttaaaatattttttttgaggaggcaagggaaggctgaagttacttttaatatatgcca

SEQ ID NO: 566064 - DNA, 345 bp, Homo sapiens
aaggcctccctcgggacttctgcctcctgccaccagaagctgcctacagagactgaagcccrccacgttctcgattaactgcagtcatggacggctccagagatcttctcccttttgtctctggcacaaaagcttgctcggtgtgaagacaacacatgagttatcacctctgccaacaatgcatgcattcttggggaggctaggggacactgggagccctggctgtggccaaggaggcactaaatcaagctgcttcttggaggctttcatggtttcctctaaacaaagcagctctcatctcacagcatgaaggagtttctgaacacagttgctaaaaaggcacca

SEQ ID NO: 566065 - DNA, 403 bp, Homo sapiens
atggactcaactgcaaattgcagataacagaataataaataaataaatttaaagattgatcaatattaactacaccgtctgaagaacagagagcaaaaatattgaagaagaataaacagagccttagatatctataggaaaacatcaagtatactaggagaaaagagagaggaagcagaaaaatatttggaaaaataattactaaaaacttcacaatttgacaataaacattataggttcaagatgctcaacaatccttagatagaaaaaacatagatagagatccccagctagacagatagtcatatagttgtaagcaaaagaaaatgagaaattgttgaaagcagcaaagaaaaggactcctcgcatatagyggaccattaataagattaacaatggtttt

SEQ ID NO: 566066 - DNA, 619 bp, Homo sapiens
taacccctgagctaacatgagcaagaaaagaaagaagacacaaattgaccaaatcaagagtgatagaggaaacatcactacagaccctattgtaattaaagggattagaagaggttagtatgaacaattgatgttaacatattagaccatttttatgaaatagaaaaaattcctagaaagacacaaatcttacaaaatctttttaaattattagatttcttctatgatttgaattagaaatttaaaatcttccacaaaaaaatcccaggtccagatggcttcactggtgaattctactaaacatttaaggaagaaataagaccaatcttacataaactctctcagaaaatagagaaggagggaatgtttcckggcacattttaagatgcctgtattatctcatactaaagccagataaagatatgacaagaaaagacaactacatattcagttcctcatggatatagatgcaaaattagttttaaaatttagtaaactgaatccagcagcatgttaaaaggattatatacagctgttaagtggattttatcccagaaatgcaagattggtttaacatttgaaaatcacttaatgtaatgcatcacattaattaaaaaaa

SEQ ID NO: 566067 - DNA, 324 bp, Homo sapiens
aagagcaaatcttcatgaccttgtgctaggcaaagycttcttagatgtgataccaaaaagatgagtgacaaaagaaaaactagagaatatggactttctcaaaatttaaaatttttgtgctccaatgaataccatcaagaaagtgaaaggacaacacacagaataggagaaaaaatagatatataacagaaaaaatcgataaaagaaaaataactaatttttttaaagggcaaagaatttgaatagacatttctccagaaaagatacacaaatggctgataaacacaagaaaagatgttgaacatcattgaccatcacagacct

SEQ ID NO: 566068 - DNA, 324 bp, Homo sapiens
aagagcaaatcttcatgaccttgtgctaggcaaagtcttcttagatgtgataccaaaaagatgagtgacaaaagaaaaactagagaatatggactttctcaaaatttaaaatttttgtgctccaatgaataccatcaagaaagtgaaaggacaacacacagaataggagaaaaaatagatatataacagaaaaaatmgataaaagaaaaataactaatttttttaaagggcaaagaatttgaatagacatttctccagaaaagatacacaaatggctgataaacacaagaaaagatgttgaacatcattgaccatcacagacct

SEQ ID NO: 566069 - DNA, 558 bp, Homo sapiens
atcccgcactctacttcgagaccatgccttgacagtgagatggtggcagcaatacctaaagtgtgcacctggtatagctgtgtaaagttttccctcaaaagacagtgcctgaaggaattcrcttctgctggagtcttacgatgtgtcaggcatcatgtgaggctctggggggctgtgacctcagagtccagctaggtgacagatctacacacaaacattaatacatgcatttaactggggttcctcacactgactgcccaacagcagagctggggatgccgcccaggctggttcacagactgtttgggatgaggccggcatctcctggtattgttacagctagctccccaggagattctaatataaggccaaggtggagaggcatgcaggagactctgaaagtgatgcggaggtggcaggaggagggtcacattcccctttgtttccactgcacatttgctccacacttccatagcttggcttgtgttctttgctctgccagctgagaccgtcttgtctactttccacctggcagagtgctactcatcctttagggac

SEQ ID NO: 566070 - DNA, 637 bp, Homo sapiens
ctttgtttccactgcacatttgctccacacttccatagcttggcttgtgttctttgctctgccagctgagaccgtcttgtctactttccacctggcagagtgctactcatcctttagggacaagctctgatgccacctcctggagaagcttctctggctcattgcccagggaaagccctttgccaactgcccccaactgtgaactccccagaaggactggtgtccgaaccccctttgccctgctggagcccagcacgatgygaggtgcgataccagcatgggatgagcatctgctgaatgacctgcggagcgccacggatcacgccactcactgaggcggagacggcaacagaggtgcttggggagatctcctaagcgcggcatcacaggaacaagagtgccctcgggggttttgtttgcttgtgtacctccctgtggtggaaagcaggcagctgggaagaagggactgccttgggaacaagcttgattataacaaccctggggtctcttcccgcctgacagaaaaaaagagcccctgccagcagctctgtgaacagcaccagccccctcagcaccagacactcagcctggctttcccagagctccccgctccagctctgagaaggaaaagctgaag

SEQ ID NO: 566071 - DNA, 637 bp, Homo sapiens
ctttgtttccactgcacatttgctccacacttccatagcttggcttgtgttctttgctctgccagctgagaccgtcttgtctactttccacctggcagagtgctactcatcctttagggacaagctctgatgccacctcctggagaagcttctctggctcattgcccagggaaagccctttgccaactgcccccaactgtgaactccccagaaggactggtgtccgaaccccctttgccctgctggagcccagcacgatgtgaggtgcgataccagcatgggatgagcatctgctgaatgacctgcggagcgccacggatcacgccactcactgaggcggagacggcaacagaggtgcttggggagatctcctaagcgyggcatcacaggaacaagagtgccctcgggggttttgtttgcttgtgtacctccctgtggtggaaagcaggcagctgggaagaagggactgccttgggaacaagcttgattataacaaccctggggtctcttcccgcctgacagaaaaaaagagcccctgccagcagctctgtgaacagcaccagccccctcagcaccagacactcagcctggctttcccagagctccccgctccagctctgagaaggaaaagctgaag

SEQ ID NO: 566072 - DNA, 589 bp, Homo sapiens
ttattaaatttggttgtctctttaatatggaattatggatattccttstaacttctggataaaagtacctttatagatatgtgatttcaaatattttcccattctgtcaatgccttttttcattttctttatagtgtctgctgaaatacagttttaattttaatattgattttgtaatttgtcttttctcttttccttgataatgaagtccaatttatgtttttttccactggtgtttttgcttttatatctaagaaattttagcctaatccaagatcataaatattttctcaaatattttcttctaggagtttttttttagttttaatttttatatttaattttatgatccattttagttaatttttgtgtataatggaaaacaaagatctgtcttcatggttttgcatgtaggcatctagttttattccagaaccatttgttaaaaagactactttatccccattgaattaacttggcagccttgttgaaaatcaattgaccataaaataatgggttaatttatgggcaataaaattctattttattgatttatatgtctatctttatgccagtaccacagagtctt

SEQ ID NO: 566073 - DNA, 589 bp, Homo sapiens
ttattaaatttggttgtctctttaatatggaattatggatattccttgtaacttctggataaaagtacctttatagatatgtgatttcaaatattttcccattcygtcaatgccttttttcattttctttatagtgtctgctgaaatacagttttaattttaatattgattttgtaatttgtcttttctcttttccttgataatgaagtccaatttatgtttttttccactggtgtttttgcttttatatctaagaaattttagcctaatccaagatcataaatattttctcaaatattttcttctaggagtttttttttagttttaatttttatatttaattttatgatccattttagttaatttttgtgtataatggaaaacaaagatctgtcttcatggttttgcatgtaggcatctagttttattccagaaccatttgttaaaaagactactttatccccattgaattaacttggcagccttgttgaaaatcaattgaccataaaataatgggttaatttatgggcaataaaattctattttattgatttatatgtctatctttatgccagtaccacagagtctt

SEQ ID NO: 566074 - DNA, 589 bp, Homo sapiens
ttattaaatttggttgtctctttaatatggaattatggatattccttgtaacttctggataaaagtacctttatagatatgtgatttcaaatattttcccattctgtcaatgccttttttcattttctttatagtgtctgctgaaatacagttttaattttaatattgattttgtaatttgtcttttctcttttccttgataatgaagtccaatttatgtttttttccactggtgtttttgcttttatatctaagaaattttagcctaatccaagatcataaatattttctcaaatattttcttctaggagtttttttttagttttaatttttatatttaattttatgatccattttagttaatttttgtgtataatggaaaacaaagatctgtcttcatggttttgcatgtaggcatctagttttattccagaaccatttgttaaaragactactttatccccattgaattaacttggcagccttgttgaaaatcaattgaccataaaataatgggttaatttatgggcaataaaattctattttattgatttatatgtctatctttatgccagtaccacagagtctt

SEQ ID NO: 566075 - DNA, 561 bp, Homo sapiens
aattacaaaacaatacaagtatcagtgtctctacaagagagggaaccagcacaaaaattctggcaccatgaaaaatctaactgtactgacactaccaaaggatcacactagatatccagcaatgacctctagccaaaatggaaactcagaaatgacaaataatttaaagcatggacagcaaggaagctcagcaagatccaagacaatgttgaaaatcaacacaaggaaacttctaaagtaacccagaaaatgaaagaagagataaacatcttaaaacaaaatcaaccaaagcttctaaaattgaaaaactcatgtaaggaatctcaaactacaattaaaagctttatcaatagrcaggaccaagcagaagaaataatttcaaagctttaagaccagacttttttttaacttttattttaagtccagaggcacaggtacacatttgtcacataggtaaacttctgttatgagggtttgttgtacagattattttatcacccaagtattaagcctagtactcattagtggttttgcttgatcctctccctcctttcaccctcc

SEQ ID NO: 566076 - DNA, 509 bp, Homo sapiens
tatagctaaccaaaaacatgaaagatctctacaaggaaaactacaaaacaaaatcagagataatacaaataaatggaaaaacattccatgctcatggactggaagaatcaatattgtaaaaatggccaaactgyccaaagcaattgatgaatttgacattattcctatcaaattactgacgtccttcttcacagaatcatgtcttcatgtgctatttttagctgtgacagttactttgatttttcttgtttatgattacctttggagttttggtaaatacaagttaggtactatgtagagggtatttctattaaaatttgtttgatgactttcttatggttaaacttgtttgtgttcttggaaggaagaccaaagatgtaaagaataacgtggttttttttggtaagtcacccatatcattggctaattaatgttattataattctctagtctatctattatgtgttcaactccatagtgtttctatgcacctttggacttaaatccag

SEQ ID NO: 566077 - DNA, 509 bp, Homo sapiens
tatagctaaccaaaaacatgaaagatctctacaaggaaaactacaaaacaaaatcagagataatacaaataaatggaaaaacattccatgctcatggactggaagaatcaatattgtaaaaatggccaaactgcccaaagcaattgatgaatttgacattattcctatcaaattactgacgtccttcttcacagaatcatgtcttcatgtgctatttttagctgtgacagttactttgatttttcttgtttatgattacctttggagttttggtaaatacaagttaggtactatgtagagggtatttctattaaaatttgtttgrtgactttcttatggttaaacttgtttgtgttcttggaaggaagaccaaagatgtaaagaataacgtggttttttttggtaagtcacccatatcattggctaattaatgttattataattctctagtctatctattatgtgttcaactccatagtgtttctatgcacctttggacttaaatccag

SEQ ID NO: 566078 - DNA, 543 bp, Homo sapiens
acttccctttctctaataaaaaaaaaagtaatgaatacaaaaaaaaaaagagaaagcaggtacatctgtagcttggagatattgcaagttcgtttccagatcaatgcaataaagctaatatcagaataaaatgaaaatgaattacactaactttttggtgtcttggtgcactaaaaggtaggtttagactatactgtagtttagtgttcaaaagcattgtgtctaaaaaaagtgcataacttaatttaaaaatacttcattgataaaaaaatgttaatcatctgattcttcagtaagtcatagtcttttggctgatggaagattttgccttgatattgatgcctgctaactgatcagggtggtggttactgaaggtgagggtggctgtggaaatttattatattaagacaaaaattaagtttgctgcattggttgaatcttctatgaacaaaawgatttatctgtagccagcatcattttacccacaatagaacttctttcaaatcactggggcctaactgagggtgaagggtgggaggaggg

SEQ ID NO: 566079 - DNA, 546 bp, Homo sapiens
ctctctcctgctctgccatggtaagatgtrcttgcttccctttcatcttctgccatgattgtaagtttcttgaggcctcctaacaatgcttcccgtacagccatgtggaactgtgagtcaattaaacctcttttctttataaattaccaagtcttaggtagttttttatagcagtgagaacagaccaacacatcttgatttccactacattataattttcataattctactattctctcattttcttacagctccaagaataatgaataacagcatacttatatatttatttctattcatgagcagagaggtaaacagaagtcaaaattatctattttttgttttttatttccaaaaatcagctttactcgtatacttactccagtgctatttattgacctttcctttatatagtcagatgcatagaactgatcctaatgatattttcctatggggttatttataaccttgatatgtatgcaaactctggcccactagtgaactctgccctttgtaattctgataaacagatttataatgcaaact

SEQ ID NO: 566080 - DNA, 573 bp, Homo sapiens
attattgctaatcaagataatattatatgtatatgtaatggtgacagattgctttacctctaagattagaaatacggtaaggatatccactatctccatatttatttaacaaaacactagaagttctaccagcacaataaagcaagaaacagaaataaagggcatgcagatgaaatgatttcctgtgagacaatcccaaggagtctataaaagaacatactagagctagtaaatgagttcagtgaatttaggatataagacaaacattaaaaaacaagtttttcaaacacttagcaagatcggtatagaagggacataccttaaggtaataaatgctatctatggcaaacccacagccaacattataytgaatggagaaaagttggaagcattccccctgaaaactggaacaagacaagaatgcccactttcatcacttctattcaacacagcactggaagtcttagccagagtaattagacaacagaaagaaataaagggcatccaaatcagtaaagaggaagtcaaactgtcgctgtctgccagtgatatgattgtatacctagaaaaccc

SEQ ID NO: 566081 - DNA, 573 bp, Homo sapiens
attattgctaatcaagataatattatatgtatatgtaatggtgacagattgctttacctctaagattagaaatacggtaaggatatccactatctccatatttatttaacaaaacactagaagttctaccagcacaataaagcaagaaacagaaataaagggcatgcagatgaaatgatttcctgtgagacaatcccaaggagtctataaaagaacatactagagctagtaaatgagttcagtgaatttaggatataagacaaacattaaaaaacaagtttttcaaacacttagcaagatcggtatagaagggacataccttaaggtaataaatgctatctatggcaaacccacagccaacattatattgaatggagaaaagttggaagcattccccctgaaaactggaacaagacaagaatgcccactttcatcacttctattcarcacagcactggaagtcttagccagagtaattagacaacagaaagaaataaagggcatccaaatcagtaaagaggaagtcaaactgtcgctgtctgccagtgatatgattgtatacctagaaaaccc

SEQ ID NO: 566082 - DNA, 609 bp, Homo sapiens
aaaacacttttctctttgaaaagaaaagtaactgagacagcaagggattttccattgcttttaaacattcttaaagactatctgtttaccaataaaataatgaaacacaatggcagttttaaaagtatagtaataaaaaccatttttgataacaacttaggaattgtttttatattaattatcctcatgcctttattcaaatatttggtagggcatgttgttagcattggtcaaacactaacactaaaagataaaatatttttaactcaccattatrtaaaacttgtgttttgaacaagttttgacaaaagaggtgagcaaactttttctttaaagggcaagatagtaaatatttgctggttatatggtttccgtcacagctgctcaaatctgccattgtagtgaaaaagcaaacttgaggaatccatgagcaactgggtatgtctatgttccaataaaataggtagggggctagatttgactcacagtgtatacataacttgctgacctctgctttacaataagcaaagagaagcatgacatttatttttcaacttctctttgttctcttccaaattgtatttaataattatacagcagagataccac

SEQ ID NO: 566083 - DNA, 609 bp, Homo sapiens
aaaacacttttctctttgaaaagaaaagtaactgagacagcaagggattttccattgcttttaaacattcttaaagactatctgtttaccaataaaataatgaaacacaatggcagttttaaaagtatagtaataaaaaccatttttgataacaacttaggaattgtttttatattaattatcctcatgcctttattcaaatatttggtagggcatgttgttagcattggtcaaacactaacactaaaagataaaatatttttaactcaccattatataaaacttgtgttttgaacaagttttgacaaaagaggtgagcaaactttttctttaaagggcaagatagtaaatatttgctggttatatggtttcygtcacagctgctcaaatctgccattgtagtgaaaaagcaaacttgaggaatccatgagcaactgggtatgtctatgttccaataaaataggtagggggctagatttgactcacagtgtatacataacttgctgacctctgctttacaataagcaaagagaagcatgacatttatttttcaacttctctttgttctcttccaaattgtatttaataattatacagcagagataccac

SEQ ID NO: 566084 - DNA, 635 bp, Homo sapiens
aaaaatctgctaagaagagacgagatagacccaagaatttactgaagtataactcacaatataaacctcaagaactattaatataaaatatgaattataaatatggcatggatatatctgggtgagtcatggttacaagagtagagcataaaaatagaatagggggccgggcgtggtggctcatgcctgtaatcccagcactttggaagaccgaggcgggtggatcacraggttaggagatctagaccatcctggctaacagtccatgttcattggctgaaattatctaataatattaaaatgtcaattcttttaactttacagattaattaaactcaatcaaaattccaaagaagtatttgtagatatcaacaaacttatatgaaaaggccaaagacctaggagagccaaagaaatactaaagaaaaagaaaaacattatagctgaagaactgatggcactcaacatgaagactgaccataaagttaaagtaaaaaagtatcgtactggtgaaagaatggaaacaaaacctatgcaacaaaatacaagcctagagattaaactcacacaagtgtagccaattgcattttgacataggagcaaaggttattaaatagagtaaaaataaaaatttc

SEQ ID NO: 566085 - DNA, 478 bp, Homo sapiens
cctctttattccgagggtgttcaggcacctgctgaccctcacggctgaccctggaggggtgctccccgtctcacaggcagtccttggtggctgaggccctggggagaagtctctgtcccaggagccatgtgagctacctttattccctgaagccctgtctgctgggtctgaattttatcctcaaaggccaaaccgaacatgaattcctctctctgtggcaggtcttctacatggcaagcaactgccatggtccacgccagccacagccaccgcttgtccatccctgaatctccaggggtctcaaaccaccctgcccggggcaggacatgcttctcagcaggccsgagtgtccgcgtctgtgagactccagtgtttccttggctaaatgagtacaatctatggtgttattacaaaatattttcctggattttaggcaaacaacacactcagcaactggaagcttttcatgttactacat

SEQ ID NO: 566086 - DNA, 518 bp, Homo sapiens
ttgcactccagcctgggcaacaagagtgaaactgtcaaaaaaaaaaaaaaaagaagaaagacaaagaagccttggataaatattactaccattgcttccctactggtaacctctaacacacaggcatcccgcagggaactacctattgtgcccttccaggagatattttatgtgtggagcatttaatcatcaactgcatgcatggacaactttatatctcaataagtggaaaataagaggccaatgtggattagaagttctaacagtactattgtcactccataaccaattggaaactaaatattggtctacacctcttaatttgttctataaaataaagaggaatttgtcagcagtcataaatatctcatgtagagagatyttgagatttagagagcatttttggtagaatactccttccctggattggcataaatgtaagtaaagttattattaaaattctgtcttaaacattagctactatatctgactcaactgcaaaggctttagttgcccag

SEQ ID NO: 566087 - DNA, 570 bp, Homo sapiens
aaaaacattaaatctgtagattgctttgggcagaatgaccattttaataatattgatttttcaaatctacgagcatagaatgttttttcatttctgtcgtctctgatttctttcagcagtgttttgtagttctccttgtagacacctttcacctccttggttagctgcattcctaggtatttcattttctttgtggctattgtaaatgagatcacgttcttgattggactctcagcctagacattacttgtgaatagaaatgctactgatttttgtacattgcttttgtatcctgaaacctagctaaaattattaatcagttctagtagccttttcacagagtctttagggttttctagatatagaatcatatcatcagtgaagacagatagyttaatttcttcttttactatttggatgccttctttctcttgcctgattgcagtagctaggatttccaatattatgttgaataagagttgtgagagtgggcatccttgacatgttccagttttcaagggaaatacagctttggctcattcagtataatgtgggctgtggggatttcat

SEQ ID NO: 566088 - DNA, 465 bp, Homo sapiens
aaaaatgcaacaaaagaatgattcactgggtcttttctctgcttcaaggggtgggagtgtgggtgggtgagtagggagaatagagccaagaagcaagtatatgctggtayaaaatttcatataaattaggggtaatacaatttttgttaagagaaactttttgctacatatctttaataactgctttttttccccaaattttaagtgtttttaagctttgtagtttagtaaaaggagtgatctttttttaattggtggctctggctatgaaatttgaaaaacattagtagaatcaatagatgacattatgatatatatgcaagtggaaggcttttgtctcatttgcaatttgcagcagaaattgatgaagaaaatattgcagctgtttcacgaaaaggacacaatagtattataaatgatatatatatatgaaggctgaatcattgcagtaatgagactgtaatt

SEQ ID NO: 566089 - DNA, 557 bp, Homo sapiens
acatgccattttattacttccaaatacaataactcaagttaatggaataataacaatgctaaaaaggcattctataatttcttgtttaatgaatcagcctgccaacaagtatttattggacaccacctctatacctagtaaacagtcttcagagtttgtgctacaaatttcaaagacacacawttataagaaatcactgtttttaatatgcttagctgctaggcaagaaattattaaagattgccactgagtcaaaaaaatgtatactgttaaaagttatcgtagttgttgctagtccatttgggctgctataaaaaatacgccacaaaatgggtagcttatcaacaatggaaatttatgtctcccagttctggagcctgagaagtccaaaaccaaggctctcgcagactcagtgtctggtgagggtttattctctagttcatagatggcattttttcactgtgtcctcacatggcagagggagtaaacgagctctctggggtctcttttataagggtactaatttcatttgtgagggctctgttctcatgaactaa

SEQ ID NO: 566090 - DNA, 413 bp, Homo sapiens
cacaatttttaaacttaataactatcaagcaaagttttcaaataagttcaatgtttttattgccaagaataaaatatggaagtcctagccaaagcaatcaggcaagatataaataaaaagcatccaaataggaaaagaagaagtcaaactatgtgattctatgcctagaaaaccctaaaaactctgcsaaaaggctctgggaactgataaaggacttcagtaaaatttcaggatataaaatcaatgtttaaaaatgaatagtatttccatacaccaataacattcaagctgagagccaaatcaagaatgcaatcccatttacagtagttacacacaaaaaaaccacctaggcatacatctaatcatggagaggaaagatctctacagggagaactacaaaacactgctgaaag

SEQ ID NO: 566091 - DNA, 546 bp, Homo sapiens
attgcagcactatttacaatagcaaagacatggatccaacccaaatgcccatcaatgatagactgaataaacaaaatgtggcacaaatataccatggaatactgtgcagccacaaaaaggaatgagwtcatgtcctttgcagggacatggatgaaattcaacaaaattatgttttagggtaaagattttgttgtccataagccattctcttggaaggaatttatgaaggaagccatctagagagatatgtggcttcctatctttgtagttatctgtttagaaacaaaaaggaaggtagattttgtgtgactctgttcccaagctgaacttccctttgatatagtgagtttggtgtcccaaaattttattttcctttcacagtctcagtgaacttttgggacaatatcaagtagtctatcaaatgtgtattttcagtcccagagaagggaaaagcagaataaaaattatttaaagtccaagacaatttacatctctcactatgcatttaatgatctagcttttgcctgtctttcaagtttcaaatct

SEQ ID NO: 566092 - DNA, 388 bp, Homo sapiens
atgtgtgaagcacaagtgcttgtggagcatctgggaagccagaatcgaaagtgtgagcatgcgctgagttacagtgacttgaagccagggagatgaactagcccatagcagcaatgactctggcatctgaggtatggtgctcacagtccatctcyagagccaatatatgcagtgcaggcacatgaggagctacggtggctccagggactagcttcttgtgatgatagctcaattgttagcagcgcagacactcacagaaaggttgtaaaactgctctccatagtgtgggtgcacagagcaactggggtcccaaggcctgggaaagtgttagccctatcagtggtggcttctttgtttgaagtatgagttcatgcaatgtggccacaga

SEQ ID NO: 566093 - DNA, 388 bp, Homo sapiens
atgtgtgaagcacaagtgcttgtggagcatctgggaagccagaatcgaaagtgtgagcatgcgctgagttacagtgacttgaagccagggagatgaactagcccatagcagcaatgactctggcatctgaggtatggtgctcacagtccatctccagagccartatatgcagtgcaggcacatgaggagctacggtggctccagggactagcttcttgtgatgatagctcaattgttagcagcgcagacactcacagaaaggttgtaaaactgctctccatagtgtgggtgcacagagcaactggggtcccaaggcctgggaaagtgttagccctatcagtggtggcttctttgtttgaagtatgagttcatgcaatgtggccacaga

SEQ ID NO: 566094 - DNA, 578 bp, Homo sapiens
taaatttgagtaatttgttaccgcgactataaacaactggtacaaatgtaaatagtaatcatgggtacagatgtwaaggcaaatggtaagctctctatgtagctaaagtgtcgatgaattaaaatctaagttcacaaaatatgtgtctgccggaataaagaaatattaaaggtggaacaaaagatgttagaatagaatgtttaagtggaacggatcttcaaattatggaggtgtatatatgtattcttccaattattatatagaactataagcactcctctcaactttttaggtgccagtgacagtgagtaggtaagttgtataagttgtaattctctcgtgaataaaatggtgataatagtgctatctcttcaaagttgtcataatgaagaataaatgatctatgtcagtacagtagcacatttactggcacatagatataatatgctaatattgtaaacaaaatgcttatgtgctgtatataattcattacatagtggtttccaaagtctcatcagctctagataacatcaatggaaagtacattttatgtttataatctcatgcctatctaatta

SEQ ID NO: 566095 - DNA, 578 bp, Homo sapiens
taaatttgagtaatttgttaccgcgactataaacaactggtacaaatgtaaatagtaatcatgggtacagatgttaaggcaaatggtaagctctctatgtagctaaagtgtcgatgaattaaaatctaagttcacaaaatatgtgtctgccggaataaagaaatatwaaaggtggaacaaaagatgttagaatagaatgtttaagtggaacggatcttcaaattatggaggtgtatatatgtattcttccaattattatatagaactataagcactcctctcaactttttaggtgccagtgacagtgagtaggtaagttgtataagttgtaattctctcgtgaataaaatggtgataatagtgctatctcttcaaagttgtcataatgaagaataaatgatctatgtcagtacagtagcacatttactggcacatagatataatatgctaatattgtaaacaaaatgcttatgtgctgtatataattcattacatagtggtttccaaagtctcatcagctctagataacatcaatggaaagtacattttatgtttataatctcatgcctatctaatta

SEQ ID NO: 566096 - DNA, 578 bp, Homo sapiens
taaatttgagtaatttgttaccgcgactataaacaactggtacaaatgtaaatagtaatcatgggtacagatgttaaggcaaatggtaagctctctatgtagctaaagtgtcgatgaattaaaatctaagttcacaaaatatgtgtctgccggaataaagaaatattaaaggtgraacaaaagatgttagaatagaatgtttaagtggaacggatcttcaaattatggaggtgtatatatgtattcttccaattattatatagaactataagcactcctctcaactttttaggtgccagtgacagtgagtaggtaagttgtataagttgtaattctctcgtgaataaaatggtgataatagtgctatctcttcaaagttgtcataatgaagaataaatgatctatgtcagtacagtagcacatttactggcacatagatataatatgctaatattgtaaacaaaatgcttatgtgctgtatataattcattacatagtggtttccaaagtctcatcagctctagataacatcaatggaaagtacattttatgtttataatctcatgcctatctaatta

SEQ ID NO: 566097 - DNA, 633 bp, Homo sapiens
gaaatcctgtctctactaaaaatacaaaaattagctctgtgtcatggcgtgtgctgtaatcccagctactcaggaggctgaggcagagaatygcttgaacctgggagacagaggcttcagtgagctgacatcccagcactgcacttcaggctgagcaatgaagcaagactccatccagaaaaaaaaaagaaagaaaagaaaaaagaaaaatgggtgaatctcagtaacaacagcaagcattgtggcgttctaagtggccctctttttatctcctttttccctcttcattgtagccttaaaaaccaacagtctgcaaacaactgaataatagctactgaagaggggtaagaagttgggcctcctgaacttacctgttcccagagaaccatcattgttcaacgagtctgccatatccccacacccatcttcaaagtagtctttattatgtatgacttgaagcttacctaatgagaataaacttttccaatggtgcattttcaagaacaatcaaaggaaatagtttaagactgtgagtgcccaaggaaggaaatgatggttggagacaacaagaggttaaaggaaacacttaaaataaaaatcaaaaatctggtgaaatgagatgtctgtagagaa

SEQ ID NO: 566098 - DNA, 462 bp, Homo sapiens
tattttgaaacactactgatttttgcttgttgatcttgtatcctgaaatgctgatgattttatttattaattctagtagcttttttgtgtatttttttagattttctgtatttaggatcatgccatctgccagtagaaaaagttgtactatattattcccaatttgaatgacatttatttccttttctttttaaatttccctgggtagaaattctagtacagtggtgaaagtgtgcatccctgtctttttcctgatcttaggggaagctttcagattttcaccacaacaattgtattagctgtggatttttaaaatatgggcttgatcatattgaggaagttactttctatttctgcttatttartgtttttattatggaagagtatgggattttttgtgcaggataagttgagataatcaattgttgtttttattattcaatgaatgtggtgtattacact

SEQ ID NO: 566099 - DNA, 309 bp, Homo sapiens
ttcagtgagcttgattttgaacaccaaaaataaaaaagagcaaaataacgaaaatatattgcagagaatgaacacartggccacggatgactatgttacaagttgagtcttcaattatgacataaactgtgatagaagattatcaaaaatgttttactctttcaagtaagttgcaagtgtcctctggtgagagacagttctcatcagtcagaacagtacacattctacaagtgacagccttctatttttgttaaaagtgaatatattctgtttttgaataaggtaggttagaaataaacacaggtgata

SEQ ID NO: 566100 - DNA, 464 bp, Homo sapiens
ttgcttacatttttataattttgtagtaaattttgagatcaggtagtatgatgtctttagcttttttctatttattcaacagtgatttccctatttagagwgtttatggtttcatacaattttagaatttaggttttttctatttctgtgaaaaaactgaattttaataaggattacattgactctgcagattactttgagtatttatggcattttaacaatattaattttccaactcatgaacatgagatctctttccatttatttgtgttttcttcattttcttctatcagtgttttatagttttcagtgtatagatctttcacctccttggttaaaattttttcctaagattttttaaatactactgtaaatgggattgcttttttgatatctttttcagatagtttgttgttagtgtacagaaacactactgaaacttttatgtcaattttatatcctct

SEQ ID NO: 566101 - DNA, 464 bp, Homo sapiens
ttgcttacatttttataattttgtagtaaattttgagatcaggtagtatgatgtctttagcttttttctatttattcaacagtgatttccctatttagagtgtttatggtttcatacaattttagaatttaggttttttctatttctgtgaaaaaactgaattttaataaggattacattgactctgcagattactttgagtatttatggcattttaacaatattaattttccaactcatgaacatgagatctctttccatttatttgtgttttcttcattttcttctatcagtgttttatagttttcagtgtayagatctttcacctccttggttaaaattttttcctaagattttttaaatactactgtaaatgggattgcttttttgatatctttttcagatagtttgttgttagtgtacagaaacactactgaaacttttatgtcaattttatatcctct

SEQ ID NO: 566102 - DNA, 464 bp, Homo sapiens
ttgcttacatttttataattttgtagtaaattttgagatcaggtagtatgatgtctttagcttttttctatttattcaacagtgatttccctatttagagtgtttatggtttcatacaattttagaatttaggttttttctatttctgtgaaaaaactgaattttaataaggattacattgactctgcagattactttgagtatttatggcattttaacaatattaattttccaactcatgaacatgagatctctttccatttatttgtgttttcttcattttcttctatcagtgttttatagttttcagtgtatagatctttcacctccttggttaaaatttkttcctaagattttttaaatactactgtaaatgggattgcttttttgatatctttttcagatagtttgttgttagtgtacagaaacactactgaaacttttatgtcaattttatatcctct

SEQ ID NO: 566103 - DNA, 388 bp, Homo sapiens
atgtgtgaagcacaagtgcttgtggagcatctgggaagccagaatcgaaagtgtgagcatgcgctgagttacagtgacttgaagccagggagrtgaactagcccatagcagcaatgactctggcatctgaggtatggtgctcacagtccatctccagagccaatatatgcagtgcaggcacatgaggagctacggtggctccagggactagcttcttgtgatgatagctcaattgttagcagcgcagacactcacagaaaggttgtaaaactgctctccatagtgtgggtgcacagagcaactggggtcccaaggcctgggaaagtgttagccctatcagtggtggcttctttgtttgaagtatgagttcatgcaatgtggccacaga

SEQ ID NO: 566104 - DNA, 388 bp, Homo sapiens
atgtgtgaagcacaagtgcttgtggagcatctgggaagccagaatcgaaagtgtgagcatgcgctgagttacagtgacttgaagccagggagatgaactarcccatagcagcaatgactctggcatctgaggtatggtgctcacagtccatctccagagccaatatatgcagtgcaggcacatgaggagctacggtggctccagggactagcttcttgtgatgatagctcaattgttagcagcgcagacactcacagaaaggttgtaaaactgctctccatagtgtgggtgcacagagcaactggggtcccaaggcctgggaaagtgttagccctatcagtggtggcttctttgtttgaagtatgagttcatgcaatgtggccacaga

SEQ ID NO: 566105 - DNA, 543 bp, Homo sapiens
atctctactaataatacaaaaattagccaggcttggtggggagtcacctgtaatcccagctgcttgggacgctgaggcaggagaatcactggaacctgggagacagaggttgcagtaagccaagatcatgccactgcactccagcctgggcgacaccatctcaaaaaaaaagtcactttcgcagtaagacyttccttgcctaccttacctaaaatcgtcatttaatctgttccattttcacatttttctgctttattttttctgctaacaactatgtaacatactacatactatgtattttatattttattgtgttttttgcctatctctcagaattttagcaccatgaaagcagggatttatatatataaaattagagttttatatatacacacacacacacacacacacacacacacacagagaaatagcatacatataaattattaaagttacatatgcatatatctatgtgtatatttacatgcacttacatacatataaaacttcatgcccagtacacaatatgtacagctttgaatg

SEQ ID NO: 566106 - DNA, 601 bp, Homo sapiens
aaattatattattaattaacattaatattaagctctatgaaacaagaatatttactgtatcacaagtccctggaagagtgcttaatacataagatagtctcaatacatatttgttaattgattgaaaagattaatcctatcttgttaccaagatcttcccatgtttaaaaaaaccatataacatttctaatattttcataggactctagtcagctgatatatcaaaattaactaaactccacttttctttccatttaggacattttggagtttttattacttttttaatgaagtccttgatgtttaagttttggtatcaataatagccttaggatgatcttagaagcagaatwctagggtcaaatggcatgaatgcttgaaacattttgccaacctgcccttaagaaacactgatataaatttatactttcaacacaatgtatgaggctcctcaattttccacactctcaacaatgtttatatctattttctttttaaatttgttgagcatacccctgcccccaacccatgactaaaaacaggtcaatgtgagagataaagtgatgcttaaatacttttccacttaacaatttcacttacc

SEQ ID NO: 566107 - DNA, 601 bp, Homo sapiens
aaattatattattaattaacattaatattaagctctatgaaacaagaatatttactgtatcacaagtccctggaagagtgcttaatacataagatagtctcaatacatatttgttaattgattgaaaagattaatcctatcttgttaccaagatcttcccatgtttaaaaaaaccatataacatttctaatattttcataggactctagtcagctgatatatcaaaattaactaaactccacttttctttccatttaggacattttggagtttttattacttttttaatgaagtccttgatgtttaagttttggtatcaataatagccttaggatgatcttagaagcagaattmtagggtcaaatggcatgaatgcttgaaacattttgccaacctgcccttaagaaacactgatataaatttatactttcaacacaatgtatgaggctcctcaattttccacactctcaacaatgtttatatctattttctttttaaatttgttgagcatacccctgcccccaacccatgactaaaaacaggtcaatgtgagagataaagtgatgcttaaatacttttccacttaacaatttcacttacc

SEQ ID NO: 566108 - DNA, 601 bp, Homo sapiens
aaattatattattaattaacattaatattaagctctatgaaacaagaatatttactgtatcacaagtccctggaagagtgcttaatacataagatagtctcaatacatatttgttaattgattgaaaagattaatcctatcttgttaccaagatcttcccatgtttaaaaaaaccatataacatttctaatattttcataggactctagtcagctgatatatcaaaattaactaaactccacttttctttccatttaggacattttggagtttttattacttttttaatgaagtccttgatgtttaagttttggtatcaataatagccttaggatgatcttagaagcagaattctagggtcaaatggcatgaatgcttgaaacattttgccaacctgcccttaagaaacactgatataaatttatactttcaacacaatgtatgaggstcctcaattttccacactctcaacaatgtttatatctattttctttttaaatttgttgagcatacccctgcccccaacccatgactaaaaacaggtcaatgtgagagataaagtgatgcttaaatacttttccacttaacaatttcacttacc

SEQ ID NO: 566109 - DNA, 498 bp, Homo sapiens
ttttgttttagctctttctaaaatgttgtgaggagaaaaaacctgatttttgttcacatttcagggatctccttctcaattgcttaactttcaaatctctctagacaagccccgcattttcctttgatgctggaaagctcaatgtacttggccaactagtcctaaattgatttcttttctgtacaccctgccccagacaaaactaaacaaatgtaaaaacccatgtctccaaattactgttttgctcaacatttgaatttgctgttgatttgagtgatacctcagttcttttctacaggttggcaatttgacatcttcaaatattctgttttagacctccacaccccatctgttaccaacacctgctatgttttggttcatgaggaatcaaatccaccctttgccaaatttcacattatcagcwctcctgcccagatcaatattttagccatgattattgcaaaagtctcgtaactaattttcctctgtatttgtcag

SEQ ID NO: 566110 - DNA, 603 bp, Homo sapiens
tgcttttgacttccttcatggcacagacccttctgatacaggcactgaaaactacacaaatggagaaaaaaggatgagtatcatatacaaatattttttaaaaaatgaaaaagcaaaaaagttgaattacagtgtttctttaaagttgcaggtgtgcctgcttcatgcctccccttccacctcctccacttcctcctctgctacccatgagactgcaagaccaaccccctcctcagcctactcaatgtgaagasaaggatgaagacctttataatatgacccatttctacctaataaatgttaagtatattttctcttatttcctcataacattttctatagcttaattataaaaatacagtatataacatactaaatatttattaatcaatcatttatcagtaagctattagtagttttgggggagttgtaagttatacatggacttttgactctatgtgtctccatgtaatgattttttactttcgggttactggtgaataggtgtccctaacccatgttgttcaagggtcaactgtgggtatatatggtatatatgtgtgtatgtgtgtgtgtgataaaacaataaaaacaaagaaatta

SEQ ID NO: 566111 - DNA, 603 bp, Homo sapiens
tgcttttgacttccttcatggcacagacccttctgatacaggcactgaaaactacacaaatggagaaaaaaggatgagtatcatatacaaatattttttaaaaaatgaaaaagcaaaaaagttgaattacagtgtttctttaaagttgcaggtgtgcctgcttcatgcctccccttccacctcctccacttcctcctctgctacccatgagactgcaagaccaaccccctcctcagcctactcaatgtgaagagaaggatgaagacctttataatatgacccatttctacctaataaatgttaagtatattttctcttatttcctcataacattttctatagcttaattataaaaatacagtatataacatactaaatatttattaatcaatcatttatcagtaagctattagtagttttgggggagttgtaagttatacatggacttttgactctatgtgtctccatgtaatgattttttactttygggttactggtgaataggtgtccctaacccatgttgttcaagggtcaactgtgggtatatatggtatatatgtgtgtatgtgtgtgtgtgataaaacaataaaaacaaagaaatta

SEQ ID NO: 566112 - DNA, 564 bp, Homo sapiens
tccaaagaatcaaagttagactgacagcagaattttctataacaacaatgaactcaggtgtctatgaaatgagttcaattttgctgtgagaaagtaactgtcggccagaatcttatacccagaaagtctataaaaagttattaaaaacgaaggtgaaataaaaatgtcctcagtgaagcaaaaacgtagtgactttgctaccaacaaactatcactaaaagaaattccaaaatatatgcttcggtcacatggaacatggtctctcacagaaagtttcaagtataagaaggaaaaggttatatggataaattcaaacaaatattgatggtataaaacagcaagattaatgtctttgtagattcaaataaaaataataagttattattaaaatacatttataaggtataggttgatttccaggtggctggaatcaaccatgctaagattcatgtattgtttargagatgggtaaagattttaattaaaccacatcttgattacttaacatgcaagttgatatttctaaaaaagtccctggaataatatctgttttattatgatcta

SEQ ID NO: 566113 - DNA, 423 bp, Homo sapiens
atgagcagctggtgaacaatgaaggaggaggaatctgctccaagtcctgggagtgacaaaaacacagaacatttcagaagagatatgaaacatttggggaaacatgtgcctttcagcatgacttgagaattgaattccagaggaggagatagaatagggggctgcagagggacgcaggcgtgcgatcttggtggaccttctatgccatgctgatgagcttagatttcttcctaagtaaaatgacaaacacttgggagacttataacaaggagagatatggatagattattccttgcttgtttatttatccctctaacttgtaggtttctaaagagcaaggacctcgttttgcttctagaatcaaggagaatgctgggtatgtagtaggtatatgagaaatagaygctgaacaaatgaatggac

SEQ ID NO: 566114 - DNA, 601 bp, Homo sapiens
ggcagagtaaaggaagtaataaaggtaaaagagggtatcactaagattataagaacaaaaaataggaagacattaatgaaactgaaagttgcttctttgattataataagagatcaatattgataataaaactctaccaaaatcaactgagaaaaaaaataagtaggtaaatcctaactaccaatattagtaatgagagagaggaaaaaaaaaatatatatatatatatacacttaaagacaataaaaggcaaatgatgaaaaattaatcatgcatttatttgtattagtccattctcacactgctatgaagaaatacccaagactgggtaatttataatggaaaaaggtttaattgactcacagttccttatggstggggaggaaacttaaaattgtggtggaaggcacctcttcacagggaagcaggagacagaatgagcatccagtgaagggggaagccttttataaaatcatcagatatcgtgagaactaactgactatcatgagaacgggatggggggtaaacacccccatgattcaattacctcccactgggtccctctcagacacgtggggattatggaaactacaattcaaga

SEQ ID NO: 566115 - DNA, 584 bp, Homo sapiens
ttttcaaccactgaggacttgccaagcacagagtggccctctaagtctagatgagaactaagacctctgagcacatgccaaaatccaatccagcacaatccagaaatgtcactgtgtgaccatacaaactctgcacaagacacagggtggggcatttgcacargacagagggtacatgcattagtgacaaagaggaaaaagaaactagtctctttcagggtgcaaacccctcaccagcatttcagatgggaagctcccagggcacaccagcccacccaccaggttataacaatgcccctttctcctttggacacaggacacctcaggccacaccccaggagtgcaggctaggttgggctgctgacttctagatactgggtgcttggtgagccttttgtttctactgagtaagaagaaatacaaagaataatattacaaagagtcttattccagtacacctaaaattaattattatcattatatcatatttgcttcaattttactaaagaaaaaaaaaacaacaaggactagagctaaaagtacagtcccaaacatcctcaggcccagccccacccctgtcttcc

SEQ ID NO: 566116 - DNA, 584 bp, Homo sapiens
ttttcaaccactgaggacttgccaagcacagagtggccctctaagtctagatgagaactaagacctctgagcacatgccaaaatccaatccagcacaatccagaaatgtcactgtgtgaccatacaaactctgcacaagacacagggtggggcatttgcacaggacagagggtacatgcattagtgacaaagaggaaaaagaaactagtctctttcagggtgcaaacccctcaccagcatttcagatgggaakctcccagggcacaccagcccacccaccaggttataacaatgcccctttctcctttggacacaggacacctcaggccacaccccaggagtgcaggctaggttgggctgctgacttctagatactgggtgcttggtgagccttttgtttctactgagtaagaagaaatacaaagaataatattacaaagagtcttattccagtacacctaaaattaattattatcattatatcatatttgcttcaattttactaaagaaaaaaaaaacaacaaggactagagctaaaagtacagtcccaaacatcctcaggcccagccccacccctgtcttcc

SEQ ID NO: 566117 - DNA, 587 bp, Homo sapiens
  misc_feature 1, 2, 3, 4, 5, 6, 7, 8, 9, 10, 11, 12, 13, 14, 15, 16, 17,18, 19, 20, 21, 22, 23, 24, 25, 26, 27, 28, 29, 30, 31,32, 33, 34, 35, 36, 37, 38, 39, 40, 41, 42, 43: n = A,T,C or G
nnnnnnnnnnnnnnnnnnnnnnnnnnnnnnnnnnnnnnnnnnntaatgaatattatgtactaggtatcagcaaagaggtatccaaggtgatcaatgtaggacacttccactgaagagatgtgaagtgtaagttcaactgaagcatcatcgcaattgtgtgccttctcagttattgggcatgttaaagagcatgatgaatgtttgtagtataaaggtgtaaatccttttgatttgttgcgtgaaagacatgtgagatcatgtagcacctgctttgacattgattctcaggagtgtgagttgctcctctgattttagatcacatttgttctcatcactcggcctaagacattgatattgatacggttttattttagttttcgacacatgagaaatcatgccatgtttgaaattataagggtatatttcatggagcctgtattcccttttcttagtgtatttctgtcatgttctagtccccagacacaaagtagaagccatcaaagcctatgctaatacaggcaggaggacagaggttgatgctaacwctgcttgaatgtatggatatctttgtcatatttatgtatgac

SEQ ID NO: 566118 - DNA, 557 bp, Homo sapiens
tcgaaagctaaaataaaaccgtgtcaatcccaatgtggatatgccgagtgatgaggacaaatgtgatctaaaatcagaggagcaactcacacacctgagaatcaatgtcaaaacaggtgctacatgatcccatatgtctttcatgcaacaaatcaaaaggatttacaccattatactacaaacattyttcatgctctttaacttgcccaataaatgagaaggcacacaattacgatgaccctccagttgaacgtacacttcacatctcttcagtggaagtgtcctgaattgatcaccttggatatctgtttgctgatacctagtagataatattcattatccctcacacccatgtagtgtaatcatttgcctaattttcttgtatccactagtttaggcttctgaaagtttcttcatccaatcttgccaccaaaggataatatattagcctcaataaaaatatcatcaattatcatttgacatacttctacaaagtaaaatggctacaagcattagatattactcagtttttcattcagaaatcactgcaatattca

SEQ ID NO: 566119 - DNA, 415 bp, Homo sapiens
tatattcactacctcaccacctttgtttytttgtacacaaaaaataacattatcattatttcattgctctcatggagcactttttataataccaataccatttgctttttgtccagttgctggtagtgcttttccttcctattaaaaaaaaaaaagaaatcttcagaaaatgttatatttactactcaatcagtcagtaattcaagaaacattttctgtgtctataaattcataaggtctatactggaaaatctgataatatgaataaaatactaattttatttatttatcaagtgaaaaaagaaacttataaaaacaaaagcagaaagacacaattcattatttctacaactcaagtcaataaaatacagtgacagcacaaaggcaataacacttatttctacttgggaagctt

SEQ ID NO: 566120 - DNA, 415 bp, Homo sapiens
tatattcactacctcaccacctttgtttctttgtacacaaaaaataacattatcattatttcattgctctcatgragcactttttataataccaataccatttgctttttgtccagttgctggtagtgcttttccttcctattaaaaaaaaaaaagaaatcttcagaaaatgttatatttactactcaatcagtcagtaattcaagaaacattttctgtgtctataaattcataaggtctatactggaaaatctgataatatgaataaaatactaattttatttatttatcaagtgaaaaaagaaacttataaaaacaaaagcagaaagacacaattcattatttctacaactcaagtcaataaaatacagtgacagcacaaaggcaataacacttatttctacttgggaagctt

SEQ ID NO: 566121 - DNA, 415 bp, Homo sapiens
tatattcactacctcaccacctttgtttctttgtacacaaaaaataacattatcattatttcattgctctcatggagcactttttataataccaataccatttgctttttgtccagttgctggtagtgcttttccttcctattaaaaaaaaaaaagaaatcttcagaaaatgttatatttactactcaatcagtcagtaattcaagaaacattttctgtgtctataaattcataaggtctatactggaaaatctgataatatgaataaaatactaattttatttatttatcaagtgaaaaaagaaacttataaaaacaaaagcagaaagacacaattcattatttctacaaytcaagtcaataaaatacagtgacagcacaaaggcaataacacttatttctacttgggaagctt

SEQ ID NO: 566122 - DNA, 415 bp, Homo sapiens
tatattcactacctcaccacctttgtttctttgtacacaaaaaataacattatcattatttcattgctctcatggagcactttttataataccaataccatttgctttttgtccagttgctggtagtgcttttccttcctattaaaaaaaaaaaagaaatcttcagaaaatgttatatttactactcaatcagtcagtaattcaagaaacattttctgtgtctataaattcataaggtctatactggaaaatctgataatatgaataaaatactaattttatttatttatcaagtgaaaaaagaaacttataaaaacaaaagcagaaagacacaattcattatttctacaactcaagtcaataaaatacagtgayagcacaaaggcaataacacttatttctacttgggaagctt

SEQ ID NO: 566123 - DNA, 499 bp, Homo sapiens
ttattaaaatgtcacagaaggaaaaaaaagaatccagaaaataagaaaaagcttcagcaaactaggcagggtactyacttaaagagaaaacctaactgggtagggagtaagtggagaaatgaattagaaatatccttttaatatatgctaaatatagttaacataacatggactatatttagatattctccaagcacagtaagataatatttttctaggactggcctggtcttgcttatgaaaaacttagggtcctgtggccacagataactgataactgcctttaaaatttgatggttaaaaaaaaaagtaatatggttaccactgccatttcaaaatatttggaaaaacttttggagtagccaggcttctaaataacactctaaagacagttaatatataacaaaatgtgactttctgaattgatctgatgtaaataagtaccatggccccattgctgcataggcctctatccatctatgcttaggggcaaatgaag

SEQ ID NO: 566124 - DNA, 499 bp, Homo sapiens
ttattaaaatgtcacagaaggaaaaaaaagaatccagaaaataagaaaaagcttcagcaaactaggcagggtactcacttaaagagaaaacctaactgggtaggkagtaagtggagaaatgaattagaaatatccttttaatatatgctaaatatagttaacataacatggactatatttagatattctccaagcacagtaagataatatttttctaggactggcctggtcttgcttatgaaaaacttagggtcctgtggccacagataactgataactgcctttaaaatttgatggttaaaaaaaaaagtaatatggttaccactgccatttcaaaatatttggaaaaacttttggagtagccaggcttctaaataacactctaaagacagttaatatataacaaaatgtgactttctgaattgatctgatgtaaataagtaccatggccccattgctgcataggcctctatccatctatgcttaggggcaaatgaag

SEQ ID NO: 566125 - DNA, 446 bp, Homo sapiens
aaggaaaaaaaagaatccagaaaataagaaaaagcttcagcaaactaggcagggtactcacttaaagagaaaacctaactgggtagggagtaagtrgagaaatgaattagaaatatccttttaatatatgctaaatatagttaacataacatggactatatttagatattctccaagcacagtaagataatatttttctaggactggcctggtcttgcttatgaaaaacttagggtcctgtggccacagataactgataactgcctttaaaatttgatggttaaaaaaaaaagtaatatggttaccactgccatttcaaaatatttggaaaaacttttggagtagccaggcttctaaataacactctaaagacagttaatatataacaaaatgtgactttctgaattgatctgatgtaaataagtaccatggccccattgctgcat

SEQ ID NO: 566126 - DNA, 446 bp, Homo sapiens
aaggaaaaaaaagaatccagaaaataagaaaaagcttcagcaaactaggcagggtactcacttaaagagaaaacctaactgggtagggagtaagtggagaaatgaattagaaatatccttttaatatatgctaaatatagttaacataacatggactatatttagatattctccaagcacagtaagataatatttttctaggactggcctggtcttgcttatgaaaaacttagggtcctgtggccacagataactgataactgcctttaaaatttgatgrttaaaaaaaaaagtaatatggttaccactgccatttcaaaatatttggaaaaacttttggagtagccaggcttctaaataacactctaaagacagttaatatataacaaaatgtgactttctgaattgatctgatgtaaataagtaccatggccccattgctgcat

SEQ ID NO: 566127 - DNA, 446 bp, Homo sapiens
aaggaaaaaaaagaatccagaaaataagaaaaagcttcagcaaactaggcagggtactcacttaaagagaaaacctaactgggtagggagtaagtggagaaatgaattagaaatatccttttaatatatgctaaatatagttaacataacatggactatatttagatattctccaagcacagtaagataatatttttctaggactggcctggtcttgcttatgaaaaacttagggtcctgtggccacagataactgataactgcctttaaaatttgatggttaaaaaaaaaagtaatatggttaccactgccatttcaaaatatttggamaaacttttggagtagccaggcttctaaataacactctaaagacagttaatatataacaaaatgtgactttctgaattgatctgatgtaaataagtaccatggccccattgctgcat

SEQ ID NO: 566128 - DNA, 502 bp, Homo sapiens
tttgtacatttgaagactgagaatttattcatgtgttacttcagtaaaaaagtaaaacccaaaggactgcatgaaatgcattttagaaaaaggtctgctagtcttcrcatagctggctgcagttattactagaaatgggaataagtggggaaagtgttagtatttcacttttgtctccatgtttttatatatatgccaattatttgaataatttaaaattttaatgcaaaagagcagtaatttctgtaagattttggatgggaccaaaatgggggaggggaccccataaactcaaaaacaggcatttcataaaattttatgcttgatttttttttcttttctttctttctttctttttttttttttttttttttgagacaagattgtgctctgttgcccaggatgaagtgtgatcacagctcactgcagcttcacttccaaaatgtgattttcctgcctcagccttctgagtagctgggattacaggcacgccatgcccagc

SEQ ID NO: 566129 - DNA, 382 bp, Homo sapiens
ttgggagtatgctcatatgcttttgcttacccttggtttctgtgatttcacaccttccatttcgccccctctcttggtgtctttgaatcagcattagttcacttgctgttagatctctatgtcaacattcaatccaagttgagtgagaaaagtccaacatttaatccacgttgagggagaaaaaagtccaaaaatccagaaggattctctgaatttgaagatgcctgaggaagggaaaatsagcatcccattcacagctgtacatctgcaaacattcaggtcctcaagcccactccttgccagcaccagccttctttataaaccacgatgtaaaaagagtttgccctgacaaacatacttgtcaacggtggttgatttaaaa

SEQ ID NO: 566130 - DNA, 382 bp, Homo sapiens
ttgggagtatgctcatatgcttttgcttacccttggtttctgtgatttcacaccttccatttcgccccctctcttggtgtctttgaatcagcattagttcacttgctgttagatctctatgtcaacattcaatccaagttgagtgagaaaagtccaacatttaatccacgttgagggagaaaaaagtccaaaaatccagaaggattctctgaatttgaagatgcctgaggaagggaaaatgagcatcccattcacagctgtacatctgcaaacattcaggtyctcaagcccactccttgccagcaccagccttctttataaaccacgatgtaaaaagagtttgccctgacaaacatacttgtcaacggtggttgatttaaaa

SEQ ID NO: 566131 - DNA, 592 bp, Homo sapiens
gacacatgcatgcatatgttcatcgcagcactattcacaatagcaaagacatggaagctaaataagaacctatagatgcaaagagaacaacagacactggagcctacctgagggtggagggtggtaggatggagaggatcagaaaaaataactatcaggtactaagctttttacctgggtaatgagataatctgtataacaaacccttgtgacacaagtttacctatataactaacctgcrtatgtatccctgaatgtaaaataaaagtaatatgtcctctagcagcttatacaatttttttctttattcttgttgttatgaagatttcctaccttgttatctgtaagggtgactttttgttacttctcagtagttggagtgtacatttatttccagggctaatatttcattaattatgtaaatttttcatcctcagctgcaatttttcaaacaattgtttttctggtattacttgtattgttttttcacaactgctagaagcctttttgtggagcttcttatttatttttattatctttttttcaagaactattttttgaacagttttagatatcttgaagatagaaataa

SEQ ID NO: 566132 - DNA, 558 bp, Homo sapiens
tcaaagtttttaaccaaaaaggatattgaattttatcaaaaggattttctgcatctatcgagatgatcatgtgcttttgtttttagttctgtttatgtggtgaatcacatttagtgatttgtgtatgttgaaccaaccttgcatcccagaaataaaagcctactcaattgyggtggtttagttttttgacatgcacctggattcagtttgctagtatttttttgagaatgtttgcatttatgttcatcagggatattggcctgaagcgttcttatttcacttgtgtctctgccaggttttggtatcagaatgacgttggcctcatagaacatgttaaggaggagtacctcccccttgatttttttagaatagtttcagtaggattggttatcagctcttctttatgtgtctagtagaatttggctgtgaatctgtctcatgcagagtcttttctggttcgttggtcgtttttcttataattgattcaattttggaactcaatacttgtctgttcagggtttcaatttcttcctggttcaatcttagaaggttgcatgc

SEQ ID NO: 566133 - DNA, 558 bp, Homo sapiens
tcaaagtttttaaccaaaaaggatattgaattttatcaaaaggattttctgcatctatcgagatgatcatgtgcttttgtttttagttctgtttatgtggtgaatcacatttagtgatttgtgtatgttgaaccaaccttgcatcccagaaataaaagcctactcaattgcggtggtttagttttttgacatgcacctggattcagtttgctagtatttttttgagaatgtttgcatttatgttcatcagggatattggcctgaagcgttcttatttcacttgtgtctctgccaggttttggtatcagaatgacgttggcctcatagaacrtgttaaggaggagtacctcccccttgatttttttagaatagtttcagtaggattggttatcagctcttctttatgtgtctagtagaatttggctgtgaatctgtctcatgcagagtcttttctggttcgttggtcgtttttcttataattgattcaattttggaactcaatacttgtctgttcagggtttcaatttcttcctggttcaatcttagaaggttgcatgc

SEQ ID NO: 566134 - DNA, 587 bp, Homo sapiens
gtttgcctactcaagcctcagcaatggtggatgcccctycccctgccaggctgctacctggcaggtccatctcagactgtgtgctagcagagagcaaggctctgtgggcatgggacccacctagccaggtgcgggagagaatctcctggtctcccgtttgctaagaccattggaaaagtgcagtatttaggtgggaatgtcccatttttccaggtacagtctgtcatggcttcccttggctaggaaggggaaatccccggaccccttgtacttcccaggtgaggtgatgctccgccctgcttcagctcaccttccatgggctgcacccactgtccaaccagtcccaatgagatgaaccaggtacctcagttggaaatgcagaaatcacctgtcttctgcattgatcacgctgggagctgcagactggagctctttctattcagctgtcttggaacacctaccccattgtatcattcttatgcttttgcatcctcatagcttagctcccacttacaagttagaatatatgatatttggtttccaatcctgagttacttcacttagaataatggtctccaactccctcc

SEQ ID NO: 566135 - DNA, 587 bp, Homo sapiens
gtttgcctactcaagcctcagcaatggtggatgccccttcccctgccaggctgctacctggcaggtccatctcagactgtgtgctagcagagagcaaggctctgtgggcatgggacccacctagccaggtgcgggagagaatctcctggtctcccgtttgctaagaccattggaaaagtgcagtatttaggtgggaatgtcccatttttccaggtacagtctgtcatggcttcccttggctaggaaggggaaatccccggaccccttgtrcttcccaggtgaggtgatgctccgccctgcttcagctcaccttccatgggctgcacccactgtccaaccagtcccaatgagatgaaccaggtacctcagttggaaatgcagaaatcacctgtcttctgcattgatcacgctgggagctgcagactggagctctttctattcagctgtcttggaacacctaccccattgtatcattcttatgcttttgcatcctcatagcttagctcccacttacaagttagaatatatgatatttggtttccaatcctgagttacttcacttagaataatggtctccaactccctcc

SEQ ID NO: 566136 - DNA, 533 bp, Homo sapiens
cctgggtgacagagtgagactctttcaaaaacaaaagaaaaaacaaaaaataaaaaaataataaaaggattatctagttatatagtaaaaattttagaaactaaagtaccatagaatttatgtatttgagtcagtgagttaaatatgtaatagttcccaaataaagaatgataattagcagaattttagtttgggaaataattttgcccaggtacatatacaraaaaatttcttgaccttgtaaccctttctacctccacagtaaaagttggttaaatttgaagaaaatttttgcaccattagagaacatcaagccactcttatttcagttaaatctacacttcatattttctcttttgttcaatgatataacagtgcctagaacacaataacctttcaatatttgttgaataaataagagatatagggacttgagatgccgtggtggtatgagatgtggtcaaagtgttgggaaagtctagacatgtttttataactttggaaaacttatcagatcttcctgaataataatt

SEQ ID NO: 566137 - DNA, 611 bp, Homo sapiens
gatgtcttctacatttttggaaagtatttggacatcaccattcaaaatatttattttatytcatttttcctactctctccttctggggctctatttaatatatgtgtgatcacttgatactatttcatgtatcttggacgctctgttatctttgcttttttaatttctagttattttacgaagttcattttgtagtttgtatttctatactgaaaatttctcatttcttcatgcaccctgtcggccttttctggtagataaataaacataaatatgtttcaccataactattattattttaaagtttccacctgttgattccaactgctagaaactctctgagtttttattgactgctttcacttttaatgggaaatagtatttcctggctttttcatatgtcttgcaacatatgattgcattccagaccttttgtgtaatagaataatacagactgaaataaatatgtgccttcagaaacagacattttccttcttctgttattctacctaagtggagggtaagttaattaaatttctgactcaactggtggctagtttgcagctttagtttgagttggttccctactggcttcaaattttcgaggggta

SEQ ID NO: 566138 - DNA, 611 bp, Homo sapiens
gatgtcttctacatttttggaaagtatttggacatcaccattcaaaatatttattttatctcatttttcctactctctccttctggggctctatttaatatatgtgtgatcacttgatactatttcatgtatcttggacgctctgttatctttgcttttttaatttctagttattttacgaagttcattttgtagtttgtatttctatactgaaaatttctcatttcttcatgcaccctgtcggccttttctggtagataaataaacataaatatgtttcaccataactattattattttaaagtttccacctgttgattccaactgctagaaactcyctgagtttttattgactgctttcacttttaatgggaaatagtatttcctggctttttcatatgtcttgcaacatatgattgcattccagaccttttgtgtaatagaataatacagactgaaataaatatgtgccttcagaaacagacattttccttcttctgttattctacctaagtggagggtaagttaattaaatttctgactcaactggtggctagtttgcagctttagtttgagttggttccctactggcttcaaattttcgaggggta

SEQ ID NO: 566139 - DNA, 611 bp, Homo sapiens
gatgtcttctacatttttggaaagtatttggacatcaccattcaaaatatttattttatctcatttttcctactctctccttctggggctctatttaatatatgtgtgatcacttgatactatttcatgtatcttggacgctctgttatctttgcttttttaatttctagttattttacgaagttcattttgtagtttgtatttctatactgaaaatttctcatttcttcatgcaccctgtcggccttttctggtagataaataaacataaatatgtttcaccataactattattattttaaagtttccacctgttgattccaactgctagaaactctctgagtttttattgactgctttcacttttartgggaaatagtatttcctggctttttcatatgtcttgcaacatatgattgcattccagaccttttgtgtaatagaataatacagactgaaataaatatgtgccttcagaaacagacattttccttcttctgttattctacctaagtggagggtaagttaattaaatttctgactcaactggtggctagtttgcagctttagtttgagttggttccctactggcttcaaattttcgaggggta

SEQ ID NO: 566140 - DNA, 615 bp, Homo sapiens
ctattgtaatcaaatttttcattcatttgtatctaatctgtctttctatctctcatacttaaagaacatttttatttttatattatgcaattctattttaaggtatgtaggcataaatttgaattttgggattcatgtcttttatgattaaatgaaaaatttcaatcattaactgtcttaatattttatctcattctttatattatttaattctgaaactaaaatttttcctatgtttgtcttttacttcaagcttccacatttttttactctgtttaatattgtcccctttttttctcttctatgattcttgggtaatytctttcaatctcttctcctgttcattgattctctcattaactgtgtcttggcagttctttaacccatgcactgaattttttattttaattatactatttttcctttctactgcaaatttgtttttagttactttcaaatcttcctagatattttgatacttttattctttactcatttatttagttatctttttgtttctttaaaattttacatagttctaatatttaatgatgttagatgttagaaggaggtattatacaattctgctgttaattgtttctgctgactctcact

SEQ ID NO: 566141 - DNA, 615 bp, Homo sapiens
ctattgtaatcaaatttttcattcatttgtatctaatctgtctttctatctctcatacttaaagaacatttttatttttatattatgcaattctattttaaggtatgtaggcataaatttgaattttgggattcatgtcttttatgattaaatgaaaaatttcaatcattaactgtcttaatattttatctcattctttatattatttaattctgaaactaaaatttttcctatgtttgtcttttacttcaagcttccacatttttttactctgtttaatattgtcccctttttttctcttctatgattcttgggtaatctctttcaatctcttctcctgttcatygattctctcattaactgtgtcttggcagttctttaacccatgcactgaattttttattttaattatactatttttcctttctactgcaaatttgtttttagttactttcaaatcttcctagatattttgatacttttattctttactcatttatttagttatctttttgtttctttaaaattttacatagttctaatatttaatgatgttagatgttagaaggaggtattatacaattctgctgttaattgtttctgctgactctcact

SEQ ID NO: 566142 - DNA, 615 bp, Homo sapiens
ctattgtaatcaaatttttcattcatttgtatctaatctgtctttctatctctcatacttaaagaacatttttatttttatattatgcaattctattttaaggtatgtaggcataaatttgaattttgggattcatgtcttttatgattaaatgaaaaatttcaatcattaactgtcttaatattttatctcattctttatattatttaattctgaaactaaaatttttcctatgtttgtcttttacttcaagcttccacatttttttactctgtttaatattgtcccctttttttctcttctatgattcttgggtaatctctttcaatctcttctcctgttcattgattctctcattaactgtgtcttggcagttctttaacccatgcactgaattttttattttaattatactatttttcstttctactgcaaatttgtttttagttactttcaaatcttcctagatattttgatacttttattctttactcatttatttagttatctttttgtttctttaaaattttacatagttctaatatttaatgatgttagatgttagaaggaggtattatacaattctgctgttaattgtttctgctgactctcact

SEQ ID NO: 566143 - DNA, 466 bp, Homo sapiens
ccaaattaactcctggccaggccatagtactttagaaaggctcctggctcctaggtcctagccttacacagatgttaattgagaaccaggatttaccaggattcctttacccrgcacactctaaactctatctcctatctacagagcatcacaatatggctggaattcttccctgattttcatgggatttctgcttgattttagcctcctagcttcataatacagcaaatttcttgagtataaagccggcagagtgttgcatcatttgtttacctctctctgctctctgataccatggcctttctatgtactaatttttttctctttagactcatatgtctattaaaattcttgtaatcttactagatgcttttgcccaaactcttcacccaaattctcagcttgttgccaatgttcagaatcagcaaatactctcagggaaaaagtggctgcaaaaagttgcccc

SEQ ID NO: 566144 - DNA, 466 bp, Homo sapiens
ccaaattaactcctggccaggccatagtactttagaaaggctcctggctcctaggtcctagccttacacagatgttaattgagaaccaggatttaccaggattcctttacccagcacactctaaactctatctcctatctacagagcatcacaatatggctggaattcttccctgattttcatgggatttctgcttgattttagcctcctagcttcataatacagcaaatttcttgagtataaagccggcagagtgttgcatcatttgtttacctctctctgctctctgataccatggccyttctatgtactaatttttttctctttagactcatatgtctattaaaattcttgtaatcttactagatgcttttgcccaaactcttcacccaaattctcagcttgttgccaatgttcagaatcagcaaatactctcagggaaaaagtggctgcaaaaagttgcccc

SEQ ID NO: 566145 - DNA, 522 bp, Homo sapiens
gctctatgctacttaacagcggcacccaatcccctgaaacttcaagccacaatcttttccacacctagagattgacgaatactatccttttggtcamctttcactcagtttttccttctactgaagaatccaaagtgtttactctctacctttttgctgtttctctttctgctccacattaatttagatgtggaaattagtccttctatggtttatcagaagtcaccctaacttgtatgcttttgttagtacatccaggaaagtgagagacttagttagaggttcatggggcaataacacatgtgactcgaatatatgttatttctgtttgtcctttggcatttatgtaaattgaggctatttaaaaattccctcatgtgctcatctgtggggccattaccatcagaatcccttatttctctgggaaaatgctaacacattttcttcttctgtcatgaaaaacagttgaccactctaccacttgttgaggttaattttttaatatcccaagttgcataaata

SEQ ID NO: 566146 - DNA, 541 bp, Homo sapiens
gattcaggtctatcggttgaaaaattcttagctatttaacctctctctctctttcctgtatttttgggaactattagtttattattgctacataataaattacagtagcccctgcatccataatttaaatgacctgcaatcaactgtggtctgaaaatattaaggtattttgggagacacagaaagagagagagagagaatcttcacataacttttattacagtattgctataattgttctattttattaatagttattgttaatctcttactgtgactaatttattaattaaactttattataggtatgtatgtataggaaaaaaaggagtagatatagggttcagttctattcatgatttcagacattcagggatcttggaatgtatttcccatggataaggggggattattgtaccacaattttagtggttttgaataacactcatttattagctttcagttctaaggtcagcaatccagacatgccatgcatgactgggtcctctgctccamgtctcacaggctgaaatcagggtaa

SEQ ID NO: 566147 - DNA, 569 bp, Homo sapiens
catggcaaatagagagaaaagaagcaattatccagataatttatatcgtgcttgtataacaaatggacattttaaataaataattcagataattgtaccactcactctccatttcacagaaggtgaatccattgtaaagtaggtggttcagctaccaacagctccagtctcccatttgaaaatagtcttttatgtaccttaggagttctccaggtcggccatgcgcggtggctcatgcctgtaatctcagcactttgggaggccgaggcaggcagatcatttgaggccaagagtttgagaccagcctggccaacatggcgaaaccccatccctactaaaaatacaaaaattagctgggcatggtggtgggcacctatagttccagctacttgggaggctgatgcatgagaatagcttgaacttgggagacggaggttgcatgcagtgagctgagactgcaccactgtactccagcctgggagatacagtgagacactgttttttttttttttaaacaacaacaacaayaacaacaacaacaaaaacttctccaagtcatggagacacac

SEQ ID NO: 566148 - DNA, 698 bp, Homo sapiens
cagtttctagccttgtgacagtgggaaaagtatttaacttcattaggcttttattatctcccttgtaaaatggaaaaggcaatgcttgtgtgcctctgtattcactaattttctttgacccayagggagcaacaacttcacttcacttccttccttatgtcatactcctctgtccatcctacctcactggatccttcctaggttcatctattagccagaacctgagttcactgggcatagtggcaatatcttaaagtcacatttcaagaccctttcccccattattggttccactttaggaagcagacaacactgtgatttgttccagcctctagtcaagctgaaggctgaggcgggggtagcaccaggtctgcttctcctacaaagacttcactctcctaaacttcagcattcttctctaatcctatttcataagagacattaaaaacatcagcacttacttacccatatggctgctgattctttggtgaatatgctttttggctgggaactccagagaagaggaaaaataaatggtaggatttgggtgccaagccagccgcaccctaaaccacaccctgaatgcgtcattgtgcctttccataaacttttctgaggattaaagaagagaatgcatgtaaagtgctaagcaccgtcactggcatatagtactcactcaataaatattaattattatt

SEQ ID NO: 566149 - DNA, 698 bp, Homo sapiens
cagtttctagccttgtgacagtgggaaaagtatttaacttcattaggcttttattatctcccttgtaaaatggaaaaggcaatgcttgtgtgcctctgtattcactaattttctttgacccatagggagcaacaacttcacttcacttccttccttatgtcatactcctctgtccatcctacctcactggatccttcctaggttcatctattagccagaacctgagttcactgggcatagtggcaatatcttaaagtcacatttcaagaccctttcccccattattggttccrctttaggaagcagacaacactgtgatttgttccagcctctagtcaagctgaaggctgaggcgggggtagcaccaggtctgcttctcctacaaagacttcactctcctaaacttcagcattcttctctaatcctatttcataagagacattaaaaacatcagcacttacttacccatatggctgctgattctttggtgaatatgctttttggctgggaactccagagaagaggaaaaataaatggtaggatttgggtgccaagccagccgcaccctaaaccacaccctgaatgcgtcattgtgcctttccataaacttttctgaggattaaagaagagaatgcatgtaaagtgctaagcaccgtcactggcatatagtactcactcaataaatattaattattatt

SEQ ID NO: 566150 - DNA, 332 bp, Homo sapiens
ttgaactctattatgagctaggcctatgctaagctcttttgcctacgttattatcttcatgatagctcattagggaacatattatctgccctgcactcccttacaaatgagaaaactgaggttctgaggggatgggacatttgcttaagatcagacagctgttaacattggcaatgggatttgagcctggatctgttggattccaaggacaataatgtgccatccactaccctgtgctgggccttgtcttggcattcagtcactatctgggagattcttcatayagtgaggctgttttaaagacccacaggcagtgggtcctaaattgattc

SEQ ID NO: 566151 - DNA, 620 bp, Homo sapiens
actcttcttcatattatcaacttctttgtattcttctattttcaaaaaaagttaatattttgtctcccaggttaaaagcaggagatttcctatttgtctagctggactaagttctgtcttctcagaattaggaaggcaagagcttagcatcaaacaggcttagacctcacaaagccattcctagcaacaaacaggaagtaaaatgcacagatttaacaatatgagacgttggtagagtaagtcagtatttaccaggttgactgckttatgcagtatagaaaattggtctatttgtgaatattgtgtaatttcatatacaattgtttaattataatttcattttagaaacaagctgcttagctgggtgtggtggcgagggcctgtagtcctaactactcaggaggctgaggtgggaagattgcttgagcccaggagtttgaggctgcagtgagctatgtttgtgccactgcactgcagcctgggtaacagagtgagaccatgtctctaaaaaaaaaaaaaaaaaaaagtaataataaaaattaaaataagctgccatctctaacatacattatacagattataaatgagtctaacatgctatggagggaaaaaactcatgt

SEQ ID NO: 566152 - DNA, 558 bp, Homo sapiens
tggtgtgtggtggacgtgtgatctgggattagtgaattggtggtagtgaagaaggtaagtgtcatgtgagcacatccctagagacccggaatggaactgggaagaaccacatccaacgggcaagcatgttaagacaaatttgggaagatgatgaaaaggagcagctagggaggtgggaagaactaggggagtcacaggtgcagtttgaagatctgatggartgaccactgagattaaatgcctcaaggagatgaaggaagatttaaaatgaggattgccttggatttggcaattaggtggttgatgcatagtcattaaagttaggctagagtgggctacaaatgtaatgaaaagtgagaaaatggagaatatggactcaggcttcttttcaaagaagcctggctgagaaaggaagtgggagagagagaaagcagaggcagcctcaaggtcaggggaatggctgtttgtttataatgatagtgacttgaaatgcttggatattgaggagaaagagcctggagcagtgggaattacaccaggatgtttatcccactagat

SEQ ID NO: 566153 - DNA, 629 bp, Homo sapiens
agcagcttggtgcttgctagtgagtcagcagtgattccatcctcagccccagtgctgggatcacagctgagagacactcttcctggtgagggctcctccccgccctgctgtctgggacatggatgttctgcttacctgatgtgaaccattcagttacctgtcatggaggagaaagagacacagaacgatctttttgttttaatgcagatgtttctacacttctttgggattaattggtatttctaattatttttcctgatatccagcagaaagattcggtgattttctatctagaggatgatatttgggactggtgtcaaagcaggatctagttcttaaggcaacattttatacttttatactacttcaactttagaaggtctttgtaagtgatcagaatagtatggaaaagcaagacaagaagacactgcttcagaagaagaggtaaacacgaaaccatcttgtcagcacaatggaaaccatgtagctgtagtaaaaaactagaaccaaatcattgyggttgttgaggtaggatagtaggattgttggtgattgcttttttgttttgttttgttatgttactttattttccaggtccaatacataggaacaagttgtaaaatttattc

SEQ ID NO: 566154 - DNA, 606 bp, Homo sapiens
ggttgataaatctcattttaacatgcayttgagtacacttagcctcatatgcagggtttaggtaaaggaaagtatgaaaatacagcattatatatgcgctgttacttgtgagagttcttcattagtgtgagatggacctacccaatgctactgtaaagactgacttcagaccagttagagcagtggtaagaaggaagatttgtcagtttcaagcagcgctgtgcagtggaatgttccatgctgatgcaggttctaaatctgtgctgtccaacctagtaggttagcatatgtggttactgagtacttgaaatgtggccagtatttgtgaggacttaactacactgggcaaagccatctacaaggccacccctcctctggcactactgtaagagggtaggctatggctccaaatacagcaatttcatgaggtatttaactctggttaaaagataaaacatgccttgtacattttgtgtatctactctggggcttcacagagagttgaactcacaattgatcacccgatcaatcatagatctagtttgaggtctgttttctgatttagaaactgcaataagcacatccattgaccgctaagaaagcatc

SEQ ID NO: 566155 - DNA, 539 bp, Homo sapiens
atggattaggagggaagatggggtgaaaatctccccctctctcttatctatttatctgtcctatataatttgtttatcttggtgcttttcaagcctggttgtacattagaatcatctgggaggctttaaaaaccaccaaggcctggactacatcccagaataattaaacaattaaattagcatctctagggtgggcccaggcattggtattttaaaagtggtctccaaaagattttgatttacagagttgaaatcccctgctccrtgttatgtcttttctatgtattgtaaaaatcttcgtgtgtatatttgtcatctattgttattaaataaactcttgtttttgtttcatattgctacataatgcattagcacaaacttggagacttataacatttattagttcacagttctgtaggtcagaaatgggggccagctggacagggttccccactcagggttgcacgaatctataatcaaggtattaactgaactgtgctcttatctggaggctctggagaagaatctgctcacaactg

SEQ ID NO: 566156 - DNA, 539 bp, Homo sapiens
atggattaggagggaagatggggtgaaaatctccccctctctcttatctatttatctgtcctatataatttgtttatcttggtgcttttcaagcctggttgtacattagaatcatctgggaggctttaaaaaccaccaaggcctggactacatcccagaataattaaacaattaaattagcatctctagggtgggcccaggcattggtattttaaaagtggtctccaaaagattttgatttacagagttgaaatcccctgctccatgttatgtcttttctatgtattgtaaaaatcttcgtgtgtatatttgtcatctattgttattaaataaactcttgtttttgtttcatattgctacataatgcattagcacaaacttggagacttataacatttattagttcacagttctgtaggtcagaaaygggggccagctggacagggttccccactcagggttgcacgaatctataatcaaggtattaactgaactgtgctcttatctggaggctctggagaagaatctgctcacaactg

SEQ ID NO: 566157 - DNA, 538 bp, Homo sapiens
cgaatggcaactcaagtacattttgtatgataattatgatgattctttaacccagatacccttttgcaactattcatttattcattgtgcatttattgagtgtgtactgttgagcctcatgagagcacctagagaaatcagtggaaatgcattgagcttaagttttccaatttaaccgggctttgatgatgaataaagaaacaaaaatgaaaaacacagaataggccaggagagtttatgtatcttttcttaagtagggccaatccatgcagaggaagggcctctagtctggataatcrtacagcatgctggaaagtactgctgctctgtcaccaatgagaaagcacctggctcaagaacaaaccaggttgtatacattggtggggctgtgaaatgaatcagttgttccctgaaactggtggtggcagacatggtctctcgtcctagaaggacaaacgacaaactcacgttctctaaaatctgtctcccttctgctttctcatgttttctgcccctggttcttgggaaatggcgagag

SEQ ID NO: 566158 - DNA, 596 bp, Homo sapiens
catcttttgaaaagaaaatgaaaacagaaaatatcgttattcattgtatagataaaattggacatagagcatatcctcaactcattaaaatttttttgaagagtcttgtaataattagaaatatcaagttcaccttaagtggaaactcaggggtttctttcactccatccttcagaaacaataagtcctttttatgtgtcaggctctgtgctgagtgtaaaacgaactgggcatgaaaagatgaataaaacctagcccttgacctcaagctaacaatctgcagtaggaaasaggcagaaaaccattactgtgcagtgagatagttaaactgataagcacaggaataggagcacctccaaggtatgtctgttatggaatatggacgtggtgctgaagagagagtggcaaattctgcggaaggtgagagttttttaggtggcaagaaatgtggaaagatatcacagacctgagtagtatcttaaagtatagcatacagacaaggtatggaagagggcagagggcaagaggctgtaatgattcagggaagatgtcatgatgctctgaattaaggaagtacacctactaaaattgttaaa

SEQ ID NO: 566159 - DNA, 549 bp, Homo sapiens
atggataaaaaatctccccataaaagagtgttttatgtagcaaatgtaaatrtttctaatgtcattttttttctttaagaaaaaatttttaatagagatggggtctcactatgttgtccaggcttgtcttgaactcatgggctcaagctatcctcctgcctcagcttcccaaagtgctgggattacaggtatgagccactctaatgtctttttaaaatctgacccaacaatcctgtgtacctgtgtgtacttcttattctagaagaagctctaacaggctgtgggaagcatctgctttattcactgtttaccccaagcctaacataggcttggcttgaacttaacataatgaaatgatggcaggaaagttagaacatctaggggatcagtagacatatgagacttcagataagggtaggggaccttcataaaaaacagtaggtcccaagtgaaactccaaacagccagggcagggctgtgatctttaagactgagccctagtccacctgctttggtactagtcagtaccagaagtcccttcagaatgaa

SEQ ID NO: 566160 - DNA, 615 bp, Homo sapiens
tattgataactttagagataaacatttatgtggaagtaaatacacaacacaagcccagaaaggtacacactgtaacttttttataacagaaaggaattgttggggataatgtatttctctcatgcttctgagtcaaaaaccaagcaaactgaaatagcccaacaccatcatgatcgattccttgtttttatttcattttactctttgcaatatgttttcatatttagtcrtatctcttttgatcctcaaagtgagccaaataagaggacaggacaggtagttattatcaatgataaagtgaagagttgagtgaagtgactactcagggccacccagttggcaagtgactgagctggattcaaaaccagctgtcatcctttttcctcacactacacacattgccctaagtcagacttccacactggaactgtttaatctgttaaaaaaaaaaaaaaagaaaagaaaaagaaaagaaaaagctgattctgcagtgaccactgagacatctaaacagaagcctcaccttaccccccctcaggagacagggccattggacggtcagagtgcccctttcctgttgtttcttgtgcatctggattcagcacacagccctgt

SEQ ID NO: 566161 - DNA, 365 bp, Homo sapiens
aaaggcccaggcccaccaaatgctgagcaaaatgagaaggacacatcctcataaaccatgagcacaccaagcagggctatgcctctggatgtacaggctttactctgcgcaaaagctcccagccaaagggttgagtggagatcaaatccaacccacacttaccaagccaggctctctggtgcagagctgcacccacctagagcaaggacactttttgtactccacataaatatgtcataacagcaaccctaccgccaagggaaaataaagtgtcctaaatcttatagagaaagygaaaaatttaaaaaacggatttttataagaataccatggatcattgctatggtagacatagagatgcacta

SEQ ID NO: 566162 - DNA, 501 bp, Homo sapiens
tgcaatttgctttataaatgatagtctatccacacaatgggatgtggtgatttaaaataatgatgtgtataattattgacatagaaagaaatttagccatttattaaatgaaaacaagtatgtttgtaaaatggtatccagaagacaaaggacccagtttcttcaacataacagtggcatgtgaaccaaaatgtagggggaactataataaagaggcttaagaaagaagaaaaaataaaaaataaaacaggcttaatatatcaaccrcatgcaatatgtttagatcctgattccagaaaagcaagtgtaaaaaagtaaagttttggctgggcatggtggctcatgcctgtaatctcagtgctttgggaaactgaggcaggaagattgcttgaggccaggaattcaagaacactctgggccacatagtgaggcctttttaaatttttttctctacaaaaagtagccaggcatggtggtgcatgcctataatcccagctactc

SEQ ID NO: 566163 - DNA, 425 bp, Homo sapiens
ggccaggaattcaagaacactctgggccacatagtgagrcctttttaaatttttttctctacaaaaagtagccaggcatggtggtgcatgcctataatcccagctactccagaggctgagacaggaggatcacttgaacccaggagtttgatattgcagtgagctctgatcaagaccctgtcttggtcaaaaaaaaggtaatttttctgtttttttagatgagggaaaatatggcatggattgactattagctattatgaaattattattagttttgtcaggtatagtaatgggaattatttaataattgtgattttttaaaagtcctcatctgttaagagtaaaatgaaaaaagtaaagtacactcccattaatgtttacaaatgcatgcacacgtttgatatgtatagattcatggaaagggg

SEQ ID NO: 566164 - DNA, 425 bp, Homo sapiens
ggccaggaattcaagaacactctgggccacatagtgaggcctttttaaatttttttctctacaaaaagtagccaggcatggtggtgcatgcctataatcccagctactccagaggctgagacaggaggatcacttgaacccaggagtttgatattgcagtgagctctgatcaagaccctgtcttggtcaaaaaaaaggtaatttttctgtttttttagatgagggaaaatatggcatggattgactattagctattatgaaattattattagttttgtcaggtatagtaatgggaattatttaataattgtgattttttaaaagtcctcrtctgttaagagtaaaatgaaaaaagtaaagtacactcccattaatgtttacaaatgcatgcacacgtttgatatgtatagattcatggaaagggg

SEQ ID NO: 566165 - DNA, 526 bp, Homo sapiens
tgtcagcagggatctgcccgagccaacagacaaaaagagatggaaatgttcacagcacctgccatgtgcagacggtgggctggactttatcctcaccatagcactcagtttgtacatgagaaacccaaagctgggaagttgcagatgccaccttgggcgtcagcatgtcagctaagccccacaggcttagcaagtgagagacgtggaaggagtggagtaaaggtgttggaaaccctgccccagtgtgctcactcactttctgtgcttggttgattagggcaggggacagggmctcatgcagcccctcccacccccactggacagtaggtcctgggctgccccacacttcggtgactggccttcctggggagtggggaaactggcatgatgctccctttgctaaagattaagttctgtagactcactccttttcaaagtttgggttagggttaggacacttggccactccaacagcagcttctggtagatagggtacactgtcattaggtcaaaagaggaagaattc

SEQ ID NO: 566166 - DNA, 526 bp, Homo sapiens
tgtcagcagggatctgcccgagccaacagacaaaaagagatggaaatgttcacagcacctgccatgtgcagacggtgggctggactttatcctcaccatagcactcagtttgtacatgagaaacccaaagctgggaagttgcagatgccaccttgggcgtcagcatgtcagctaagccccacaggcttagcaagtgagagacgtggaaggagtggagtaaaggtgttggaaaccctgccccagtgtgctcactcactttctgtgcttggttgattagggcaggggacagggccycatgcagcccctcccacccccactggacagtaggtcctgggctgccccacacttcggtgactggccttcctggggagtggggaaactggcatgatgctccctttgctaaagattaagttctgtagactcactccttttcaaagtttgggttagggttaggacacttggccactccaacagcagcttctggtagatagggtacactgtcattaggtcaaaagaggaagaattc

SEQ ID NO: 566167 - DNA, 524 bp, Homo sapiens
tcagcagggatctgcccgagccaacagacaaaaagagatggaaatgttcacagcacctgccatgtgcagacggtgggctggactttatcctcaccatagcactcagtttgtacatgagaaacccaaagctgggaagttgcagatgccaccttgggcgtcagcatgtcagctaagccccacaggcttagcaagtgagagacgtggaaggagtggagtaaaggtgttggaaaccctgccccagtgtgctcactcactttctgtgcttggttgattagggcaggggacagggcctcatgcagcmcctcccacccccactggacagtaggtcctgggctgccccacacttcggtgactggccttcctggggagtggggaaactggcatgatgctccctttgctaaagattaagttctgtagactcactccttttcaaagtttgggttagggttaggacacttggccactccaacagcagcttctggtagatagggtacactgtcattaggtcaaaagaggaagaattc

SEQ ID NO: 566168 - DNA, 526 bp, Homo sapiens
tgtcagcagggatctgcccgagccaacagacaaaaagagatggaaatgttcacagcacctgccatgtgcagacggtgggctggactttatcctcaccatagcactcagtttgtacatgagaaacccaaagctgggaagttgcagatgccaccttgggcgtcagcatgtcagctaagccccacaggcttagcaagtgagagacgtggaaggagtggagtaaaggtgttggaaaccctgccccagtgtgctcactcactttctgtgcttggttgattagggcaggggacagggcctcatgcagcccctcccacccccactggacagtaggtcctgggctgccccacacttyggtgactggccttcctggggagtggggaaactggcatgatgctccctttgctaaagattaagttctgtagactcactccttttcaaagtttgggttagggttaggacacttggccactccaacagcagcttctggtagatagggtacactgtcattaggtcaaaagaggaagaattc

SEQ ID NO: 566169 - DNA, 524 bp, Homo sapiens
tcagcagggatctgcccgagccaacagacaaaaagagatggaaatgttcacagcacctgccatgtgcagacggtgggctggactttatcctcaccatagcactcagtttgtacatgagaaacccaaagctgggaagttgcagatgccaccttgggcgtcagcatgtcagctaagccccacaggcttagcaagtgagagacgtggaaggagtggagtaaaggtgttggaaaccctgccccagtgtgctcactcactttctgtgcttggttgattagggcaggggacagggcctcatgcagcccctcccacccccactggacagtaggtcctgggctgccccacacttcggtgactggccttcctggggagtggggaaactggcatgatgctccctttgctaaagattaagttctgtagactcactccttttcaaagtttgsgttagggttaggacacttggccactccaacagcagcttctggtagatagggtacactgtcattaggtcaaaagaggaagaattc

SEQ ID NO: 566170 - DNA, 601 bp, Homo sapiens
tccacaaaaatattaaaaattaaaaaaaaaagaaattgtcatgtttgtagacttcccaaatttgccatcctaggcaaacagtgctcttgtttttaaacaaatagttgtatacataattttccccctcactattcaaaacatgtcataaatggtaagtccaagaaaaatacaggtattcccccccaaagraaactgtaaaatcgacttttttctatctgtactgttttttattggtttttaaattggttttccaagtgagtaaatcagaatctatctgtaatggattttaaatttagtgtttctctgtgatgtagtaaacaagaaactagaggcaaaaatagccctgtcccttgctaaacttctaaggcacttttctagtacaactcaacactaacatttcaggcctttagtgccttatatgagtttttaaaagggggaaaagggagggagcaagagtgtcttaactcatacatttaggcataacaattattctcatattttagttattgagagggctggtagaaaaactaggtaaataatattaataattatagcgcttattaaacactacagaacacttactatgtaccaggcattgtgg

SEQ ID NO: 566171 - DNA, 503 bp, Homo sapiens
tggtctctacaaaaaataataacaaaaattagccgggtgtggtggctcgtgcctgtggtcccagctgctccggtggctgaggcgggaggatctcttgagcttaggcttttgagctatcatggcrccagtgcactccagcgtgggcaacagagcgagaccctgtctctcaaaaaagaaaaaaaaaaaagaaagagaaaagaaaagaaagaaagaagtgaaggtttgtcagtcaggggagttgtaaaaccattaataaagataatccaagatggttaccaagactgttgaggacgccagagatcttgagcactttctaagtacctggcaatacactaagcgcgctcaccttttcctctggcaaaacatgatcgaaagcagaatgttttgatcatgagaaaattgcatttaatttgaatacaatttatttacaacataaaggataatgtatatatcaccaccattactggtatttgctggttatgttagatgtcattttaaaaaat

SEQ ID NO: 566172 - DNA, 542 bp, Homo sapiens
ggcaacagagcgagaccctgtctctcaaaaaagaaaaaaaaaaaagaaagagaaaagaaaagaaagaaagaagtgaaggtttgtcagtcaggggagttgtaaaaccattaataaagataatccaagatggttaccaagactgttgaggacgccagagatcttgagcactttctaagtacctggcaatacactaagcgcgctcaccttttcctcyggcaaaacatgatcgaaagcagaatgttttgatcatgagaaaattgcatttaatttgaatacaatttatttacaacataaaggataatgtatatatcaccaccattactggtatttgctggttatgttagatgtcattttaaaaaataacaatctgatatttaaaaaaaaatcttattttgaaaatttccaaagtaatacatgccatgcatagaccatttctggaagataccacaagaaacatgtaatgatgattgcctctgaaggtctattttcctcgtctgacctgtgtgtgggttttgtttttgttttactgtgggcataaatta

SEQ ID NO: 566173 - DNA, 469 bp, Homo sapiens
ttattttgaaaatttccaaagtaatacatgccatgcatagaccatttctggaagataccacaagaaacatgtaatgatgattgcctctgaaggtctattttcctcstctgacctgtgtgtgggttttgtttttgttttactgtgggcataaattaatttttcagttaagttttggaagcttaaataactctccaaaagtcataaagccagtaactggttgagcccaaattcaaacccagcctgtctgatacttgtcctcttcttagaaaagattacagtgatgctctcacaaaatcttgccgccttccctcaaacagagagttccaggcaggatgaatctgtgctctgatccctgaggcatttaatatgttcttattattagaagctcagatgcaaagagctctcttagcttttaatgttatgaaaaaaatcaggtcttcattagattccccaatccacctcttgatgg

SEQ ID NO: 566174 - DNA, 618 bp, Homo sapiens
ttgtcatataagattcatatttacttcttatacatttgataaagtaaggcatggttgtggttaatctggtttatttttgttccacaagttaaataaatcataaaacttgatgtgttatctcttatatctcactcccactattacccctttattttcaaacagggaaacagtcttcaagttccacttggtaaaaaatgtgaaccccttgtatatagagtwtggctcacaagggaaagggcctcagtgattcaaattttccagattaggaatctgatgctcaaagaagttaaatggcatagttggggtgacacagctgtctagtgggaggccagccttctatattttagccagcgttctttcctgcgggcagggtcatgaggagtatgcagactctaagagggagcaaaagtatctgaaggatttaatattttagcaaggaatagatatacagtcatcccttggtctccctgggggattggtttcaggaccccttcttggacaccaaatctatggatatttaagtcccttctataaaatggtatagtatttgcatataacctatccacatcctcctgtatactttaaatcatttctagattacttgtaatacctaataca

SEQ ID NO: 566175 - DNA, 513 bp, Homo sapiens
gtttagacacaacaactgaccagcattaatgtcaaaataaagatcataaggctgacagaatagaccctttgtggcaataacaaattattcgtaagatctaaggtcatgccaggcaagtgttatgtcatgcactcctacacttaaagaataaactatgttctaactgccacaagattttctatttatttatttatttatttattttttgagacggagttctgccctgtcagtttttctttttgtttagcagctaaacaagcaccagctgagataagcaattttttttttttttttttttgagtcagagtcttgctctgtcgcccaggctgcagtgcagtggcccgatctcggctcactgtgagctctgtcttctgggttcatgccattctcctgcctcagcctcccaagtagctgggactacaggcacccaccaccacgcccsgctaatttttttgtatttttagtagagatggggtttcaccgtgttagccatgatggtctccatctcctgac

SEQ ID NO: 566176 - DNA, 628 bp, Homo sapiens
ctgttttctcctttttgttgttattatcaccaattatctctttatacattgcatatccattaacacacataactattgttttgtgcatttgtcttttatattgaataggggaaaaagaggagttagaaaccaaaaactgcaatattggactttacctatgtagctactttttcactggtctctacttctttatatggcttggagatacttcctagtttcctttcatttcaacatgtaggactccttttagcatttcttctagagcagatctactagcattttttgtagattaagactactagacaactccttcagtttttgtttatctgggaatgtcttaattcctcttttcatgaatatataattctttatttttaaaaaattttaattaaaaaaaagtagaaacagggtcttgccatgttgttcctgggctsaaatgatctgcccaccttggcctcccaaagtgttgggattacaggtgtgagctactgtgcctggctggatacagaactcttagttaacagtttttttctttcggcagttcagatatgtcatctctctccttcttggctttcatattttctgaaaagaaatcagctagtaatcttactgagaatcccttgtatgt

SEQ ID NO: 566177 - DNA, 602 bp, Homo sapiens
catgaccagctaattttttgtatttttagtagagacagggtttcaccatgttggccaggctggtctctaactcctgacctcaggtggtccacctgcctcggcaccccaaagtattgggattacaggcttgagccgcagtgcccggctgcttcaaacattctttctgcatttttctcctttctttctgaaattcttattatgtctgtttgatagtgtcttgtggatctcttaggctcagttcattgttggtcattcctttttttttttttttttctgagatggagtgtcattgttgttgcccaggctagagtgcaatggcgtggtcttggcttactgcaacctctgcctcctgggttcaagcaattcttctgcctcagcctcccaagtagctaggattacaggcrcctgccaccacacccagctaatttttgtatttttagtagagatttttagtagagatggctaaccatcctgtgttagccaggatggtctaaatctcctgacctcgtgatctgcccgccttggcctcccaaaatgctgggattacaggcatgagccactgcgcctggcctgaaatgtgtttttttaaaaaggagtgaagg

SEQ ID NO: 566178 - DNA, 567 bp, Homo sapiens
attgctatgtccaaagaaatacctttatttcctttgagtttataaccagacacctctggactaggtctctaaggtcataggcttttcccagctgatttgatcttcttagcttcctccaagctaaataaagctattgtctgcactttcaacttcataggcactctaggacaacattaatggctagagctttggcaaatcagtccctagattgggggtgctaaattggaagttctgtttctttattcattattctatggagaagagccttctcaggtatttggcatctggaagaaaaaaatatgcagactcagggaaagaagaaggatatatggaagtaatgatgtcttcagaaaatcttgttccttttgtaaaagttcctattagtgtgagcattcatycattcatttaacaaatatttattgagtgggtcaggcataatactagatattggggatgggagacagctgttaattaaataatcccatgagtaataataaaataacaactgtgataagtactataactgaaagtatagggtatgatgatagcatataaatggagaacata

SEQ ID NO: 566179 - DNA, 567 bp, Homo sapiens
attgctatgtccaaagaaatacctttatttcctttgagtttataaccagacacctctggactaggtctctaaggtcataggcttttcccagctgatttgatcttcttagcttcctccaagctaaataaagctattgtctgcactttcaacttcataggcactctaggacaacattaatggctagagctttggcaaatcagtccctagattgggggtgctaaattggaagttctgtttctttattcattattctatggagaagagccttctcaggtatttggcatctggaagaaaaaaatatgcagactcagggaaagaagaaggatatatggaagtaatgatgtcttcagaaaatcttgttccttttgtaaaagttcctattagtgtgagcattcatccattcatttaacaaatatttattgagtgggtcaggcataatactagayattggggatgggagacagctgttaattaaataatcccatgagtaataataaaataacaactgtgataagtactataactgaaagtatagggtatgatgatagcatataaatggagaacata

SEQ ID NO: 566180 - DNA, 567 bp, Homo sapiens
attgctatgtccaaagaaatacctttatttcctttgagtttataaccagacacctctggactaggtctctaaggtcataggcttttcccagctgatttgatcttcttagcttcctccaagctaaataaagctattgtctgcactttcaacttcataggcactctaggacaacattaatggctagagctttggcaaatcagtccctagattgggggtgctaaattggaagttctgtttctttattcattattctatggagaagagccttctcaggtatttggcatctggaagaaaaaaatatgcagactcagggaaagaagaaggatatatggaagtaatgatgtcttcagaaaatcttgttccttttgtaaaagttcctattagtgtgagcattcatccattcatttaacaaatatttattgagtgggtcaggcataatactagatattggggatgggagacagctgttaattaaataatcccatgagtaataataaaataacaactgtgataagtactataamtgaaagtatagggtatgatgatagcatataaatggagaacata

SEQ ID NO: 566181 - DNA, 506 bp, Homo sapiens
gaattcctgacctcaagcatcctcccaccttgacctcctaaagttctaggattacagatgtgagtcaccacacccaacctccatctacttttgactacgtcctttttcatcattcctgcctataatttaagtagtattttgcatcttgttctctccaatatactcatccttgagctttttccaagtctaaaattcttaacatcattgatctcagcagtactcttgattgactgtccctatttcctttctttggaagtcctcatctaaatgggctttattctctatagttgacagttttggggggactttttaggaccttcagcattggccctctaaaattataattagcacagtttttttttggggggggtcagggcaaaagcttaaatgtatgtatgggaaaaataatgcaaatactacagacaatattcatgtagtttgttatatacaatatgcatacatttacaastgatttggataaacagccataacaggattaagactac

SEQ ID NO: 566182 - DNA, 624 bp, Homo sapiens
aaaaacccgcccccgtgattcaattacctcccaccaggtccctcctawgacatatggggattatcaaggtagatttgagtagggacacagagccaaaccatatcagatagcatgcatatgtacatagaaaatgtcaaattgttcacgatcagaaaatgtttattctctcccctattcttttccctttcctctgtagctgtgtgcacatatgtattttgattatgaatgaactccatttattctttcaccttccagctgagctcttatcccttccctgattttctctttcacttaaaaatggactaaggaattccactctgtttatattttatagcatatatttaaacatttctttcacattattgttggctaagttttatagttcttcaatgctgattgctacagtgtctttcaaatccaggaaaaatatgcaactttgatagtcccaatgtgcctgcagatttgtaggtggaaggaccgattgctttatgattaagagtctgcaataatttgtttaaaaactttaacttgcaggctgttaatgattggactaagtgactgaggaaagatcaactttaattgtatgacttaactctactaagagtttcataaacacattttaac

SEQ ID NO: 566183 - DNA, 624 bp, Homo sapiens
aaaaacccgcccccgtgattcaattacctcccaccaggtccctcctatgacatatggggattatcaaggtagatttgagtagggacacagagccaaaccatatcagatagcatgcatatgtacatagaaaatgtcaaattgttcacgatcagaaaatgtttrttctctcccctattcttttccctttcctctgtagctgtgtgcacatatgtattttgattatgaatgaactccatttattctttcaccttccagctgagctcttatcccttccctgattttctctttcacttaaaaatggactaaggaattccactctgtttatattttatagcatatatttaaacatttctttcacattattgttggctaagttttatagttcttcaatgctgattgctacagtgtctttcaaatccaggaaaaatatgcaactttgatagtcccaatgtgcctgcagatttgtaggtggaaggaccgattgctttatgattaagagtctgcaataatttgtttaaaaactttaacttgcaggctgttaatgattggactaagtgactgaggaaagatcaactttaattgtatgacttaactctactaagagtttcataaacacattttaac

SEQ ID NO: 566184 - DNA, 566 bp, Homo sapiens
gtggtcatatggtttttgtttttagttttgtttatgtgatgaatcacattgattgatttctggatgttgaaccattcttgcattgctggaataaaactcacttgattgtgaagaattatctttttgatatgctgttgcattcagtttgctagaattttattgaggatttttgcattgatattcatctagaatattggcctgtggtatttttgttgttgttcttttgcccttgcctgattttggttataagggtgatactgattttgtggaatgagttagggagtaatygctcctccttagtcttttttttttttttttttttgaataatttcagtaagattggtaccaactcttctttgaacatctggtaaaatgcagctgtgaatctgtctggtcctgggctgttgttgttgttgttgttgaaagattttttatttcttattctatttaattacacattattggtcagttcaggatttatgtttcttcctggttcaattgtggagggtcatgtttccaggaatttatctatttcctctaggctttctattttgtgtgcatagagg

SEQ ID NO: 566185 - DNA, 605 bp, Homo sapiens
tgcttttaaaccaaagggcaatatgacagaaaagaggaatttttaaattatttgcaaagtaaaaattctaaatgtctttttactgctttgtttaagatattgtttaaactcaaacaatgagacatttgatactttactgtctattcagccgtgtgtctgtaaacatttacacaaatttacatcaatttctatttgttctatgagaacatgaatcccattaaaatggctaatgtatagatggaaacttccattgctactattcttcaggtttttcttattgaaaagtgatttgcgtttcctttttgttatataaaactttgtattttgctggttagccttaaaatgattccctaatcgaatatctcttctttcaaatttcrgtgtttttaagaatatataaaatgagtctagtaatagatctaatggaagatactgagcatttaaaagttaaactgtttacataatagtaatcatttgcttatgtaaataggaaaagaacgtggttaactgcctgcacacagcaggaaatgcaaacatgaagactcagttctgtcttagaactgatggagtgaattgaatgtgtacaatgcagaggtgttcattgc

SEQ ID NO: 566186 - DNA, 584 bp, Homo sapiens
ttaccctttagactcattaaagttttcttgaaacatatggtcttcatatcattataccaaacacacttccaaattcttacttaatagccacataatccactagaccattggctctgtgaaggcagaaagtacatctaatctgtcccggcctctgttttctgggatttacaggatgtttagtgaatatactgaaagaatgaatgatgaagaaattcttacgaggaagttctattcattataatagcgtggttggaaaagtgggttaataccttttaatgatagcagtgtaatcaaaggcattaaatactacaaacattaaagaatagtrtagaatgttattaagaatgatataccaacaaacttgacaaaataaaacaaatagacaactttcttaaaaaatacaatttatcaaaattaccaataagaaagaaaatctgagtaatcctaatctccattaaggcaattaaatttgtctccataaagaaagttccacgctgagatagttgtactggtaaattctgtctaaaactaaataaataaaatcaaggttatacacactttttcagcaaaaaaagaggaagagg

SEQ ID NO: 566187 - DNA, 584 bp, Homo sapiens
ttaccctttagactcattaaagttttcttgaaacatatggtcttcatatcattataccaaacacacttccaaattcttacttaatagccacataatccactagaccattggctctgtgaaggcagaaagtacatctaatctgtcccggcctctgttttctgggatttacaggatgtttagtgaatatactgaaagaatgaatgatgaagaaattcttacgaggaagttctattcattataatagcgtggttggaaaagtgggttaataccttttaatgatagcagtgtaatcaaaggcattaaatactacaaacattaaagaatagtatagaatgttattaagaatgatataccaacaaacttgacaaaataaaacaaatagacaactttcttaaaaaatacaatttatcaaaattamcaataagaaagaaaatctgagtaatcctaatctccattaaggcaattaaatttgtctccataaagaaagttccacgctgagatagttgtactggtaaattctgtctaaaactaaataaataaaatcaaggttatacacactttttcagcaaaaaaagaggaagagg

SEQ ID NO: 566188 - DNA, 525 bp, Homo sapiens
cgcgttatcctgtgctgctcactacaccacctcctgcgattctttttttttttttttctttaattgaaatggacataaatgctgagactctaagagactagagcgccattcattgctattccaggaagcattcctggaggccaggtgcccaccagccagcctgcattgggccctgcagggtacaaagactggaagataagcctcttcctctgaatgatagatgcctacgggtatggaaaatattgtgtgtcaagtgttgtggctatctgaagggcagtgagttccaggagaacagctcaagcaactgagggaggtaccggcatgtacttactgtctttacaacttccagggaatttaagagaccatttatgtgtttttgctgttgccatttgaggggtttattttatttatttatttatttatttatttattatttttatttwtttttttttttgagacagagtctcgctctgtcacccaggctggagtgcagtggtgcaatcttggctcactgcaagctccacc

SEQ ID NO: 566189 - DNA, 625 bp, Homo sapiens
ttatttccttcttgtacattttttaagtgaagcctaaagtggaataacattaggagcaatttttaaaatagcttgggaccttttttaagtgcgttcttaagttcttaaaattgtcttagaccattaatttaagtattactctttaaagatttgtgaatatatttagctttatctatacaataaggttaattttgctttctaagctttgcggaagtaatatcgtctcacagagagatggagaatattaacatctgttcttcctcatccatttttcttacacgcagaagtaaatgtaattcaagagatttgattatatgagttagccataaatttatgaaattggtgacatagcttattacagtcatgattaattatatttaataccaaaaattaacttaaaatcccattatactggggcccttgatcatgtagctaktgacttttaaatttcggagtacttttaaacattttccattcaatgtgatactcctgaccaacgtgaaacacacacacacacacacatatgtacacacatacactttctatatatatttaagaatacctttaatattcaaataatttcttgattgttctatataaactgttttgttaaaaaaactcacat

SEQ ID NO: 566190 - DNA, 569 bp, Homo sapiens
atattaaacgcattttagagggaaggaaacaagttcagaaagtttatgtgctttctcaaggtcccacaattagtaagtgcctgatctgagatttttttttaattttattattattatacttttaagttttagggtatatgtgcacaatgtgcaggtttgttacatatgtatacatgtgccatgttggtgtgctgcacccattaacttstcatttacattaggtatatctcctaatgctatccctcccccctccctccaccccacaacagtccccagtgtgtgatgttccccttcctgtgtccatgtgttctcattgttcagtttccacctataagtgagaacatgtggtgtttggtttttggtccttgcgatagtttgctgagatttaaaagctacaactgattgactcttgtgccagtgatagtttcttcaaaaaatataaatctaattttcctttcaaaaggttaaaaaaattaaatagttcctgcagtcataatgtaaaatcattaaaagtgaaatattttgttctcaatttcctaataattaataatgacaaatatccagaaaca

SEQ ID NO: 566191 - DNA, 569 bp, Homo sapiens
atattaaacgcattttagagggaaggaaacaagttcagaaagtttatgtgctttctcaaggtcccacaattagtaagtgcctgatctgagatttttttttaattttattattattatacttttaagttttagggtatatgtgcacaatgtgcaggtttgttacatatgtatacatgtgccatgttggtgtgctgcacccattaacttctcatttacattaggtatatctcctaatgctatccctcccccctccctccaccccacaacagtccccagtgtgtgatgttccccttcctgtgtccatgtgttctcattgttcagttyccacctataagtgagaacatgtggtgtttggtttttggtccttgcgatagtttgctgagatttaaaagctacaactgattgactcttgtgccagtgatagtttcttcaaaaaatataaatctaattttcctttcaaaaggttaaaaaaattaaatagttcctgcagtcataatgtaaaatcattaaaagtgaaatattttgttctcaatttcctaataattaataatgacaaatatccagaaaca

SEQ ID NO: 566192 - DNA, 542 bp, Homo sapiens
caccttctcattccctctctccttgttttttcagacattttgccaacattgtttataaattagcaaattctttaaaggaaaagtggtgcagactgtcagcctcatcagtgtgggttttttttttttctctccagcatcttagttccctaagtcctggctgccttggtagcttccccaatgcctttaactagatgctttttcttgtagttttcattgtatcatatcttattcagctttctagccataattggtgggattggtctgttacaagttagttcatcataatcagagtcaggaatcttgttaactgagcctttcttcattcattcattcaatcattcattcatattatatgtttactatgtgtgtttactcccattatagatataaagatgataaaacagagtctttggttactaagagctaccatctacttcagacccataaacaaataccaacagtacaatgggaaaaccgtaagagaattaagtacgtagtgtgcagtggaagcacagrggaaaaagtgattagttaagacttgg

SEQ ID NO: 566193 - DNA, 568 bp, Homo sapiens
tctttttctaacttctggagatgtatgcttacataatgcattttcagcgtttcttctttactaatctgtttaaggccatgaatttccatttaagttctactttatccgcatccagaatgttttgatacatagtcttttcatcattattctgttaaaatattttcaattcccaatttgaattttccaatttatacattatttagaaatgtttcttaatttcagaaaaattttaaatagtgatttaactaaaattaccactgtcttttaacatatggtgattttagttatttttgttattggcttatatgaataatattataaaatgtgttccgtatgataccaattattttaaatgtgttgaaacttgctttatggcccaagttacggtcagtttttaatgtacattctgagtagttattgggtgcaatgttctatctgcctgttaggtcaaatgttctaattattttgttttcaaattgtctctgtctttaatgatctttttgaatgcctgggctctcaacttttgagagtattacatgaawatctgttaccattatggtagatttat

SEQ ID NO: 566194 - DNA, 541 bp, Homo sapiens
ggtggcacctgtaattccagcactgtgggaagctgaggcaagaggatcccttgaggccaggagttcaaggccagcctgggcaacgtagcaagactcccagctctacaaaaaatttaacaaaattagctgggaatggtggcatgcacctgtagtcccagctacttaggaggctgaggtgggaagatcacttgagctcacgaatttgaggttacagtgagctgtgatagtgccactgtactctagcctgtgtgacagaccacgaccttatctctaaaaaaaaaatgtgaaaatgtacataaaatgtgccatgtgcagacagtaaatgtccaatacaagtaagawcttcccatttctttgacacagtctgcatcatacaaccacatcttatatagacattccagggatgctcagaggaaggagatgggggaaaagtaggtagctcttggattgaacagttggagacttgtagaggaaagcaaatagaaccaccaaagtgatgggaggtcaaggaagatgcagagaattgtttgagggaagtaag

SEQ ID NO: 566195 - DNA, 553 bp, Homo sapiens
gcacctgtaatcccagctactcaggaggctgaggcaggagaatcacttgaacccgggaggmagaggttgctgtgagctgagattgcgccattgcactctagcgtgggcaacaagagtgaaactgtctcaaaaaaaaaaaattttttttcatatgatgaaggaattacaaagaagttagcttttgctgctgaacaaaacacctccaacctctatggcttaggacagcaatttatttaactcatgattctatttgggctgagctcagctgggtggttcttttggacttgactggacttactcatgactgtggtcagctgcaagtcagctaggtagctttgctcatgggatctggctgttagctgaggaaatgagtccaggtgtctttacttatccagcaggctctccttggcttattcctgtagtaaatcagcaaacttacaaggactagagcagatgcttgcaagtagttttgaaacctaagcttggaactggaacattatcagttctgctgcattctttaggtcaaatcaagtaagaaggccaagagggtgaa

SEQ ID NO: 566196 - DNA, 553 bp, Homo sapiens
gcacctgtaatcccagctactcaggaggctgaggcaggagaatcacttgaacccgggaggcagaggttgctgtgagctgagattgcgccattgcactctagcgtgggcaacaagagtgaaactgtctcaaaaaaaaaaawttttttttcatatgatgaaggaattacaaagaagttagcttttgctgctgaacaaaacacctccaacctctatggcttaggacagcaatttatttaactcatgattctatttgggctgagctcagctgggtggttcttttggacttgactggacttactcatgactgtggtcagctgcaagtcagctaggtagctttgctcatgggatctggctgttagctgaggaaatgagtccaggtgtctttacttatccagcaggctctccttggcttattcctgtagtaaatcagcaaacttacaaggactagagcagatgcttgcaagtagttttgaaacctaagcttggaactggaacattatcagttctgctgcattctttaggtcaaatcaagtaagaaggccaagagggtgaa

SEQ ID NO: 566197 - DNA, 461 bp, Homo sapiens
atcgaatggaagggcattgaatagaatggaatggaatgkactcgaatttaatggactggagtgaaatggattcgaatggaatggactggagtgaaatggattcgaatggaatggactggagtggaatggactcgaatggaaaggaaacgagtggaatggaatggaatggaatggcttgaaatggataagaaatgaaaagaatgtaatggaatcggatggaatggaattgaatgtattggagtcgagtagaacagaattgaatggaatggcatcaaacggaatggaaacgaaaggaatggaattgaatggactcaaatgttatggaatcaaagggaatggactcaagtagaatggactcaacagaaatggtcttgaatggaatttattcgaatataatttaatcgaatggaatgcaatagtatggaatggaatcgaatggaacggaatcgaatggattggaa

SEQ ID NO: 566198 - DNA, 461 bp, Homo sapiens
atcgaatggaagggcattgaatagaatggaatggaatggactcgaatttaatggactggagtgaaatggattcgaatggaatggactggagtgaaatggattcgaatggaatggactggagtggaatggactcgaatggaaagsaaacgagtggaatggaatggaatggaatggcttgaaatggataagaaatgaaaagaatgtaatggaatcggatggaatggaattgaatgtattggagtcgagtagaacagaattgaatggaatggcatcaaacggaatggaaacgaaaggaatggaattgaatggactcaaatgttatggaatcaaagggaatggactcaagtagaatggactcaacagaaatggtcttgaatggaatttattcgaatataatttaatcgaatggaatgcaatagtatggaatggaatcgaatggaacggaatcgaatggattggaa

SEQ ID NO: 566199 - DNA, 461 bp, Homo sapiens
atcgaatggaagggcattgaatagaatggaatggaatggactcgaatttaatggactggagtgaaatggattcgaatggaatggactggagtgaaatggattcgaatggaatggactggagtggaatggactcgaatggaaaggaaacgagtggaatggaatggaatggaatggcttgaaatggataagaaatgaaaagaatgtaatggaatcggatggaatggaattgaatgtattggagtcgagtagaacagaattgaatggaatggcatcaaayggaatggaaacgaaaggaatggaattgaatggactcaaatgttatggaatcaaagggaatggactcaagtagaatggactcaacagaaatggtcttgaatggaatttattcgaatataatttaatcgaatggaatgcaatagtatggaatggaatcgaatggaacggaatcgaatggattggaa

SEQ ID NO: 566200 - DNA, 478 bp, Homo sapiens
aaaggaaacgagtggaatggaatggaatggaatggcttgaaatggataagaaatgaaaagaatgtaatggaatcggatggaatggaattgaatgtattggagtcgagtagaacagaattgaatggaatggcatcaaacggaatggaaacgaaaggaatggaattgaatggactcaaatgttatggaatcaaagggaatggactcaagtagaatggactcaacagaaatggtcttgaatggaatttattcgartataatttaatcgaatggaatgcaatagtatggaatggaatcgaatggaacggaatcgaatggattggaacgaaatcgaatggaacggaacagaatagactcgaatgtaatggattgctatgtaattgattcgaatggaatggaatcgaatggaatgcaatccaatggaatggaatgcaatgcaatggaatggaatcgaatggaatgcagtggaagggaatggagt

SEQ ID NO: 566201 - DNA, 478 bp, Homo sapiens
aaaggaaacgagtggaatggaatggaatggaatggcttgaaatggataagaaatgaaaagaatgtaatggaatcggatggaatggaattgaatgtattggagtcgagtagaacagaattgaatggaatggcatcaaacggaatggaaacgaaaggaatggaattgaatggactcaaatgttatggaatcaaagggaatggactcaagtagaatggactcaacagaaatggtcttgaatggaatttattcgaatataatttaatcgaatggaatgcaatagtatggaatggaatcgaatggaayggaatcgaatggattggaacgaaatcgaatggaacggaacagaatagactcgaatgtaatggattgctatgtaattgattcgaatggaatggaatcgaatggaatgcaatccaatggaatggaatgcaatgcaatggaatggaatcgaatggaatgcagtggaagggaatggagt

SEQ ID NO: 566202 - DNA, 436 bp, Homo sapiens
gaatggaatttattcgaatataatttaatcgaatggaatgcaatagtatggaatggaatcgaatggaacggaatcgaatggattggaacgaaatcgaatggaacggaayagaatagactcgaatgtaatggattgctatgtaattgattcgaatggaatggaatcgaatggaatgcaatccaatggaatggaatgcaatgcaatggaatggaatcgaatggaatgcagtggaagggaatggagtggaatcaagtggaatggaacggaatggaatggaattgaaaggaatggcatggaatcgaatggaatggactggaatggaatggattcgaatggaatcgaatggaacaatatggaatggtacccaatgtaatggaatggaatggaacggaacagaatggaatggaatggaatggaatggaatggaatggaatgg

SEQ ID NO: 566203 - DNA, 478 bp, Homo sapiens
aaaggaaacgagtggaatggaatggaatggaatggcttgaaatggataagaaatgaaaagaatgtaatggaatcggatggaatggaattgaatgtattggagtcgagtagaacagaattgaatggaatggcatcaaacggaatggaaacgaaaggaatggaattgaatggactcaaatgttatggaatcaaagggaatggactcaagtagaatggactcaacagaaatggtcttgaatggaatttattcgaatataatttaatcgaatggaatgcaatagtatggaatggaatcgaatggaacggaatcgaatggattggaacgaaatcgaatggaacggaacagaatagactcgaatgtaatggattgctatgtaattgattsgaatggaatggaatcgaatggaatgcaatccaatggaatggaatgcaatgcaatggaatggaatcgaatggaatgcagtggaagggaatggagt

SEQ ID NO: 566204 - DNA, 436 bp, Homo sapiens
gaatggaatttattcgaatataatttaatcgaatggaatgcaatagtatggaatggaatcgaatggaacggaatcgaatggattggaacgaaatcgaatggaacggaacagaatagactcgaatgtaatggattgctatgtaattgattcgaatggaatggaatcgaatggaatgcaatccaatggaatggaatgcaatgcaatggaatggaatcgaatggaatgcagtggaagggaatggagtggaatcaagtggaatggaacggaatggaatggaawtgaaaggaatggcatggaatcgaatggaatggactggaatggaatggattcgaatggaatcgaatggaacaatatggaatggtacccaatgtaatggaatggaatggaacggaacagaatggaatggaatggaatggaatggaatggaatggaatgg

SEQ ID NO: 566205 - DNA, 577 bp, Homo sapiens
atcacacaagctactaaagactctcctgagatgtgatagttcccaacaaaaacattatgtaaggtctatctatgatatatattttattcctattttccaacataaatgcaatcaagcattttcatcatcaacatctttacagatatcttccttgccttcctctaatcatatccccagcatcttatccctatacttcctccatggacctcataaatggctagtgaggtagactataatggaatggtcatccatacatttattcytttgttcaaacatcacttaccaagtatgtccaattgctaggatttgagctcaaccccggaaatacaaatgcagatcagccttcatcccagtccttgaagtgttcacagtctaattgttgagtgtcgcaagacatgagattggtggtggaggcagggggtggtagagtctatcactttagatgttaaaatagatgagttttcagtttaaactttgagagctacagaaagctactccaaccagaaatccaaaagaattgagtgggaaacagcatccaacaagggagactaccaaagagtgaagtaaaaatacatct

SEQ ID NO: 566206 - DNA, 580 bp, Homo sapiens
aatgcccttataggagtcattagagagcttgctgcttactgctctctgctctccaccataaaaggatacagcaaggatcagcagtctgcaaccctgaaaaaggagctcaccagagttccaccatgctggcaccctggtctcaggcatctaatctcagaactgtgagaaataaatttctgttgttcattagccacccagtctatggtagtgtgtgtgtgtgtgtgtgtgtgtgtgtgtgtgtgtgtttaactttaaaaatcttgtacatgctttatttgtgttttttaattttttaatcatcttgaaaatgggaggatcgcttactrtaaagtgagtgccttataaccattgctgccttattctaaaagataaatcactatggattgcatacagcttcaaataagaaaaaaaatttgtaacagtacattataatttttataggacattgttatggactgataacagatacagtaagacagctagctgaaagaggcataatcctagcatctactattatttagatagaatctatctatctatctatctatctatctatctatctgtcatttttcttgaaaca

SEQ ID NO: 566207 - DNA, 574 bp, Homo sapiens
gttttcatctttgtgcttgcctgggktactaaattttttatctggattatggaaaactcatgaagatattttagttttcatattgtggttaaatcagtgtttctatggactttttattctgccatcttgttgactcacataatattttcttagtctttttcatctattaaataaagttggaagtgactttcagaaagcttttttttattcatagtccatttttgcttttattctctatgatactgtaacacctgcaatacacttctattgtagccacagtaacacaatttatcttctaaattgtggcactttggagagtaaaaacagatgcttattgtgaatgtccagaatgcaatttttatttatcacatttacttaataatggtatctaattctaatcattcttgtcttttgaaaatgatgataatgtttttattttaaaaagtgagcatcactatagggtagccttaaattgagctctcaagatcttattcactatccacaggaggccaagagcttggtatcaaacacctgtagaccatttggtattgaaaagagttgcaaaggctacagt

SEQ ID NO: 566208 - DNA, 634 bp, Homo sapiens
atattaaaatgtttttagtaatcaaaggcaatgctactagcaacataggactccagatactgaaaattactgagggtactacatccatgtgaaaattattggtgctgagaaaggcagataatatgagatatactggttggaaggacagagcasattaaagttatagattatatcttctgtttgtgagaaatgtccacaacatacagcttgaacccaggttctctaagccacatccacactacattcctcttagtttcccatgcaaacaatttctgtttttccctgacctgctgcagagaatgtcccccttcatggaacaccatggacacaccaccaccaccacctcctgctcccccatcatccattggccaactgttattcttctctcaattctcaactacaacaccatttgcttggtgaggccttgtctgactgtttaaaataagcttgggtgctcttgcgtaccactgcccaaaattttctgtcttccccctttctgaaccatctactcataagtacttatctaatttttggctcccctagaatggaaggtcagagtacagtcaccatgtcgatcttgagcaatgaatatactccacacctcccccatagtaaatgctcaacaaatattgaa

SEQ ID NO: 566209 - DNA, 634 bp, Homo sapiens
atattaaaatgtttttagtaatcaaaggcaatgctactagcaacataggactccagatactgaaaattactgagggtactacatccatgtgaaaattattggtgctgagaaaggcagataatatgagatatactggttggaaggacagagcagattaaagttatagattatatcttctgtttgtgagaaatgtccacaacatacagcttgaacccaggttctctaagccacatccacactacattcctcttagtttcccatgcaaacaatttctgtttttccctgacctgctgcagagaatgtcccccttcatggaacaccatggacacaccaccaccaccacctcctgctcccccatcatccattggccaactgttattcttctctcaattctcaactacaacaccatttgcttggtgaggccttgyctgactgtttaaaataagcttgggtgctcttgcgtaccactgcccaaaattttctgtcttccccctttctgaaccatctactcataagtacttatctaatttttggctcccctagaatggaaggtcagagtacagtcaccatgtcgatcttgagcaatgaatatactccacacctcccccatagtaaatgctcaacaaatattgaa

SEQ ID NO: 566210 - DNA, 617 bp, Homo sapiens
attatcatgcttttcctgacttccttttcttctttttgcctccaaatgctttagccattataatttgtggtctgaatgccaattttactactgccactaatctgcattgcacagaatgttgatttgtcaaagtagactcaggcacatcataaatccctcccaccaaaatttgctaatgcttgttgtattcacttaataaagcaccacaagttgggtggcttaggataagagtaatgtatctcctataattctggaggccagaagtctgaaatcatgtttctgtagggccacatgctaagtaatattctagggaaaattttttccatgcctttctcttagtttctggtgtagctggcaatccttgatgttctttagtttgcagatgaataacaycaacttctgcctccattgttacatgatattctccccctacatattcatatcattttttaataaggacataagtcatactgaattaagggcccattctactccagtaagactttgttttaactatttatgtctgtgagactctattttcaaataagtttgcattctgtggtactgagagataggactccaacttttacttttgctggatgcagttcaacctataa

SEQ ID NO: 566211 - DNA, 586 bp, Homo sapiens
  misc_feature 118: n = A,T,C or G
aactacattttgatctatgaattttttttatgagaagatatctattatattcagagaggtctttgattatcactatactatatagtactatctaactcaaaaacatttttctctttanaaagaataaggactgggaaattagctacaatttccagccagggatttaaaggctaatttcaaggcacttcaacaggttgagttaacacagcagataagttcttctctataaatttcctactgacatgtttcgtgatacaacaagcctcatctgaaaagcaggtaactttttcttcttttatctgagcagaagcatgattgcattttttaaaagtaccctgtctatggaaaaccaatttagtttcattaatgaaaaggaagcacaatgtgattgagaatgtaatacggaattatagttcattaattcttcaagtatgtaattttccaggctcctgatcccccattgatttctgcacacccccacaggtcccactaaatgtgagcaaaaggaaatttaatcgtgttgctatgtcatgtgtggcgatgctggtgctccmcaattaggcagaaacattgtgagagggatttt

SEQ ID NO: 566212 - DNA, 517 bp, Homo sapiens
gggtagaaccacagcgacaagtggatagtatcaggggtaggttttgactyattatgactttctactaagcagaaagaactgcacaggttttgattaggctgccaagtagaaatattctgacataagctggttatgttgtagagaattaaacaaagagtgccccactgggccacatggaccttcgcatcccatccaaaatttattacagagttaagggatagaccctgccttaaaagggcttacaatccaggaaatggatgatgatcattatcactgtcaaccagttagctgccttctatatttgaagccagcatttcacaagcagcattgcttaaagagcaatatctctaatagaggttcatggttccttgaaaacaaaatattacatggtcaaataagtttcaagaccactatattactatagttcttcctagttgccttctaaacactcataatgtacataagctaattatgagctctgagacactttaaaaaaaaaaacttcattcatttactc

SEQ ID NO: 566213 - DNA, 597 bp, Homo sapiens
tgctgcagacactaggaaaattattcttccttgcatcttccagcttctggtggccccaggcattctttggctatggctacataactccagtgtacacctacataactccagatgaagaatgaagcattctttacttccccaactcctcccccatctgtgcagacttgatttctatataaaactccttattcccataatacttgtagtggcccaattttcctgactgaatgcagactgaaacaggaaagtctggagacctgaggatgtggtggagagttgatttacattcttcaccaggctttctctgtgtttcttttgtgttcttttcttacgaaaacaccagtcactggatttgggrcccatcttaagtccagggtgattttatcttgagtttatcacctaatcatatcttcaaagaccctttctctaaataaggtcatattctgaggttccaactggacatggttttttaagggacactattcttctgcccactacagatagttttcaatgtactagtggcatttggatatttaaagcctttaaagccctggtactaaatgaaatcactaagaatttggtagctacaaaagaaaa

SEQ ID NO: 566214 - DNA, 616 bp, Homo sapiens
tggacttttcagttaatgctgaaatgagttaaractttgggtactgttgtgaaggcatgattgggattgaaatgtaagcatatgagatttgggaggggtcaggggtgaaatgatatggtttggctgtgtccccacccaaatctcatctttaaaagtagctcccataatccccatgtgctgtggcagggacccagcaagaagtaatttaatcatggagacaggtttttcctgagctgttctcatgatagtaaatgagtctcatgagatctgatggttttataaacggcacttcccatgcacatgctctcttgcctgccaccatgtaagatgtgcctttgctcctactttgcttcctgccaagattataaggcctccctagccatgtggaactgtgagtacattaaccctcttttgctttataaattacccaatctctggtatgtctttattagcagcgtgagaacagactatacggtgtgccttatagaatgttttttctatagccattgaaataatcatttgaaaaatcaactaatttcatgaacaatattgatagtacatagatttctgctactgatcattattttatttctggaatatatagtaccttatcatc

SEQ ID NO: 566215 - DNA, 204 bp, Homo sapiens
gggttggctccaccgcatttctgtggctgtcagtggccttggcaagctgataggcgcatcaaaacctctttggtrtaaaagtccagatgagggagatcagagagtgtgtgggtgcagagcctctggggaggacgggtttgcaggctacactgtgttcaggtgcccaggtcagtagggatccttccctgcaggtggcctctgaga

SEQ ID NO: 566216 - DNA, 576 bp, Homo sapiens
tctctacctttgatctttgaggctgatgatctttggatgaggwttttgtatggggttcctttttgttgatgttgatgttattcctttctgtttgttaatttttcttctaacagtcaggcccctcttctgtaggtctgctgaagtttgctggaggtccattccagaccctatctgcttttttgtccagtggaacctgcagaacagcaaatattgctgcctggtccttcctctggaagcttcatcccagaggggtgccggcctgatgccagccagagctcttctgtatgaggtgtctgtcaactcctgttggaggttccttccagtcaagaggcacaggggtcagggacccacttgaagaggcaatctgccccttagcagagctcgaacacagtgctgggagaaccctctttgtcaggatccactgctcccttcagagccagcaggcaggaatatttaagttcactgaagttgtgcccacagccaccccttccaccaggtgctctgtcccaggggctttatctataagcccctgactggggctgctgcctttctttcagagatgccctgcccagtgaa

SEQ ID NO: 566217 - DNA, 642 bp, Homo sapiens
gtgtgtttatgtgtgtgcatatgtaaaatgtgaatatacatatatttgtgagtgatatatatgttttcctctttctttacctgcttccttccttactaaagtaattagaagtctttaaaagaaggagaccaaataacattgaaataatttcttaagagaaaattaacattcaatagattaatacattttctggagcatctaaaattcactttccctccccacaaaaggtaagatagtctatatattgaagagccataatcatatacatccatttcttctgattagtaactacaatatttattaagtaagcatggacgtttatttggctctgtagctacctatttcatgttcttttggaatcacagctttctttatatgtcatartgaaaatcaatatttgaaacttcttcctctggaaaaacatataatttcctttataggagatttaactacttaaatagttctgcttatgcaggtaagagaaatattctaagaaaaaatgagagatctgctgtataaagcctttattgatatgagttattatttaaggaataaaaaaaattaaagctctgatgctgcaaacaaagctccttgatgagaactgagttcatgctgagataaaaagttacaaagcaagagaac

SEQ ID NO: 566218 - DNA, 454 bp, Homo sapiens
gaccattaaattattttgaggttaataacatgtatattgatgtcaccttaaaacaaaggaaggatgagaaacgaagatgatacaagaggtagatttcaccttttttttaactcctttaacatatcattctgcatctatgaaagattttttgaagaattattttaagctcatcctccctctcttctccagctttgctgcttctcatttcttactctttcctgtcaccatttctccttaccaagaagttgggggaaggagggaaaatgaccacgtaaagctgtgttagtttgttgtaaactcattaagcattcattatttggctgggtgcggtggctcacacctgtaatctcagcactttgggaggccgagctgggtggatcacctgaggtcgagagttcaagaacagcatggccaacatgggkagaccccgtatctactaaaaatacaaaaatta

SEQ ID NO: 566219 - DNA, 637 bp, Homo sapiens
tcttactataaccctaaaaaggaaggtattatttgtcctacttaaggaatgaataactcaaagataagagagtccattaattttcacatcgaagtggggacacaagattcatggttttttcttccactatgctagactgcttttaactgctataaaaatgtaaaatctccatttagccatgggattcagtaaaaatgcatgtccactttctcaagtctttctcacactcacccagttttttgtgtcttgctactttacttgtttgttaactcctaatattacttagtaagagtaaagatatcttagaatttaggaagtctttgccactccttgggaatattactttaatcctcctaacattcaggacctcatgtgtaaaatagggattacattcgtacctatctcatgggattgcaattagaataatatgatattacttaggaaaatgtaggcataaggactaaaataaggctgacacccagcaatgaatgttaaattcccttcatctttaatgggaactttctcaaactcagtcttctttcatcttcttttataagaactttgcccgcattatcacattcatactatctgagatggacctgaattmttaagttaacaaaatgccaatatactatta

SEQ ID NO: 566220 - DNA, 508 bp, Homo sapiens
aaatttttttcatgaaagatattactgcgacaattattgaaagtggattatggactgcagattatgtggaagtgttaaatttaatgttaaatatcctcattttgataactgtttagttttatgtgagaaattgtctttgattttaggaaatatgtattaaagcatcaagaaataaaaaagcatgttgtcctcaacctaccatgtaatagttcagacaagaaaaatagactagtatagcaaaatggtaaaagtcaatgaatataggtaaagagtgcatgaaagtttttgtaytattcttgtaagttttctgtgaacttgaaattattacacatatttttaaagttaaaaaggaacaaacttctagatttgtttgcaggtctacagggcccattttagtgagctttctgcttttggaattcactgaaccacatgggggcactaaatcctatgttcctatacaacatcaaactccaggggtcccatgccaacatccgcatgaacttcaaca

SEQ ID NO: 566221 - DNA, 538 bp, Homo sapiens
ggacattttatttcctcccgttatcattgcaactggtttgtccacctaatgagacactacctggtgtagaattagggtccacaggaatatcctaaccccatatagatctgaggctgtgatacatcaattggcaaakaattttagcttcccccaaacagctgagcttaacttaatgtaaaacaattggggtgcattgaatacattttcttgttgtagacttatgtacagaaaataaccacgagagttattatttaatggacactttttccacattactactgaaaaataccatattccaccccatccccacctcctcatacaggataatgttcattaaaagggctgcatttttttaattatcaaaatacagatgaaacaagaaaaaaatatacttaaggctaggtttgaggaaaaaaaggacattggcaatataacgttttaaggtgttacctgtgtacagaaagatattcaaactgcataaaagccctgtctgtaagaaaaggccaaactatacaaatatattttaagcagattgagt

SEQ ID NO: 566222 - DNA, 479 bp, Homo sapiens
tttttaaagcctcagagcccctaataactaggtaattgccttttaattccaaactatgatttgcttctttatctttctcccttgttctcgtcacctcagacattttcatagctcctggtctcagctatccaagcttgtaattagttgctctttagaataggctcgttaatcctttttaatatttycctgctatttgctccggactctaaatgtttctacttggcccttctttaggccaaaccatttcttctgctgtctagagctcaaaacctttgtgtggactaaacagctgacaggcttttcaaatgagtctaactcatagctaatttctacttattcactcagggcttcttctgagtgaatgaacattaccttggactacctgtttctctcatagtccacataataattgcttctgataacaaaataagcattttttctttaaaaaataactaaattgttttcttctttcagatgca

SEQ ID NO: 566223 - DNA, 479 bp, Homo sapiens
tttttaaagcctcagagcccctaataactaggtaattgccttttaattccaaactatgatttgcttctttatctttctcccttgttctcgtcacctcagacattttcatagctcctggtctcagctatccaagcttgtaattagttgctctttagaataggctcgttaatcctttttaatatttcyctgctatttgctccggactctaaatgtttctacttggcccttctttaggccaaaccatttcttctgctgtctagagctcaaaacctttgtgtggactaaacagctgacaggcttttcaaatgagtctaactcatagctaatttctacttattcactcagggcttcttctgagtgaatgaacattaccttggactacctgtttctctcatagtccacataataattgcttctgataacaaaataagcattttttctttaaaaaataactaaattgttttcttctttcagatgca

SEQ ID NO: 566224 - DNA, 479 bp, Homo sapiens
tttttaaagcctcagagcccctaataactaggtaattgccttttaattccaaactatgatttgcttctttatctttctcccttgttctcgtcacctcagacattttcatagctcctggtctcagctatccaagcttgtaattagttgctctttagaataggctcgttaatcctttttaatatttccctgctatttgctccggactctaaatgtttctacttggcccttctttaggccaaaccatttcttctgctgtctagagctcaaaacctttgtgtggactaaacagctgacaggcttttcaaatgagtctaactcatagctaatttctacttattcactcagggcttcttctgagtgaatgaacwttaccttggactacctgtttctctcatagtccacataataattgcttctgataacaaaataagcattttttctttaaaaaataactaaattgttttcttctttcagatgca

SEQ ID NO: 566225 - DNA, 554 bp, Homo sapiens
ttcaaattgctatctttagttctatttgaagcctatggatatagttttatctaaaaaagtcttcttgcttagtctgttcacaacttactttggtttcgaaggaggcatttggcaaaagttaaatgtggctgattacyacgattacttctcgagaccctcactaagacagttactacttgaatctatcattacaacagttactattgttactacttgagaccttcattatgagacgaaaagaaagaacatagaaatgaaaacttaagacaaaagaaactattttaaaggaaagatccagagaaaaaagaaaggagctccccgctttcagtgagcaaaggcaacctctgagcgtctaccgcccttcctatttattgtgtagcaagagcagggcggagcaggtaacgattggtcggctgcttaattgataacaggtttatattattactaacaggcttcagatgtgcctaatggcaagaaacactgcacttggggcgtgactgccctcggcattccttctgggtggcagactcaatttgtcagtttgctgacatttt

SEQ ID NO: 566226 - DNA, 554 bp, Homo sapiens
ttcaaattgctatctttagttctatttgaagcctatggatatagttttatctaaaaaagtcttcttgcttagtctgttcacaacttactttggtttcgaaggaggcatttggcaaaagttaaatgtggctgattaccacgattacttctcgagaccctcactaagacagttactacttgaatctatcattacaacagttactattgttactacttgagaccttcattatgagacgaaaagaaagaacatagaaatgaaaacttaagacaaaagaaactattttaaaggaaagatccagagaaaraagaaaggagctccccgctttcagtgagcaaaggcaacctctgagcgtctaccgcccttcctatttattgtgtagcaagagcagggcggagcaggtaacgattggtcggctgcttaattgataacaggtttatattattactaacaggcttcagatgtgcctaatggcaagaaacactgcacttggggcgtgactgccctcggcattccttctgggtggcagactcaatttgtcagtttgctgacatttt

SEQ ID NO: 566227 - DNA, 626 bp, Homo sapiens
actgactagccatatgcagaagaatgaaactggaccctatctcttagcatgtacaagaattagctcaagatagattaagacttaaatggaagactgaaactataaaagtcctggaaaaggcataggaaaaattcttctggacattggcctccacaaagaatttatgacttaagaccttaaaagcaaatgcaacaaaaacaagaacagacaaatgtgacttaattaaattataaagcctccacacagccaaagaactatcaataaacaacctatagaactggagaaaatttttgcaatctacccatctgacaaaggtctactatccagcatttatacagaacttaaatttataagaaaaacacaacccagttagaaagtgggcaaaggacatgaacagatacttttcaaaagaagacatacagatggccacaagcatatgaaaaaatgctcaacatcactgatcattagagaaatgcaaatcaaaattacagtgaggtaccatctcacaccagtcagaatggttactatgtaaaagtaaacagcaacaacaacaacaacaacaacaacaaacacatgctggcgaggttgcagagaaaaaggaacrcttgctaatacattgttgttgg

SEQ ID NO: 566228 - DNA, 557 bp, Homo sapiens
tccaagaacactaattggggaagggacagtctctttaataaatagtattgggaaaattgaatattcatacacagaaaaatgaaactacatctctctcaccatacaaaagccaactcaaagtggattaaagacttaagtgtaagacctgaaactatgaaactactagaagaaaacacatgggaaacccttaaggacattggtctgggcaaaaattttatgaagaaaatctgaaaagtgtargcaaaatatagagtgcaattaacatcttcacaatgtaaaaatagacaagtaggattataccaaactaaaaagcttctgcacagcaggagaaataatcaacagaataaagagacaacctgaagaatgggggaaaatctttgcaaactgctcatttgacaagggattaatgtccagaatatacaaagcactcaaacaagtcaacaacaaagaaacaagtaatgggatcaaaagatgggccaatgagctaaatagacatttttaaaataagacatacaaatggccagctggtataaaaaaaaattctcaacatcactaat

SEQ ID NO: 566229 - DNA, 586 bp, Homo sapiens
agtgttctgaagatcatacatgaactgaaaatgcaggcgaaaaatacaagaaatctccawtgccaaattagtcaatcatgtgtgacttctgacccttcacgcatagcatctatttgctatgctatgtatttcatctttgcatcatcttcaatattggaggtagaaattgtgtagacctttagagaattctaatttgttgtatgcattttttttcaagtttgactccataaaagtgcattatcacaatgttggctttgtgtgtaagtattgtgtatgtatataaaaatgtctaaacttcctcaagaaatgaagagatggctgagcgcggtggctcacgcctgtaatcccagtactttgggaggccaaggcaggcagatcacgaggtcaggagatcgagaccatcctggctaacatggtgaaaacccgtctctcctaaaaatacaaaaaattagccaggtgtggtggcaggcacctgtagtcccagctacttgggaggctgaggcaggagaatggcgtgaacccgggaggcagagcttgcagtcagccgagactgcaccactgcactccagcctgggcgacagagcga

SEQ ID NO: 566230 - DNA, 601 bp, Homo sapiens
aaggggtcttttcccagctttctcagttsctgggtaaactggcttcctgacctaaacgggtcctaggtccatctcatctctttaaattcaaactgctctcaaatacaaactcagtggtcctctctggcctcttcccacagatgtttctcaaacccattcatctaaggctgagcacacagcctacttagcttccccgagcaaagcctctagtctagacaaggccacagttaatacaggagtcacccctatgagacatacttctttataatctttctcagtgtgttaggactttttcagatgcaaataacagaaacctgatccaaattagcttaataaagaaaaaataactctgcagaaaattccagaaatagatctcactgctcccagcacacaggtgatgccatcagaactcagcctcatgttccatcttgactctgcattcctcaatattggctttgtttagacaggcctccaaatagctttggctcgtgtcctcagcagaaagagagatccccttcattctaacataagagcccagagctgagtctcagagctcaggtggatcacatgatcacctctgaaccaatcactatggcctggg

SEQ ID NO: 566231 - DNA, 526 bp, Homo sapiens
ccaaactttataacctctctattttaaaaagtcrgctgatgggcaacctaaattcagtctgcaatctcattttctctgtgccacatcatttaacctattcacaggattcagggattagaatatggacatttggccggggaatggggggtattattctacctctcacaccgagtaaaagggactgtagtgctcccacatctacacacggggctcaggctcccatttgggagctggagcttggtgttctcattttcgtttgccgccttgggcaggtccttttcctcctggaccccagcatccccttctgtatttaaacaagtgggctagatgactgctgtattcattagtgtaaagttgagctctgaaccatagagacccagcaagaactcagttgctttaaaaaagacagtctgatacatcaatccaagatgaacattctgggtgtacaaaggctgtgctccatgtggtcattcagggatggaggtgattttcatctcatccctctgttgtaactcagggacttgct

SEQ ID NO: 566232 - DNA, 579 bp, Homo sapiens
ttcttcattctttttctgggagtacctggtgacatttgtggagaaaaacctgaaaaaggcaatttcaatgccccaaggagcttcccattcttacaccagctccccattggcctctaccacatccccaaccaccccattgaactccttttacttgtgttcagtcgaatccacctgtgtatgccagtatatgcatttctcttcctggggcacctgtttctccttagactaggagccagctggttgccctgcaaccttagttccttgatgggttcaaggaaatgcataaatttgcagtttgtctggtttggtaagaataagagcaaaattctttccagctgtttatttatttatttatttwttttttttttgtttgtttgtttgtttttttattttttattttttttattgatcattcttgggtgtttctcgcagagggggatttggcagggtcataggacaatagtggagggaaggtcagtagataaacaagtgaacaaaggtctctggttttcctaggcagaggaccctgcggccttccgcagtgtttgtgtccctgggtacttaagattagggagtggt

SEQ ID NO: 566233 - DNA, 570 bp, Homo sapiens
taactttatttcttaattgttaatatgttggggaaattatcaataagtatagaaaatgacaaagttattgtttctgaaaaactatgaaaaagaggatagccttacttatgcagagcctattaaaaagagagtaytttttcttcttaaaatgcatagcttgaccagctccatttaacactgttttttaaaagacgtgttaatatcctaatggtataaatgaattcagtcatgactagttgagtcaaagagatttaaaaattatttgaactgttttatcaaatttctagctcattgtttagtgctagatattcacaaaacaaatagttaagttcctaagattattgttgcaaactgtgggaactaaaagtctttaattacattactttgaaagcaaaaagtgatttccatgcaaaatattttaaaggatttctacccaatgtcaaattttctcatctattcatttaataagaattgattaaatatctgttgtgtcttaaaaatcaatgacgaataacatcctaaacttcagcaagcatatggttgaacactaaataaagaacaaaaaccaag

SEQ ID NO: 566234 - DNA, 570 bp, Homo sapiens
taactttatttcttaattgttaatatgttggggaaattatcaataagtatagaaaatgacaaagttattgtttctgaaaaactatgaaaaagaggatagccttacttatgcagagcctattaaaaagagagtactttttcttcttaaaatgcatagcttgaccagctccatttaacactgttttttaaaagacgtrttaatatcctaatggtataaatgaattcagtcatgactagttgagtcaaagagatttaaaaattatttgaactgttttatcaaatttctagctcattgtttagtgctagatattcacaaaacaaatagttaagttcctaagattattgttgcaaactgtgggaactaaaagtctttaattacattactttgaaagcaaaaagtgatttccatgcaaaatattttaaaggatttctacccaatgtcaaattttctcatctattcatttaataagaattgattaaatatctgttgtgtcttaaaaatcaatgacgaataacatcctaaacttcagcaagcatatggttgaacactaaataaagaacaaaaaccaag

SEQ ID NO: 566235 - DNA, 570 bp, Homo sapiens
taactttatttcttaattgttaatatgttggggaaattatcaataagtatagaaaatgacaaagttattgtttctgaaaaactatgaaaaagaggatagccttacttatgcagagcctattaaaaagagagtactttttcttcttaaaatgcatagcttgaccagctccatttaacactgttttttaaaagacgtgttaatatcctaatggtataaatgaattcagtcatgactagttgagtcaaagagatttaaaaattatttgaactgttttatcaaatttctagctcattgtttagtgctagatattcacaaaacaaatagttaagttcctaagattaytgttgcaaactgtgggaactaaaagtctttaattacattactttgaaagcaaaaagtgatttccatgcaaaatattttaaaggatttctacccaatgtcaaattttctcatctattcatttaataagaattgattaaatatctgttgtgtcttaaaaatcaatgacgaataacatcctaaacttcagcaagcatatggttgaacactaaataaagaacaaaaaccaag

SEQ ID NO: 566236 - DNA, 591 bp, Homo sapiens
ttacttgtctttagggacctggatctaacttagtgctgttgcttctgtttcttcccttttgtcctcctcttctttttctcctttgtgttctgttttactttttaaaaatagatgccacaactctgatttttaatctgattgtgtaaatgatccttaatagtaaaatcaattttaatatcttayaaaacagaagcacagcaaagcattttgcagaatttaccataaagtaaataataaccattcctagtatgataatgctgcaactatttttctttcatcctctgcaacatttttatctgacacagtctctgctgtttccaagttcaacgtcctgcagcaagccttgccagcaatacagaatactttcaattagtagttctctacttctctggtagctaagcaactgacctgtggtgaagaatacataatgatctgcatagacaccttagagcaatagaaagtacaagcttcacaatttcatttgctctcttgtgttgatgttacaataaccagttaaatgcatggaaatatttgatagtagtttgctataataaactttaataaagattaaaagaagccttggagaaaggt

SEQ ID NO: 566237 - DNA, 478 bp, Homo sapiens
aaaataagcaatcagaaaagttcatacagatattgttacttgtctttagggacctggatctaacttagtgctgttgcttctgtttcttcccttttgtcctcctcttctttttctcctttgtgttctgttttactttttaaaaatagatgccacaactctgatttttaatctgattgtgtaaatgatccttaatagtaaaatcaattttaatatcttacaaaacagaagcacagcaaagcattttgcagaatttaccataaagtaaataataaccattcctagtatgataatgctgcaactatttttctttcatcctctgcaacatttttatctgacacagtctctgctgtttccaagttcaacgtcctgcagcaagccttgccagcaatacagaatactttcaattagtagttctctacttctctggtmgctaagcaactgacctgtggtgaagaatacataatgatctgcatagaca

SEQ ID NO: 566238 - DNA, 566 bp, Homo sapiens
tgaggaaaggacctcagagcttgaaaactggctctcagaaataagacagtcgggcaaaaataaataaaattttacagagctcattgtattagattaggtacacttggataatcttcctgtcttcacatcaactgattattaacattaattacatctgcgcaatccattttgccatgtaatacaatataatcatcaaagtaacactgggaggctaaggtyatgaccatctaatattctgtataccacacaattgtattgctttctgaggtcattgaacactttcagaattcatgaaaggtggatactcactataaataagatagatatggctagcaagaagaaaaatatagggattctatacttaaaagatacagctatttccatttatataattgtcacaataaaaatttaaatgtgaataagtgaatagcaagtatagaaagtttagcaaaataatgagaattagatatataaatgaatttttaagatagtctcagaaaaagtgtaatatttgtcatttatcctgaaatgtcaaaaattttcctaagcagaactactcaccacca

SEQ ID NO: 566239 - DNA, 566 bp, Homo sapiens
tgaggaaaggacctcagagcttgaaaactggctctcagaaataagacagtcgggcaaaaataaataaaattttacagagctcattgtattagattaggtacacttggataatcttcctgtcttcacatcaactgattattaacattaattacatctgcgcaatccattttgccatgtaatacaatataatcatcaaagtaacactgggaggctaaggttatgaccatctaatattctgtataccacacaattgtattgctttctgaggtcattgaacactttcagaattcatgaaagktggatactcactataaataagatagatatggctagcaagaagaaaaatatagggattctatacttaaaagatacagctatttccatttatataattgtcacaataaaaatttaaatgtgaataagtgaatagcaagtatagaaagtttagcaaaataatgagaattagatatataaatgaatttttaagatagtctcagaaaaagtgtaatatttgtcatttatcctgaaatgtcaaaaattttcctaagcagaactactcaccacca

SEQ ID NO: 566240 - DNA, 514 bp, Homo sapiens
tcgtgatctgcccgcctccgcctcccaaagtgctgggattaaattagatgtaaaatgttgttcaggtttattaaataaagaaagaaaaagattgttaactagatgtcttattttgtttttctctgacaayggctgtcttgtaaattggtatatttagatcatgcacatttaaagtaattattgggtggtaaaaaagttgggctggtatttattatgtttataactattttctattcatatcatttattctttgcctcccaacaatcactctttttcttatttctattgttttaattgacacttaaaataatcccattacatttcctctcctagcatgtcagttatactttagaacagttttagtgatttatgtgagtttgcaatacacatttttaactaatctcaatctacctttaaataagactttgaataactcaacacaaatatcactttacaagagtgttacagactcaatatttgtattcccctattcccccaaaatgtgtatgttgaa

SEQ ID NO: 566241 - DNA, 514 bp, Homo sapiens
tcgtgatctgcccgcctccgcctcccaaagtgctgggattaaattagatgtaaaatgttgttcaggtttattaaataaagaaagaaaaagattgttaactagatgtcttattttgtttttctctgacaatrgctgtcttgtaaattggtatatttagatcatgcacatttaaagtaattattgggtggtaaaaaagttgggctggtatttattatgtttataactattttctattcatatcatttattctttgcctcccaacaatcactctttttcttatttctattgttttaattgacacttaaaataatcccattacatttcctctcctagcatgtcagttatactttagaacagttttagtgatttatgtgagtttgcaatacacatttttaactaatctcaatctacctttaaataagactttgaataactcaacacaaatatcactttacaagagtgttacagactcaatatttgtattcccctattcccccaaaatgtgtatgttgaa

SEQ ID NO: 566242 - DNA, 607 bp, Homo sapiens
aaaattaaggaagaaatcaagacattctttgaaaataacaaaaagataaaacaagcaagaatctctgggacacagctaaagtggtattcagagggatatttgtagtcctaaatgctcacatcaaaatgatagatatcaaactaaaaacccagcattacaactagaagtaccagaggagcaaaagcaaacaaacctcaaaactagcagaagaaaagaaataacaaaaatcagagctgatatgaaggcgttcgagacataaaaaaaaaaaataaaaagatgaacaaatccaagagttggatcwttgaaaaaatcaataaatagatatatggatacctagacttttaagaaaaggagaagctccaaataaatactatcagaaatgacaaagaagatgttaccactgatcccacagaaaaaaaaaataaccaccgtaaactactttaaacacctctatgtacacaaactagaaaatgtaggaaaaattgataaattcctggacacatacatccacccaagatggaagcaggaagaaattgatccttgaacagaccaataatgagcttcaaaactgaatcagtaataaatagcctaccaaaaaaaaatgcca

SEQ ID NO: 566243 - DNA, 607 bp, Homo sapiens
aaaattaaggaagaaatcaagacattctttgaaaataacaaaaagataaaacaagcaagaatctctgggacacagctaaagtggtattcagagggatatttgtagtcctaaatgctcacatcaaaatgatagatatcaaactaaaaacccagcattacaactagaagtaccagaggagcaaaagcaaacaaacctcaaaactagcagaagaaaagaaataacaaaaatcagagctgatatgaaggcgttcgagacataaaaaaaaaaaataaaaagatgaacaaatccaagagttggatcattgaaaaaatcaataaatagatatatggatacctagacttttaagaaaaggagaagctccaaataaatactatcagaaatgacaaagaagatgttaccactgatcccacagaaaaaaaaaataaccaccrtaaactactttaaacacctctatgtacacaaactagaaaatgtaggaaaaattgataaattcctggacacatacatccacccaagatggaagcaggaagaaattgatccttgaacagaccaataatgagcttcaaaactgaatcagtaataaatagcctaccaaaaaaaaatgcca

SEQ ID NO: 566244 - DNA, 488 bp, Homo sapiens
tagaaaaactttaaaaataggtaatttaaatagaggtttcrgcagcatgctgatgctcctcagtaagaactagatggcatacataaagtcaaaagaggtttgactttgacttcaaaaacaattcaactagatagaaaggaaataataggtaatttaaaaattactatagccatcccacctaaattgaaatgcagaaatatgtagaattagaaagtaaagtatttatcaaaatataacggttgatccaaattattgcttttcttgtcagaaatattcaggaactaggaaataatagtcattactttcccaagtcagttattctttatgttcataagtaattgcttatttgctatagccaatactcatggaagcctttgtcttctgtgacatagcaggtttacagttctgcttcaaatttttgaagttttcactgttacattcactggctcattttatttcatgattttgagtctgggagacattccctt

SEQ ID NO: 566245 - DNA, 623 bp, Homo sapiens
aacccaaatacctaacagccaactgatctttgactaagcaaacaataacacaaagtggggaaaagacaccctattcaacaaattgtgctggaatagttggctagctacacgtaggaaatgaaackggatcctcgtctctcaccttctgcaaaaatcaactcaaaatggattaagaaattaaatctggctgggcgctgtggctcacgcctgtaatctcagcacttcgggaggctgagacatgcacatcacctaaggtcaagagttcaagacctgcctggccaacatggcaaaaccccatctctactaaaaaaatacagaagtaaaccaggtgtggtggcatgtgcctgtaatcccagcttgggaggctgaggcaggagactcgcttgaacccaggaggcagaggttacagtgagctgagattgcaccactgcactccagcctggggctacagcaagactctaagactctatctcaaaaataaataaacaaataaataaatgaatctaagacctgaaactgtaaaaattgtagaagataacattggaaacacacttctagacattggcttaggcaaggatttcatgacaagaacccaaaagcaaatgcaataaaaacaaagataa

SEQ ID NO: 566246 - DNA, 628 bp, Homo sapiens
catgcatattttatacaattttcataagaagagagttgagtagagagtcagtttatagtttagagaaaagagaaaaacaaggaaaaaaataaagagaatgcaaattttaaaacaaaagcaattcagaattgaaattatagaaattatctatataatgagaaagatgaaattgaaatctaagaaacayatgactatgacaaagcaaatgtatctttagatacaatatacagatatcaatagtttaagaaagtaatatttattttcttatttaaaatgttaagttaattaccacagagataaatttaaatacttgttaaactaatatagtgagctattctatagacaaacaatagaagaaatggggaaaggaaacaaactaaaaatgtgagtaaatgtataatatgatgtaaattggccgaactaagttaaatgtaacaataatgacaataaatgcaaataagttaaaagcagtaattaaaggatcctgacttttataaattttttaataagagccaaaacatgttgttgacataagttaaaatttaaaagaaaatatatatgtatataactactaacattaaaattattttataacacaccaggcttaaatactaaaaagctagagggg

SEQ ID NO: 566247 - DNA, 628 bp, Homo sapiens
catgcatattttatacaattttcataagaagagagttgagtagagagtcagtttatagtttagagaaaagagaaaaacaaggaaaaaaataaagagaatgcaaattttaaaacaaaagcaattcagaattgaaattatagaaattatctatataatgagaaagatgaaattgaaatctaagaaacatatgactatgacaaagcaaatgtatctttagatacaatatacagatatcaatagtttaagaaagtaatatttattttcttatttaaaatgttaagwtaattaccacagagataaatttaaatacttgttaaactaatatagtgagctattctatagacaaacaatagaagaaatggggaaaggaaacaaactaaaaatgtgagtaaatgtataatatgatgtaaattggccgaactaagttaaatgtaacaataatgacaataaatgcaaataagttaaaagcagtaattaaaggatcctgacttttataaattttttaataagagccaaaacatgttgttgacataagttaaaatttaaaagaaaatatatatgtatataactactaacattaaaattattttataacacaccaggcttaaatactaaaaagctagagggg

SEQ ID NO: 566248 - DNA, 220 bp, Homo sapiens
ttaataataggaactaaagataaagaatataggattttacaggaagtatctaacaatcatttcaatatttatttcttagtctattaaagatcattccttcaaatcctcagataagtaaattctatcagaattttaagaatctgttatttattatgctacttctgaatatrgaaaaacaaattgcctagctaaggctagcatatgttttattccaaaatca

SEQ ID NO: 566249 - DNA, 548 bp, Homo sapiens
aaaactgatgaaagaaaaaagctagttatttgaaaacatcaataatattgataaacttctatcaagattaactaaaacaaayagagatgacataaattattaataccagaaatgaaagagaggacatcattagtgatcccatgtacattaaaggatagtaaaggaatattatgaacaactttatgcacaaaaatttaatgacgagggtgaaatgtaccaattccttgaaggacacaatcaaccaaaactcacatgaggagaaatagataatctgaacaggcctttatctattaaagaaactgaattaataattaataccctgctaaatagaaagcaccagggctagataagttcactgctaaatcttaccaaacatttaatcaggaaattatatcgattctgcacaatcacttccaataataaaagtaaaaacaagttattctggaaagagggaccatggcacaagaaatgtttggcacagcacaaccagtccccagagaccaaagctaggccatatcttcaaagcccagagtgtgcatagcctgagt

SEQ ID NO: 566250 - DNA, 496 bp, Homo sapiens
taaaattaggaatttgtcagcaatagctcctcctgcctttatcatatgttttaaatgatttaacagtgacattttattgtattttcttttttattgagattcatttcctatcttgtctaatattctcctattctcctgatagtttacacacaattatcacaaaacactagcagttccaytaattttgtcttcactatcctcagagactttctgaggaaataataatagtgtttcttttatctttatctctggagcttagtagggtaccttgcccattgtagttgagaaatgataaataggaatgactgaaaaaaaatacatttgaaaacagcttgaacataagaagaagcttgagatatttataatatggacacttgtttttttcctaaagcaaagctattactattagttagagattatgtagattttaatttctttatagaagacaaaataaaactagtagattaaaaaagttagttcctgccactattcttcc

SEQ ID NO: 566251 - DNA, 496 bp, Homo sapiens
taaaattaggaatttgtcagcaatagctcctcctgcctttatcatatgttttaaatgatttaacagtgacattttattgtattttcttttttattgagattcatttcctatcttgtctaatattctcctattctcctgatagtttacacacaattatcacaaaacactagcagttccactaattttgtcttcactatcctcagagactttctgaggaaataataataktgtttcttttatctttatctctggagcttagtagggtaccttgcccattgtagttgagaaatgataaataggaatgactgaaaaaaaatacatttgaaaacagcttgaacataagaagaagcttgagatatttataatatggacacttgtttttttcctaaagcaaagctattactattagttagagattatgtagattttaatttctttatagaagacaaaataaaactagtagattaaaaaagttagttcctgccactattcttcc

SEQ ID NO: 566252 - DNA, 639 bp, Homo sapiens
aattacaaacgtttgggaacacttatcaataaaatgtataaaaccaattcattttctgccaataacatgatcatgtatgtctcaaatcacaaaagacgatgaattatgcaattatttttctcttgagatccttaaagattggagtaagaataaggaagttatattatttttccatagggactaaaacgtaatccacatgctttaatataatgggctgcttgtttgcctttctgtgagacaaggcaagcatatccaccatacacatggcattgatcagtcaataaatcttgctatgccaaaaccacaaatttaattggttcagcattagggatcccatatattagtttttctcacgaccaatcccrtttgggaagattctaatacatcttcaaatgcaacttctctattgtaaaactgataggtctagaaaatgtggagaaatacagtgggaggagaggaaaaggggagaaaagagagatgagagaggggagagggaagaatggggagagagacaatatatgtttttaaacatttggaaaccatttgcttccttttttcttttacataaggcaaataagacaatatgcatagaagtactttatgtttcaattttgagaggaataatttaagaaatgtgat

SEQ ID NO: 566253 - DNA, 490 bp, Homo sapiens
ggtgcttaaccattggtgaaggatccaccccccaacacacctccaccccctactgtttccagacagaagcctgctgcagaggcagagcctcttggaaatcctgttctgtggcagtgcagaaggaaaacaagggctttgagttgctctgcaggaggccgccctcctctagaccccagattcatagacctaccaacagttcacaccctcagtwtggaaaagccataggcactcaataccagcccagcccataagggcagccatgggggctaaagcctgcaaagccacaggtgcactgccctggtagaggttttccatgagcctctgcctctgcagcaggctactcccccttcctactacccaccaccctccgaccaccctacagccagcatactgttccccaccctacccaccccttttttcttccacccccacacctcccatccatgattaaataatctcccaccaggccccacctccaacatttgggatt

SEQ ID NO: 566254 - DNA, 490 bp, Homo sapiens
ggtgcttaaccattggtgaaggatccaccccccaacacacctccaccccctactgtttccagacagaagcctgctgcagaggcagagcctcttggaaatcctgttctgtggcagtgcagaaggaaaacaagggctttgagttgctctgcaggaggccgccctcctctagaccccagattcatagacctaccaacagttcacaccctcagtatggaaaagycataggcactcaataccagcccagcccataagggcagccatgggggctaaagcctgcaaagccacaggtgcactgccctggtagaggttttccatgagcctctgcctctgcagcaggctactcccccttcctactacccaccaccctccgaccaccctacagccagcatactgttccccaccctacccaccccttttttcttccacccccacacctcccatccatgattaaataatctcccaccaggccccacctccaacatttgggatt

SEQ ID NO: 566255 - DNA, 490 bp, Homo sapiens
ggtgcttaaccattggtgaaggatccaccccccaacacacctccaccccctactgtttccagacagaagcctgctgcagaggcagagcctcttggaaatcctgttctgtggcagtgcagaaggaaaacaagggctttgagttgctctgcaggaggccgccctcctctagaccccagattcatagacctaccaacagttcacaccctcagtatggaaaagccatagrcactcaataccagcccagcccataagggcagccatgggggctaaagcctgcaaagccacaggtgcactgccctggtagaggttttccatgagcctctgcctctgcagcaggctactcccccttcctactacccaccaccctccgaccaccctacagccagcatactgttccccaccctacccaccccttttttcttccacccccacacctcccatccatgattaaataatctcccaccaggccccacctccaacatttgggatt

SEQ ID NO: 566256 - DNA, 552 bp, Homo sapiens
aagggctgctgcagaggactgtgaaatgccttcgaggcctctttcccattgtcttggctatttgcactgggcttctttttatgcagatactctaagcctccttgaattttcccccggaaaatcagcttttctttttgaccactkggccaggctgcagattttccaaactttaagtctccacttctcatttcaatagaagttccaacttgaagtcatttcttaggtcacgcataagaacacaggctattcaatgcagacaggacacctcgctaggctgcctagatgttcattccaccagatacatcctaaatcatcacccccaaattcatagtttcatagatgtccagggcagggtcaccgtgcagccacgttctttgctaaggccaatcaaatgtaaccatggctcctgttcacaggaaattcctaatcttcatctgagaccttttaagtctggacttcagtgtttatccttctgtcagccttctgatcgcaagtatttaacaattctctacagtggtcaaattttcctcatcttgctgtcttccaagcttt

SEQ ID NO: 566257 - DNA, 552 bp, Homo sapiens
aagggctgctgcagaggactgtgaaatgccttcgaggcctctttcccattgtcttggctatttgcactgggcttctttttatgcagatactctaagcctccttgaattttcccccggaaaatcagcttttctttttgaccacttggccaggctgcagattttccaaactttaagtctccacttctcatttcaatagaagttccaacttgaagtcatttcttaggtcacgcataagaacacaggctattcaatgcagacaggacacctcgctaggctgcctagatgttcattccaccagatacatcctaaatcatcacccccaaattcatagtttcatagatgtccagggcagggtcaccgtgcagccacgttctttgctaaggccaatcaaatgtaaccatggctcctgttcacaggaaattcctaatyttcatctgagaccttttaagtctggacttcagtgtttatccttctgtcagccttctgatcgcaagtatttaacaattctctacagtggtcaaattttcctcatcttgctgtcttccaagcttt

SEQ ID NO: 566258 - DNA, 552 bp, Homo sapiens
aagggctgctgcagaggactgtgaaatgccttcgaggcctctttcccattgtcttggctatttgcactgggcttctttttatgcagatactctaagcctccttgaattttcccccggaaaatcagcttttctttttgaccacttggccaggctgcagattttccaaactttaagtctccacttctcatttcaatagaagttccaacttgaagtcatttcttaggtcacgcataagaacacaggctattcaatgcagacaggacacctcgctaggctgcctagatgttcattccaccagatacatcctaaatcatcacccccaaattcatagtttcatagatgtccagggcagggtcaccgtgcagccacgttctttgctaaggccaatcaaatgtaaccatggctcctgttcacaggaaattcctaatcttcatctgagaccttttaagtctgracttcagtgtttatccttctgtcagccttctgatcgcaagtatttaacaattctctacagtggtcaaattttcctcatcttgctgtcttccaagcttt

SEQ ID NO: 566259 - DNA, 519 bp, Homo sapiens
  misc_feature 480, 481, 482, 483, 484, 485, 486, 487, 488, 489, 490, 491,492, 493, 494, 495, 496, 497, 498, 499, 500, 501, 502, 503,504, 505, 506, 507, 508, 509, 510, 511, 512, 513, 514, 515,516, 517, 518, 519: n = A,T,C or G
atgtggatgatgttcaggatgttggtctggtgtccctgagacagcactaacaggtccatgactgggtccaggttctgcctgggatgattggcaaagagctcactgacagtgttgaaggcatctgtggtgaagtggatgggctggtccagctccaaggcctggctgaggctgaagaactggcagccttctgatgctccttcttaaagcctgtcaccatcacctgcttgcatgtcaactcattggctgtgaagttgagccgagtgccctgttgttcatcttcttggtgaagcatttgaagctgtcaatcttgctctcccactcctaaagtttgagtgtcaccctggaggtgggctcagagccagggagaatctggcactcaccatctcatccttctcagcmttcctcttgccctgtctccaggctgtctcttcagtgctggtgtggcacatcaggaagtgatggaagatgtggcactgtgcnnnnnnnnnnnnnnnnnnnnnnnnnnnnnnnnnnnnnnnn

SEQ ID NO: 566260 - DNA, 348 bp, Homo sapiens
ccttctggctgtctgggcacagtcctcatgtggtccctggctcagcctcaagggtcctgcattagtcttcctgtagcctctgtgctgtgtctgtagatcgggactctgtgggwagggccctgggatgcccaacagcacaagatgtctcatctgccaaatgtccctgccttcctcccactctgacactcaggaataggctacatggcatgtccaggcagtgccaggccacctcactatctcctttgagattggcccagagggcttttggggtgagtgtggagctgggcacctggagcctgaggccagctgtctctccctctgtcttggaggaaaagccatgtcccaaaa

SEQ ID NO: 566261 - DNA, 348 bp, Homo sapiens
ccttctggctgtctgggcacagtcctcatgtggtccctggctcagcctcaagggtcctgcattagtcttcctgtagcctctgtgctgtgtctgtagatcgggactctgtgggaagggccctgggatgcccaacagcacaagatgtctcatctgccaaatgtccctgccttcctcccactctgacactcaggaataggctacatggcatgtccaggcagtgccaggccacctcactatctcctttgagattggcccagagggcttttggggtgagtgtgragctgggcacctggagcctgaggccagctgtctctccctctgtcttggaggaaaagccatgtcccaaaa

SEQ ID NO: 566262 - DNA, 605 bp, Homo sapiens
taaaatgcaattcaaattagcatgaaacatttgcagtttaaggaaaggcttatggcatcagaatccttatttacaggattcattattttgtgtttttttgagatatggtctttgtctgtcatccaggcagaagtgcggtgatgtggtcataattcactgcagccctgaactctgggtacaagccatccttttgcctcagtctcccaactagctgggtctagaggcatgagccaccatgccmagctaatttaaaaaaaaaattttgtagacatgggggtctcactatgttgctctggctgatctcaaattctggcctcaagtgatcattctggcacaggcttttaaattgctacaattacaggaatgagccaccatgcctagtatagagtgttatattattttcaaagtcttattctgagagccatttattgactttggcctaaataactcaatatgatatctctgaaacttttttttgacatattatggggaatgataatgagggaaggtggttagacactttttactaagagataacttagtgccatctaaggaggaacaaaaatgaattatcagaaaaataaaagtaagatgaagtgcaaaag

SEQ ID NO: 566263 - DNA, 630 bp, Homo sapiens
ctagaaaaaaaatggcatctgttttttcttttaaatatttacatttccattattattataacaaaatcaatctttcagagtaatgattctcactgtggagtcatttgatgattaagatcagttggcataagaaacaattgtgatttcaaaattatgtgatacttttgaattggtcttaagctacattgttcaytaatcactttttaaaattatgaatggattctattactttttatatgaccagattacattaatactaacataattatgatttcaaatttttataaatcagacaattctgaattcagttattagttttgatcttgctgataaatattttaagcttcagcctcttttactaacatattcacaattgctctttgaatcactgactcaaaatgaaaggcaacaaacatataataattaggttataattgttttaaaagtgtattcttttcctttgttttaggaacaagcacaatatgaaaaacaattagagcagttaaacaaggataatatggcttcactaaataaaaaggaactcacacttaaagatgtggaatgtaaattctcagaaatgaaaactgcttatgaagaggttacaaccgaattagaagaatataaggaagc

SEQ ID NO: 566264 - DNA, 630 bp, Homo sapiens
ctagaaaaaaaatggcatctgttttttcttttaaatatttacatttccattattattataacaaaatcaatctttcagagtaatgattctcactgtggagtcatttgatgattaagatcagttggcataagaaacaattgtgatttcaaaattatgtgatacttttgaattggtcttaagctacattgttcattaatcactttttaaaattatgaatggattctattactttttatatgascagattacattaatactaacataattatgatttcaaatttttataaatcagacaattctgaattcagttattagttttgatcttgctgataaatattttaagcttcagcctcttttactaacatattcacaattgctctttgaatcactgactcaaaatgaaaggcaacaaacatataataattaggttataattgttttaaaagtgtattcttttcctttgttttaggaacaagcacaatatgaaaaacaattagagcagttaaacaaggataatatggcttcactaaataaaaaggaactcacacttaaagatgtggaatgtaaattctcagaaatgaaaactgcttatgaagaggttacaaccgaattagaagaatataaggaagc

SEQ ID NO: 566265 - DNA, 640 bp, Homo sapiens
acaaaaaccgactaggtttcccaggctggtctagaactcttggccctcaagtgttcttcctgccttgacccccaccctctccaaccaagcactgggattacaggtgtaatgacagggagtcatcacatctggcctcccctagcatttagatattaaactgttggaaaaatgagtaaaaaataaatgtaagtagcattttgagtattttcttcccatacacccatggattgtttagtgtatcttactacttcacataggagaccattcctgcatcaaactatataaactaagtatttaaatttgattttttccctacaataagctctatgctaaagctcattacatttgattttgacaatctgtttttataccacagttgcaaaaaattaatcacattctttacttcatgagacattatcattattgtttcctacaagtttctctggttttacttgtttcatttktttattccttatcccttgtcacagacaggcatgctaatgtgtttgatataggttctttactcttaaagaattcttacaagataagaaggttgttttctgagtgtgtgtatgtgtatatacgtgagtgtatacattttgcttaaagagtattgtgctataaatctaattttatttct

SEQ ID NO: 566266 - DNA, 610 bp, Homo sapiens
tgatataggttctttactcttaaagaattcttacaagataagaaggttgttttctgagtgtgtgtatgtgtatatacgtgagtgtatacattttgcttaaagagtattgtgctataaatctaattttatttctaattttttcacagagcataacatccttcatacattcccacattgctgtaggttatttttggttgtttattcccctgtagctgctgcatagttttcaataaaatgaatcaaccacttttccctatccagtcttgcagtagaattcacactgatatcctgctactgaaatattcacttccttatggtatccatatgaaaacactttttggtcatgtgtcacaatttgtcaggggctatgttagtctctttatattgctatgaagacatacccaatgctgggtaatttatttatttattttttaataaaagaggtttatcttggttcggggttctgcagactgcacagraagcaatgctatctgctctgggtgaggcctcaagaagcttacaatcatggcagaaggtgaaggggagacagtgtgtcacatggtcagagagggagtaagagagagaagggggcagtcccaggctgtttcta

SEQ ID NO: 566267 - DNA, 586 bp, Homo sapiens
cagtaatttacagcctttcaaaattgttccggtaatatttcatttttcttgctcatgctaaaccaccttctcatcaaactattcagtaccttaaattctactaaaatttctttgtggcatcacacacatacccatttcgatacactctttttctattatcacctgtagaaacctacataacttcacagcacatctcagatgccagctctttcaagatcttctctgataaacccaaggagaaataatttttccctcatcaaaatccttagtgcacttgggattacatcacatattcttcttataggagtggtctttctattagcattgaaggtccttaagagcaagattgctttttaaacatctgtatttcttaaagtattctgtgcaaaatactatgctaaaccctgtatttactcaaacattttagcttaatgaattaaaatatgactcaaaatggaatggtaagttgttccatcttaatatattaagaaatatcaccaacagcaactacatcaagaaaccaagaagacraactttaatggaatatttgatggacgctgaagtgagtctattaacaaaaacaaac

SEQ ID NO: 566268 - DNA, 586 bp, Homo sapiens
cagtaatttacagcctttcaaaattgttccggtaatatttcatttttcttgctcatgctaaaccaccttctcatcaaactattcagtaccttaaattctactaaaatttctttgtggcatcacacacatacccatttcgatacactctttttctattatcacctgtagaaacctacataacttcacagcacatctcagatgccagctctttcaagatcttctctgataaacccaaggagaaataatttttccctcatcaaaatccttagtgcacttgggattacatcacatattcttcttataggagtggtctttctattagcattgaaggtccttaagagcaagattgctttttaaacatctgtatttcttaaagtattctgtgcaaaatactatgctaaaccctgtatttactcaaacattttagcttaatgaattaaaatatgactcaaaatggaatggtaagttgttccatcttaatatattaagaaatatcaccaacagcaactacatcaagaaaccaagaagacaamctttaatggaatatttgatggacgctgaagtgagtctattaacaaaaacaaac

SEQ ID NO: 566269 - DNA, 437 bp, Homo sapiens
gttcattttcttcaaaaatttggatcctttcattttctagggctgcatatcctttttcctaaagaggaactccacattttataagttgcagttcccataaagactagatctgtccctagttttgatgaactatacctgggaaaccagaggtatggcaatcctaaaacgaatataggaaaagagttccaatagacacagattcccttcccctggtgaaaatgaagatagaaacaacaacaaaaaaagatattatgtaatataaaataaaacaaatgttcattatatttgaacctgtattctcttttctaaactgagtttcagagggcaaggaacatgtctgtcagatactactttctatccagtayacatagtagctgcacaataaacatttatgacatgaattaattagcgtttctctggcctgccaatgccctgta

SEQ ID NO: 566270 - DNA, 597 bp, Homo sapiens
catagaacaagtctctagggagttccagactttcccacatttttctgttgttttctgagccctccagactgttccaacctctgcctgttatccagttccaaagttgcttccacattttcagttatctttagarcagagtcccaccccactcctggtaccaatttactgtattagtctgtttttatactgctgataaagacatacccaagactgggcaatttacaaaagaaagaggtttaatgatcttacagttccatgtggctggggaggcctcacaatcattgcagaaggtgagaggcatgtctcacatggcagcagacaagagaagagagcttgtgcagggaaacttccctttataaaattatcagatcacatgaaacttactatcatgagaacagcatgggaaagacctgctcccatgatttaattacctcccaccaggtccctctgacaacacatgggaattcatggtgagatttgggtggggacacatcactagataacagcaaagctgtacaattcttaaacattgtcatggaaaactaattccacaactctactttgaactatatgtgatgttgtttacattcatcatac

SEQ ID NO: 566271 - DNA, 597 bp, Homo sapiens
catagaacaagtctctagggagttccagactttcccacatttttctgttgttttctgagccctccagactgttccaacctctgcctgttatccagttccaaagttgcttccacattttcagttatctttagaacagagtcccaccccactcctggtaccaatttactgtattagtctgtttttatactgctgataaagacatacccaagactgggcaatttacaaaagaaagaggtttaatgatcttacagttccatgtggctggggaggcctcayaatcattgcagaaggtgagaggcatgtctcacatggcagcagacaagagaagagagcttgtgcagggaaacttccctttataaaattatcagatcacatgaaacttactatcatgagaacagcatgggaaagacctgctcccatgatttaattacctcccaccaggtccctctgacaacacatgggaattcatggtgagatttgggtggggacacatcactagataacagcaaagctgtacaattcttaaacattgtcatggaaaactaattccacaactctactttgaactatatgtgatgttgtttacattcatcatac

SEQ ID NO: 566272 - DNA, 597 bp, Homo sapiens
catagaacaagtctctagggagttccagactttcccacatttttctgttgttttctgagccctccagactgttccaacctctgcctgttatccagttccaaagttgcttccacattttcagttatctttagaacagagtcccaccccactcctggtaccaatttactgtattagtctgtttttatactgctgataaagacatacccaagactgggcaatttacaaaagaaagaggtttaatgatcttacagttccatgtggctggggaggcctcacaatcattgcagaaggtgagaggcatgtctcacatggcagcagacaagagaagagagcttgtgcagggaaacttccctttataaaattatcagatcacatgaaayttactatcatgagaacagcatgggaaagacctgctcccatgatttaattacctcccaccaggtccctctgacaacacatgggaattcatggtgagatttgggtggggacacatcactagataacagcaaagctgtacaattcttaaacattgtcatggaaaactaattccacaactctactttgaactatatgtgatgttgtttacattcatcatac

SEQ ID NO: 566273 - DNA, 626 bp, Homo sapiens
tcttggattttgtcagtcatagcagacaatagcattttatgtcctgtgaagaattgtatgcataattttggaaacaagacaaaggaaagaggctctctaagctgttagaaacaaaggatttttaaaatctttcttctctcatacctccattaaggttgtcttttctcctttaaagctataagaaatatactgaatactaatgtgacagaaccagatgcaatccccaaatatcatatttacttaatataaattcatagtccttacctttaaggagatttgacaattcactttgtcttttagccttggggtagtcaggaaagttaggcacaatgttttaatgctcattccttctcttttgctcttagctrtcattaatccctaatgcctggaactgcataaatttcttctacaaaggaagcccacaggtcgtttttatttggagcactttttttaatatgcgccacaatatattccggtatgtattacctcgtctgaatgcaaaactgttttatatgcagatttaaggtagtgagcagtcaagtttaaaaaatggttctggtatcctgtagcttctcaataataatatactcttacattccaacagagaaggatggattatgggtttt

SEQ ID NO: 566274 - DNA, 613 bp, Homo sapiens
attctcagcacaaaaatggataatgaatatccatttattgttattaaaataatgggcatgattatgctaataggtaacattctttctttagtatgaaattgcattgtattgtgtctaagaaaaagtgttggttgtttttgcaaagtataattcaggagattaattgtattcaccaatccacagwtttcactaatgagaagtgaactggaatttgaaagcacatacacttttccccttaaacaattgcccactccattttgcaagctgagaaatggagaaagagggatatcaatctaggtaaagtctgaggtgctacttgtattaacaggactcaggaatcaaaaatctgtacttcctcccataaaaaggggtgcgatttttccctgtagacagtgagttaatgtggctgccttcaaaggcaaacagacttcaatgtgactagaagaaaaggacaatggagtgtccccaaaagagaggcatgttttttaatgaatgaaaaaccagagatacttttcaaaataatagaataacatggcttagttattttcattacattacaatacatttagtagactgtcctgtccttcagaaataagagccacagtgaaatgac

SEQ ID NO: 566275 - DNA, 613 bp, Homo sapiens
attctcagcacaaaaatggataatgaatatccatttattgttattaaaataatgggcatgattatgctaataggtaacattctttctttagtatgaaattgcattgtattgtgtctaagaaaaagtgttggttgtttttgcaaagtataattcaggagattaattgtattcaccaatccacagttttcactaatgagaagtgaactggaatttgaaagcacatacacttttccccttaaacaattgcccactccattttgcaagctgagaaatggagaaagagggatatcaatctaggtaaagtctgaggtgctacttgtattaacaggactcaggaatcaaaaatctgtacttcctcccataaaaaggggtgcgatttttccctgtagacagtgagttaatgtggctgccttcaaaggcaaacagacttcaatgtgactagaagaaaaggacaatggagtgtccccaaaagagaggcatgttttttaatgaatgaaaaaccagagatactttwcaaaataatagaataacatggcttagttattttcattacattacaatacatttagtagactgtcctgtccttcagaaataagagccacagtgaaatgac

SEQ ID NO: 566276 - DNA, 580 bp, Homo sapiens
ttgcctttgtttccatatatagccttttcaatgccttaataaacctctaattcccttttttttgccattgatatctggaattcatagagcagcttgttttcctgacaaaaccctgaccggtgcaaggataagttagaaaccagagatgaatgattttacaaaaccacatccactgttcaaatgggagtagtggttaaacattctggtcttagagtctaactgccagagttcaaaacccagcttcatcayttactagctgtgtgggcttaggcaagttatttaaactagctgtgtgggcttaggcaagttatttaagctctctgtgcctcagtttcatctctgtccaatgggatatgtataattatattatgtatctcatgactatttgttgtgagagatgataaaaattcatatgaataaaaacttagaggccaggcatggtggctcatgcctgtaatcccagcactttgggaggccaaggcaggcagatcacgaggttaggagttcaagaccagcctggccaacatggtgaaaccttgtatctactaaagatacaaaaaattagctgggcgtggtagca

SEQ ID NO: 566277 - DNA, 597 bp, Homo sapiens
ctcttgctttaaattcaagtaattaataggacaatcccactataatgcccttactcttctcatatagctccagtggaaatttaagcagggacaatgtttaggaactgctaatctaatataagcttgccttaaaggcctaaccacaacgtgcagcctatgattgagctactccagtggcaggaaaatcacccttataaggaagcccatcccatgttcatagagcattattttgagggagtacttcattatattgattgagagttatgcatggcctccaaatagaatatctcacatgcacacactcacacacatacacaaacaaatacgcaaattaataaaactttgtagattctaacccttgacatttcttatacccacccttctctctccaactccagatcttctgcctttgtttagatcctcgtaacctccaagtttcccaatttctctctggttttccgttgttcttctctgattcatctgcatactgcctctgggataacttttgtagaccccaaacttatcatgtcacttcttattagccctcagtgatgttcctttaccrttcgaaaaaactccccaaaaagaaaaaaataa

SEQ ID NO: 566278 - DNA, 392 bp, Homo sapiens
aaggcagactagtaaaagctctgttacctcttagatctgtggtttcaggcaatttatttataattctgaacctcaactttcttatgtgtgacataagcrtgattataatgcaggattgtagtgagttagaattgaaataattcacatagaacttttagcaaagtgcttggcacatggaaatactcaagctattatttgtaaaaagataagagattttcttacaacaatattgtaaaataattactaagcatatgcctccagaagaaaggtgttaaaagtaattataggcagattgtttaataaaaatggaaatatggcataagaaaatgagtttctgaatgcgcaatggtgtaattcctgttgttttctgtatagcgctgtagtttggaaag

SEQ ID NO: 566279 - DNA, 532 bp, Homo sapiens
aggtgtggtggcaggagcctataatcccagctactcaagagctgaggcaggagaatcacttgaagctgagaggaagaggatgtagcaagccaagttcacgccattgcacttcagcctgggagacagagtgagactctgtctcaaaaaaaaaaaaaaaaaaaagatataagttttttccgtatgkctaggaaatgattaaataaaataataacaaaattatataaaatttaagtgatcaattaaaaaagtgatatacataggaaacctagcacaaaatgagtaaatggagggttctcaataaacatcagttgaataaatgaatgagtcacgaattctaacttttgtcactaactagttgtgagacatactcatatcacttcttcttttgtagcctcagttttctcatcaataatatgagatgtatgaatttgaagaatagttttctacctacctttcaaattctaggaaggtacttggtgagttccacaaaatataaagtatattcttagccagtgatagacatttaaagcgc

SEQ ID NO: 566280 - DNA, 532 bp, Homo sapiens
aggtgtggtggcaggagcctataatcccagctactcaagagctgaggcaggagaatcacttgaagctgagaggaagaggatgtagcaagccaagttcacgccattgcacttcagcctgggagacagagtgagactctgtctcaaaaaaaaaaaaaaaaaaaagatataagttttttccgtatgtctaggaaatgattaaataaaataataacaaaattatataaaatttaartgatcaattaaaaaagtgatatacataggaaacctagcacaaaatgagtaaatggagggttctcaataaacatcagttgaataaatgaatgagtcacgaattctaacttttgtcactaactagttgtgagacatactcatatcacttcttcttttgtagcctcagttttctcatcaataatatgagatgtatgaatttgaagaatagttttctacctacctttcaaattctaggaaggtacttggtgagttccacaaaatataaagtatattcttagccagtgatagacatttaaagcgc

SEQ ID NO: 566281 - DNA, 339 bp, Homo sapiens
agcatttaagtatggcaatccattttgaatgaacgtgggttcaggaataaagtgcaggcagaaccaatctgccctgaagaaaggaaaagcataaaatattgcacaaagacaggagaatttccagggtggctttaatagcaacccaaactggcaggtgcacaaagcaaaccattayctttgtgtgctgattttaagaaatattattggtttttttctcttttttttcatataaccataaaagcaatactcaaagatgtaaataatgctgatttgtgccttggtgtaaatttgatggggtgtagtactgatgactatttttttaaaaaaattacctataga

SEQ ID NO: 566282 - DNA, 452 bp, Homo sapiens
ctgggcaacatagcaagactctgtctctacattaaaaaaaattagctggacatggtggcttatgattctagttccagctattgggaagatgaggtggtaggatcacttgagctgaggagtttgaggctgcagtgagctwtgattgcaccagtgcactccagcctgggtgatagagctagatactgtctctaaagatataaataataaataaaagaagaaaatagaggaatctatttgttatagtaatggaatgaaagagatttttctttctaaaattgatattaaaaacacaaaagccatgagtttaaataatagaataatgatttcctaagttaaaaacaaagttcttgaacagactgtaacaaatcagactgggaagtatacttgtgatatctgtgacacagtacttttaagcctaactttaaaaataatgtaaacaactccttcaaatt

SEQ ID NO: 566283 - DNA, 547 bp, Homo sapiens
ttcaagtgattctcttgctcaagctccctgagtagctgggattacaggcacgtgccaccacgcctggctatttttgtatttttagtacagacggggatttcgccatgttggccaggctggtctcgaactcctgactttgtgatcttcccgcgtcggcctcccaaagcactgggattacaggtgtgagccaccatgcctggcctggcaggctgatttttaagaatgctcaagtcatattatagcagaacttactgctaaatgttcttccatggcttatttaatttttagaggaagtacacagtactacaaattggtacaacccttccagcagtcacataacaatatttaccaagttatgtccwtatctttgaaccaagtaattcgacagaatttactctaaggacataattgaataagaaaacagaaagatgatgtgcactaaagtgttgattgtgacactgacgtggatgtgcgtgtgtttgtgtgcatgtgtgcaaagccagcaaacattttaactgaaaagactatgtaaccaagtagtaaataa

SEQ ID NO: 566284 - DNA, 436 bp, Homo sapiens
tgaatgatgtgcttagttaaccatctctccctttctgtttcctcacctgatagtagattaaaatctgtatcactgcgttgttgtgaggatacaattatatcaggcaaaatgccatagtaataatacaaagaaaaaccttattggtaatttattagagacgacrataatattttcgctcatactattatttataactttgtttaaaatgtattatctatatctgttataaatttagcaataggagataagttggaaatttcccaatgatgctaaaagctggtcgatcaatttgagtcaagtaaggaagcattatttccttgctgggttatgcatttctagacgatcagatactagtctaacctaaactaccttcacaatgtctacctgtaagaatgtccagttagagtcaaaatttgagttataaaaatttgctatt

SEQ ID NO: 566285 - DNA, 519 bp, Homo sapiens
atgctacaaggagttgtgatcagcctgggtgacagagtgagaccctgtctcaaaacaaaacaaaacaaaaaccttgaactcagaatattttattgataaaatgttagatcttgagcctaacatgtacctgtagagatcattcaacagttaaagaaacagaacytgaggcaattataaactcacaaagaatgtatttgcactttttagggatagacttagaactgaaccatgactctattttttttatttctctctagcacataatttcacctgctcatccttcgtagatcagaaagttattgatggtgcatatagtgttatgcttatttttgatttcacaataacttaattctgtgtcacatataaaggcagacaataaatatatgtagaattggcactattttgaacattggagaatgttctacacttttaaaaacaagtgaattattttttaattgtattttatttcatttgcttatttcagatgccattatttccagaaaagtttgggttggtaac

SEQ ID NO: 566286 - DNA, 548 bp, Homo sapiens
gctgaaaaaggattaatatccagagtacataaggagctcaaacaactctacaggaaaaattctgataatacaatmaaaaatggacaaaacatgtaaacagatatttttccaaataaagcatataagtgacaaggataccaatgaaaaggtgcttaaatcagtactaccactatggagaaccttttagaggttactcaacaaattaaaaattgagctaccatgtgatccagccaatctcattgctaggtatatagccaaaagaaaggatatcagtataataaagagataactgtacacccatgtttgttgcagtacttttcacaatagctaagatttggaaggaacctaagtgtccatcaacagatgaatggataaatggtatatatacgcaatagagttctattcagccatgaaaaagaatgagattctatcatttgaaacaacagggatggaactgaagatcgttatattaagtgaaatacaccaggcacagaaagacaaacatcacatattctcacttatttgtgggatctaaaaatcaaaacaat

SEQ ID NO: 566287 - DNA, 536 bp, Homo sapiens
tttgggtcagaacatatttagataagcgttggaataatagaatgtatatttgatagaaaactgaatctgggtgatggaattgctgaaagagctcagcagcatagactgcttctttcttggggcaagtyatcttctgccaatctgcttttgatttgtggtatggttagacttgtcattgttgggtttctattgatgttaaaggggctttgttgtttcttttgttttggtagaaagtaattaaaccagtgaaaaatgattagctggaatttttttttcacagagaatatgattttctaaaaagtacaattatgctcaagttaagctttttataaaaggtatttggtgttctataaagggtaaagacattagactttttttaaacttaaaggtcacatttaaaggggaaaaggtgggaacatgagcaatgcttgcaagaaccacagcaaaggaattattatttttaaatttttatttttatttgagacagggtcttgctctgtcacccaggctggagtgtagtggcatgatcttggctc

SEQ ID NO: 566288 - DNA, 536 bp, Homo sapiens
tttgggtcagaacatatttagataagcgttggaataatagaatgtatatttgatagaaaactgaatctgggtgatggaattgctgaaagagctcagcagcatagactgcttctttcttggggcaagttatcttctgccaatctgcttttgatttgtggtatggttagacttgtcattgttgggtttctattgatgttaaaggggctttgttgtttcttttgttttggtagaaagtaattaaaccagtgaaaaatgattagctggaatttttttttcacagagaatatgattttctaaaaagtacaattatgctcaagttaagctttttataaaaggtatttggtgttctataaagggtaaagacattagactttttttaaacttaaaggtcacatttaaaggggaaaaggtgggaacatgagcaatgcttgcaagaaccacagcaaaggaattattatttttaaatttttatttktatttgagacagggtcttgctctgtcacccaggctggagtgtagtggcatgatcttggctc

SEQ ID NO: 566289 - DNA, 339 bp, Homo sapiens
gagataatcatgtggtttttgtctttggttaggtttatatgctggattacgtttattgatttgcatatgtggaaccagccttgcatcccagggatgaagcccacttsatcatggtggataagctttttgatgtgctgctggattcggtttgcaggattttattgacgatttttgcatcaatgttcatgaaggatattggtctaaaattctcttttttggttgtgtctctgcccggctttggtatcaggatgatgctggcctcataaaattagttagagaggaatccctctttttctattgactggaatagtttcagaaggaatggtaccagttcctcct

SEQ ID NO: 566290 - DNA, 240 bp, Homo sapiens
actatacatagggatgacaacatggagagatatttcgtgagatcacaaacttatggtatrgcagaagtagaacgctgagtagagactctgtgttcccaatcattatttctaccaccagctttctattttgatgttaataatgttcttatgtgggaaaccctacatatttgccaatgtttagttcattgacaaagaaatagaaagagcttcaagaacactcgaatctttaaaaaataaaat

SEQ ID NO: 566291 - DNA, 384 bp, Homo sapiens
atggtagggacggctgcacaatgttatgactatatttagtaccactgaactgtacayttaaaatggttaacagagtacattttatgttatgtgtattttaccacaataaaaaaataaaataccttaggaacattttcctgaaagagtccacataaaattcattttaatgcatgtgtttatgcatagctttctatttttctcttttctatttatattccaaattagaatataatgctaatcaagcatagtggctgtgtttcttgcttcctctagtctgcaggtagcatacaaatgtaagaaactactcattaatgtcacatctatttattttctgccttataccaagcttgtgggattctcttaaatacaacatttttatactta

SEQ ID NO: 566292 - DNA, 384 bp, Homo sapiens
atggtagggacggctgcacaatgttatgactatatttagtaccactgaactgtacatttaaaatggttaacagagtayattttatgttatgtgtattttaccacaataaaaaaataaaataccttaggaacattttcctgaaagagtccacataaaattcattttaatgcatgtgtttatgcatagctttctatttttctcttttctatttatattccaaattagaatataatgctaatcaagcatagtggctgtgtttcttgcttcctctagtctgcaggtagcatacaaatgtaagaaactactcattaatgtcacatctatttattttctgccttataccaagcttgtgggattctcttaaatacaacatttttatactta

SEQ ID NO: 566293 - DNA, 384 bp, Homo sapiens
atggtagggacggctgcacaatgttatgactatatttagtaccactgaactgtacatttaaaatggttaacagagtacattttatgttatgtgtattttaccacaataaaaaaataaaataccttaggaacattttcctgaaagagtccacataaaattcattttaatgcatgtgtttatgcatagctttctatttttctcttttctatttatattccaaattagaatataatgctaaycaagcatagtggctgtgtttcttgcttcctctagtctgcaggtagcatacaaatgtaagaaactactcattaatgtcacatctatttattttctgccttataccaagcttgtgggattctcttaaatacaacatttttatactta

SEQ ID NO: 566294 - DNA, 384 bp, Homo sapiens
atggtagggacggctgcacaatgttatgactatatttagtaccactgaactgtacatttaaaatggttaacagagtacattttatgttatgtgtattttaccacaataaaaaaataaaataccttaggaacattttcctgaaagagtccacataaaattcattttaatgcatgtgtttatgcatagctttctatttttctcttttctatttatattccaaattagaatataatgctaatcaagcatagtggctgtgtttcttgcttcctctagtctgcaggtagcatacaaatgtaakaaactactcattaatgtcacatctatttattttctgccttataccaagcttgtgggattctcttaaatacaacatttttatactta

SEQ ID NO: 566295 - DNA, 302 bp, Homo sapiens
gggttccaatttattattttgcaagtggcgatccacgtgtacrctgttgacccagtttgttcaaagactgtcccttcctcattgaattgcacatggcaccactgtaagaatccattgactatagacacatagttttatatatggactctcaattctcttccatcaatctatatatttttctttcatcagtgttgtgttgtcttgattactgatgctttgccgtaaggtttggagcacgggggtgtgaattatcctaatacgttttcttttttcaagactattttggctattttgagtccctt

SEQ ID NO: 566296 - DNA, 302 bp, Homo sapiens
gggttccaatttattattttgcaagtggcgatccacgtgtacgytgttgacccagtttgttcaaagactgtcccttcctcattgaattgcacatggcaccactgtaagaatccattgactatagacacatagttttatatatggactctcaattctcttccatcaatctatatatttttctttcatcagtgttgtgttgtcttgattactgatgctttgccgtaaggtttggagcacgggggtgtgaattatcctaatacgttttcttttttcaagactattttggctattttgagtccctt

SEQ ID NO: 566297 - DNA, 302 bp, Homo sapiens
gggttccaatttattattttgcaagtggcgatccacgtgtacgctgttgacccagtttgttcaaagactgtcccttcctcattgaattgcacatggcaccactgtaagaatccattgactatagacacatagttttatatatggactctcaattctcttccatcaatctatatatttttctttcatcagtgttgtgttgtcttgattactgatgctttgccgtaaggtttggagcacrggggtgtgaattatcctaatacgttttcttttttcaagactattttggctattttgagtccctt

SEQ ID NO: 566298 - DNA, 397 bp, Homo sapiens
tgtgtgagaaagattgagcaggttattgtgcttttttaagatgcaacttttgcttaatctagagataggcaatgctccctataagggacaaggagaaaaataaatgagcaatagagatgtgacaggcatggaaaaagacactacatttatcaaacaaatagggccacggatgacgataatggggatcaaatcttgagatactgactcagtttataacctcactgtatratagagcaaatcatttgttaatttttttacaaatggaatttaatttaattaagatgaatacagtgttttaaacaaggcaggtcatcttaaaataaaatagtggaataaagtgataaaaccaatgtaaaaatcgtaaacattttataaagaatttttgtcatgtaattta

SEQ ID NO: 566299 - DNA, 568 bp, Homo sapiens
atttaaaggaatcatagaatggtatcgaatggaatcatcatcgaatggaatggaatgsaatggaatggaatcagcatagaatggaatcaaaagcaatcattcaatggaatctaatagaatcatcgaatagacttgaatgtaatcatcatcgaatggagaagaatggaatcatccaatggacaggaatggaatcatcctcgaatggaatcgaatggaatcatataatggacccgaatggaatcatcattgaatggaatagaatggaatcgtcatcgaatggaatcatatggaatcatctaatggacccgaatggaatcatcatcgaattgaatagaatgcaatcatcatcaaatggaatcgaatggaatcatcaaatggaatcgaatggagtcattgtctaatgcaatcgaatgaaatcatagtatggaatcccatgaaatcaacatcgaatggaatcgattggaatcattatcaaatagaattgaatggaatcactgaatggaatcatcatcaaatggactccaacggaatcatcgaattgactctaatggaatcatcactgaatgga

SEQ ID NO: 566300 - DNA, 568 bp, Homo sapiens
atttaaaggaatcatagaatggtatcgaatggaatcatcatcgaatggaatggaatgcaatggaatggaatcagcatagaatggaatcaaaagcaatcattcaatggaatctaatagaatcatcgaatagacttgaatgtaatcatcatcgaatggagaagaatggaatcatccaatggacaggaatggaatcatcctcgaatggaatcgaatggaatcatataatggacccgaatggaatcatcattgaatggaatagaatggaatcgtcatcgaatggaatcatatggaatcatctaatggacccgaatggaatcatyatcgaattgaatagaatgcaatcatcatcaaatggaatcgaatggaatcatcaaatggaatcgaatggagtcattgtctaatgcaatcgaatgaaatcatagtatggaatcccatgaaatcaacatcgaatggaatcgattggaatcattatcaaatagaattgaatggaatcactgaatggaatcatcatcaaatggactccaacggaatcatcgaattgactctaatggaatcatcactgaatgga

SEQ ID NO: 566301 - DNA, 568 bp, Homo sapiens
atttaaaggaatcatagaatggtatcgaatggaatcatcatcgaatggaatggaatgcaatggaatggaatcagcatagaatggaatcaaaagcaatcattcaatggaatctaatagaatcatcgaatagacttgaatgtaatcatcatcgaatggagaagaatggaatcatccaatggacaggaatggaatcatcctcgaatggaatcgaatggaatcatataatggacccgaatggaatcatcattgaatggaatagaatggaatcgtcatcgaatggaatcatatggaatcatctaatggacccgaatggaatcatcatcgaattgaatagaatgcaatcatcatcaaatggaatcgaatggaatcatcaaawggaatcgaatggagtcattgtctaatgcaatcgaatgaaatcatagtatggaatcccatgaaatcaacatcgaatggaatcgattggaatcattatcaaatagaattgaatggaatcactgaatggaatcatcatcaaatggactccaacggaatcatcgaattgactctaatggaatcatcactgaatgga

SEQ ID NO: 566302 - DNA, 619 bp, Homo sapiens
tttgttcacttgtttatctgytgaccttccctccactattgtcctatgaccctgccaaatccccctatgtgagaaacacccaagaatgatcaataaaaaaaaaagaactaagattagatgagaattataaaagcatattgtatgcaaggattatatatgcattaacattgttgatacagtgcaattgtgctatacatctattttttaaaagtggggaagatgaagaaagtatatacaaaaatgatttagctgttttcagtaattacatgagcggtggtggtattggcattattgttctgagactgttgtatgtataatgtggaataaaacaaatgtgtaattatgaaaaaaaagagaataaacagggtgacaggtgtgggatagtcattttaaagaatatttagtagctgattcttttttaaagctctccatgcttaaaatataaatattctgaaagaaaacaaaagccaagaccctttttgtagagagttggagaatgctaggactttctgggagtgctggcttttgcagaggcatgggtaaacattagtgaagttattgctgagaacagctcgggacaggaggggaatgaaaagagaagacagtatggagacaatga

SEQ ID NO: 566303 - DNA, 619 bp, Homo sapiens
tttgttcacttgtttatctgctgaccttccctccactattgtcctatgaccctgccaaatccccctatgtgagaaacacccaagaatgatcaataaaaaaaaaagaactaagattagatgagaattataaaagcatattgtatgcaaggattatatatgcattaacattgttgatacagtgcaattgtgctatacatctattttttaaaagtggggaagatgaagaaagtatatacaaaaatgatttagctgttttcagtaattacatgagcggtggtggtattggcattattgttctgagactgttgtatgtataatgtggaataaaacaaatgtgtaattatgaaaaaaaagagaataaacagggtgacaggtgtgggatagtcattttaaagaawatttagtagctgattcttttttaaagctctccatgcttaaaatataaatattctgaaagaaaacaaaagccaagaccctttttgtagagagttggagaatgctaggactttctgggagtgctggcttttgcagaggcatgggtaaacattagtgaagttattgctgagaacagctcgggacaggaggggaatgaaaagagaagacagtatggagacaatga

SEQ ID NO: 566304 - DNA, 619 bp, Homo sapiens
tttgttcacttgtttatctgctgaccttccctccactattgtcctatgaccctgccaaatccccctatgtgagaaacacccaagaatgatcaataaaaaaaaaagaactaagattagatgagaattataaaagcatattgtatgcaaggattatatatgcattaacattgttgatacagtgcaattgtgctatacatctattttttaaaagtggggaagatgaagaaagtatatacaaaaatgatttagctgttttcagtaattacatgagcggtggtggtattggcattattgttctgagactgttgtatgtataatgtggaataaaacaaatgtgtaattatgaaaaaaaagagaataaacagggtgacaggtgtgggatagtcattttaaagaatatttagtagctgattcttttttaaagctctccatgcttaaaatataaatattctgaaagaaaacaaaagccaagaccctttttgtagagagttggagaatgctaggactttctgggagtgctggcttttgcasaggcatgggtaaacattagtgaagttattgctgagaacagctcgggacaggaggggaatgaaaagagaagacagtatggagacaatga

SEQ ID NO: 566305 - DNA, 615 bp, Homo sapiens
gcgttagcctgccctctagtggtgcctgaaaacgtgtgctagactgtggtgcccaatgcagagctttgcttgtcccagagatagacgcttgaaaacctcaagattagaaggaacgcttcagcagctttccagtaaatacagtaggtggagacaaacactggaaaactgcaacctaggcaacattgctttcgtttgactcttagaagattgctaggcacccagagttattgaaacttgggttgaccataatttgtcatgcttaatatttcctgcttttaaaaaattgttaaaaatgttaatatatgaagattttaaacacattcagtttataaatccgttggcgcttcatgccattaattatcttaaatacccaccaaaagcagaaatttgggtggtggtatggaggtgcaaaggttaataagacacagaccctgtccttaaaacttactctctgtttggaagagaagatctatttgaatgtaattacaatacatggcagtggtataacaaagagacagtttaaatatatatatatgtttaaatatatatatatatatatatgtacacacacacacacatacacacacrcacacaaaactgtgctaggtatgccca

SEQ ID NO: 566306 - DNA, 594 bp, Homo sapiens
acaatttagtggctactacgaagaaacagaaaataataaatagtggcaaggatgaaatgttaaaatgccagatacaccaaatcatgcaaacacaacatcaaaacacagcttggtggagatggagggacagatggggaggggaagagtgtggaaaggctggaaaacagtcccaaacagacacacgtctccatgtgacactttttttctttttttaggcagggtcttgctctgttgcccaggctggagtgcagtggtgtaatctcggctcactgcaacatccacctcccgggttcaagcgattctcctgcctcagcctcccgagtagctgggactacaggcatgtgcccccatgccaggctaatttttgtatttttagtagacatggggtttccccatgttggtcagtctggtctcgaactcctagcctcaagtgatccgcccgcctctgccttccaaagtgctgggattacaggcrcccgccaccacgcccagctaagttttgtatttttagcagagacggggttttaccaggttggccaggctggtctcagactcctgacctcaagcgatccacccgcctaagcctctcaaaat

SEQ ID NO: 566307 - DNA, 552 bp, Homo sapiens
aaaattatccaggtgtggtggcatgcacctgtagtcccagttacttgggaggctgagatagggaggattgcttgagcccagaaggttgaggctgcagcgagtggagattgtgctactgcactccagcttcggtgacagaatgagaccctgtcttaaaaaacaattgagggattcagctatagcagagctgagagagaaatttatagcactaaatccttatattagtaatatggaaagttctcaaaccagtagtcaaaaaactaaaagaggaatagtaaaataaagttaaggcaaataggacggaaagcgaagagcagaaattgatgaaattaaaaacaggaaagcaatgcagaacattaaggaaataaaaaacaggttcttcaaaaaattaataaaactgataatcctctagcatgatcaacaaagataaaaggagataacacacaaatcagyaatatcaggaatgaaacaagaaatatcacaaaagaggctgcatctatgaaaaatgctataaaaattttatgctcatacatttgacagcctaggaaaaaa

SEQ ID NO: 566308 - DNA, 624 bp, Homo sapiens
cactaactactttaaaaagaaatgcctgggagacttctatttcyagcagagtggcagactgatgccttgaacaaccctcttattacaaaactgaatactccacatgaaaacaaatctattcaaatgcattgttaagctgtgaagagaataacgaaagttctaagaaaccaaaatctaaatgaaaacagaagtccaggcaggcactgaaaacctaaaaaaaaacaaaaacaaaaactgaagaggccaattgttggcaagcatgtggaacagcaggaactctttaagctgctgctggtggtggaggccaagacactgtgctcccagaacacgacacagaagcctccacactgaagcagagcacaggtgccctggagtctccaccccacccagggatcctccagcagaagcacgtttgcccctgcatacctgcaagtcccatatccagacctagtgttcagggccgtgggataacagccaaaaataggaaatcattttactcatcaatggaaaaatggtgacacagtcatataatggaactcaacaatgacgataaatcaatgtctaccacagacaagaacatggatgtgttctgtaatactgaaccaaataagccaggctaaatag

SEQ ID NO: 566309 - DNA, 624 bp, Homo sapiens
cactaactactttaaaaagaaatgcctgggagacttctatttccagcagagtggcagactgatgccttgaacaaccctcttattacaaaactgaatactccacatgaaaacaaatctwttcaaatgcattgttaagctgtgaagagaataacgaaagttctaagaaaccaaaatctaaatgaaaacagaagtccaggcaggcactgaaaacctaaaaaaaaacaaaaacaaaaactgaagaggccaattgttggcaagcatgtggaacagcaggaactctttaagctgctgctggtggtggaggccaagacactgtgctcccagaacacgacacagaagcctccacactgaagcagagcacaggtgccctggagtctccaccccacccagggatcctccagcagaagcacgtttgcccctgcatacctgcaagtcccatatccagacctagtgttcagggccgtgggataacagccaaaaataggaaatcattttactcatcaatggaaaaatggtgacacagtcatataatggaactcaacaatgacgataaatcaatgtctaccacagacaagaacatggatgtgttctgtaatactgaaccaaataagccaggctaaatag

SEQ ID NO: 566310 - DNA, 624 bp, Homo sapiens
cactaactactttaaaaagaaatgcctgggagacttctatttccagcagagtggcagactgatgccttgaacaaccctcttattacaaaactgaatactccacatgaaaacaaatctattcaaatgcattgttaagctgtgaagagaataacgaaagttctaagaaaccaaaatctaaatgaaaacasaagtccaggcaggcactgaaaacctaaaaaaaaacaaaaacaaaaactgaagaggccaattgttggcaagcatgtggaacagcaggaactctttaagctgctgctggtggtggaggccaagacactgtgctcccagaacacgacacagaagcctccacactgaagcagagcacaggtgccctggagtctccaccccacccagggatcctccagcagaagcacgtttgcccctgcatacctgcaagtcccatatccagacctagtgttcagggccgtgggataacagccaaaaataggaaatcattttactcatcaatggaaaaatggtgacacagtcatataatggaactcaacaatgacgataaatcaatgtctaccacagacaagaacatggatgtgttctgtaatactgaaccaaataagccaggctaaatag

SEQ ID NO: 566311 - DNA, 598 bp, Homo sapiens
tcctgggttcatatctcagctctgccatgaatgagctgtattaccttgggcaagttacttagctgtcctctgcctcgattttctcatctgtaaaatgggtatatggagagactctacctcacaggctgtcatgaaaatgaagggcctgtatgcaaagctcaataatgctttatatgctgtaggttctctgaaagtgtgagccaccactcctagtactatatagtctattaggtgagacaagatgtggaaacaaatagaaataccatatagtgccttggtgattgctgcagagacacaaatgcagcagaaggtggactccatggtgcagtcattgatggcttctcagaggcggtgacatttgagttcaacttttccatctgcacaggagggcagggtcagcctagagggagtaaagtgtctgagcacaggaatagaggcygagggtgctgggtaagtggagagtggttttgtgaggtttgagagcaggatacgcaccagggagggtgtggttgaagcaggaaggggctgtgctgcaggtgtgcaggcctgcagaggggtgcaggcctgcagaggagtgcaggccaggcatgacagggtc

SEQ ID NO: 566312 - DNA, 598 bp, Homo sapiens
tcctgggttcatatctcagctctgccatgaatgagctgtattaccttgggcaagttacttagctgtcctctgcctcgattttctcatctgtaaaatgggtatatggagagactctacctcacaggctgtcatgaaaatgaagggcctgtatgcaaagctcaataatgctttatatgctgtaggttctctgaaagtgtgagccaccactcctagtactatatagtctattaggtgagacaagatgtggaaacaaatagaaataccatatagtgccttggtgattgctgcagagacacaaatgcagcagaaggtggactccatggtgcagtcattgatggcttctcagaggcggtgacatttgagttcaacttttccatctgcacaggagggcagggtcagcctagagggagtaaagtgtctgagcacaggaatagaggctgagggtgctgggkaagtggagagtggttttgtgaggtttgagagcaggatacgcaccagggagggtgtggttgaagcaggaaggggctgtgctgcaggtgtgcaggcctgcagaggggtgcaggcctgcagaggagtgcaggccaggcatgacagggtc

SEQ ID NO: 566313 - DNA, 534 bp, Homo sapiens
ttctcgaactcctgacctcaagtgatccacccgcctcagcttcccaaagtgttgggattacaggcgtgagccactgcagctggctgattttgttttattttgaggaaatagggccaggcacagtggctcacacctttagtcccagctacttaggaggctgargtggcttgcttgagcccaagaggtcgaggctgcagtcagctgtgattgagcccctgcagtccatcctggaaaacagaatgataccttgtctcattaaaaaaaaaaaaaaaaatcgaatcaatgaaagaaaatgaaatcacatctgttcttcagtaaagtttaatagttttctgcttaattatattaattttatccctagaaatgtatttttgttgctattttgaaaggtattgtttctctgttaggttttttttgtttgtttgtttgtttttgagacagagtctcactgtgtcgcccaggctggagtacagtggtgcagtcttggctcactgcaacctctgccccccaggtccaagtgattctcctgcctca

SEQ ID NO: 566314 - DNA, 534 bp, Homo sapiens
ttctcgaactcctgacctcaagtgatccacccgcctcagcttcccaaagtgttgggattacaggcgtgagccactgcagctggctgattttgttttattttgaggaaatagggccaggcacagtggctcacacctttagtcccagctacttaggaggctgaggtggcttgcttgagcccaagaggtcgaggctgcagtcagctgtgattgagcycctgcagtccatcctggaaaacagaatgataccttgtctcattaaaaaaaaaaaaaaaaatcgaatcaatgaaagaaaatgaaatcacatctgttcttcagtaaagtttaatagttttctgcttaattatattaattttatccctagaaatgtatttttgttgctattttgaaaggtattgtttctctgttaggttttttttgtttgtttgtttgtttttgagacagagtctcactgtgtcgcccaggctggagtacagtggtgcagtcttggctcactgcaacctctgccccccaggtccaagtgattctcctgcctca

SEQ ID NO: 566315 - DNA, 481 bp, Homo sapiens
agagtctcactctgttgcccaggctggagtgcagtggtgcgatctcggctcagtgcagcctccacctcccaggttcaagtgattctccagcttcagcctcccgagtagtcgagattacaggcctgtgccactatgctcagctaattttgtatttttagtagagacagggtttcaccatgttggccaggctgatcttgaactcctgggctccagtgatccactcacctcrgcctctcaaagtgctgggattataggcctgagccactgtgcccggccccatagcatattttaaaagtagtttttaggtattgtctatttgaaattttttaaaatatttttaaattttttttagagatgtggtctcactgtgtcacctaggctggattacagtggcatggtcatagctcactgcagcctgaaccttctgggctcaagcgatcctcctaccttagctaccctagtagatgggactacaggcaaa

SEQ ID NO: 566316 - DNA, 637 bp, Homo sapiens
tacgggtagctcccacctctctggatgctcacttctgcagggttcaaggatttgcattaggaaaccctgagaggtggtccggtgcagctctccccatcttcagcaaggtgaaaggaacatctatatctagtaatgtggcctttgagtgctggccagaagcccagctcagccactcacaggtggcatgtgcggaatacagacccagagttatctgattccagtgcctcatgtactttcccacycaactccagcccctcctcccactgagccaagcataccacagtggggaaagggagaggatacagcaaagtcctccaccatttggcaacttgatggatatggaaattttacaacactaggttgggcatggtggctcatgcctataatcccagcactttgggaggccaaggtgggataattgcttgaggccaggaatttgagaccagcctgggccacatactgggactttgtcactacaaaaaaatttaaaaattaggccaggcatggaggctcacgcctgtaatcccagcactttgggaggccaaggtgggtgaatcacctgaggtcggaagtttaagatcagcctggctaacatggttaaaccccatctctactaaaaatacaaaattagccaggc

SEQ ID NO: 566317 - DNA, 592 bp, Homo sapiens
cctgtaatcccagctactcaggaggctgaggcaggagaatcacttgaactcgagaggcggaggttgyagtaagacaggatcacaccactgcactccagcctgggcaaaagagtacgactctgtctccaaaaaaaaaaaaaaaaaaattaaattagccagacatggtggcatgcacctgtagtctcagctacttgggaggctggggcaggaggatcacttgagcctgaaagtcatggtgcagtgatcatgccactgcactccagcctaggtgagacagcaagaccctgaggaaggaaggaaggaaagaagcaaggaaggaaaaagggaggggggatgaaagaggggaggaaaaaggaatggaggagaggggagggggaaggaaggaggaagaaagagaaagaaagaaggaccaggcacagtggctcacacctgtaatcccagcactttgggaggccaaggcagggcagaacacttgagttcaccatgttttgagtttctcagtgtagctccccattgccatttgacagcagcaagctcatctggattcctctccccaccctctcacggctttacttaggatctcaattatctt

SEQ ID NO: 566318 - DNA, 279 bp, Homo sapiens
caggatcacaccactgcactccagcctgggcaaaagagtacgactctgtctcmaaaaaaaaaaaaaaaaaaattaaattagccagacatggtggcatgcacctgtagtctcagctacttgggaggctggggcaggaggatcacttgagcctgaaagtcatggtgcagtgatcatgccactgcactccagcctaggtgagacagcaagaccctgaggaaggaaggaaggaaagaagcaaggaaggaaaaagggaggggggatgaaagaggggaggaaaaa

SEQ ID NO: 566319 - DNA, 282 bp, Homo sapiens
tccattcctttttcctcccctctttcatcccccctccctttttccttccttgcttctttccttycttccttcctcagggtcttgctgtctcacataggctggagtgcagtggcatgatcactgcaccatgactttcaggctcaagtgatcctcctgccccagcctcccaagtagctgagactacaggtgcatgccaccatgtctggctaatttaatttttttttttttttttggagacagagtcgtactcttttgcccaggctggagtgcagtggtgtgatc

SEQ ID NO: 566320 - DNA, 565 bp, Homo sapiens
caccctttgtttccaaacccctttcctccagggtcccgctgtttcaaatctctgtggtctattaaatgctaaatcatctgacagatttcttctggggagactatagtttccagggcaacayccaaaacacatatatatatatctgtctttttttttaagtttttgttgttctcaacctgagctggcctgagcaaaactgttaggtgtagaggattagaacagagaacggggacagtcttcccagagttccagaagtacggggctgaggctggattgcccaaggagttcctggaccagtaatccccagagaaacagcatttagctcaagtaacagcctctagctcaagctaccagttctgtccccccatctccacagaaaacggattgatacagtttggctttgtgtccctacccaaatctcatctcaaattgtaatctccaggtgttgagaaagggacctgttgagaggtgattggctcatgggggcagtttcccccaggctattctcatgatagtgagttctcatgagatctgacagtttcataagaggctctttgcccttcat

SEQ ID NO: 566321 - DNA, 588 bp, Homo sapiens
gtagctgggcgtggtagcatgcacctttaatcccagctacttgggaggctgaggcaggagaatcacttgaacccagggkgcagaggttgcagtgagctgagattgtgccactgcactccagccagggtgacagaatgacaacctgtctcaaaaaaaaaaaaaaaaaaaaacaggttgtaacctgtccaagataccccccatacatctaaaacaattaaacacattcaacaaagtaaacatgtttctgtcctctgtctcatgtctctcaggcagcagggcttcccatgtattttatgctggcaggcactgtcccacacccacctgaagccacagtgtcttaaggcttcttctgttgtaaaacatgcctttggatccactaccaacaacttcttgacaaggtccagagctaaagcaacaattgggcaaatcacagtgaaaaggataaatatattatcagtaacagtatgccagaattaacaggccaccatccagaaagagcagagagggtctgagatcgtcagggagtcagcagacagggccccctaatcttcctcactctctgtattcagagtactgtgagaagaccag

SEQ ID NO: 566322 - DNA, 588 bp, Homo sapiens
gtagctgggcgtggtagcatgcacctttaatcccagctacttgggaggctgaggcaggagaatcacttgaacccagggtgcagagkttgcagtgagctgagattgtgccactgcactccagccagggtgacagaatgacaacctgtctcaaaaaaaaaaaaaaaaaaaaacaggttgtaacctgtccaagataccccccatacatctaaaacaattaaacacattcaacaaagtaaacatgtttctgtcctctgtctcatgtctctcaggcagcagggcttcccatgtattttatgctggcaggcactgtcccacacccacctgaagccacagtgtcttaaggcttcttctgttgtaaaacatgcctttggatccactaccaacaacttcttgacaaggtccagagctaaagcaacaattgggcaaatcacagtgaaaaggataaatatattatcagtaacagtatgccagaattaacaggccaccatccagaaagagcagagagggtctgagatcgtcagggagtcagcagacagggccccctaatcttcctcactctctgtattcagagtactgtgagaagaccag

SEQ ID NO: 566323 - DNA, 588 bp, Homo sapiens
gtagctgggcgtggtagcatgcacctttaatcccagctacttgggaggctgaggcaggagaatcacttgaacccagggtgcagaggttgcagtgagctgagatygtgccactgcactccagccagggtgacagaatgacaacctgtctcaaaaaaaaaaaaaaaaaaaaacaggttgtaacctgtccaagataccccccatacatctaaaacaattaaacacattcaacaaagtaaacatgtttctgtcctctgtctcatgtctctcaggcagcagggcttcccatgtattttatgctggcaggcactgtcccacacccacctgaagccacagtgtcttaaggcttcttctgttgtaaaacatgcctttggatccactaccaacaacttcttgacaaggtccagagctaaagcaacaattgggcaaatcacagtgaaaaggataaatatattatcagtaacagtatgccagaattaacaggccaccatccagaaagagcagagagggtctgagatcgtcagggagtcagcagacagggccccctaatcttcctcactctctgtattcagagtactgtgagaagaccag

SEQ ID NO: 566324 - DNA, 602 bp, Homo sapiens
cccagctactcaggaggctgagatgggaggatcacttgacccagaaggcagaggctacagttagccaagatcaagccactgcatgccagcctggacaacagagcaagacacatttgtgacttcatctaatcacctcctaccagtctgtgaagcaatgaaaatatttcttaccagataaaaagaataactcctaaactccagcagtccacagcayggttatacccagcagtcccaacagaaacaagaacttcaggagccaagcaggtgggggttccacataaagttctcatgagagaggtctctcccaaaatcttggagtgcccaaaatcagtaatctaaaattcagtacaaaagggaataatgttgaacttgtcataaaataaaaagattaacatagtctgccagtccaagaagacatgtaggctagatcagtttctattgtacaattcacacctgccattaatctggaatctacagattcatgtctttgcaagttaagacatttaactttggttaaattaaaattcctgagcctaggaatctcaacactcaggctttccaacttaatctatgtcctctgtaatcttacaaaaagcttatta

SEQ ID NO: 566325 - DNA, 549 bp, Homo sapiens
gttgcaaaggcaggaggattgcttgagcccaggagtttgagaccagcctgggcacaatagcaagactccatctctacaaataataaaatattaaccaggtgtggtggtgcgcacctggggtcccggctacccgggaggctaaggtgggaggtttgctcaaggctgcagtgaactgtgaatgcaccactgcattgcagcctaggccacagaacaggaccttgtctataaataaagaaataagtaaaaacataaataaaaataagtaaaaagaaatataagtaaatataaatataaatacatgtaaatatacaaatgaatacatgaaaacaatttttaaatttaacatcactgagggcatcctatccatttcatttcatgattccattacgtcatttcacttagatgaaatgataatatgacttgagatgagatgaaatgactaaatgatgagatgagatgaaatgatgagatgaaattttgagatgaaatggtgagtagaaatgatgagatkaaatgatgagacaaaatgacaaaattgaaaagaaattg

SEQ ID NO: 566326 - DNA, 549 bp, Homo sapiens
gttgcaaaggcaggaggattgcttgagcccaggagtttgagaccagcctgggcacaatagcaagactccatctctacaaataataaaatattaaccaggtgtggtggtgcgcacctggggtcccggctacccgggaggctaaggtgggaggtttgctcaaggctgcagtgaactgtgaatgcaccactgcattgcagcctaggccacagaacaggaccttgtctataaataaagaaataagtaaaaacataaataaaaataagtaaaaagaaatataagtaaatataaatataaatacatgtaaatatacaaatgaatacatgaaaacaatttttaaatttaacatcactgagggcatcctatccatttcatttcatgattccattacgtcatttcacttagatgaaatgataatatgacttgagatgagatgaaatgactaaatgatgagatgagatgaaatgatgagatgaaattttgagatgaaatggtgagtagaaatgatgagattaaatgatgagacraaatgacaaaattgaaaagaaattg

SEQ ID NO: 566327 - DNA, 594 bp, Homo sapiens
gaaaaatgttgagattaaatgcgatgagaygaattgagatgatatgaaataatgaaactaggtgaaataatgaaatgagatgaaacgaaataatgaaatgaaattgaaatgagatgagaagaaatgacgagatgaaatgttgaaatgaaaggaagaaatgatgagatgagatgaaatgatgagatgaaaaattatgagatgaaaatatgagatgaaatgaaatgagatgatatgaaatgacataatgaaataaatgagattagatgaaatgaaatgaaatagtgaaatgaaatgatgaaatgatgaaatgatgaaaatgaaatggagatgagatttgatgaaaagatgagatgatatgatgagatgggatgggatgagataaaatgatgagatgaaatgatgagatgatgagatgaaatgatgaggtgaagtgatgcactgtcacgtgtgtgtctattctttttcccaaccaacaaaaattataattcattaattttaattttatttaacaatactcttaagagttgaaggaaaaatattatctacattatgggttacaatctaagtataaataatacataaatatattaaaac

SEQ ID NO: 566328 - DNA, 594 bp, Homo sapiens
gaaaaatgttgagattaaatgcgatgagatgaattgagatgatatgaaataatgaaactaggtgaaataatgaaatgagatgaaacgaaataatgaaatgaaattgaaatgagatgagaagaaatgackagatgaaatgttgaaatgaaaggaagaaatgatgagatgagatgaaatgatgagatgaaaaattatgagatgaaaatatgagatgaaatgaaatgagatgatatgaaatgacataatgaaataaatgagattagatgaaatgaaatgaaatagtgaaatgaaatgatgaaatgatgaaatgatgaaaatgaaatggagatgagatttgatgaaaagatgagatgatatgatgagatgggatgggatgagataaaatgatgagatgaaatgatgagatgatgagatgaaatgatgaggtgaagtgatgcactgtcacgtgtgtgtctattctttttcccaaccaacaaaaattataattcattaattttaattttatttaacaatactcttaagagttgaaggaaaaatattatctacattatgggttacaatctaagtataaataatacataaatatattaaaac

SEQ ID NO: 566329 - DNA, 655 bp, Homo sapiens
atacatgatttaggtaatggatatgataatgactctgacttgatctttacgcattgcataaatatatcaaaatatcactctgtaccccataacatgtacatttattatatgtcaattaaaataaatttaaaagacaaaaaatgaggtaaaggtaaatgtacagaatttaattactttttcttctataaaacccgagtcagtaccaagaagagtcaatttattagttttctaaaataaaaaaaaatcaaaatgaccaaaaaagagcaatatccaagaaaacattgaaaatgaaacacaacatttagtaagaatggaaarcttgggcactgtatcaccctgttcctagataccgatttactgatggccatttaaatagaattttattctatctaattcatttatactcccagagttcgaaattacgttttacctacaataaatgagataacacctgtaaattatatggtactctgcctaacacacgttaataactcaatacatgttagcaataaacttttagtatagcagtcaaagtattaatttctcacattgcaatttccttcaaagacatgaatacaacctttctaatgactccttgttcatcaagatacctcttcaaattattctatttatttcattcagtatattatctgtg

SEQ ID NO: 566330 - DNA, 655 bp, Homo sapiens
atacatgatttaggtaatggatatgataatgactctgacttgatctttacgcattgcataaatatatcaaaatatcactctgtaccccataacatgtacatttattatatgtcaattaaaataaatttaaaagacaaaaaatgaggtaaaggtaaatgtacagaatttaattactttttcttctataaaacccgagtcagtaccaagaagagtcaatttattagttttctaaaataaaaaaaaatcaaaatgaccaaaaaagagcaatatccaagaaaacattgaaaatgaaacacaacatttagtaagaatggaaagcttgggcactgtatcaccctgttcctagataccgatttactgatggccatttaaatagaattttattctatctaattcatttatactcccagagttcgaaattacrttttacctacaataaatgagataacacctgtaaattatatggtactctgcctaacacacgttaataactcaatacatgttagcaataaacttttagtatagcagtcaaagtattaatttctcacattgcaatttccttcaaagacatgaatacaacctttctaatgactccttgttcatcaagatacctcttcaaattattctatttatttcattcagtatattatctgtg

SEQ ID NO: 566331 - DNA, 536 bp, Homo sapiens
aatggaaagcttgggcactgtatcaccctgttcctagataccgatttactgatggccatttaaatagaattttattctatctaattcatttatactcccagagttcgaaattacgttttacctacaataaatgagataacacytgtaaattatatggtactctgcctaacacacgttaataactcaatacatgttagcaataaacttttagtatagcagtcaaagtattaatttctcacattgcaatttccttcaaagacatgaatacaacctttctaatgactccttgttcatcaagatacctcttcaaattattctatttatttcattcagtatattatctgtgtataccgatatgatattacactttttttttttgagatggaatctcattctgttactgatgctggagtgaggtggcatgatctcggttcactgcaacctccacctcccaggttcaagcgattctcctgtctcagccccacgggtagctaggactacaggtgcacaccaccatgcctggctaatttttgtat

SEQ ID NO: 566332 - DNA, 536 bp, Homo sapiens
aatggaaagcttgggcactgtatcaccctgttcctagataccgatttactgatggccatttaaatagaattttattctatctaattcatttatactcccagagttcgaaattacgttttacctacaataaatgagataacacctgtaaattatatggtactctgcctaacacacgttaataactcaatacatgttagcaataaacttttagtatagyagtcaaagtattaatttctcacattgcaatttccttcaaagacatgaatacaacctttctaatgactccttgttcatcaagatacctcttcaaattattctatttatttcattcagtatattatctgtgtataccgatatgatattacactttttttttttgagatggaatctcattctgttactgatgctggagtgaggtggcatgatctcggttcactgcaacctccacctcccaggttcaagcgattctcctgtctcagccccacgggtagctaggactacaggtgcacaccaccatgcctggctaatttttgtat

SEQ ID NO: 566333 - DNA, 457 bp, Homo sapiens
taagttctcattcttataatactcaaaatgtcctttaatttttaatttttgatagtcatatcattatccctaggtattttagcttctatcttaaattctaaaatrattttgaaacaggagaaagtattctttattactatatgtattaaacatcatggttttcaaatttaactgcaaatgtatcttttcattgcttcttgatgacgcccttcaccctatccatattatcactaccaagtggtgattacttttcaggttcacatacttattctttagaaaaatcttgtctgtgccttataaagaatatgattgttggcattcaaaagccagtgaagtatacattattagcctgttgcctaactcatttctttaagaaactacactaattacccacatacttatgtttttatttcctcattatttctggaggaaacaaatactgctaacatgatatctg

SEQ ID NO: 566334 - DNA, 562 bp, Homo sapiens
tatcttttcattgcttcttgatgacgcccttcaccctatccatattatcactaccaagtggtgattacttttcaggttcacatacttattctttagaaaaatcttgtctgtgccttataaagaatatgattgttggcattcaaaagccagtgaagtatacattattagcctgttgcctaactcatttctttaagaaactacactaattacccacatacttatgtttttatttcctcattatttctggaggaaacaaatactgctaacatgatatytgtaagagagaaaaaagtcttttcttgaaaagtgctgtcattgtagtactaacttatagtatcaacttctttatcaactccttatgcgctttttattctgagagaaataaaaaagctaaaagtgaaatgactttttttactgtccatattataagcacccatcttggtaatttagggtctttatagttagggtaagttgtgtcataccgaggttacaaaatgaaaagtatttcgtctctttgggcctttctttattcagtaatactgtcagtttggctttttttgta

SEQ ID NO: 566335 - DNA, 562 bp, Homo sapiens
tatcttttcattgcttcttgatgacgcccttcaccctatccatattatcactaccaagtggtgattacttttcaggttcacatacttattctttagaaaaatcttgtctgtgccttataaagaatatgattgttggcattcaaaagccagtgaagtatacattattagcctgttgcctaactcatttctttaagaaactacactaattacccacatacttatgtttttatttcctcattatttctggaggaaacaaatactgctaacatgatatctgtaagasagaaaaaagtcttttcttgaaaagtgctgtcattgtagtactaacttatagtatcaacttctttatcaactccttatgcgctttttattctgagagaaataaaaaagctaaaagtgaaatgactttttttactgtccatattataagcacccatcttggtaatttagggtctttatagttagggtaagttgtgtcataccgaggttacaaaatgaaaagtatttcgtctctttgggcctttctttattcagtaatactgtcagtttggctttttttgta

SEQ ID NO: 566336 - DNA, 623 bp, Homo sapiens
tcattgtagtactaacttatagtatcaacttctttatcaactccttatgcgctttttattctgagagaaataaaaaagctaaaagtgaaatgactttttttactstccatattataagcacccatcttggtaatttagggtctttatagttagggtaagttgtgtcataccgaggttacaaaatgaaaagtatttcgtctctttgggcctttctttattcagtaatactgtcagtttggctttttttgtaggtcaacttattgaactcagtattctgaaataatatgtttactatcttttgataagcatttaaaatattagatttattgttattcttctgactttattgggctggaagaataattgtttcactccataaaagccaagttgcggagaaaaacacatagacattcaactgcaaagcagagaaacttgactattttctgcaattttaaagtgtatattgaataaaaccatctttttattttcttttttgctcactggcaaatattaacaacatcaagtgtattattataatgttatctagttaaaaatctcaaaaagttttcataattaccattttaaaatatataaataggggacctaatgttaatttttattgt

SEQ ID NO: 566337 - DNA, 623 bp, Homo sapiens
tcattgtagtactaacttatagtatcaacttctttatcaactccttatgcgctttttattctgagagaaataaaaaagctaaaagtgaaatgactttttttactgtccatattataagcacccatcttggtaatttagggtctttatagttagggtaagttgtgtcataccgaggttacaaaatgaaaagtatttcrtctctttgggcctttctttattcagtaatactgtcagtttggctttttttgtaggtcaacttattgaactcagtattctgaaataatatgtttactatcttttgataagcatttaaaatattagatttattgttattcttctgactttattgggctggaagaataattgtttcactccataaaagccaagttgcggagaaaaacacatagacattcaactgcaaagcagagaaacttgactattttctgcaattttaaagtgtatattgaataaaaccatctttttattttcttttttgctcactggcaaatattaacaacatcaagtgtattattataatgttatctagttaaaaatctcaaaaagttttcataattaccattttaaaatatataaataggggacctaatgttaatttttattgt

SEQ ID NO: 566338 - DNA, 623 bp, Homo sapiens
tcattgtagtactaacttatagtatcaacttctttatcaactccttatgcgctttttattctgagagaaataaaaaagctaaaagtgaaatgactttttttactgtccatattataagcacccatcttggtaatttagggtctttatagttagggtaagttgtgtcataccgaggttacaaaatgaaaagtatttcgtctctttgggcctttctttattcagtaatactgtcagtttggctttttttgtaggtcaacttattgaactcagtattctgaaataatatgtttactatcttttgataagcatttaaaatattagatttattgttattcttctgactttattgggctggaagaataattgtttcactccataaaagccaagttgcggagaaaaacacatagacattcaactgcaaagcagagaaacttgactattttctgcaattttaaagtgtatattgaataaaaccatctttttattttcttttttgctcactggcaaatattaacaacatcaagtgtattattataatgttatctagttaaaaatctcaaaaagttttcataattascattttaaaatatataaataggggacctaatgttaatttttattgt

SEQ ID NO: 566339 - DNA, 614 bp, Homo sapiens
tattattataatgttatctagttaaaaatctcaaaaagttttcataattaccattttaaaatatataaataggggacctaatgttaatttttattgtctgagaccatgtctgttatttcactctttaaattcagttagtaatgcagaacctagcacttagtagatactcaaaaattatttgctgaataaaaaaaggttaaacatttaatatatacaaaatgtactggaaaaaatgcaccaaacaattttgttataccagtttaatgtaaatattgcctttaaaagataatatagttttcaggtgtctacagtgattttgtaatatttgtgcacatataaaataatatttccaaaaaygtaatccagtggggaaatatactttctaaattctagatttataatttagggtttaaattataaaatcattaaataagacacaagtgaaatatagtcaaatatccccttggaaaaaaattaagtggcctctaaagtgaggtattaatatatgtaattttacaatccactagtgatagaattaattaaatatgccaccaaattgattaactcctacagtgttaaaagagaagcactaacaatgccagtgaacatgtaac

SEQ ID NO: 566340 - DNA, 553 bp, Homo sapiens
aatatatacaaaatgtactggaaaaaatgcaccaaacaattttgttataccagtttaatgtaaatattgcctttaaaagataatatagttttcaggtgtctacagtgattttgtaatatttgtgcacatataaaataatatttccaaaaatgtaatccagtggggaaatatactttctaaattctagatttataatttagggtttaaattataaaatcattaaataagacacaagtgaaatatagtcaaatatccccttggaaaaaaattaagtggcctctaaagtgaggtattaatatatgtrattttacaatccactagtgatagaattaattaaatatgccaccaaattgattaactcctacagtgttaaaagagaagcactaacaatgccagtgaacatgtaacatggatttaagctacaagtcatagaaatgtgatgagaagcctcagcgctgtaaaacagagggtggaggaaagattttcctctctcaaatgagctttgcgaggtatactttttgaagggataggaagttgaagtgttcaggacttt

SEQ ID NO: 566341 - DNA, 553 bp, Homo sapiens
aatatatacaaaatgtactggaaaaaatgcaccaaacaattttgttataccagtttaatgtaaatattgcctttaaaagataatatagttttcaggtgtctacagtgattttgtaatatttgtgcacatataaaataatatttccaaaaatgtaatccagtggggaaatatactttctaaattctagatttataatttagggtttaaattataaaatcattaaataagacacaagtgaaatatagtcaaatatccccttggaaaaaaattaagtggcctctaaagtgaggtattaatatatgtaattttacaatccactagtgatagaaktaattaaatatgccaccaaattgattaactcctacagtgttaaaagagaagcactaacaatgccagtgaacatgtaacatggatttaagctacaagtcatagaaatgtgatgagaagcctcagcgctgtaaaacagagggtggaggaaagattttcctctctcaaatgagctttgcgaggtatactttttgaagggataggaagttgaagtgttcaggacttt

SEQ ID NO: 566342 - DNA, 453 bp, Homo sapiens
attgacaaataaaaattgcttgtacaacttgaagttttgatatatgtatacattgtgtatgaatatgtcaaactaacatttattagttcacatacttatattttatggtgatagcgtttatatasactcttagcaatcttcaaatatataatacattgttaactgtggtcaccgtattatacaatacatctcctgaacttattccttctggctaaattttgtatcctttgaccaacactaatcctttctcttttcctacacccccaagcctttggtagccaccattctactatctgctcctgtgagttttacttttttagattctacatataagtgagatcatgtgttatatgtctttctgtgcctgacttatttcacttacaataatgtcttccatgtttatccatgtttttgcaagtggcagacagctttccttctttttaaagctgaata

SEQ ID NO: 566343 - DNA, 453 bp, Homo sapiens
attgacaaataaaaattgcttgtacaacttgaagttttgatatatgtatacattgtgtatgaatatgtcaaactaacatttattagttcacatacttatattttatggtgatagcgtttatatagactcttagcaatcttcaaatatataatacattgttaactgtggtcaccgtattatacaatacatctcctgaacttattccttctggctaaattttgtatcctttgaccaacactaatcctttctcttttcctacacccccaagcctttggtagccaycattctactatctgctcctgtgagttttacttttttagattctacatataagtgagatcatgtgttatatgtctttctgtgcctgacttatttcacttacaataatgtcttccatgtttatccatgtttttgcaagtggcagacagctttccttctttttaaagctgaata

SEQ ID NO: 566344 - DNA, 581 bp, Homo sapiens
ttatacatatatacatatatatgtatatatgtatgtattctctgtatgtacactctctctatatatataatctgtctatatagtctatatatacttatgtactctctgtctstacagagggaggcagagagagagagagagagagagagagagagagagacagacagacagagagtacagatgtttacctgcaatgcaaaaacaagagttaaagaaacccactagacataatggttaacatcataacacatgcaaagcactttatacatgcatttaaaagcatcaaagaagctgggcatggtggctcacgcctgtaatgtcagcactttgggaagctgaggtgggcggatcacctgaggtcaggagttcgagaccagcctggacaacatggtgaaatcctgtccctactaaaaatacaaaaattagccaggcgaggtggcacatgcctgtagtcccagctactcaggtggttgaggcaggagaatcacttgaacccgggaggcagaggctgcagtgagccaagattgtgccactgcactccagtcagtctgggcaatagaacgagactccatcccaaaaaa

SEQ ID NO: 566345 - DNA, 570 bp, Homo sapiens
cacaaataagtgagaacatgcgatgtttgtctttttgtgcctggcttatattacttaatataatgacctctagtttcatccatgttgttgcaaatgactggatctcattcttttttrtggctgaatagtactccattgtgtatatgtgccgcattttctttatccatttatctggtgatggacagacacttaggttgctttcaaatattagctattgtgaacagtgatgcaacaaacatggaactgcagatatgtcttcaatatagtgatttcctttcttttgggtatatacccagcaatgatattgctgggtcacatggtagctgaatttttagttttttgaggaaccttcaaactgttctccatcgtggttgtatttatttacattcctaccaacagtgtatgagggttcccttttctccacatcttcagcagcatttgctattgcctgtctttggatataagccattttaactggggggagatgatacatcattgtagttttgatttgcatttatttgatgatcaataatgttgagcaccttttgatatgcctgtttgccatttgta

SEQ ID NO: 566346 - DNA, 593 bp, Homo sapiens
aaaaaaagtcaaaaacattacacgaaaagaaaactgcggaccaacatctctggtgaacaaagatgcacaaattcccaacaaaacatgtgcaaactaaatctaatagtgtatcaaaagaattatataccatatccatatgggatatatcccakatatgcaaggctgactacacattcaaaaatcaatgagtgtatctaatgacatcaacaggctaaaaggaggaaaaatcacatgattatatcaacagatgcacgaaaaatattgagcaaaatccaatgcctgtttattataaaaacttttgaaaaactattaatagaggataacttgtttaggttgataaagaatatttattaataaaactacagctaacttcatacttaatggagaaattcaaagctttctcactaagatcaggaccaaggcagggataagcctgtcactactccttttaccatttactggaagtcatagctgaaatggtaagacaagaaaaggaaataaaggtatacaattggtaaggaaaaaaataaaactgcttttattcacagatgacgtgattgtctgtgtagaatatctgaaagaatcaaccaaaa

SEQ ID NO: 566347 - DNA, 593 bp, Homo sapiens
aaaaaaagtcaaaaacattacacgaaaagaaaactgcggaccaacatctctggtgaacaaagatgcacaaattcccaacaaaacatgtgcaaactaaatctaatagtgtatcaaaagaattatataccatatccatatgggatatatcccatatatgcaaggctgactacacattcaaaaatcaatgagtgtatctaatgacatcaacaggctaaaaggaggaaaaatcacatgattatatcaacagatgcasgaaaaatattgagcaaaatccaatgcctgtttattataaaaacttttgaaaaactattaatagaggataacttgtttaggttgataaagaatatttattaataaaactacagctaacttcatacttaatggagaaattcaaagctttctcactaagatcaggaccaaggcagggataagcctgtcactactccttttaccatttactggaagtcatagctgaaatggtaagacaagaaaaggaaataaaggtatacaattggtaaggaaaaaaataaaactgcttttattcacagatgacgtgattgtctgtgtagaatatctgaaagaatcaaccaaaa

SEQ ID NO: 566348 - DNA, 482 bp, Homo sapiens
catgcaagatagttgtaatggttaaatgaaataatcaatgaaaaagaattcataagcatttattttccattatttttattttaatttttaaattatttaatatttttattttttataattttaataaaacaaaaaagtattttacttttactaatatttatatatatttggagatatatttttgaatacatatttatttaggttcaaaatgtaagaggcctctgttaaaacatatttataaattattttattgaaattatctgtctttatttttcttttctttctttcttttttttgagacggagtctttttttttttggctctgttgccaggctggagcgcagtagctccatctcggccactgcatcctccgtctcccatgttcaagcaattctcctgcctcaagctcccaagtagctgggaccacaggcrggcaccaccatgctcagctaatttttgtatttttagtagagatggggttt

SEQ ID NO: 566349 - DNA, 528 bp, Homo sapiens
gtaaaaagttttgcttatttgatgcatgcaactcaatgagtttaggaataagtgatgaaaccatyactacaaacaaagccatagacatatccctcacctcccaaattttcttctgccttctttgttattgccatcatcatcaatgtgtgtatgtatgtgtgtgtttgataagaacatataagatatgctctcagaaaattttaagaatatgatatactatgttagctcttggtactattctgtatggtagatctccggagtttacttatcttacaaaactgaaattttgtaccctttgtaagtcaaatatattgttaatgtcaggcctctgggcccaagactgtacgtatgcatccagatggcctgaagtaactgaagactgacaaaagaagtgaaaatggcctgttcctgtcttacctgatgccattaccttgtgaaattctttctcctggctcattctggctcaaaagctcccccactgagcaccttgtgacccccacccctgccagccagagaacaacccccttt

SEQ ID NO: 566350 - DNA, 550 bp, Homo sapiens
tttgcttcttactagttatgtgaccttaggtaagtaagttaacctctctggctttggtacagagggttgatgagaggattaaatgggttaatgtatgtatgtaaaacatttagaaagtgcctggcacctagcaaatactatgttaaatataagtatttactattgtaattggtggtcataaagtcaacctgaagagcaggtttaatgagccatcatggtctcttttcctagatctttaccctaatattgactcttgtaagcttctaattctgaggtgagaaccaaaatgaaaggatcctaaggaaaggcagagctcttctaaatactctattccaggtctcttttgctctggactccatactggcttctttttggaaaggggtccctttgacagggaaatcagttccttgcctgtyttgctaaagcaactctaaaaagaggcattgcaaagagaaaacgattcagaagaatatattcagtgaacaaaatatttaaaaactgctttattgcacatatgggaacaatagactctgggactactaggggaggg

SEQ ID NO: 566351 - DNA, 592 bp, Homo sapiens
gagattacaaagtaccttcttaagggtgggggagattacaaagtacattgatcagttagggtggggcagaaacaaatcacaatggtggaatgtcatcagttaaggctatttttacttcttttgcggatcttcagttacttcaggccatctggatgtatacgtgcaagtcacaggggatgcgacrgcttggcttgggctcagaggcctgacagatactatgctgactacctgagtgatgggatctgtacccaaagcctcagcatcatacaatttacccatgtaacacacctgtacatgtacctccattatctaaaataaagccaaaatttaaaaaacaaaaaacaaacaaaaaaaaacttacttattcttctttctaaaggttttccctcctagtgtctagcccaattttttcttataggaatgagtttgtctgtagttgataccacttcttcatttccttcttgaatgatggtggataagacataggggaaattccatttgaggtcaccctcatgttaaagtatggtagccagagcatggcccagagaatgttataacctgcactaaatggctatgttgtcatggcagcttc

SEQ ID NO: 566352 - DNA, 445 bp, Homo sapiens
acaaaatttctgctttcctatcaacaaataatactatgatgattctgaacttaatgaaaaaccaagtcctgagcacttaaatgatctgagaaactaatgtgcattaattgcatattaacatcaaagagcaaaaaagatgctctgataaatatgtagctggtataattttttcaatccacttattttgatgatgatgatgataattagactatgctggttacttaagagaatacatagaattattgggggaaccagcccccaatgtttcaacrtaggttctttctattttccctaagtgtcggctcatctgagaaataaagagaaagagtacaaagagagaaattttatagctgggactccgggactgtcatcacatattggtaggaccatgatggcaaccccgagctgcaaaaccagaaagtttttattagggattttaaaaggg

SEQ ID NO: 566353 - DNA, 583 bp, Homo sapiens
gagaaaccttggattagaagtcatgggaaaggattgtagattcctaggtttgggacatcagcaatgagagaatagtatttattagtcatttatttttgtgatgaggaagaatggaggaggaacagttttgcatcatgactattgggtagaattaagtagcatatgatagatgagcataattgtggatatttctcttgagtttttgccagagtaccagattyctctttttttcttttctataaacagtagttatgtcaaagttggatggttggatgcaggagatgagcaataagttactcattttctccaaagtcagaggatgcaaacttctcatgttctcacctgcaggtttttttggtttcttttcttttctttttttaaaaaataaatttaatttaattttaagttccaggatatatgtgcaggacgtgcaggttagttcagccatttaacgatgagtccgtggcttccatttgtaaaatgcaggcaaggtgaacaagtccatggaaagacatgaaaaccaaactctcagaagggaatgctacatgtctttcttatcccaggaaattctgctgggataaga

SEQ ID NO: 566354 - DNA, 362 bp, Homo sapiens
atagctttttaaaattttcttatgtatccgacatttttaaattatttatttattaccccattgtttaaaatatttagctcaaactttttattttaatgtgtggcatcatagctttgttgaaagtgaatgggctttggactggaaacactacgatttcaattttgccttggtcattrtgaattcagataagttgtacctcttgttttttttcaactcaaaaatagggggatattatacttgttttattgtgccaggaaatgagcacttgtcatttgtttgggaaacacaacatcctttggtttaaaattgggaaaattctttaccttgtgttttgggggtggtggagacctccttcccctaga

SEQ ID NO: 566355 - DNA, 362 bp, Homo sapiens
atagctttttaaaattttcttatgtatccgacatttttaaattatttatttattaccccattgtttaaaatatttagctcaaactttttattttaatgtgtggcatcatagctttgttgaaagtgaatgggctttggactggaaacactacgatttcaattttgccttggtcattatsaattcagataagttgtacctcttgttttttttcaactcaaaaatagggggatattatacttgttttattgtgccaggaaatgagcacttgtcatttgtttgggaaacacaacatcctttggtttaaaattgggaaaattctttaccttgtgttttgggggtggtggagacctccttcccctaga

SEQ ID NO: 566356 - DNA, 469 bp, Homo sapiens
gatattttactaaagaagataatcagattgcaaataacacatgaaaagatattcaacatgttaaaaccacrgtgagattccactatacacctattagaacgggtaagaaataaaaacaaaaacaaaaagccatcaataccaagcactggcaaaaatgcgaagtaactaggaccctcgtacccggctggtggacatgcaaaatggtcaagccactctggaaaacggtttggtaatttcttataaagttatatgtacatttaccttatgatctgcaatcccactcctaggtatttagaagaatgaaaacttgcatttatacaaaaaaactatgtccagggcacgttaagagcagcattgttcctaatcatcaaaaactggcaacagcctgaatgttcttcactggtgttttattgtaccagagttaccctggtacaacaaaatacttctcagcaataaaaagaaacaaact

SEQ ID NO: 566357 - DNA, 588 bp, Homo sapiens
actctgcccctttttctttgcctcggaatcttcttttattttttataacttcaggccaggtagtagattttggaggataaggatttttactctaaatttgattagggaaaatgtatcattcagaaaaagctctgcatgtctcaacatgcgtcaatcttgacaacatacattttcaataaaaaaataaagttgaaaaaattcatatgatataatttttgtaaattttaaaacactttatatttttatggtcacatacatacatcagaaaaatacatttattcccacaagaaagatgaacaccaactccaggagagtggttattttgtggagaggggaaagaaaaaaacgaacggggtgggctgggctgaactgggactatggctgtaactgtttttcctcaaaaggaggaaatctatctaaagcaagtcygccaactgttagtacttttaaaatccaggtttatactatcttcagttcttttttgtactttgaaatatttactaaataaacatttacataattcatgtatcaaaatatcacatgtatcccattaagtatgtacaattattatttatcaatttaaaaaat

SEQ ID NO: 566358 - DNA, 632 bp, Homo sapiens
ggtttaattgacttacagttccacatggctgggaaggactcacaatcatggctgaaggtgaatgagaagcaagttatgtcttagatggtggcaggcaagagagcttttgcagaagctgcaaccaggagaacttaagaccatgtttagcctgcaaacacattttatttgccataaacaatgtttattttttaaaattgcattagttgcctctcttaaaattggaaaatttcttctaaaaacaatttggatgtcaggcttctcttgaaaagttggaaggtctaacacactgggtctatgttctctcacagcagtaatcaactaaagctgatgagaatattttctccagttctctgggccyacttcatgtgggcatgttacctgcctggtgctgtaggtgttggaaatccagagattctgaattctgcttaactacagcatccttacaatatacctcttaaagatggtcttgcattcatttaataaataatgattttttgcatactacatgtaaaacattgtgctgaggaacaagacaacaaggtcccttgtctattggaatttgttttggtcttataggcaatgttatgggctgagttttgtccccccactacaataaataatagaaaagatat

SEQ ID NO: 566359 - DNA, 587 bp, Homo sapiens
aatttaactcccaaggccaggaactaataacatgtgatggacatcaaaaaaggagaaaaccaataatcaatgaaataaatagaaatcaagaaactgaaggaggctgttatcagagaaagaaaaggcacaagaaattggataatctagatacctgggtaataaattcaagcctcatgtaaaacagtgctgtgatcagaaaatttatgtccctggcaaattcatatgttgaaatcctcacccccaaggtgatggcatttaggagctggggcaattgggggcaattaagtcatggggagtccatgaaaggaattagtgtccttataaaagagaccccagagatcccctttgtttcttccatcttgtgmggttagatggctgtctatgaggaagtgggtcctcactagacatggatctgctagcaccttgatcttggacattccagcctccagaactgtgagaaataaatgtctattgcttatgagccatcctgtctatggtactttgttacagcagcctgaatggattaagacaaacagcaatggctctattttcaattgagaattaaccaaaaggaaaatgggtgtttc

SEQ ID NO: 566360 - DNA, 479 bp, Homo sapiens
attcgcctgcctcagcctaaatggattgagtccatttgcagaaaacagaggaaaagtacgctgtttccactggtttcaacttggagcaggattgtctgttggtgtctcarcatggggccttcttcactctccctggaagcaaggcccagaaacataaaggctatgttttctagactccttgtaagtagtgctctgatttagggtcttctaacgagagacacttgcacgagaaggtggaagagaaggcactgttattgctctggagttagtgagcaggtacagggtcactggcagatagcagatctgaggttttgccagtgacttttgggggtctgcctgaaaatcacctacttaggtgcttcagacaactgagacaggtgatgaaggtcccctgcaactcctgccttacctgatttcctgaatacttgtggcagtttccctgattttcttgtcttacaatgttttgtaaaccctaaatt

SEQ ID NO: 566361 - DNA, 479 bp, Homo sapiens
attcgcctgcctcagcctaaatggattgagtccatttgcagaaaacagaggaaaagtacgctgtttccactggtttcaacttggagcaggattgtctgttggtgtctcagcatggggccttcttcactctccctggaagcaaggcccagaaacataaaggctatgttttctaractccttgtaagtagtgctctgatttagggtcttctaacgagagacacttgcacgagaaggtggaagagaaggcactgttattgctctggagttagtgagcaggtacagggtcactggcagatagcagatctgaggttttgccagtgacttttgggggtctgcctgaaaatcacctacttaggtgcttcagacaactgagacaggtgatgaaggtcccctgcaactcctgccttacctgatttcctgaatacttgtggcagtttccctgattttcttgtcttacaatgttttgtaaaccctaaatt

SEQ ID NO: 566362 - DNA, 512 bp, Homo sapiens
tttgtggtcattttttaaaataacaaattagctgaggactgtagacaaaagcaaattttttttttttgagatggagtcttactcaatcgcccaggctggagtgcagtggcagaatctctgctcactgcaacctctgcctcccargttcaaacagttctcctgcctcagcttcccgagtagctgggattacaggcatgcaccaccacgcccagctaatttttgcatttttagtggagaaggggttttaccatgttggccaggctggtctcaaactcctgacctcaagtgatccacccacctcagcctcccaaagtgctgggattacaggtatgagtcactgttcctggccgagaaaagcaattttagtcacaaacaatcatggctgcattaacaacttcaaacaaggtctatagtaactgagcatattttcttctaagtttttaggcatacatttctataatatcaatttttttcttccccctgctattttctataaggtgtgttagtggtac

SEQ ID NO: 566363 - DNA, 435 bp, Homo sapiens
ctttaactccccaacattattctccaaagattagtgatgaggcaacacaagcwaatgtgaatttattacatcctggtctctatttcaagttgttttaaagattatcatacattttctctttcttttattctttgaggaaaaaatagcattcctttaagggtacttactccttttaagagcttggagcctaccccttcacatgtgttctttaaaatttctcacgtaattctccactattctctcattatctttgtctccctgacccccacccctgcctcagaatcaacactgctatggtaaactgttacacgtttttctaaaactctcaccaatattcgaataaattaagtagatatgatttagtagagtctataaggattctcaaacacaagataaatgattaggaccctgcaatttttcagtatcagaagaagg

SEQ ID NO: 566364 - DNA, 400 bp, Homo sapiens
tacaacaaagtaaacaaacaatgaaaaatcacaaaatatattatcgcataaaacattctgaaacatgtggagaagcccctaatgactgaaaaccagawgacaaacccatcaatagatctagaaattactgcaatgatagaacttgctaaaaatcaaatgcaaaaataagtatcaaagcatagagagatgagtaagacaaatgaagtacagaggaacaaaagacatatgagagatttatcaggcattacacaacaaaaattaagtgaagtaaaacatttgaagaactgaaagaaaaaaaggtaaatcaacttagaactgttgccccataaaaatattctcactgaaggcaaaataaagatgttttcacaaagaaactatctgagataatgtactgccagaa

SEQ ID NO: 566365 - DNA, 400 bp, Homo sapiens
tacaacaaagtaaacaaacaatgaaaaatcacaaaatatattatcgcataaaacattctgaaacatgtggagaagcccctaatgactgaaaaccagaagacaaacccatcaatagatctagaaattactgcaatgatagaacttgctaaaaatcaaatgcaaaaataagtatcaaagcatagagagatgagtaagacaaatgaagtacagaggaacaaaagacatatgagagatttatcagrcattacacaacaaaaattaagtgaagtaaaacatttgaagaactgaaagaaaaaaaggtaaatcaacttagaactgttgccccataaaaatattctcactgaaggcaaaataaagatgttttcacaaagaaactatctgagataatgtactgccagaa

SEQ ID NO: 566366 - DNA, 514 bp, Homo sapiens
tgaaaaacatctaatttatggaatttgagaattgtagcatctctggggtagagttgggtgtttctctttgtggcagatcttctccttactctggaataaaatgatttgatgagtaagtatagtttcatacacatggtgaagtttcagtataaactcatgcaggattgaggttggagcctagtcattattcttggtacaaaggattaacccaaacgcagtttcttcattcagagctactgtacatttatttagaaatggaaattgggtatataaacaaggcagcatctttgtacaatagagcattttacccctaattttagatttgaattattcaatgaagaaacatgaggcatatgcttccgggaatgtggaggtacatgatctccactcaatgctctgaagaacattccatggcaaggacgtggcttgactaacatgtccaactaacratgcgctcttctttagaaggttgtttaagagtggataaatatgactttggggaaaatggaatatt

SEQ ID NO: 566367 - DNA, 650 bp, Homo sapiens
gaattcccaggaaggagatctttgaaagacaataataatatctgctgctgaaggcttttaattctttggacaataagtggtgctacactgggcacaatttggtgctaaagaaagaaagttatttgtaggcagaatcctgtacctgcctcctagtctctgcagagaacagagagtttgttgttgaatagaaatggccagcagtgttactattgctgtattttgtattttatctaaggtcatattcaacttcttttttttctcataaaaaattaaactgttaaactgcccattatccattgtccttttacackggtgtttcctggtcttgtctgttgctcaatgtgattgaatgaccatgtatgacaaatagtaatgagctcatagtatttcccttagtcagttaataaacagtgcatatctttggaagaagagacacactttattacttccccatatggtttcaaagggatgtgagagcacaatgagtcaggccaacaggaaaacttaaaaaaagaaacggaaaaaaaagtttttaaagaatcttattgtgtttctcccaagttgctcatagcaacttgtttattaattctagaaataggcaaagaaattttataccttaataagaaaagaaaaagacaatattttaggga

SEQ ID NO: 566368 - DNA, 608 bp, Homo sapiens
atcacagactgtcctggattccagaagagttccaaccagtgaagctggcattccaggagaatcctctgattcttttggcaaaactgagtcaagaacatattgccagttcttcctgggctcaactaaatgtggattccattcacaatcacttttgctttgcatgytgtgtacgcttatgaccatcatgtttatcagcagttccagagggcagctgcgaggttgcttccaaatattgcaatatgattccataatgttttgtagaatttggaatccattattctcatattcaaggacaggtttcagatttcagcattgaaagatgtcttcccagttctttcattgctttcagggtgctcagctcacatggcctgagacaggaattgtgcagcctccacagccacctaaactatagactttctagaggactctacaaaagcctgtttcatgtgcagcatggtggaagaatacagttaactttttcaatactagaaccataaaaatcactgaaactatattacctttttgtttatcctaaaagagacaaatattcaccctatctagaaacacagaacatcttcaaatgcacctctgcgttgttgaaaaaggca

SEQ ID NO: 566369 - DNA, 543 bp, Homo sapiens
tcagttcataaaaatgcttgattcatcaaaaataatcacctcacctgataattgaaagctacagagaattattatgcagccgtggactctcaaaaatttattcatttttggtaattaacattatttcttcttgatgatgttgctaaatggcttgaacccagtctgaagaaccatgcatgatcatttatgctgaaaasaaaagaaattagaagcttttgttgcacaggtaagaaaagataaatttctgaaaaccaaaatgtcctaccaggtctatccatatttgttttattaatgggtaatgctttctattagctaatgaaaagatgatggtagtttaacagtggaataacttttaatatatcataatcagagaatacaaggtaagcaaaattacaatccaatgtctgattagaaaaaaaaattattttatggaattaaaaaatattattttattaaataaaatatggttttcttttgaaagtatgtggaaatcaaattgctaagatcaatgcaaccatttaactgagtttcattttgacaaaa

SEQ ID NO: 566370 - DNA, 654 bp, Homo sapiens
agactggattcccgtgacagtgggttgttacaaagtgagcctccttcacttgttcagtcctctgtttgaacgtgtcagcttccccttggccttctccaggttatgacacagtgtgaaagcccttgtcagaagccagggccatgctcttgaacttcccaggctacaaaactgtgagctaaatgaacttctcttatttataaatggctcactatcaggtrttccattatagcaacactaagtggactatgacaccccctagcctcctggtggagggaaaggcagtcggtgcccccaccatccctgggaccctcctacctgacacaggcaccagctgcatggatcaccaaacttccctcacactgccttgggaaactgaggaagcaaaggaaagttcacccattcaatcagtctcttataatcttatcgcgcatagaaatcactctgcatatatttattgtggtaataaaaaaaaaaacctagtccccaaatgttgaatgcaaatatgaattttggtctactcttgctcactggaacttaaaaggttgaaatatccaaattgaaatatccaaagaaaatagattataaaaatagactgagaaatcagatctagcagttcacaatttatcgacatagacatgagcactgaaactatga

SEQ ID NO: 566371 - DNA, 551 bp, Homo sapiens
gagaatttaccttccagggccccatagtctagggctgggggtagacaatacctgacctgaacttgagagggatgcatccctatattttataatctattgtctggccacttattactttaagactgttgcaaagaaactagaggcatttgacaatttctgtaaaatattgctatcagatagtgttaggtgaatactcacaggccatcatgagcaagagtccacacagtcaactccctgcaacccacaggtggcagctgccatcacctgttcaccctaaatttaagggtagtgcattccacacctgtaacttttgcttccttgacatttagagttttctaaatataagagtaaaccaaatattttttgtttacaagattaatagtttttaaacatgttttgtgaaaattgaggagagatttgggaagacagatgtgtatattctcagtatgttttagcctcctgagcccccaagcatgaatatatgaggcttcaaagagaakaaaaatgagaacgtgtcttttatctttgctaatattcaattaagtagatca

SEQ ID NO: 566372 - DNA, 266 bp, Homo sapiens
taaaacacatttacaaatttaatgtatacatctaaaactaaaatgaataacaaagttacaacaaaaacacaaactaggaaatatatgtgtacatgttacaacaggtaaattttaatgtttrtcttagtttcaaaacaaaaaatacaatcaaatctccacatgccatattttcaaaagatataaaaacaattctcacaagtgaaaatatgactaggtaacaaacattcacaacttttttgactctgtgaaaaatacaaattgaacta

SEQ ID NO: 566373 - DNA, 485 bp, Homo sapiens
gagatagagaagaactagagagtacacacagaacataaataggacatgtgtggtacaagaagaggagaagtcaagattcagctggacagaggctccctgagtcagcatttccaatggtttgtttcatgtttatccagtctctatggtgttttatacaggttttgttgaaaagagccatgtgggcaagttaagttgaaaaatttggattaagcaaatgtgatcaggttcctttattcttcttagtgctctgtgctaatacatatggaacccaatgggaggggaagacagaggtgggaggatgtcccaacttatttcaacacaaaccccattttttatagagcagccrgtgagattagtacttcataaaacacacttgagaacatcttatcaagaaaaactaaaagtttatatgaattcttacagaggtggaattgaatgttatcactagaattttgcgatttttaatttgttatatggttcagtaa

SEQ ID NO: 566374 - DNA, 603 bp, Homo sapiens
aagaaagggccacatcttacactgtgttcacttgtgcacagtctcattgwgagttgtagttttgcatataggacatttcaataaaatggaaacacacaattatgggtaccctacacgtggagcatgaggtcacagcccagcaactccatctggggccatttcacccaagctgcaaatatagtgtctagaaaagctattagtgtcgagaatgttgaccttacaaaccagttatttaaagtgatcatagtttgcagaaaagattaccttctgaaagaggtaagagaccccaatcaatataatctgagtatcttaagtaaaattaggaaaatatctcagaaattattgttgggaaacttgatgtggttgttatgcaagcaatccaggaaaaaaacaaccaaacacacacagactaacaaataaaccctccctattcattgtcaggcccagtgtaagccatcagctaggatatgttgttttgctgatggtgaggtcacagggcaaaaagaacatgagatcattcagtaaacaagaccaactggaaaactagttttgcatccccatgcccaaccacccatcagtcacatgcttacatttaggtatgtt

SEQ ID NO: 566375 - DNA, 548 bp, Homo sapiens
aaagtctacatgacaatattattgtgaagaccatgtaattattgggcacaaaaaatttgaatgagtgcttcctcgtacctattaataagagctaatactaaatgctgaaacaattcatgagctattctgtatttgcaatggcaaagtagcacttaatactcatgatggactcaagaatatcagatcacagatgcgttcagggtcagattttcatgaaacaaaaacaatattacttatagccatgtttgtgtggttgccactttacgctggtgcgttgcaaagtttgtggcacttagatgacatttgttaaatatttgcttaagcaaatgaaaaaaatggctgttcaagaatagcaattgttttctcaaccctgtaagtcacagcacatttcttrggtatataaagttacatactgaggtgccctggaatgttacaaagaagaaaaaaattttgttttctcactatttgggaaataacagtctatatttaatggatttttaaaatagataaccatatttataaactacgtattactaccaggtcaatac

SEQ ID NO: 566376 - DNA, 548 bp, Homo sapiens
aaagtctacatgacaatattattgtgaagaccatgtaattattgggcacaaaaaatttgaatgagtgcttcctcgtacctattaataagagctaatactaaatgctgaaacaattcatgagctattctgtatttgcaatggcaaagtagcacttaatactcatgatggactcaagaatatcagatcacagatgcgttcagggtcagattttcatgaaacaaaaacaatattacttatagccatgtttgtgtggttgccactttacgctggtgcgttgcaaagtttgtggcacttagatgacatttgttaaatatttgcttaagcaaatgaaaaaaatggctgttcaagaatagcaattgttttctcaaccctgtaagtcacagcacatttcttgggtatataaagttacatactgaggtgccctggaatgttacaaagaagaaaaaaattttgttttctcactatttgggaaataacagtctatatttaatggatttttaaaatagataaccatatttataaactacrtattactaccaggtcaatac

SEQ ID NO: 566377 - DNA, 461 bp, Homo sapiens
gagggccaagcaccagctcatgccctgcctgccaacagtaccatctacccagatgcaccttcaagaaagccacttgcctagctgctgcctttartcaccattctgagtgctgccagaggagaacaggcctgttttgtgcttcacccattcttccatttccagaagagccctgtggaggtggcagctgggggaccagccacacaggttaaactctctgatgcttccatcggcttacctggttggttagtggcttgaacctcaacccaggcttattcaaaagcctctcaagctgttcatggttgaagtttgacaccccgatgttcttcaccagcccggtgatcaccaggtcctccatggcctataagagaacgactctgctgggtgtgaagcttctgtctactgcactgacaatctacgtccctcagcagttctgtatggtattctaaaactggttggaccca

SEQ ID NO: 566378 - DNA, 549 bp, Homo sapiens
ctttagggcagagcaacctaaagctctgagctggtcactgaccagcaagccaggctgcccctgagcttcaggaagagcatagcttcgtgccagggtccgtagtcagcagcaagtcctgagtgaccaatgggccaacacgcagcagttagttactgcctcmactctgcaacaatcaccggaacctcgctggtgctacatgagcaccctagagtttaacccaaatcttttaggacataaaacattgtgacagaaagagttgaggcccatgggccctggtcctgacatctcagataccttaggtcagtctttgtcttctattgatggggggagcctagcctgggactcctccctgtccgagggttccctctggcctcctccctggagagcttcacccagcaagctctgtcctaacctcagcaagcttaagcttaagcttactttcttcttgggcctcaaatgtgatgtcccatcccacatgatggttagcaagactgtaagaccacacgtgctcggtcagccatgctggagcccaagcctgagacccacccc

SEQ ID NO: 566379 - DNA, 560 bp, Homo sapiens
tttccctggagaagcctgcaaaaccaacaaaacaaagtgtcttctcacagtcagaggaatccaacacaaatctcccctttcacccaagcatgtggacaacataatacataaaaaattaagtcactaatttggtactagtataatcagtctaaaaacaggcaatatcagttatgaaggaatttatgaataatctaagttccaactcctttacatattttgggaaaaaaaaactataggttatttttagtgtctgcagaaaactgagctagatggtatgcttcctgaatgatcaaagcaataaaaaagtatagaatgaataataactsagatgcaaagaggcttaagatttatcctgtacactcagataccacagcgtccaataataaaggctgaggtgtagactcacacgaaggtatccatacaaaaagaagtatataacaaaacctaaatgaatgtataatgctacaagcaataaggtagttcagaaaagagaacagtcactctaaatgaagctcaggcaagggaagggactagaactagggaagactatgggggtgggc

SEQ ID NO: 566380 - DNA, 560 bp, Homo sapiens
tttccctggagaagcctgcaaaaccaacaaaacaaagtgtcttctcacagtcagaggaatccaacacaaatctcccctttcacccaagcatgtggacaacataatacataaaaaattaagtcactaatttggtactagtataatcagtctaaaaacaggcaatatcagttatgaaggaatttatgaataatctaagttccaactcctttacatattttgggaaaaaaaaactataggttatttttagtgtctgcagaaaactgagctagatggtatgcttcctgaatgatcaaagcaataaaaaagtatagaatgaataataactcagatgcaaagaggcttaagatttatcctgtayactcagataccacagcgtccaataataaaggctgaggtgtagactcacacgaaggtatccatacaaaaagaagtatataacaaaacctaaatgaatgtataatgctacaagcaataaggtagttcagaaaagagaacagtcactctaaatgaagctcaggcaagggaagggactagaactagggaagactatgggggtgggc

SEQ ID NO: 566381 - DNA, 519 bp, Homo sapiens
tgttttccagctttatgtaaattcttttaacatatgtaatcccccactcaactgtaatttttttgtaattaagaaatatttgaggccgggtgcggtggctcactcctgtaatcccagcactttgggaggccgaggcgggtggatcacaaggtcaggagatcgagaccatcctggctaacacgatgaaaccccgtctctactaaaaatacaaaaaaaaaaaaattagccaggcgcggtggcgggtgcctgtagtccyagcttctcgggaggctgagacaggagaatggcgtgaacccgggaggcggagctggcagtgagccgagatcgcgccactgcactccagcctgggcgacagagcaagactccatctcaaaaaaaaaaaaaaaaaaaaaaagaagaaaaagaaatatttgttggatgcatcttatctatgttaaactatgtgtgcctcatatatagactctggactccttagaataatgtctatagtactggtggttaacccatcacttgccacac

SEQ ID NO: 566382 - DNA, 519 bp, Homo sapiens
tgttttccagctttatgtaaattcttttaacatatgtaatcccccactcaactgtaatttttttgtaattaagaaatatttgaggccgggtgcggtggctcactcctgtaatcccagcactttgggaggccgaggcgggtggatcacaaggtcaggagatcgagaccatcctggctaacacgatgaaaccccgtctctactaaaaatacaaaaaaaaaaaaattagccaggcgcggtggcgggtgcctgtagtcccagcttctcgggaggctgagacaggagaatggcgtgaacccgggaggcggagctggcagtgagccgagatcgcgccactgcactccagcctgggcgacagagcaagactccatctcaaaaaaaaaaaaaaaaaaaaaaagaagaaaaagaaatatttgttggatgcatcttatctatgttaaactatgtgtgcctcatatatagactctggactccttagaataatgtctatrgtactggtggttaacccatcacttgccacac

SEQ ID NO: 566383 - DNA, 635 bp, Homo sapiens
tgttctgtagtgaattacattgattgatttttgctactgaacgaactttgcattcccaggataaatcctacttgcttgtggtgtattttacttttaaatattgttttacttaatttcttaatattttgattatgtttttatattatttaaatcttcaagtatattcttttgatatcttgtgccaggttttggtatcaaggttatttgctcctatgaaatgagttagggaacattttgtcctatgttttttttaaaaagcttctggaattgttattatttctacataaaatatcttakgaatttaatagtgaacctatcttatcctggtgtttcccttgacaaagattttgttgtgaattctattttatagtaagaatacctgcatgggaatagctgtttttatactatatttatattacacagtataaatacagagagaatagctgaatttaggtatgtttataaatatagctattcttatgcagctattttctctctttctctgaataatcttactagagttctgacaacttaatctcaaagaaacaatttctgctttgttaatttttcattgtgttttgttttgtttcattaagtttcagaaaacctttctttttctacatgctgctatttaa

SEQ ID NO: 566384 - DNA, 541 bp, Homo sapiens
tgcttgtggtgtattttacttttaaatattgttttacttaatttcttaatattttgattatgtttttatattatttaaatcttcaagtatattcttttgatatcttgtgccaggttttggtatcaaggttatttgctcctatgaaatgagttagggaacattttgtcctatgttttttttaaaaagcttctggaattgttattatttctacataaaatatcttatgaatttaatagtgaacctrtcttatcctggtgtttcccttgacaaagattttgttgtgaattctattttatagtaagaatacctgcatgggaatagctgtttttatactatatttatattacacagtataaatacagagagaatagctgaatttaggtatgtttataaatatagctattcttatgcagctattttctctctttctctgaataatcttactagagttctgacaacttaatctcaaagaaacaatttctgctttgttaatttttcattgtgttttgttttgtttcattaagtttcagaaaacctttct

SEQ ID NO: 566385 - DNA, 541 bp, Homo sapiens
tgcttgtggtgtattttacttttaaatattgttttacttaatttcttaatattttgattatgtttttatattatttaaatcttcaagtatattcttttgatatcttgtgccaggttttggtatcaaggttatttgctcctatgaaatgagttagggaacattttgtcctatgttttttttaaaaagcttctggaattgttattatttctacataaaatatcttatgaatttaatagtgaacctatcttatcctggtgtttcccttgacaaagattttgttgtgaattctattttatagtaagaatacctgcatgggaatagctgtttttatactatatttatattacacagtataaatacagagagaatagctgaatttaggtatgtttataaatatagctattcttatrcagctattttctctctttctctgaataatcttactagagttctgacaacttaatctcaaagaaacaatttctgctttgttaatttttcattgtgttttgttttgtttcattaagtttcagaaaacctttct

SEQ ID NO: 566386 - DNA, 650 bp, Homo sapiens
taagtttatttattaaacaactagtggcagcctagaatttttacagcttgacttctcttgaaagttctttctcttttttacctctgagtagtagaacacaacatttaaaaacattaaaaacctaatatttgtcaaattatttgtcaaaaccttccggtaactctgttctaatttaaaagctggatgttaaaagacttttgtatttagagggtcagctatacactgtgctccagaaaacccttaaatwtttatagtgattccctatcctttttaaacacaaagcaagcaaatgaaaacattctttcaggtcaaaaaccaaatggcaccttcctaattgaaaacatactccaactccacacttatcttgcttgttaatttcatggctgatctgacagaatactttttaaagtagaaacttgcatagcccaaattattaatctcccacagcacaaaggtccctgtttaatcttatctttcctgctaacaatagctggggaggataattaagaactattagtctattcaagataagaggctgaaggagaaaaatacatttttttgtaaatgtcagtagtttctttgagtttttctagagaacttggtatctggcattaattttaaaaagaggaaaacctctgtgatgccccaaa

SEQ ID NO: 566387 - DNA, 607 bp, Homo sapiens
aacatctttaaaagatttcaggactctttgtgtttggttaagkttccaacaggtggaagatatcttccaagactgaccatagtcatatttgggaaggaaagatcagaatcaatttaatcaagatactaaatatgaaatgggggagggagcagtcagtggaactaaccagagtaacattctgaacttggaactgaatccagagtttatacttgcacaaatcctggcctccttccccatacaaacccctagtacaggtctttgagattgtttctagcaaactgaatttttcttccttagcctggggggaaaatgcagactctggctttattttctgcatgggaatcacgtgggtagcttaaatattccaggcatcttgacttggcatattgaacgcattttcttattccataagctgttctacatgtcgttagagtgacagcagtgagtagtaaaataagcactggctttggagtcaggtagacctggattcttagtagaccctggacttcaagagtcagtattgcaccatgggtaagaacatggaccatggacccagactgcctggctgcagatcctgctcttgttacaaaatatgtgactatggatc

SEQ ID NO: 566388 - DNA, 633 bp, Homo sapiens
ctacactgtctgtcctgtgctactcaaatgggcataaacaacatggagcaacataatatgttctactactttcagcattcaatgtacttagctgttacagacaaaggaaattatttctaccttagataacagctgtgaatmcaactgaagccaagaaacagacaggacacatgttttagaatattaaatttccttatgaaaaccagcctcctacatcattttatcttttcgaaggaacttcctggaggacagctttgagctttatcataccatggtaaatagctttggttaagatttaatctttgtgttctttctcctatgcaattataataaatttataaaaattccttctaatttaattccacttttagtaaatttttataagaacaaggaaatgtggacagtgatttatatgcaaagatcttcattgtagcattatgtataataacaaaatttggaaataacctaaatgtcccaaaataatggaaagactaaataagaatgaatatcaatataatgtagcattactcagtatcaagaaaatagagtttcaaaggatgtggaaaaatgtttttggaagttaaaaaaatcaatatgtaaatattgcaatcaaattctattaaaaattgtgtg

SEQ ID NO: 566389 - DNA, 626 bp, Homo sapiens
cctggttattctaatacagatagaacaaagctttggctgagctttgtccccagccaaatggtctcagacaggaagcacccacagtgcataakaacaatgtctggagaatgccaccccaagatgagagaaaatggcaaggaaactatgcaaacaaactaaaaggcaggggaaaaggtagtatgtatcatgcaaaataaaaacccaacacagaaggaaacaagctaagggatgaaggaaaccccttataactttctcactataggaaaatatcataagaacatgaatttaagaaaacaaagagttcaaaacctagaccatgaaacaaaaagaatgagctacagacctaaaaaaacaaagccagtagcatccatacagaactaacaaagacattaggaacagcaaggaataaaataaacattgccaagaataaaaatgctgacttcaaggaaaaggtctgaaataagtttattgaacccagatttaaaaaagacagagattgaaagatcaaatgccacttccaaatgtggagaactgtgttcaatctggccagaggcaaccaaaagtcatacagagaatgactgcgatggttggaagtctgtgaaatcatatgaaaagcggagtaaccc

SEQ ID NO: 566390 - DNA, 599 bp, Homo sapiens
cacttctattcaacattttatttgtcctagtcaatacaatagaaacagcaaacaataataggttagtaaattttcaggatgcaaaaatcaatatatgaacgacaactggtttcctttatgttagcaataaccaactggaaactgaaagcaaattataatttataaaacattgtgaacataagtaattcaaaaatctaagctgttggaactccttaaatgattttgagccttaaaggaattcttatgaggactgagtcaactttacaggtagctataacctaagcaactgtgtaatctttgttttctctgattatagattaagccttcctcacatgcattattttgtaaaatgttgagaatggctgaaggccaccggggaagacatcctwcctattattgttgacttttattatagattaacctccttcttacctttctcacacaaaaacttcatggttatcacatcaccttaagatgaaatgttaaataaacacttctaagttggaaaggaaatgaaaacaagctatagagaaaagaaaacaagccatagagaaaagaaagactgtaactaacttattgtaacccaagctaaccttgta

SEQ ID NO: 566391 - DNA, 614 bp, Homo sapiens
atgccataacaactttatttattatagcaaatgaaataaacaaaccaaatgccagtcacaaagataatgaattaacaaattgcagtatatgtataaaatgtaatacttctcagcaataaataaaataaactactggtacatgcagcaacatacgtgaagcttacacatgtaatgccatgtgaaacatcacacaaaaaattacataccatagaattccatttatatacaactatagaaaatatacatctaatctgtggtgctctatagcagatctgtggatgcctgatacctggggtggaaggatcttgactgataataggcttaaggaaaccagttgwcataaatagaacactgatgtaacaatactagaattcacattcctttctagtgtacctaaagcatatgatatttgattatacgtcataaacaaagcatccacaaatataaaatgttttaaatcattcagagcttattctttaatcacaatagtattttaggttagaaatcaatagtaaaaggaagactagtaagtcctcatttactagaaaaatttttaaagactcgtttaatacgtgagttaactaaaaaatcagtgaaaacatattgaaatcatt

SEQ ID NO: 566392 - DNA, 455 bp, Homo sapiens
agaagtaataattctacttaggctaatctaacacttggcaatataaattgattgtttcttttgtaattagttgacagcgtgcgcccttgcttgctcttggcgcctcctcggccttggcgcccactctggccacrcttgaggagcccttcagcccaccgctgcactgtgggagcccctttctgggctggccaaggccagagccggctccttcagattgcagggaggtgtggagggagaggggcgagcaggaactggggctgcgcgtggtgcttgcaggccagcacgagttccgggtgggcatgggctcagcgggcccccgactcggagcagccggccgggccccgctggcccggggcagtgaggggcttagcacctggggcagcagctgctatactcaatttcttgccgggccttaggtgccttcccgcggggcagggctcaggacctgcagcccg

SEQ ID NO: 566393 - DNA, 455 bp, Homo sapiens
agaagtaataattctacttaggctaatctaacacttggcaatataaattgattgtttcttttgtaattagttgacagcgtgcgcccttgcttgctcttggcgcctcctcggccttggcgcccactctggccacgcttgaggagcccttcagcccaccgctgcactgtgggagcccctttctgggctggccaaggccagagccggctccttcagattgcagggaggtgtggagggagaggggcgagcaggaactggggctgcgcgtggtgcttgcrggccagcacgagttccgggtgggcatgggctcagcgggcccccgactcggagcagccggccgggccccgctggcccggggcagtgaggggcttagcacctggggcagcagctgctatactcaatttcttgccgggccttaggtgccttcccgcggggcagggctcaggacctgcagcccg

SEQ ID NO: 566394 - DNA, 597 bp, Homo sapiens
acaataacactcctttatcaattgttattgcaaaaactgaaagaatgcacaaagctgaatttgtaataatggctcccattttgtaaacttgtgtcaagaccatatgctttaaaatattatctataatcctagtaacagccttgtgatgtaggtattatttttcccacttattagataaggtatctaagaactatgactcagataatttcagtgccttgcccaaggtaacacagatagtaagaggtaaacttgggattaattccaaatcgccgtaactccaaagccctcattctctcaaccatcttgtgctgctacttttttgagaaaaggaaatattttgtagctcattgaaaagatctcttaattgggactgttttgtcctggctaaggtctcccaacacagtcttcttattctacctctgaatactttgyactaagatattcttcctctctagtttgggagtctttttaaaattttttaaaaatccttcatcattgaactttgtccccacttggtttttctgaatggtgctccccagcttctcttgtcctccagaaacatgtgccaaatgtgattgctcgctcattctactgcac

SEQ ID NO: 566395 - DNA, 610 bp, Homo sapiens
tgatgcaatagactttggggactcaggaaagggtgggagggggatgagggataaaagactacaaattgggtacagtgtacactgctcaggtgatgggtgcaccaaaatctcagaaatcaccactagagaacttattcatgtaaccaaacaccacttgttccccaaaatcctgtgaaaataaaaaaattaaaattaaaaaataaaattgttcaaaaacaagccatcaattccagggaattaaatgagagrccaatttaggtataaaataaattacttatcataaaactagattgctcatttcagatttggaatttaaatcccaaaggcaaaatcatgcagaaagccaaaattgagttgttggccaacagaagagcgaagtaatataggaagttggtggggaggacgagcctagagaagttcctgggtccaaaagcatgttgctcattctgttttttatacaggttactggctgtattagagagatggtctgggcttttaaaggcataactgaaaagggaatttcatactagttatggttaatgccagagtgctagaactagtgaagcctactgggagaaggtatgtttttctaaagaaagaattttggcct

SEQ ID NO: 566396 - DNA, 610 bp, Homo sapiens
tgatgcaatagactttggggactcaggaaagggtgggagggggatgagggataaaagactacaaattgggtacagtgtacactgctcaggtgatgggtgcaccaaaatctcagaaatcaccactagagaacttattcatgtaaccaaacaccacttgttccccaaaatcctgtgaaaataaaaaaattaaaattaaaaaataaaattgttcaaaaacaagccatcaattccagggaattaaatgagaggccaatttaggtataaaataaattacttatcawaaaactagattgctcatttcagatttggaatttaaatcccaaaggcaaaatcatgcagaaagccaaaattgagttgttggccaacagaagagcgaagtaatataggaagttggtggggaggacgagcctagagaagttcctgggtccaaaagcatgttgctcattctgttttttatacaggttactggctgtattagagagatggtctgggcttttaaaggcataactgaaaagggaatttcatactagttatggttaatgccagagtgctagaactagtgaagcctactgggagaaggtatgtttttctaaagaaagaattttggcct

SEQ ID NO: 566397 - DNA, 542 bp, Homo sapiens
cgagaggctaaccccatgggattcatactgagaaaggattattatcagcctaaaaatgaggaggccaagatggatgttaaaaacccaccaatttttagatacaagagcattggtagaaccaatggtattccatgaccactagggagtatgtgttcrgacattctcagaaaagttattgatcattttcataaagtcctaagctaaagaacaactcttgagctacacagaactattaaaggcatgtctaatgcccaagactagtgcctgtattagaccaaaaatgctcatttagactatgaatttaattctatcagatatgcttcagattacttgtgtgcatgcagtagtttggaaaagtgccttcctgaattataaatataaaactgaaagaggatgagagtgaaggtgacacttagaaacacatggttggactactcagcaatttattaatctccatttttttcatcccacccaagaaatccgccaccaaatatcaacataaaatgcatagccaatcttttcatttttattgctttaacaca

SEQ ID NO: 566398 - DNA, 542 bp, Homo sapiens
cgagaggctaaccccatgggattcatactgagaaaggattattatcagcctaaaaatgaggaggccaagatggatgttaaaaacccaccaatttttagatacaagagcattggtagaaccaatggtattccatgaccactagggagtatgtgttcggacattctcagaaaagttattgatcattttcataaagtcctaagctaaagaacaactcttgagctacacagaactattaaaggcatgtctaatgcccaagactagtgcctgtattagaccaaaaatgctcatttagactatgaatttaattctatcagatatgcttcagattacttgtgtgcatgcagtagtttggaaaagtgcsttcctgaattataaatataaaactgaaagaggatgagagtgaaggtgacacttagaaacacatggttggactactcagcaatttattaatctccatttttttcatcccacccaagaaatccgccaccaaatatcaacataaaatgcatagccaatcttttcatttttattgctttaacaca

SEQ ID NO: 566399 - DNA, 584 bp, Homo sapiens
attcttgtcttgatcatgatcttttaggaaaaacattgaatttttcttcaagtattatgttagttataggttttacaaaacatctactatcagactgagaaagtgtccttctatttcttgtttgctgaggtgttttgttgttgctgttgttttgtttygtggtttttttcaaaatggatgatgcatttttcaaataagtttcccgcatttactgagttaattatatagattttcttttttagtttggtaaactaaattcaacatgttaattgaattattactagctagaaatgtataaatgctatttattttccaaaatagccaccctcaggttttcaaaattttttctctatttttttcatgttttatgtttaattgattttagtatgatctattttatttcttttgttcctacataatttggtttcatttgctctctttctggtttcttagggtagaagctaaattatttcttgagttttttttttaatatagatgtgtggtggtacaactattttcctcagtactattccagtggcaacttccaaattctcttgttatgtttcaattttcattaagttcaa

SEQ ID NO: 566400 - DNA, 584 bp, Homo sapiens
attcttgtcttgatcatgatcttttaggaaaaacattgaatttttcttcaagtattatgttagttataggttttacaaaacatctactatcagactgagaaagtgtccttctatttcttgtttgctgaggtgttttgttgttgctgttgttttgtttcgtggtttttwtcaaaatggatgatgcatttttcaaataagtttcccgcatttactgagttaattatatagattttcttttttagtttggtaaactaaattcaacatgttaattgaattattactagctagaaatgtataaatgctatttattttccaaaatagccaccctcaggttttcaaaattttttctctatttttttcatgttttatgtttaattgattttagtatgatctattttatttcttttgttcctacataatttggtttcatttgctctctttctggtttcttagggtagaagctaaattatttcttgagttttttttttaatatagatgtgtggtggtacaactattttcctcagtactattccagtggcaacttccaaattctcttgttatgtttcaattttcattaagttcaa

SEQ ID NO: 566401 - DNA, 566 bp, Homo sapiens
aaatgctttctaatttctttttttttttttttgtaatttgactgatggctatttggatatccattcattctccaaaggtatttctatggtttctaatttaattccattgttttcagagaacatactttgtatatcatggatccttttaaatttattgagggtttctttatggccctgattatgttctgtatacatgtaagaagaatctgtattctgctgttgttcaggacagaggtaagtttagaaatgtcaacaggtaaattaagtaaagtctgttaataatgtcattcattttttatatctttattgagttcctttctacttttctatcagttactgagaaagggcattgaaatctttaactatgattgagaatttgtctatttcctttgcrgtttgtcaatttttgtttcatttctttggaagttctgttattaggtacataaacatttaggattcctatgtcctcttactgaatatgtctattctgctttatgaaatcacatttatttcttactggtaatattctttgctctaaatctactttgattagtattaacagcaca

SEQ ID NO: 566402 - DNA, 609 bp, Homo sapiens
atgaccccaaagaacagaaaatttgtgtaatgccagaaaatgaattcaaaataatgatcttcaggaaactaagcaagattcaaaagaatatagatagacaattcaacaaatccaggaaaacaatttatagtctgaatgagaacttcaactaagaggtatatattgttagcaacaacaacaacaacaaaaacacagaaattttacagtctatgaatttaatgtatgaaataaaaatacagtcaagtatttttrttcaacagaaaactagacaaagcagtagaaacattttctaaacttgaagacaggtcttttgaaatcacttagatgacaaaaattttttaaaagaataaaaaaggatgaagaaagtgtaaaagatttttgggacaccataaagcaaataattttcacattatgggaattttacaagaggaagagttagggaaaggcataggaaatatatgtaatgaaataatggctaaaaacttttcaggtcttgatagagatatggacatctagaccaggaagctcaaaaactctaaatagattcaacacaaaaaggttctctccaggacatattatagtcaaactgtcaaaagtcaaaggcaaaaa

SEQ ID NO: 566403 - DNA, 576 bp, Homo sapiens
agtctttaaacgctggagtatgctggtggaaaagtactggaaactttggggggaagtcagtaaatgtgtttggacaatctgtgtttgctaattggtgtttattgtagttaggcttctcctcttctacagagactaggagatagaggtcctatcatttttgttttgttttgtttgttgtttgtttgttttactggaatctgttggaagcaaaagaggctctatctttcttcatgattacatttcataggcaaggaagacattcctggctcataaaactgacaagagactgggagaagatttacatctcagaaggccagggaaagaacttataattgcaagttatctaaagtaaatgctctaataaaaggaaggtcagagaacagtactaagaaagaaacctgtstaaaggcaaactgaaggcagcgttaagactactgtggtcactattcaagattagggaatagatatgttgtttctcaacattattagtcatagaactactctttttaaggagcactttgtggtattaattttttgaagcagaaatcctttattctatgaggcttgtgtacaagg

SEQ ID NO: 566404 - DNA, 472 bp, Homo sapiens
aaaaactctaattgtacttgattgttggctcacatttaagtagtgattacattttttaaaagattctggagaaatgactatttttttctttgattctgtgaatctaatagatcatgacactttgcaagcaggtttggcatgccagagtaagcaaaggaaggagtgagagaagaatgctaccttaatcaaaacaggttcagatggactgccctgtcctatatccaaaaaaactcaaaaaacaaacaaaaaccatgtattagttmttctgatgttgtctttgataagaactaagaacattaaaaagagggaggctgctgattcaaatatcctgcaaagattttgaaggaaagcaatgatcaggggccatctcaatgagtatgttgaagctgaggggaaacagttatttctggagcaagtttagaaaatgaattgccctcagaattaggtagatattgtatcctggagtatttga

SEQ ID NO: 566405 - DNA, 590 bp, Homo sapiens
tgctgattcaaatatcctgcaaagattttgaaggaaagcaatgatcaggggccatctcaatgagtatgttgaagctgaggggaaacagttatttctggagcaartttagaaaatgaattgccctcagaattaggtagatattgtatcctggagtatttgattccgttgatactagaatcttaatgctttgtttcactttcctgattttgatacttaaacgtgcttcgtaaaccatctgaaaccaaagctacaggattgtctgaatttaacctaatgataccagggaaataacgcataattatttctgctctccttagcagaatttaaattctctctcttctgtcagaaagatgacaaaaaaaaatgactcatgtcaagaatcaatttgtcacatctataaccttgacactattgaaaataagtatatagtgagatgactggggactttaaggggttggaagaggcttgacagaaggaagtctgatttataacctttctcatctatgaactttccaaagactttcatctaatgttcttcctggatcccagccctgaatttagttaacctttgtggctgtgccaatttatcc

SEQ ID NO: 566406 - DNA, 590 bp, Homo sapiens
tgctgattcaaatatcctgcaaagattttgaaggaaagcaatgatcaggggccatctcaatgagtatgttgaagctgaggggaaacagttatttctggagcaagtttagaaaatgaattgccctcagaattaggtagatattgtatcctggagtatttgattccgttgatactagaatcttaatgctttgtttcactttcctgattttgatacttaaaygtgcttcgtaaaccatctgaaaccaaagctacaggattgtctgaatttaacctaatgataccagggaaataacgcataattatttctgctctccttagcagaatttaaattctctctcttctgtcagaaagatgacaaaaaaaaatgactcatgtcaagaatcaatttgtcacatctataaccttgacactattgaaaataagtatatagtgagatgactggggactttaaggggttggaagaggcttgacagaaggaagtctgatttataacctttctcatctatgaactttccaaagactttcatctaatgttcttcctggatcccagccctgaatttagttaacctttgtggctgtgccaatttatcc

SEQ ID NO: 566407 - DNA, 580 bp, Homo sapiens
tattaaacctccattctttgattttggcatccacagatgcttcttactggaaccaattattaagatggttggttaattatataatgctgccattccttctacaattattagttggcattctactataaggcacagcattcccttattatttatttaaattagtaggaagtcatagattcctattttattgaataaattatagttcagcataattactagcattctttactttgaagatcaaactgacccagatttggccagtgacagcctttcaaactgacatctgtgacttttcacagtcctcatcattcttgaacaacttcctgccacgagaaattccaagcttagcttgcattttccctgccctagccatggagtcagccatcccctcaaggagtgctcwtatcttttagttgagaatggtgtttagaaaccaatattaggcattaaaggtggtcagtgctacaagagtgtcattgatcccagaccctctgagtgaggacaactatatacacacgtgtacacccatgtatatattatccatatctacacattttggaaatgctgcattcacattatt

SEQ ID NO: 566408 - DNA, 638 bp, Homo sapiens
tccgctgcctgggttcaagcaattcccctgcctcagcctcccgagtagctgggactacaggtgcacaccaccacgcccagctaatttttgtattttagtagagacagggtttcaccatgttggccaggatggtgttgatctgacttcgtgatccgcccacctcggcctcccaaagtgctgggattataagcatgagccactgtgtctggccacaactatcactttttataccagattaacatacagatattaccatatattatatattttaagaaaagccaaaatgtccacagtatttcatttcccaaygtattaaaaatatatagtggatgtttgtgacatgtgaaggctatctatttctcaacaatttttctatattttgggaaatctttaactaggtcccacctctcacaagtacaatggaggctaggtatttctaatgcctctcctccgccaggctgggtaaactggagacttgaagtcttgagacttgaaatgattcccattggtgtataaagaatgacagtggctatggcaaacaaagtggtggtagagtttgttcattgctgagacttgattctatagccttccatctgattctgtaagatctgacattgcttcaaaaacttactcttatg

SEQ ID NO: 566409 - DNA, 522 bp, Homo sapiens
ttattatgcaggcctctgcctggcctgcgccaggttgcccrttcctttactgtacacatgataacaaaaaaaagggaagatggagcctccatgttggacatgcctggctcccaggtagcccttttctattggcacagctgccatcattccccgttacaagcttccagcttgtttatctgtgcttgcagctcgatttttcaggctactctttgttagaaaaaaataattattgggctgttttttgttaaaagggaagctctgctggggactcttttaccctcactatctgcctaaataatttctacctcctgtgtcaacaggactggttaggggtaggataagtatgtaacccaagctgggccaatcacattctgtccttggaaatgttttttcgggggaaggaaggttggagtatcagagaattccatcattgttccatggggacaaagccctggatacagtcacacctgaggctcctgattcttccccacccttctccatgtgtgaggcaataaaattcct

SEQ ID NO: 566410 - DNA, 522 bp, Homo sapiens
ttattatgcaggcctctgcctggcctgcgccaggttgcccgttcctttactgtacacatgataacaaaaaaaagggaagatggagcctccatgttggacatgcctggctcccaggtagcccttttctattggcacagctgccatcattccccgttacaagcttccagcttgtttatctgtgcttgcagctcgatttttcaggctactctttgttagaaaaaaataattattgggctgttttttgttaaaagggaagctctgctggggactcttttaccctcactatctgcctaaataatttctacctcctgtrtcaacaggactggttaggggtaggataagtatgtaacccaagctgggccaatcacattctgtccttggaaatgttttttcgggggaaggaaggttggagtatcagagaattccatcattgttccatggggacaaagccctggatacagtcacacctgaggctcctgattcttccccacccttctccatgtgtgaggcaataaaattcct

SEQ ID NO: 566411 - DNA, 522 bp, Homo sapiens
ttattatgcaggcctctgcctggcctgcgccaggttgcccgttcctttactgtacacatgataacaaaaaaaagggaagatggagcctccatgttggacatgcctggctcccaggtagcccttttctattggcacagctgccatcattccccgttacaagcttccagcttgtttatctgtgcttgcagctcgatttttcaggctactctttgttagaaaaaaataattattgggctgttttttgttaaaagggaagctctgctggggactcttttaccctcactatctgcctaaataatttctacctcctgtgtcaacaggactggttaggggtaggataagyatgtaacccaagctgggccaatcacattctgtccttggaaatgttttttcgggggaaggaaggttggagtatcagagaattccatcattgttccatggggacaaagccctggatacagtcacacctgaggctcctgattcttccccacccttctccatgtgtgaggcaataaaattcct

SEQ ID NO: 566412 - DNA, 543 bp, Homo sapiens
tttctatgaaaaagagaatggatattgggtggcagctaacagtttctatcatattccctctatgattaccaaaatcacagcagtacacatatcatagtcatatttttgcacatattcccctctagactataaagtccttgaatatttttacatgatttatggtgcagtggccaacgactataaaggatgcaaccggcaaaattatgcaggttggcttagycttaaaagtacacattgggttttgcatttagaaggtgtttttatatctttttaaaagcagtatcagtattatggtgaaggcaaaaattgtatcatgatcagttgagtactgagtatgcaatgacagataaaatatggtggcacagactcaattttccaaaagtttgaagttgaaaggaataaaagagagagaaagaaagagagagatacttgagggtcagagcagacagagtcaccaaaagcatttttgtttgttaacatttttatttatatactgcctaaagtggcagtaattgagaaatgtttaggtaaagaaaaaaaagc

SEQ ID NO: 566413 - DNA, 514 bp, Homo sapiens
tgtacttttaaggctaagccaacctgcataattttgccggttgcatcctttatagtcgttggccactgcaccataaatcatgtaaaaatattcaaggactttatagtctagaggggaatatgtgcaaaaatatgactatgatatgtgtactgctgtgattttggtaatcatagagggaatatgatagaaactgttagctgccacccaatatccattctctttttcatagaaacagaactctgattacactggggaaagcaatgtgcaggattaacacacaaacaaacatacaaaatttatattttgtagcataccttgcagtgaawtataacagtatgactaagctctagcgaatagtttgtaaaaaaaaaaaattagtatttgaaagggaccttctggaaggtccctttcaaagtgtaaggaatgtttgcttcagtttctctttattcttactgcctggaatatacaagtcattgttagagccgtataagccatatttttgaccttgataata

SEQ ID NO: 566414 - DNA, 561 bp, Homo sapiens
aaactgcatgttctgcacatgtaacccagaacttaaagtataataaaaaaaaaattagtctaagagagaaacagtgagaacttacttagggcaatattgatgagaatggaaaggagtgtatctatacaaggaacaattctgaggaaaatatgtttagaagcaattatccattgggtgttaagggtgaaaaagragaaagaattaagaatttcctaaaggttttgaggttaaatagtttacttagtcaacaatggcatcgttaactaaacagtgtatatagaaggaagaccatgttacggtgagtatggaaactcattcaggttttgcttgttgaatttaagtgaccaaggggcatccaaggagaaaggtttaggagaagttgggtctttggttctggaacttaggaaagaggtatgaaagagaagtatatgggaccatccagtgaaaatatgttggatgccatttttttaaaaatagctgagacagtgatccagaaacaacttttttcacaaagtgattccaatgtacctttatagattctgagacttgactgtggcagtt

SEQ ID NO: 566415 - DNA, 541 bp, Homo sapiens
cacaccattctcctgcctcaatctcccaagtagctgggactacaggcgcctgccaccgtgcccggctaattttttttgtattttttagtagagacggggtttcaccatggtctcgatctcctgacctcgtgatcctcctgcctcggcctcccaaagtgctgggattacaggcgtgagccactgcrcccggccatataatgtaatttttgtatattatttattcctccaaataactccattagtgtagttattttcaaattttcttctttaaggaaatgatgacagagagagcttaacctgtccaaattacaataattaaatagcaggatttaatctctgcaattctgaggcaggattgtatgctcttaaaaactgcaatgtataaataccacctactggttattttaatgtatttaaattaaaaactcaggcctcttaatctaatactaaagatttaaaatatttttttctcgattttctatgtgtattagcctattttcatgctgctgataaagacatacccaagactgggaagaaaaag

SEQ ID NO: 566416 - DNA, 605 bp, Homo sapiens
acaaacaaaagtgtgctaattttactcaaagtcattctgttgttaaaatattctcagcctgttttccctccatgtcttccctccctttcaatgcaattaccttttttagctacaattagcttmcagggagcacctactatgtggcaagcattctgagtactttacacagactcatatcctcacatgcacatatgtaagtatattacatacacatgcacatactctcataaacatatattcataatcacattcacaattataatcacatacttcgactcaatcacatactcataaacatgggcaggaaaacatatacatgctcaaatatatatgtattcacatgatcacatacacaataacatgtacatacacaatcacacacacatgtacaatcacaagtacatacaaaatcacacagctatgtgaaatcatttacttatacaaagtcacatacacaatcatatacaatacacattacatcctcttaaaaatcctataagtttgggtcccattattatcatgttcatttttcaaatgaggaaatgaggtacaaaagttgtatgaaattattctgcttgtaagtgatacagcctatatttgaaatg

SEQ ID NO: 566417 - DNA, 605 bp, Homo sapiens
acaaacaaaagtgtgctaattttactcaaagtcattctgttgttaaaatattctcagcctgttttccctccatgtcttccctccctttcaatgcaattaccttttttagctacaattagcttccagggagcacctactatgtggcaagcattctgagtactttacacagactcatatcctcacatgcacatatgtaagtatattacatacacatgcacatactctcataaacatatattcataatcacattcacaattataatcacatacttcgactcaatcacatactcataaacatgggcaggaaaacatatacatgctcaaatatatatgtattcacatgatcacatacacaataacatgtacatacacaatcacacacacatgtacaatcacaagtacatacaaaatcacacasctatgtgaaatcatttacttatacaaagtcacatacacaatcatatacaatacacattacatcctcttaaaaatcctataagtttgggtcccattattatcatgttcatttttcaaatgaggaaatgaggtacaaaagttgtatgaaattattctgcttgtaagtgatacagcctatatttgaaatg

SEQ ID NO: 566418 - DNA, 558 bp, Homo sapiens
ctccagcctgggtgacagaacaagacactgtctcaaataagcaaacacacaaaaaagaaataagagttcacatacattctttagaacacaatgaagaacaaagttgggaattttcctaaggaaattggttaagaatctaatgtacataaagtaacactttcccaaagagtgactgctaacttgtagaaataaatattctatatctcaggtaagatacaatttgatcacamattggctcagcaggaatatttgccttctcccctaacatacttctctggcttaaatgctgagctcatcatgctggtggaagttgttctggtgaactttcccttcctcttagtgcctggttcctaatttcttctgcagacacagctcctggtcacccactctgcttctttactgtgcaacgtactcatgttgccaccaccctgctcagaatgagttgagctccgattcttggctcctgaatgagatctgagaagttccttttcttgattttaagccattggcacggacctttaagccacccatataatacaagtttctaaggacccaaag

SEQ ID NO: 566419 - DNA, 595 bp, Homo sapiens
ctacagtttattgattgaatgcattggaacatttcaagaaattgcaaaaataagaaataaaaaaacagtttctaactgatcaactgaacaattttattctgcaaaatagaatttattgtaatttaccgagtcaacttggatttttcaaaaagttaggggttgattgctgtgtaacacatcatgtagaaaacatttttgaatgctgaagtagtggattctaataaatgtatacagaagaataaacaaaacaatatcaatctcatatatctccatgaaagagacttagatatttggtgtatatacatattgaccaggctactttttatactcactggttctcttttaaaactaataatgctactcaaaccaacaaaacaagcaagctttagaatataatctctgtttacagaaaaaaaatatattcaacatgaattaagcaaggcttgtttatgatacacagaaagaacaggcaaggcccctatccccagcccacaaacacacatttaatgatacatctacacgctagcatcactttggatgttttcacattcaaatttgctggaaacrtttagtctgggtatgtacagtaagtaca

SEQ ID NO: 566420 - DNA, 666 bp, Homo sapiens
ttaaggcttggagagtgactggagaagggtttggtattagcattcagtattatttatttgtaatgcaatttgagaactttctccataatgaggaaaaattacacacagccatttaattcctcagggtacttgagaataaaaagctggcttcaggagagcagagaattactgcagcctttactataataaccaccagcatggaaatgaaataagaatctgctagctccaggtggaaagttatctgaggaacctaaatgggcctgttgctgatatactcatggttggcacaagcagaaaaccagacattcaagcccctccactgaacccctcgcagtcagcagcactaaagcccagaagcacaaaatgagtgaagatattggtggcgataaattttttttttgagttaatggacttcatgaatacatgtattttttaagttcgagctattatctaatttcaaatcaccccttgctaacatactaatttattaacttacagaaatgatgatcctacgtgatactggcctcccgacaacagaactgggttttggcagggwtttattttcagcaacactggggagaaaaagcatgagaaacttttgaagaataataaaaaatggattaaagggaatagaaataatttatcatgtgcagatgtgcagaaaga

SEQ ID NO: 566421 - DNA, 408 bp, Homo sapiens
tgggagtcagtccacttattaggaaaccaactcttctcccttccagactctgaatactgacaccctggagggggtccacctgcctttgctggtgctctctctgcatgagattgggtggcttttttttttttttcttgagacagagtttcactcttgttgcccaggctgaagtgcaatggcactatctcggctcactgcaagtgccgcctcccaggttcaartgattttcctgcctcagcctcccatgtagctgggattataggcacccaccatgacgcccagctaatttttttaattttttttctttctttttttttttttttagtagaaacgggttttcaccatattggccaggctggtctcgaactcctgacctcaggcgatccacgcacctcggcctcccaaagt

SEQ ID NO: 566422 - DNA, 408 bp, Homo sapiens
tgggagtcagtccacttattaggaaaccaactcttctcccttccagactctgaatactgacaccctggagggggtccacctgcctttgctggtgctctctctgcatgagattgggtggcttttttttttttttcttgagacagagtttcactcttgttgcccaggctgaagtgcaatggcactatctcggctcactgcaagtgccgcctcccaggttcaagtgattttcctgcctcagcctcccatgtagctgggattataggcacccaccatgacgcccagctaatttttttaattttttttytttctttttttttttttttagtagaaacgggttttcaccatattggccaggctggtctcgaactcctgacctcaggcgatccacgcacctcggcctcccaaagt

SEQ ID NO: 566423 - DNA, 408 bp, Homo sapiens
tgggagtcagtccacttattaggaaaccaactcttctcccttccagactctgaatactgacaccctggagggggtccacctgcctttgctggtgctctctctgcatgagattgggtggcttttttttttttttcttgagacagagtttcactcttgttgcccaggctgaagtgcaatggcactatctcggctcactgcaagtgccgcctcccaggttcaagtgattttcctgcctcagcctcccatgtagctgggattataggcacccaccatgacgcccagctaatttttttaattttttttctttytttttttttttttttagtagaaacgggttttcaccatattggccaggctggtctcgaactcctgacctcaggcgatccacgcacctcggcctcccaaagt

SEQ ID NO: 566424 - DNA, 553 bp, Homo sapiens
  misc_feature 448, 514, 517: n = A,T,C or G
catttactttccatttcaaatggttcattgttaatatatagcaataaaacagatttttacatattgacattatatccagggatataataaattcagtctttaagtggaataaggatccttttggattttttacaygcacaaaacatgtcatctttataaaagataatttacttctttctttataatctttaaattttgtgtctatttttctgccctccggactcactagaatatctagtgcaatgttgaattgaaatgatgatagtagacatccttaccattaatgtagtaaacaatgttgtttgatttctaatagcaaattgactaaaattctaaaatatatattgtatattgatttattctatttactatgtttttgtttaagatttttgcatctatggtcatgagggatattggcctataatctccctccctccctccctacctnccttcctccctcccttcttccttccttccttccttccttccttctttccttctctcattctctctntgnttttggcgtcttgttaggttttaatatcgaggctat

SEQ ID NO: 566425 - DNA, 571 bp, Homo sapiens
ctaacctaacaaacatcatagtttaacttagcctatcttagatgggctccaaacacttactttggtctagagtaggtaaatgtaaaatggggcaaaattgtgtaacacacagcctactgtggtgaatactatacacagatgggcattttgtagacatgaaggtgtcagaggtatgtgaaccagagcaactccatcttaaataggagctgggtaaaataaggctgagacctactggactgcaattccagacagttaaggcattgtaagtcacaggataagacaggaggtcagcacaagatacaggtcataaagaccttgctgataaaacagtttgcagtaaagaagctggctaaaacccatcaaaaccaagatggccacgagagtgacctctggtcakgctcactgctacacttccaccagtgccacaagtgtttacaaatcacatggcaatatcaggaagttatggtctaaaaaggggaggcataaaaaaatccaagccttgtatagcctgttatcaagaaataaccataaaaatgggcaaccagcagccctcagcactgctctgtctatg

SEQ ID NO: 566426 - DNA, 571 bp, Homo sapiens
ctaacctaacaaacatcatagtttaacttagcctatcttagatgggctccaaacacttactttggtctagagtaggtaaatgtaaaatggggcaaaattgtgtaacacacagcctactgtggtgaatactatacacagatgggcattttgtagacatgaaggtgtcagaggtatgtgaaccagagcaactccatcttaaataggagctgggtaaaataaggctgagacctactggactgcaattccagacagttaaggcattgtaagtcacaggataagacaggaggtcagcacaagatacaggtcataaagaccttgctgataaaacagtttgcagtaaagaagctggctaaaacccatcaaaaccaagatggccacgagagtgacctctggtcaggctcactgctacacttccaccagtgccacaagtgtttacaaatcacatggcaatatcaggaagttatggtctaaaaaggrgaggcataaaaaaatccaagccttgtatagcctgttatcaagaaataaccataaaaatgggcaaccagcagccctcagcactgctctgtctatg

SEQ ID NO: 566427 - DNA, 611 bp, Homo sapiens
taaatatttattttatagttcagagtataggccaatactttgtttcrttactcaaagtgttccagcttcatctattgggagaaacggccctgcaaagctgtctcttgtggggaaatttgcattctgtagagaatcctcttcccttgccagatcttttcctgattctgaagaaactagctgagagtgtagcaccttttaaaggtctgaatagaaaacatgtgccatctattgcctcttaggggggccacctatgagacttcatctacataatatgaacactggcttccacaacccttaccttaacccagacactcctttctattgatttcaggtctttagacaataacttaactcttttaactgactgccaatcagaaaatctatgaatccacgtatgatctggaaactcctgcttccagatgttctgcctttccaggcggaactaatgtatacctcacaggtattgattgatgtattttgtctccctaaagtgtataaaatcaagctgcaacccaaccactttgagcacatgttcttaggacttcctgaggctgtgtcacaggtcatgatctttcaccttgggaaacccaaacttctaaattgattgagac

SEQ ID NO: 566428 - DNA, 611 bp, Homo sapiens
taaatatttattttatagttcagagtataggccaatactttgtttcattactcaaagtgttccagcttcatctattgggagaaacggccctgcaaagctgtctcttgtggggaaatttgcattctgtagagaatcctcttcccttgccagatcttttcctgattctgaagaaactagctgagagtgtagcaccttttaaaggtctgaatagaaaacatgtgccatctattgcctcttaggggggccacctatgagacttcatctacataatatgaacactggcttccacaacccttaccttaacccagacactcctttctattgatttcaggtctttagacaataacttaactcttttaactgactgccaatcagaaaatctatgaatccacgtatgatctggaaamtcctgcttccagatgttctgcctttccaggcggaactaatgtatacctcacaggtattgattgatgtattttgtctccctaaagtgtataaaatcaagctgcaacccaaccactttgagcacatgttcttaggacttcctgaggctgtgtcacaggtcatgatctttcaccttgggaaacccaaacttctaaattgattgagac

SEQ ID NO: 566429 - DNA, 611 bp, Homo sapiens
taaatatttattttatagttcagagtataggccaatactttgtttcattactcaaagtgttccagcttcatctattgggagaaacggccctgcaaagctgtctcttgtggggaaatttgcattctgtagagaatcctcttcccttgccagatcttttcctgattctgaagaaactagctgagagtgtagcaccttttaaaggtctgaatagaaaacatgtgccatctattgcctcttaggggggccacctatgagacttcatctacataatatgaacactggcttccacaacccttaccttaacccagacactcctttctattgatttcaggtctttagacaataacttaactcttttaactgactgccaatcagaaaatctatgaatccacgtatgatctggaaactcctgcttccagatgttctgcctttccaggcggaactaatgtatacctcacaggtattgattgatgtattttgtctccctaaagtgtataaaatcaagctgcaacccaaccactttgagcacatgttcttaggacytcctgaggctgtgtcacaggtcatgatctttcaccttgggaaacccaaacttctaaattgattgagac

SEQ ID NO: 566430 - DNA, 611 bp, Homo sapiens
taaatatttattttatagttcagagtataggccaatactttgtttcattactcaaagtgttccagcttcatctattgggagaaacggccctgcaaagctgtctcttgtggggaaatttgcattctgtagagaatcctcttcccttgccagatcttttcctgattctgaagaaactagctgagagtgtagcaccttttaaaggtctgaatagaaaacatgtgccatctattgcctcttaggggggccacctatgagacttcatctacataatatgaacactggcttccacaacccttaccttaacccagacactcctttctattgatttcaggtctttagacaataacttaactcttttaactgactgccaatcagaaaatctatgaatccacgtatgatctggaaactcctgcttccagatgttctgcctttccaggcggaactaatgtatacctcacaggtattgattgatgtattttgtctccctaaagtgtataaaatcaagctgcaacccaaccactttgagcacatgttcttaggacttcctgaggctgtgtcacaggtcatgatcyttcaccttgggaaacccaaacttctaaattgattgagac

SEQ ID NO: 566431 - DNA, 572 bp, Homo sapiens
taaataaggcccaacctacggaattcagcttctgtygtcaagtgttaaccaattcaagagaatgctttaagagaccacaaagaagaagaccaaacttctctgagcttctaaagatgataaaagtctgcagccccaaccttcttctttgccacataaccttttcagtttaatggtctctccttttgaaactcactttcctaaagtagaccaaactcccttatctccattggcatgaactcaaaatcctcctgatactaaaatctaaaattctgctggttgaaccttctccttgtaccaatctggcattaccagtttttcccaaatatttatgaagctttttaaaagtgttctttttttacatttaaaatgaaagtatattcatattttctgaggtataaataaaaatttttatgtttgcgttgatggttatattggtctgcatgttcttatattattcttcaggtataagcatgattctttaaagataaatttatatttctctttaagagattgtatttatatttttaaaaattaagcagtcagtgattatagttagaaaatctcaatatgaa

SEQ ID NO: 566432 - DNA, 498 bp, Homo sapiens
tttttcaaccacctgacaccaatttatggaaaaataaaggatttttgaaaaaaaaatcattttaaaaagtaaaattaaatgacacaaatctgcagtagtatttggcagagctcattgaaccctgcaaaggcagcatctcacttgtcttcactacttcccagtagaraaatggagatatgttttgtacgttgatattttttatatgaaaatggaggagaagcagtgtgactgataaactacagtaagttcactacacaggactaggacttgccactttcagattcagagcaacagagatttttaaaacagagatattggtgtattttatgaggttgatgttgaagttctatctcagaaccatcagctccatggtctttaggagcccatgtcaggcaatatggttttatgacttgaaagaaaagtttggattatggattttaaaagtcaatttttcctttcctctcctttgttcttttctcctcctttcccttctttact

SEQ ID NO: 566433 - DNA, 498 bp, Homo sapiens
tttttcaaccacctgacaccaatttatggaaaaataaaggatttttgaaaaaaaaatcattttaaaaagtaaaattaaatgacacaaatctgcagtagtatttggcagagctcattgaaccctgcaaaggcagcatctcacttgtcttcactacttcccagtagagaaatggagatatgttttgtacgttgatattttttatatgaaaatggaggagaagcagtgtgactgataaactacagtaagttcactacrcaggactaggacttgccactttcagattcagagcaacagagatttttaaaacagagatattggtgtattttatgaggttgatgttgaagttctatctcagaaccatcagctccatggtctttaggagcccatgtcaggcaatatggttttatgacttgaaagaaaagtttggattatggattttaaaagtcaatttttcctttcctctcctttgttcttttctcctcctttcccttctttact

SEQ ID NO: 566434 - DNA, 532 bp, Homo sapiens
agtgagccgagatcggtccactgcactccagcctgggcaacacagcgagactccgtctcaaaaaaaaaaaaaacaacaacaacaaaccagaaagttctagttttagaaaatccctatagctaggtatgtttaccaggttaaatggtggggttacaatattgtagaagagtagaataaaattctttatgaataatgtttaaatcaaagaaaagaggccaaggttttcatgaacatcaataaagctttataacaatacaattcattatcattgtttggattaatattgtaataattacacactttttacattatgaaaataagtcataaatagtgtaaaaataattctgaagatcaacttctcacaaactaggaaccctgaaaacaaatttaaaaagcaaataaaaacaaaytggaaactgaacacaatgcaattatctccaaaccgcaaatcaaaaatcttatgcatcttttgatacagtaatgtcagctggagaaattacaaggaaattaaaataaaaattgaacagggaga

SEQ ID NO: 566435 - DNA, 532 bp, Homo sapiens
agtgagccgagatcggtccactgcactccagcctgggcaacacagcgagactccgtctcaaaaaaaaaaaaaacaacaacaacaaaccagaaagttctagttttagaaaatccctatagctaggtatgtttaccaggttaaatggtggggttacaatattgtagaagagtagaataaaattctttatgaataatgtttaaatcaaagaaaagaggccaaggttttcatgaacatcaataaagctttataacaatacaattcattatcattgtttggattaatattgtaataattacacactttttacattatgaaaataagtcataaatagtgtaaaaataattctgaagatcaacttctcacaaactaggaaccctgaaaacaaatttaaaaagcaaataaaaacaaactggaaactgaacacaatgcaattatctccaaaccgcaaatcaaaaatcttatgcatcttttgatacagtaatgtcagctggagaaattacaakgaaattaaaataaaaattgaacagggaga

SEQ ID NO: 566436 - DNA, 569 bp, Homo sapiens
acacgttgtaaaatatttcttatctgccttaaaagggtgcctggctcttagctgattatctgttggatctggaaaggaaggaaagaaaaaaaaaagggaaaggggattcgctatagaatgtggatttttcccgtaagagacttcacagggcaatttcagggtatagcaaggaaatacattttggggtaaaacattttgattttcttccttgttatgccagagtcagatgggaaagttagtcacaatwtacagggttaaatgaaacccatctgatgagaatttatgatttgtagggtatgagtccccagactccttagataggaatttaggccagataagaaaaatcagagtttagtcctcacctgttatccaattcctgagtcacttccacattttcaggttatctttaaaacagtaccccactctaccagtaccaatttcctgtattagtctgctttcacactcctctaaagaatatctgagactgcataatttataaagaaaggaggtttagttgagtcacagtttcacatggctggagagccctcaggaaacttataatcatggca

SEQ ID NO: 566437 - DNA, 574 bp, Homo sapiens
tgatgagttgatgggtgcagcaaaccaccatggcatgtgtatacctatgtaacaaacttgcatgttctgtacatgtaccccagaacttaaagtataataaaaaatagagaggttctgaaaaatatttgattttttgaaataaaaattcagtgcattagaaaagcaggatctttagaagaattcctgctgtgaatcataaaagaaaaaaatcttttcctgatttagtgtatgcttattacctccaacttccctcattcataacttggcagttttactttgtyaggttaagataacagcagcattagcagcaacaaatatcaacctttacatctgcttttgcctgccgggtccttaccccagtcgatgcaacaaatattgagtaatgggttgagtgtccttttcaaaaagataacctagtgatctctggaagatctagcaacccatgtttataatttttaagactaactgtcaaagctcaggacattctgaatctattgatttgttggaaagtattgggcctccctttgtctgcagaagagatgggaggaaccatgaaagtctggtccattaatca

SEQ ID NO: 566438 - DNA, 574 bp, Homo sapiens
tgatgagttgatgggtgcagcaaaccaccatggcatgtgtatacctatgtaacaaacttgcatgttctgtacatgtaccccagaacttaaagtataataaaaaatagagaggttctgaaaaatatttgattttttgaaataaaaattcagtgcattagaaaagcaggatctttagaagaattcctgctgtgaatcataaaagaaaaaaatcttttcctgatttagtgtatgcttattacctccaacttccctcattcataacttggcagttttactttgttaggttaagataacagcagcattagcagcaacaaatatcaacctttacatctgcttttgcctgccgggtccttaccccagtcgatgcaacaaatattgagtaatgggttgagtgtccttttcaaaaagataacctagtgatctctggaagatctrgcaacccatgtttataatttttaagactaactgtcaaagctcaggacattctgaatctattgatttgttggaaagtattgggcctccctttgtctgcagaagagatgggaggaaccatgaaagtctggtccattaatca

SEQ ID NO: 566439 - DNA, 667 bp, Homo sapiens
ataagaacaagtcgattagagtctactaggtatgcacatatagagcaaaacttgtaaagggggcattggagataattaaaatttgagaaatattgatatagtgaaaattacattcgagttataatagaagacccagattcaaatcctgkggcaaaaataaaacccatatgacttagcaagtcacttaccttatctgagtttcagtgttctcttcaataagatagtttttatagcctgtgtttttaaatatctgttaaatgtaaatgtccttctatggtggacacacgtattcccttatcactaatttcatcttagcacaaaagagtttatcatagcatttgttctggcatctagctgggtcctagagaactctcacaaaagccaggtgcatttgtatgtggaaagctaaaaacatgaaaaatttaggacctaactgggagctggagggagtcagtctaaaataagaccaaagccttaggtaaagatgaaggtacaaagactgtataaaagatggaggtgaggtgagtaaagatgactttcatctaatttacaatttgactaaaagccgccaaaactacagtggtggctcacacgtgtaatctcagtattttaggaggccaaggcaggtggattgcctgagcctaggagtttgagacccacgtgggta

SEQ ID NO: 566440 - DNA, 667 bp, Homo sapiens
ataagaacaagtcgattagagtctactaggtatgcacatatagagcaaaacttgtaaagggggcattggagataattaaaatttgagaaatattgatatagtgaaaattacattcgagttataatagaagacccagattcaaatcctggggcaaaaataaaacccatatgacttagcaagtcacttaccttatctgagtttcagtgttctcttcaataagatagtttttatagcctgtgtttttaaatatctgttaaatgtaaatgtccttctatggtggacacacgtattcccttatcactaatttcatcttagcacaaaagagtttatcatagsatttgttctggcatctagctgggtcctagagaactctcacaaaagccaggtgcatttgtatgtggaaagctaaaaacatgaaaaatttaggacctaactgggagctggagggagtcagtctaaaataagaccaaagccttaggtaaagatgaaggtacaaagactgtataaaagatggaggtgaggtgagtaaagatgactttcatctaatttacaatttgactaaaagccgccaaaactacagtggtggctcacacgtgtaatctcagtattttaggaggccaaggcaggtggattgcctgagcctaggagtttgagacccacgtgggta

SEQ ID NO: 566441 - DNA, 667 bp, Homo sapiens
ataagaacaagtcgattagagtctactaggtatgcacatatagagcaaaacttgtaaagggggcattggagataattaaaatttgagaaatattgatatagtgaaaattacattcgagttataatagaagacccagattcaaatcctggggcaaaaataaaacccatatgacttagcaagtcacttaccttatctgagtttcagtgttctcttcaataagatagtttttatagcctgtgtttttaaatatctgttaaatgtaaatgtccttctatggtggacacacgtattcccttatcactaatttcatcttagcacaaaagagtttatcatagcatttgttctggcatctagctgggtcctagagaactctcacaaaagccaggtgcatttgtatgtggaaagctaaaaacatgaaaaatttaggacctaactgggagctggagggagtcagtctaaaataagaccaaagccttaggtaaagatgaaggtacaaagactgtataaaagatggaggtgaggtgartaaagatgactttcatctaatttacaatttgactaaaagccgccaaaactacagtggtggctcacacgtgtaatctcagtattttaggaggccaaggcaggtggattgcctgagcctaggagtttgagacccacgtgggta

SEQ ID NO: 566442 - DNA, 601 bp, Homo sapiens
ccgtgcacatgtaccacaacccagaagctctgtcaacccagtccttttggatttttatgaagtttccattacataggcatgattgattaaatgagtggccattggtgatcaattcaacttttaacccgtctccctcccctaaaataaggggtgaggctgaaagttccaatgctctaactacagggttggttccccaggcaaccagccctcattctgaggctcttcaggaccctgagctgtcaatcatctccttagcatacaaagagacacttatcagttcagatgttcccagggttttaggagctgtgtgtcaggaaactgggtcaagaccaaaatatattatttatgatawccaatattagaatttctgaatgagttgagaaccaaaatttacaaacctcccagacagggaggatatctgctatttttacaacaaactctcaattttccactttacttttttttgttttcatgacgcagactcagagaaaggtgtaaagagagagagatcttggagaagacaggatgaggatataaatcagaccagaaagtgccaaggtttcctcgggaaaaaaaaaaagagaaagaatggataaaggat

SEQ ID NO: 566443 - DNA, 369 bp, Homo sapiens
acacaagggcgtgacattttatgmggcacatagcacatttgaactatgctttgttgaatctccatatcaacctctgtaataactctaacattggtatgaaacccaaataatcacacaaatctaactctagttacctttatggcttatgcctaaaaatgtcaaaacaacctacacataataaatgaagtaaatctttaaaaaatctgtaacaaatgttctcttgccctgggacaggagatggtttcccaggccggctcccctgaggccctgagccaattgttgtttcagcactgctggttttctagaacttgggcagctgtccagctcccagtcaaaatgggcacctctaatcttgctatttgctgggat

SEQ ID NO: 566444 - DNA, 394 bp, Homo sapiens
ctaaagagcagttatcaccacactaagcataaaaattcaactttgcctttcccctrtcttatctgttctgtcttccccatactgactgttctattgtcaagatgcaatttgttaataagattcatggccaaaaataaagtagaagtggactttgcaaaaccttgtgaatataaagtgaagtcctaggcctaaaatatggcagaaagttgcttattaaaggaccttcgtctctcggcatattgaaatgatgtcagagtatgcaattataaatacgattgtcatatttaccatgggaagatatctatagtactttgctgggctgggttacagaaatatgtgtaatataacaccacttctactaaaatatgtgctaagtatgcaaagaaaagaattc

SEQ ID NO: 566445 - DNA, 394 bp, Homo sapiens
ctaaagagcagttatcaccacactaagcataaaaattcaactttgcctttcccctatcttatctgttctgtcttccccatactgactgttctattgtcaagatgcaatttgttaataagattcatggccaaaaataaagtagaagtggactttgcaaaaccttgtgaatataaagtgaagtcctaggccyaaaatatggcagaaagttgcttattaaaggaccttcgtctctcggcatattgaaatgatgtcagagtatgcaattataaatacgattgtcatatttaccatgggaagatatctatagtactttgctgggctgggttacagaaatatgtgtaatataacaccacttctactaaaatatgtgctaagtatgcaaagaaaagaattc

SEQ ID NO: 566446 - DNA, 584 bp, Homo sapiens
caactataatagctgggtgyggtggcttatgcctgtaatctcagtactttgggaggccaaagtgtgaggatcacttgagtccaggtgttcaagaccagcctgggcaacaaagtgagacgctgtctctgtaaaaaataaaaaatgggctgggcacagtggctcacgcctgtaatcccagcactttgggaggctgaggcgggtggatcacctgaggtcaggagtttgagaccagcctggccaacatggcgaaaccccgtctctactaaaaatacaaaaaattagccaggcgtggtggcaggcgcctgtaatcccagctacttcaaagactgaggcaagagaatcacttaaacctgggaggcagaggttgcagtgagcagagattgagccattgtactccagcctgggcaacaagagcaagacaccatctcaaaaataaataaataaataaataaataataaaataattaaaaaataaaaaataaattagctgggcgtggtggcacacgcctttagtcccaactacttgggaggctgaggcaggtggattgcttaagctggggagatcaagactgcaatgagccata

SEQ ID NO: 566447 - DNA, 584 bp, Homo sapiens
caactataatagctgggtgcggtggcttatgcctgtaatctcagtactttgggaggccaaagtgtgaggatcacttgagtccaggtgttcaagaccagcctgggcaacaaagtgagacgctstctctgtaaaaaataaaaaatgggctgggcacagtggctcacgcctgtaatcccagcactttgggaggctgaggcgggtggatcacctgaggtcaggagtttgagaccagcctggccaacatggcgaaaccccgtctctactaaaaatacaaaaaattagccaggcgtggtggcaggcgcctgtaatcccagctacttcaaagactgaggcaagagaatcacttaaacctgggaggcagaggttgcagtgagcagagattgagccattgtactccagcctgggcaacaagagcaagacaccatctcaaaaataaataaataaataaataaataataaaataattaaaaaataaaaaataaattagctgggcgtggtggcacacgcctttagtcccaactacttgggaggctgaggcaggtggattgcttaagctggggagatcaagactgcaatgagccata

SEQ ID NO: 566448 - DNA, 559 bp, Homo sapiens
tattcccttctttagttcttgttgtcttcaactatggcctaagcaatttggaacaagttcactatgaaartccacccagaagtttaattatttatttctctgtaatatccgtttttattttttctttatgaatgctaaattttaaatcccttaactttatagcccattaataattttatatttataaaataaactattaaaaagttttaagaagcttgactttatcaattatcatctaatttctatttttaaatcttatgaattttattttatgaactgagatgaattccataacattgaagggtaataagaaacataaaagtcaacactatactattttttaatgaaatcaaaagtatataattaaaataagtttttcttctgcccttctgaaagatataaaatgttcaggagaacaaaatgtcctgcagtcataggacacttgagacttttaacacccagcagctgggcctttcaagcctacagtcatttttggctgtacttttgggcatcatccataatgttttccagtttctttttttttttttttttttattat

SEQ ID NO: 566449 - DNA, 559 bp, Homo sapiens
tattcccttctttagttcttgttgtcttcaactatggcctaagcaatttggaacaagttcactatgaaagtccacccagaagtttaattatttatttctctgtaatatccgtttttattttttctttatgaatgctaaattttaaatcccttaactttatagcccattaataattttatatttataaaataaactattaaaaagttttaagaagcttgactttatcaattatcatctaatttctatttttaaatcttatgaattttattttatgaactgagatgaattccataacattgaagggtaataagaaacataaaagtcaacactatactattttttaatgaaatcaaaagtatataattaaaataagtttttcttctgcccttctgaaagatataaaatgttcaggagaacaaaatgtcctgcagtcataggacacttgagacttttaacacccagcagctgggcctttcaagcctacagtcatttttggctgtacttttgggcatcatccataatsttttccagtttctttttttttttttttttttattat

SEQ ID NO: 566450 - DNA, 644 bp, Homo sapiens
cacatgtgtgtttgtgtgtgtgtgtgtgtgtgtgtgtatgtgtgtgtactacaaagggaaagacagtaactttgcagtggagaaactgagcaggccaacaacaccagtaacaagacataacatcttgagaactgtgacatgataccttgagaactcaacactggctctgtgacattcttgacaaaaatacagagcagctttcagtcatgcagaagcatcagacctatccaaattgacttacattagacaaaacacatgatcgacatattttgaaagtatcaagattgtgaaagactaggaaagcctgaggaactatttccagattacaggagactaaggagaagtaactagttgcaatgcagaatcctraacttgatcctggaccaaaaagagacaaatagtgggagaaaatggtaagatttgagcaaaatctctagttatatagtatgctactaatgttaatgggctttggttctgactgccatgctaaggttatataaaatggtaataaagaaagctgggaaagaaatccatgaaaactctctgtagaattctgcaactattctccatgtctaactttagttaaagaaagaaaaactttaaaaagatctctaagtttccttggatttgaatattttgttaaa

SEQ ID NO: 566451 - DNA, 646 bp, Homo sapiens
tatatatatatgtgtgtatgtatacacatatacatatatacatacacacaaaatgtgggtatacatacacacacacaactcccacattttcttcatccattcatttattgataaacactttggttgactctggttgactcaattcttggctattgtgagtagtgctgcaatgcacatggaagtgcagatgtttcttccacatactgctttcacttcctttgtatatatacctggtagtgggrttactgaattacatggtagttttatttttaattttttgaggaacttatatattgtctatcaaaatggctttattaatttacattcccaccaacagcatataagagttccctctattccacatcctggtcaatatgagtatcttttgtcttgatagtggccattcttacaagtgtgaggtgatatctcattgtgattttaatttgcatttccctgataattagtaatgttaaatctatctatccatatatatatatacctcttggccatttgtatgacttcttttgagaaatgtctattcatatcctttgcccatttttaaattaggttattttttttcttgctattgagatgagttcctcatatattttgaatatgaacttcatatcagacatataatttgcaa

SEQ ID NO: 566452 - DNA, 572 bp, Homo sapiens
tgggcttgctttttagcagggcttagggtctgagcaccataaagcctttgatctttctatactttatgtaagaataaagccttcagtttcctaaatcatattacagttcttcctgctgccagcttgtaagtatcttaatagttctcattgctctcaagcctcaatcctctcaccctagcctccttgctattaggtaatctttttccagtctcctgttcagcatcaaatcttcagcctgtagaatcttaaatgagtttctctaacttttcctggactgtagatttcaacatgttgctaccttttacttggtatggcagaaagattcaatagtgtctctcatgcttctcacctcctgctatttgtacaattgtctaattctgtttgattcaagaactgtaatttcttctaataaatggatgtgtacaatgtgacaaggcatgcatgattacataagaatatagcacctatgtctagagtcagatcctctttcttctttttccgaattgctccttctccctttctctaccacttcccaaagacagctsctattaatctcacaggtgtaagaaaat

SEQ ID NO: 566453 - DNA, 573 bp, Homo sapiens
atactgttataattagatattaatattcaatgaagattaacttttattcatgttaaaatctttaggtgattattttattagaaaattacatcttattaataaaatgttattaacttgtattagaaatatgtttcagacaagtcaatactgaggtgtaaatttaaatatattttacataaatttcactcaatttttttagtaaattaaatgttcagaaaaatagtaaagtttagatttaggtattacatggcaccgtgtctttcttcggttttaaatggtctgtagtgataaaatctgtcaggaccatcagccttcctggatttccaaaatgtcattttaattctaaaaactgaaaaacagtaaaaaaaaaaaaaatctggattcttttgccaaaaaawttcaatttatgaaccactgggtactaataaaaataatttttaaatatagtgatattaatgctaaagaagataataatatactgttttacaaaaggagaaaaacctcattttatgacagaaacaaatttgagacccagctttcaaacttaaaaaaaaaaaaagaaaatgattaatt

SEQ ID NO: 566454 - DNA, 567 bp, Homo sapiens
aagaatgaacaatggcagtctgcgaaacaagagtactgcaatttttgtctctaactatatttgtaatcttgaacaaattacataactcctctctcttgctttastttcctcatttagttcatctttttctagatcatcctttctggttctgtaattctattttattttcagttgccttctcaattttctatattgcaatatattttaattcataatggttcaatttgtgataatcactgctcagccacaaattgaaaatttagccaaaaaaaccccacagaaatggcattgctttgactttaaaatagcatactcttcctgtcttttttgagatctaaaattgtttatcagtttgcggggttctcttgggtttattgtactattagacactgacacgttttaaaggatccttaaaaaaaaaaagaaacaaatgaaaagaaaaagaaaacaaccaaatctggcttgttctgggatgctgagatgtcttgacagcaattactgcagtagagactggtgaataccctattttcacagctgatgttttccttcaaaattgcagctaccttc

SEQ ID NO: 566455 - DNA, 585 bp, Homo sapiens
acaattttttttggtttgattagctttaggcttgacggatggtttaacttttttaaaaaatcacattttaacactatatacatgtttgttaaataaagataacttattatgtctcttaaatgagattctttaaaatttttctgtagagttatatcacatgtgttaaaaatgtatgtactaaattaattactgaaaatgagcaaaaagtaattctgttaaaataagaaaataatgcatgcttacaaaaaggtctgagctaaaaaaaaatctttaaaaaaatctccataagtctttgaataacgtttgaattttcattggacttytgctgtttgtttattagctgagtcagtctacacaatactaaaatgccttacaatgacatgtatttaaaagtaagggtcatgagaaatatggtggaaaataataagtccaggggaaaatatatactaaagtctctgcagctattaaaattacccagccagaagtgatggcacacatgtataatcccagcagtttgggaggccaaggtgaagaggattgttcaagcccaggagttggagaccagcctgggaaacatagcaagat

SEQ ID NO: 566456 - DNA, 499 bp, Homo sapiens
tctccaatatttgatttccttcttgtcttcttttctttgtggtggtgttttgtgtttgatacacgagtctcactctgtcacccacgctcgagtgcacwggtgtgatgttggctcatagcaaccttcgcctcccgggttcaagcgattttcctgcctcacactcctgagtggctgggattacacgtgtgcgccaccacgcccggctaatttttgtgtttttagtagagatggagtttcaccatgttggccaggccaggtctccaacttctgggccccaagccatctgcccacctcagcctcccaaagtgctgggattacaggcagcatggccaccatgcccggctttccttcttgccttttcttaagagtcctgcttcaaggaaacttccgtctccttttcaaaaactatttcagtaacaatcccttggtgtttatttaccatttgtagcttaaacttaaaactttttccctgtattagttatttttcaaatatactttt

SEQ ID NO: 566457 - DNA, 492 bp, Homo sapiens
gacacaatatgtttaaccctatatcagacagaatttttaaagtggcactcattaacagaaccattttaaatatagctgaaaatgataaagcaagtcttgtagttaatgccaaaataatacatacaaaataataatttgctaagcaccattacccggagaagcaaaatcaggtgaaagtcacctaactttctgtttctgccctgggtcagactttaccagatgctaaacacaagaagaaccaaaactcaatyttctcttccaacaatgggtatatgaccacaagactgtctttaaaatcagatattgtgtgctgctggattcggtttgccagtattttattgaggatttttgcatcaatgttcatcaaggatattggtctaaaattctcttttttggttgtgtctctgcctggctttggtatcaggatgatgctggtctcataaaatgagttagggaggattccctctttttctattgattggaatagtttca

SEQ ID NO: 566458 - DNA, 492 bp, Homo sapiens
gacacaatatgtttaaccctatatcagacagaatttttaaagtggcactcattaacagaaccattttaaatatagctgaaaatgataaagcaagtcttgtagttaatgccaaaataatacatacaaaataataatttgctaagcaccattacccggagaagcaaaatcaggtgaaagtcacctaactttctgtttctgccctgggtcagactttaccagatgctaaacacaagaagaaccaaaactcaattttctcttccaacaatgggtatatgaccacaagactgtctttaaaatcagatattgtgtgctgctggattcggtttgccagtattttattgaggatttttgcatcaatgttcatcaaggatattggtctaaaattctcttttttggttgtgtctctgcctggctttggtatcaggatgatgctggtctcataaartgagttagggaggattccctctttttctattgattggaatagtttca

SEQ ID NO: 566459 - DNA, 544 bp, Homo sapiens
ctgggcagtggaggttcccttggctctgtrtttctcctggtgggccatcattctgccttgcttttcgatcttcatggatcaagttgtttccttgattagtcccaatgcaagaacctggaatgaggaagtctttgctcttgtgctgtaaaatggactgttaagacgtgaaaatagtatatcagaattaacaggaaggcaatttgttctcagaatctcatgtgctaatgtgggtctgaaagaacaaaggaaggaaatagtgtcactagcacagtagaagaaggaccataggtggaggtcagcaatggaagagctcttatctttattttgttttggaatattaattgcaaagtttctaataaaatataaaacacaagcatttactgcttacagatggtgtatttgatactattaagtaattagcagtaataatatatacccattcacattaataaaactagttccacttacatatttgagtttagataaaactaccattttctaacagtttcgtatatcaatatttcaaatgggttaaaagcacatg

SEQ ID NO: 566460 - DNA, 627 bp, Homo sapiens
aacctttcctccagtgtgattttaagcaatttacttaactaatcttttgggtraagattcaataattaaatccatataaagcttttagaaaaatgcacagcacattgtaaacaccttattgaactatttaacacttttcctttagaacaaatgtatgtaatattgtccacagaaaacagacagaaaaattgagccagtcaccaattattttcttcactaagcacctaaatgtcaatttgcagaacagtgcaggcaggtcccctgttttctaggctttggttccatgttatacagaagcaacaggtgtgctcaggcaacagcaaggtttgggtttgagctgcagccctgctatgggttataatcaagtcatccgatccccttcctagaaataattacctacaatgtttttgtgagaattcaaaataataacataatgtaattatatttatgaggcacattaaacattatgctttattatcccaataattcaaggtactgccagtgtccccattttgcagttgaggaaactgaggcacatggaggttaagtaacaatcttcaggttataaaactagccagttcgcttaaccactatgctacacagcttttcatgtttccatagaaagca

SEQ ID NO: 566461 - DNA, 627 bp, Homo sapiens
aacctttcctccagtgtgattttaagcaatttacttaactaatcttttgggtaaagattcaataattaaatccatataaagcttttagaaaaatgcacagcacattgtaaacaccttattgaactatttaacacttttcctttagaacaaatgtatgtaatattgtccacagaaaacagacagaaaaattgagccagtcaccaattattttcttcactaagcacctaaatgtcaatttgcagaacagtgcaggcaggtcycctgttttctaggctttggttccatgttatacagaagcaacaggtgtgctcaggcaacagcaaggtttgggtttgagctgcagccctgctatgggttataatcaagtcatccgatccccttcctagaaataattacctacaatgtttttgtgagaattcaaaataataacataatgtaattatatttatgaggcacattaaacattatgctttattatcccaataattcaaggtactgccagtgtccccattttgcagttgaggaaactgaggcacatggaggttaagtaacaatcttcaggttataaaactagccagttcgcttaaccactatgctacacagcttttcatgtttccatagaaagca

SEQ ID NO: 566462 - DNA, 610 bp, Homo sapiens
tgtaatttggagctggacccaggggcattgcaacagcaggactgcagaaagcagatatggggagaaaaaagaaggtttctgttctagactcagtccttcccctccctactacatacttttccaccctctcagagcctggggccctgaagagaaggctcatcagcactttgaggcccctggcagagcaaggttttggtgtccagcargcacccagcactgggagagtggagacaggcgctgggctgcagagaagctgagctgggaatcaatttccctgggggctggccccagctgtctcattgacttgctgtgtgactttgcatgaggaaaaatgattcctttgtgcctcagttttcccatccataattaggatgattttgcagctcttccacctgctgtatgtgctgtgacctcaagccagggaggggatgggagggtgaaggtagcattttgccctgatgcccacctaccactccaggcttttaaccagacaatgccattcattgacctgcaacccatattattgacccaatgttcctcaaagaaaggcttcagccatttccaaatctgttcactttgccctatgaattgcttggggtccaggctggcc

SEQ ID NO: 566463 - DNA, 610 bp, Homo sapiens
tgtaatttggagctggacccaggggcattgcaacagcaggactgcagaaagcagatatggggagaaaaaagaaggtttctgttctagactcagtccttcccctccctactacatacttttccaccctctcagagcctggggccctgaagagaaggctcatcagcactttgaggcccctggcagagcaaggttttggtgtccagcaagcacccagcactgggagagtggagacaggcgctgggctgcagagaagctgagctgggaatcaatttccctgggggctggccccagctgtctcattgacttgctgtgtgactttgcatgaggaaaaatgattcctttgtgcctcagttttcccatccataattaggatgattttgcagctcttccacctgctgtatgtgctgtgacctcaagccagggaggggatrggagggtgaaggtagcattttgccctgatgcccacctaccactccaggcttttaaccagacaatgccattcattgacctgcaacccatattattgacccaatgttcctcaaagaaaggcttcagccatttccaaatctgttcactttgccctatgaattgcttggggtccaggctggcc

SEQ ID NO: 566464 - DNA, 513 bp, Homo sapiens
tggccaggatggtcttgatctcttgacctggtgatcctcctgcctcagcctcccaaaatgctgggattacaggcatgagccaccacgtctggcctcggtcagtgtatacctttttaagmatttttgtctgttctttcattcacagagaatgaaatgcctaaatcctaagtgtaggatgtagcaaaatatcatcaggccaagacccctgtaatcatcactcagttggtaaattcttgcaggatgccaaattggaactttaggtgctggagtggtgagcattccaaagcggtgggcatgaagccagtcctatgactctccaagcctagaccccttgagggactgggtcattaggtgttagagaagatttataaagggtacggctctgcagatgcctgagctgagagaaccaatccaggaagggtggagtgaagctgcctacgtccttccctcaatcaggagaatggggttttaagggaccacatggagagcttgacatgtgtcccttgtcatcaa

SEQ ID NO: 566465 - DNA, 633 bp, Homo sapiens
gtagcagaaaatagttgctgaataaatatttgttgattgaatggatggataattgacactgctcacacaggagtcaggggaaaaaaatctctccaccataggtccagtgggctattatwatctgtcccaactcataaagacactggctacaggattgcaaattagattctactaaaaggaaaaggaagcacattactcttaaatgaaagttttgctaaattcctcattcattaattcaacataatttgttgaattcttagcatctgctaggcatcatttcaggctcttgagatttgtgaatggtcattacgattcatacagttgtggagcttacattctagttcaagcagtcagataataataagcataataagtaatttgagtagtgtgctggaatgggacacatgcaataaaaacaatgaagcagaagaaatgagattggggtactaggggtagaatttgggtacagataggcctcaatattattttatttatttcttattttagaggcaaggtcttgctctgtcacccaggctggagtgcagtggcaccatcatagctcactgcagccttgatctcctgggctcaagcaatcctcccacttcagcctcccaagcagctgggactacaggt

SEQ ID NO: 566466 - DNA, 567 bp, Homo sapiens
tccagtgggctattataatctgtcccaactcataaagacactggctacaggattgcaaattagattctactaaaaggaaaaggaagcacattactcttaaatgaaagttttgctaaattcctcattcattaattcaacataatttgttgaattcttagcatctgctaggcatcatttcaggctcttgagatttgtgaatggtcattacgattcatacagttgtggagcttacattctagttcaagcaktcagataataataagcataataagtaatttgagtagtgtgctggaatgggacacatgcaataaaaacaatgaagcagaagaaatgagattggggtactaggggtagaatttgggtacagataggcctcaatattattttatttatttcttattttagaggcaaggtcttgctctgtcacccaggctggagtgcagtggcaccatcatagctcactgcagccttgatctcctgggctcaagcaatcctcccacttcagcctcccaagcagctgggactacaggtgtgtgccactatgccctgctaattttaattttcttt

SEQ ID NO: 566467 - DNA, 686 bp, Homo sapiens
acactgctgataaagacataccagagactagaaaatttataaagaaaaagaggctcaagggacttatggttccatgtggctggggaggactcacaatcagggcagaaggcaaaggaggagcaaagtcatgtgttacattgtggcaggcaagacaaagagcatgtgcaggggaacccccctttataaaaccatcagatctcatgagacttattcactatcatgagaacagcacaggaaagaccctcccttatgattcaattacctcccatatccaaattatgggagctacaatttgagatttgggtgggacacagccaaaccatatcaaatggttagagattctgsatcaaaacaatctcttccttgcttctggctcttgtcccaggacttttacctagtgcttggtggttcattttggatttgaaaaatcttgaataatttttttagcttttttctgcagttttatctctagtctggtttgatatgatttgagcaacaatataatctcaatcaggacagcaacacaaatccattactttgattattataacataaacaaaactatttctgagtgtttcttattaaaaacaaatagaattgctttaattgaccatgaaatccaaattttgggcactaattagcaacttcattcttgaaaagtctactgtcctatgctctaagctaga

SEQ ID NO: 566468 - DNA, 686 bp, Homo sapiens
acactgctgataaagacataccagagactagaaaatttataaagaaaaagaggctcaagggacttatggttccatgtggctggggaggactcacaatcagggcagaaggcaaaggaggagcaaagtcatgtgttacattgtggcaggcaagacaaagagcatgtgcaggggaacccccctttataaaaccatcagatctcatgagacttattcactatcatgagaacagcacaggaaagaccctcccttatgattcaattacctcccatatccaaattatgggagctacaatttgagatttgggtgggacacagccaaaccatatcaaatggttagagattctggatcaaaacaatctcttccttgcttctggctcttgtcccaggacttttacctagtgcttggtggttcattttggatttgaaaaatcttgaataatttttttagcttttttctgcagttttatctctagtctggtttgatatgatttgagcaacaatataatctcaatcaggacagcaacacawatccattactttgattattataacataaacaaaactatttctgagtgtttcttattaaaaacaaatagaattgctttaattgaccatgaaatccaaattttgggcactaattagcaacttcattcttgaaaagtctactgtcctatgctctaagctaga

SEQ ID NO: 566469 - DNA, 592 bp, Homo sapiens
tctaaatgaatatttgtgtcattgttcttgcactcgtggtaagactagaactttcaargtcaacatatttgttcatcgtgttcacagtggcactcataaaagattattgccacttattgggcaactactctcttcactaaatatcttattagcatgattttccaaagatgataggaaattaaaacactccatagtacagtttattttgtggttttgaggaaatgtaatacaaagaaagggcacatattctagtgaattttataaaagaaatgatctgctacttgacctggagtgtgtgctgggggtgtggggggaggaaatagcaaaggcttatagagaaactgattgagctcattctgttatttgtttcaggggtgactccaggatggtgcctctctttgtgatgttctcgcaataacaatattctttttattttccttgatctttcacagcctgtggatatttcagcttgcaaggttaaataatgtttttgctccatggccagtttttaaaatcctccctggctctgctatgacactagattaaaaaaacaacaaaacagcctttgtttcccattgcttgtgcttcacat

SEQ ID NO: 566470 - DNA, 612 bp, Homo sapiens
ccaacctgacagtgctttatttctattattatattatattatatttatcctatggtataaaattgttctttactattctgacattcttgctagaaatcatgaaatcttcacaagtactctgttagcataatgcttggtgtatcttagatgtttaatagatattgagcatatagatgaaatagaacatttggaaactcaatttatagagattataattagaaaacataaattttatgctttgcagtttgggattaytaataggttagaatgtagaaggcactattcaggtaaaatgcgagtaagcagtgtttttttttttttaaattagaactaacttctgtagaaagattatatacacacacacacatatatatatattattccctgttaataacattttaatgtatattcaattatattcttttagatataatctccctattaagtttaataacttccttgaattaggttatcattgggatgagccatatgaaattactcatattcatctatttttaaactaaaaaatggcaatttcatatgcttcaatccaaacattattatttagtacaatataaagaatggctacatggtccataatactttattaaa

SEQ ID NO: 566471 - DNA, 612 bp, Homo sapiens
ccaacctgacagtgctttatttctattattatattatattatatttatcctatggtataaaattgttctttactattctgacattcttgctagaaatcatgaaatcttcacaagtactctgttagcataatgcttggtgtatcttagatgtttaatagatattgagcatatagatgaaatagaacatttggaaactcaatttatagagattataattagaaaacataaattttatgctttgcagtttgggattattaataggttagaatgtagaaggcactattcaggtaaaatgcgagtaagcagtgtttttttttttttaaattagaactaacttckgtagaaagattatatacacacacacacatatatatatattattccctgttaataacattttaatgtatattcaattatattcttttagatataatctccctattaagtttaataacttccttgaattaggttatcattgggatgagccatatgaaattactcatattcatctatttttaaactaaaaaatggcaatttcatatgcttcaatccaaacattattatttagtacaatataaagaatggctacatggtccataatactttattaaa

SEQ ID NO: 566472 - DNA, 231 bp, Homo sapiens
aattcctgcttcaaagttttgttatgaaaagtcataataaacatagctaacacttgtcactacacaaaaattgttctctagaaaacaaaagagtaccamacagattagatgacattttaatctaaatacaaactttgaaatagagtagccaaagttcaaaaaaaatatttaatttctcctttaaatgcatcttttcaatgacatctcatagagtaatatgagaattgtttt

SEQ ID NO: 566473 - DNA, 544 bp, Homo sapiens
ttagagaagagtggccttcacaccctatcctgccaagattctgttggcttcccacccacaaaaatcaagatattcaaagcaactgaggcaaacctagtgcaaccctgtgtgactctgacaacaagaaagagaagctccccgtgggtcaaatgtcaggaatgcccacatctcagctattgcagacactctgtacctagattctcctcctaytcctaaaaacattgccatgaaagagcacacaaagatggaattcagcttttcattcaaagcttcaaaaggcaatgaaagagaaatgaggatcatgggaggagggagatagcggaatgaaggtttcaatgatgtcccaaaatataaaacaaatcagcagaattctggtcattgttgctacactgatcacagttttgggtgatcataaaagatgaagagtagcatacctttttggaaatgcatgacagaacacttggcaggtattttcataataaaatttcactcatcaaatttactaaccaagtctattcagcattttcagacctcagctctcaat

SEQ ID NO: 566474 - DNA, 544 bp, Homo sapiens
ttagagaagagtggccttcacaccctatcctgccaagattctgttggcttcccacccacaaaaatcaagatattcaaagcaactgaggcaaacctagtgcaaccctgtgtgactctgacaacaagaaagagaagctccccgtgggtcaaatgtcaggaatgcccacatctcagctattgcagacactctgtacctagattctcctcctattcctaaaaacattgccatgaaagagcacacaaagatggaattcagcttttcattcaaagcttcaaaaggcaatgaaagagaaatgaggatcatgggaggagggagatagcggaatgaaggtttcaatgatgtyccaaaatataaaacaaatcagcagaattctggtcattgttgctacactgatcacagttttgggtgatcataaaagatgaagagtagcatacctttttggaaatgcatgacagaacacttggcaggtattttcataataaaatttcactcatcaaatttactaaccaagtctattcagcattttcagacctcagctctcaat

SEQ ID NO: 566475 - DNA, 603 bp, Homo sapiens
atagtcatctcattcagaaaattaaagggaaaccaaaaaaaaaaaaaagaaagagaaaaaagagatcaaatgacccttgcctcagtcaccagtgctacgtattgttcaagacaaatccacagttcacatttcattggcaatactaaygtatcactatatttagtgtggcattataatctctcaaattattttgaaggaggaagaatctgccaataacccactgtagcattagaaatatttaaacacttaatataatacatgttgtgttatgtattccaaagggagaatttccctaacacgttacacttaaatgcaatattaaacttcaattatcacttctcatatcaaggttttatattctaattagcaagagaaaatgaagatcacaccagagtccattttattttaaaaatttcttagaaccatgtaatttaaacctagaagagatttcagagactgcctagggtcaaggccccttgtttttacacaggagaaaaccggggctcatactagtttcccaagttgcagaaagacataaactcacttaatgcacatgtggcattagatcccaggcctcctgacatatatcctagtgttctttta

SEQ ID NO: 566476 - DNA, 603 bp, Homo sapiens
atagtcatctcattcagaaaattaaagggaaaccaaaaaaaaaaaaaagaaagagaaaaaagagatcaaatgacccttgcctcagtcaccagtgctacgtattgttcaagacaaatccacagttcacatttcattggcaatactaatgtatcactatatttagtgtggcattataatctctcaaattattttgaaggaggaagaatctgccaataacccactgtagcattagaaatatttaaacacttaatataatacatgttgtgttatgtattccaaagggagaatttccctaacacgttacacttaaatgcaatattaaacttcaattatcacttctcatatcaaggttttatattctaattagcaagagaaaatgaagatcamaccagagtccattttattttaaaaatttcttagaaccatgtaatttaaacctagaagagatttcagagactgcctagggtcaaggccccttgtttttacacaggagaaaaccggggctcatactagtttcccaagttgcagaaagacataaactcacttaatgcacatgtggcattagatcccaggcctcctgacatatatcctagtgttctttta

SEQ ID NO: 566477 - DNA, 582 bp, Homo sapiens
gatgaagctggaaaccatcatcctcagcaaactaacaggggaacagaagacccaacactgcatattttcactcrtaagtgggagttgaataatgataacacatggatgcagggagtggaacaacacacactggggcctttcggggagtggggtgcaaggggagggagagcattaggacaaattcctaatgcatgtggggcttaaaaccaaatgacgggttgacaggtgcagcaaaccaccatggcacatgtatacctatgtaacaaacctgatgttcagcacatgtatcccagaacttaaagtaaaataaaataaaataaacagtttgtgaatttatcaataacctgatagaattacagactgcagtgcgtactcataaggaactcttatttattcatgctgttgaagggagattggataagctagacatattaaataatagtatgtttgattttcttggagtttataaagttatcaagctaaacagtaactatctgaatcttgagagactggaaatttggctgacttcttttaggtttcttcctttcccacagaattctttgtttctccctctattctgtg

SEQ ID NO: 566478 - DNA, 582 bp, Homo sapiens
gatgaagctggaaaccatcatcctcagcaaactaacaggggaacagaagacccaacactgcatattttcactcataagtgggagttgaataatgataacacatggatgcagggagtggaacaacacacactggggcctttcggggagtggggtgcaaggggagggagagcattaggacaaattcctaatgcatgtggggcttaaaaccaaatgacgggttgacaggtgcagcaaaccaccatggcacatgtatacctatgtaacaaacctgatgttcagcacatgtatcccagaacttaaagtaaaataaaataaaataaacagtttgtgaatttatcaataacctgatagaattacagactgcagtgcgtactcataaggaactcttatttattcatgctgttgaagggagattggataagctagacatattaaataatagtatgtttgattttcttggagtttataaagttatcaagctraacagtaactatctgaatcttgagagactggaaatttggctgacttcttttaggtttcttcctttcccacagaattctttgtttctccctctattctgtg

SEQ ID NO: 566479 - DNA, 442 bp, Homo sapiens
aatggaatggaatggaatggaatggactggaatggaatggaattaacccgaatacaatggaatggaatggaatggaacggaatggagtggaatggaatggaatcaacccgagtgcaggggaatggaatggaatggaatgcaatggaatggaatcatccggaatggaatggaatggaatggaatgcaaagcaatggaatcaactcgattgcaatggaatggaatggaatggaaaggaatacattggaatcaacccgagtggaatggaatggaaaggactggaatggagtggagtggaatggaatggaatggratagaatcaactcgattggaatggaatggaatggagtggaattaacccgaatagaattgaatggaatggaatggaacggaacggaacggaacggaatgaaatggaatggaatggaatggaatggaatggaa

SEQ ID NO: 566480 - DNA, 442 bp, Homo sapiens
aatggaatggaatggaatggaatggactggaatggaatggaattaacccgaatacaatggaatggaatggaatggaacggaatggagtggaatggaatggaatcaacccgagtgcaggggaatggaatggaatggaatgcaatggaatggaatcatccggaatggaatggaatggaatggaatgcaaagcaatggaatcaactcgattgcaatggaatggaatggaatggaaaggaatacattggaatcaacccgagtggaatggaatggaaaggactggaatggagtggagtggaatggaatggaatgggatrgaatcaactcgattggaatggaatggaatggagtggaattaacccgaatagaattgaatggaatggaatggaacggaacggaacggaacggaatgaaatggaatggaatggaatggaatggaatggaa

SEQ ID NO: 566481 - DNA, 442 bp, Homo sapiens
aatggaatggaatggaatggaatggactggaatggaatggaattaacccgaatacaatggaatggaatggaatggaacggaatggagtggaatggaatggaatcaacccgagtgcaggggaatggaatggaatggaatgcaatggaatggaatcatccggaatggaatggaatggaatggaatgcaaagcaatggaatcaactcgattgcaatggaatggaatggaatggaaaggaatacattggaatcaacccgagtggaatggaatggaaaggactggaatggagtggagtggaatggaatggaatgggatagaatcaactcgattggaatggaatggaatggartggaattaacccgaatagaattgaatggaatggaatggaacggaacggaacggaacggaatgaaatggaatggaatggaatggaatggaatggaa

SEQ ID NO: 566482 - DNA, 442 bp, Homo sapiens
aatggaatggaatggaatggaatggactggaatggaatggaattaacccgaatacaatggaatggaatggaatggaacggaatggagtggaatggaatggaatcaacccgagtgcaggggaatggaatggaatggaatgcaatggaatggaatcatccggaatggaatggaatggaatggaatgcaaagcaatggaatcaactcgattgcaatggaatggaatggaatggaaaggaatacattggaatcaacccgagtggaatggaatggaaaggactggaatggagtggagtggaatggaatggaatgggatagaatcaactcgattggaatggaatggaatggagtggaattaacccgaatagaatkgaatggaatggaatggaacggaacggaacggaacggaatgaaatggaatggaatggaatggaatggaatggaa

SEQ ID NO: 566483 - DNA, 435 bp, Homo sapiens
ggaatggaatggaatggaatgtaagggaattgaatagaatcaatccgaatggaatggaatggaatggaacggaatgtaatgkaatggaatggaatggaatcaacccgagtgcaggggaatggaatggaatggaatgcaatggaatggaatcatccggaatggaatggaatggaatgcaatggaatggaatggaatggaatcaacccgagtgcaatggaatggagtgaaatggaatggaatggaatggagacaaccagaatggattggaatataatggagtgtaagggaattgaatagaatcaatctgaatgtaatgaaatggaatggaacggaatggaatggaatgtaatggaatggaatggaatgcaatggaatggaatcaacccgagtgcaatcgaatggaatcgaatggaatggaatgcaatggaatggatt

SEQ ID NO: 566484 - DNA, 435 bp, Homo sapiens
ggaatggaatggaatggaatgtaagggaattgaatagaatcaatccgaatggaatggaatggaatggaacggaatgtaatggaatggaatggaatggaatcaacccgagtgmaggggaatggaatggaatggaatgcaatggaatggaatcatccggaatggaatggaatggaatgcaatggaatggaatggaatggaatcaacccgagtgcaatggaatggagtgaaatggaatggaatggaatggagacaaccagaatggattggaatataatggagtgtaagggaattgaatagaatcaatctgaatgtaatgaaatggaatggaacggaatggaatggaatgtaatggaatggaatggaatgcaatggaatggaatcaacccgagtgcaatcgaatggaatcgaatggaatggaatgcaatggaatggatt

SEQ ID NO: 566485 - DNA, 435 bp, Homo sapiens
ggaatggaatggaatggaatgtaagggaattgaatagaatcaatccgaatggaatggaatggaatggaacggaatgtaatggaatggaatggaatggaatcaacccgagtgcaggggaatggaatggaatggaatgcaatggaatggaatcatccggaatggaatggaatggaatgcaatggaatggaatggaatggaatcaacccgagtgcaatggaatggagtgaaatggaatggaatggaatggagacaaccagaatggattggaatataatggagtgtaagggaattgaatasaatcaatctgaatgtaatgaaatggaatggaacggaatggaatggaatgtaatggaatggaatggaatgcaatggaatggaatcaacccgagtgcaatcgaatggaatcgaatggaatggaatgcaatggaatggatt

SEQ ID NO: 566486 - DNA, 435 bp, Homo sapiens
ggaatggaatggaatggaatgtaagggaattgaatagaatcaatccgaatggaatggaatggaatggaacggaatgtaatggaatggaatggaatggaatcaacccgagtgcaggggaatggaatggaatggaatgcaatggaatggaatcatccggaatggaatggaatggaatgcaatggaatggaatggaatggaatcaacccgagtgcaatggaatggagtgaaatggaatggaatggaatggagacaaccagaatggattggaatataatggagtgtaagggaattgaatagaatcaatctgaatgtaatgaaatggaatggaacggaatggaatkgaatgtaatggaatggaatggaatgcaatggaatggaatcaacccgagtgcaatcgaatggaatcgaatggaatggaatgcaatggaatggatt

SEQ ID NO: 566487 - DNA, 514 bp, Homo sapiens
gaaatggaatggaatcgaaaggaatggaatggaatggaatggtttcaacccgaatggaatggaaaggaatggaatcaacccgagtggaatgsaatggaatggaatggaatggaatgggttcaactcgaatggaatggaaaggaatggaatcaacccgagtggaatggcatggaatggaatggaatggaatggaatggaatggaagggaatggaatggaatggaattaacctgaacagaatggaagggaatggaatggaacggaacggaatggaatggaatggaatggaatggaatggaatggaatggaatgaaatggaatgggatcaacccgagtacaggggaatggaatgcaatggaatgcaatggaatggaatcatccggaatggaatggaatggaatggaatgcaatggaatggaatcaatcaacccgagtgcaatagaatgcagtggaatggaatggaatggtatggaaactacgcgaatggaatagaatgtaatggagtgtaagggaat

SEQ ID NO: 566488 - DNA, 514 bp, Homo sapiens
gaaatggaatggaatcgaaaggaatggaatggaatggaatggtttcaacccgaatggaatggaaaggaatggaatcaacccgagtggaatggaatggaatggaatggaatggaatgggttcaactcgaatggaatggaaaggaatggaatcaacccgagtggaatggcatggaatggaatggaatggaatggaatggaatggaagggaatggaatggaatggaattaacctgaamagaatggaagggaatggaatggaacggaacggaatggaatggaatggaatggaatggaatggaatggaatggaatgaaatggaatgggatcaacccgagtacaggggaatggaatgcaatggaatgcaatggaatggaatcatccggaatggaatggaatggaatggaatgcaatggaatggaatcaatcaacccgagtgcaatagaatgcagtggaatggaatggaatggtatggaaactacgcgaatggaatagaatgtaatggagtgtaagggaat

SEQ ID NO: 566489 - DNA, 514 bp, Homo sapiens
gaaatggaatggaatcgaaaggaatggaatggaatggaatggtttcaacccgaatggaatggaaaggaatggaatcaacccgagtggaatggaatggaatggaatggaatggaatgggttcaactcgaatggaatggaaaggaatggaatcaacccgagtggaatggcatggaatggaatggaatggaatggaatggaatggaagggaatggaatggaatggaattaacctgaacagaatggaagggaatggaatggaacggaacggaatggaatggaatggaatggaatggaatggaatggaatggaatgmaatggaatgggatcaacccgagtacaggggaatggaatgcaatggaatgcaatggaatggaatcatccggaatggaatggaatggaatggaatgcaatggaatggaatcaatcaacccgagtgcaatagaatgcagtggaatggaatggaatggtatggaaactacgcgaatggaatagaatgtaatggagtgtaagggaat

SEQ ID NO: 566490 - DNA, 514 bp, Homo sapiens
gaaatggaatggaatcgaaaggaatggaatggaatggaatggtttcaacccgaatggaatggaaaggaatggaatcaacccgagtggaatggaatggaatggaatggaatggaatgggttcaactcgaatggaatggaaaggaatggaatcaacccgagtggaatggcatggaatggaatggaatggaatggaatggaatggaagggaatggaatggaatggaattaacctgaacagaatggaagggaatggaatggaacggaacggaatggaatggaatggaatggaatggaatggaatggaatggaatgaaatggaatgggatcaacccgagtacaggggaatggaatgcaatggaatgcaatggaatggaatcatccggaatggaatggaatggaatggaatrcaatggaatggaatcaatcaacccgagtgcaatagaatgcagtggaatggaatggaatggtatggaaactacgcgaatggaatagaatgtaatggagtgtaagggaat

SEQ ID NO: 566491 - DNA, 571 bp, Homo sapiens
atggaatggaatgtaatggagagtaagggagttgaatagaatcaatccgaatgtaatggaatggaatgcaacggawtggaatggaatggaatggaatggaatgcaatggaatggaatcaacccgagtacaatggaatggaatggaatggaatggaatggaatggaatggaaagccttcaaaccgaatggaatggaaaggaatggaatcaacacgagtggaatggagtggaatggaatggaatggaatggaatggaatggaatgatacggaatagaatggaatggaacgaaatggaatggtatggaatggaatggaatggaatggaatgaaatggaatggaatcgttccgagtggaataggagggaatgtattcgagtggaatggaaaggaatggaatcaaccagagtggaatggaagggaatggaatggaatggaaactaatagaatggaatcaaccagagtggaatggaatggaaaggactggaatggaatggaatggaatggaatggaatggaatggaatggaatcaactcgattgtaatggaatggaatggaatggaatggaatggaa

SEQ ID NO: 566492 - DNA, 474 bp, Homo sapiens
tggaatcatccggaatggaatggaatggaatggaatggaatggaatggaatcaacccgagtgcaatggaatggagtggaatggaatggaatggaatggaacaacccgaatggaatggaatgtaatggagagtaagggagttgaatagaatcaatccgaatgtaatggaatggaatgcaacggattggaatggaatggaatggaatggaatgcaayggaatggaatcaacccgagtacaatggaatggaatggaatggaatggaatggaatggaatggaaagccttcaaaccgaatggaatggaaaggaatggaatcaacacgagtggaatggagtggaatggaatggaatggaatggaatggaatggaatgatacggaatagaatggaatggaacgaaatggaatggtatggaatggaatggaatggaatggaatgaaatggaatggaatcgttccgagtggaataggagggaa

SEQ ID NO: 566493 - DNA, 571 bp, Homo sapiens
atggaatggaatgtaatggagagtaagggagttgaatagaatcaatccgaatgtaatggaatggaatgcaacggattggaatggaatggaatggaatggaatgcaatggaatggaatcaacccgagtacaatggaatggaatggaatggaatggaatggaatggaatggaawgccttcaaaccgaatggaatggaaaggaatggaatcaacacgagtggaatggagtggaatggaatggaatggaatggaatggaatggaatgatacggaatagaatggaatggaacgaaatggaatggtatggaatggaatggaatggaatggaatgaaatggaatggaatcgttccgagtggaataggagggaatgtattcgagtggaatggaaaggaatggaatcaaccagagtggaatggaagggaatggaatggaatggaaactaatagaatggaatcaaccagagtggaatggaatggaaaggactggaatggaatggaatggaatggaatggaatggaatggaatggaatcaactcgattgtaatggaatggaatggaatggaatggaatggaa

SEQ ID NO: 566494 - DNA, 474 bp, Homo sapiens
tggaatcatccggaatggaatggaatggaatggaatggaatggaatggaatcaacccgagtgcaatggaatggagtggaatggaatggaatggaatggaacaacccgaatggaatggaatgtaatggagagtaagggagttgaatagaatcaatccgaatgtaatggaatggaatgcaacggattggaatggaatggaatggaatggaatgcaatggaatggaatcaacccgagtacaatggaatggaatggaatggaatggaatggaatggaatggaaagccttcaaaccgaatggaatggaaaggaatggaatcaacacgagwggaatggagtggaatggaatggaatggaatggaatggaatggaatgatacggaatagaatggaatggaacgaaatggaatggtatggaatggaatggaatggaatggaatgaaatggaatggaatcgttccgagtggaataggagggaa

SEQ ID NO: 566495 - DNA, 474 bp, Homo sapiens
tggaatcatccggaatggaatggaatggaatggaatggaatggaatggaatcaacccgagtgcaatggaatggagtggaatggaatggaatggaatggaacaacccgaatggaatggaatgtaatggagagtaagggagttgaatagaatcaatccgaatgtaatggaatggaatgcaacggattggaatggaatggaatggaatggaatgcaatggaatggaatcaacccgagtacaatggaatggaatggaatggaatggaatggaatggaatggaaagccttcaaaccgaatggaatggaaaggaatggaatcaacacgagtggaatggartggaatggaatggaatggaatggaatggaatggaatgatacggaatagaatggaatggaacgaaatggaatggtatggaatggaatggaatggaatggaatgaaatggaatggaatcgttccgagtggaataggagggaa

SEQ ID NO: 566496 - DNA, 474 bp, Homo sapiens
tggaatcatccggaatggaatggaatggaatggaatggaatggaatggaatcaacccgagtgcaatggaatggagtggaatggaatggaatggaatggaacaacccgaatggaatggaatgtaatggagagtaagggagttgaatagaatcaatccgaatgtaatggaatggaatgcaacggattggaatggaatggaatggaatggaatgcaatggaatggaatcaacccgagtacaatggaatggaatggaatggaatggaatggaatggaatggaaagccttcaaaccgaatggaatggaaaggaatggaatcaacacgagtggaatggagtggaatggaatggaatggaatggaatggaatggaatgatacggaatagaatggaatggaacgaaatggaatggwatggaatggaatggaatggaatggaatgaaatggaatggaatcgttccgagtggaataggagggaa

SEQ ID NO: 566497 - DNA, 571 bp, Homo sapiens
atggaatggaatgtaatggagagtaagggagttgaatagaatcaatccgaatgtaatggaatggaatgcaacggattggaatggaatggaatggaatggaatgcaatggaatggaatcaacccgagtacaatggaatggaatggaatggaatggaatggaatggaatggaaagccttcaaaccgaatggaatggaaaggaatggaatcaacacgagtggaatggagtggaatggaatggaatggaatggaatggaatggaatgatacggaatagaatggaatggaacgaaatggaatggtatggaatggaatggaatggaatggaatgaaatggaatggaatcgttccgagtggaataggagggaatgtattcgagtggaatggaaaggaatggaatcaaccagagtggaatggaagggaatggaatggaatggaaactaatagaatggaatcaaccmgagtggaatggaatggaaaggactggaatggaatggaatggaatggaatggaatggaatggaatggaatcaactcgattgtaatggaatggaatggaatggaatggaatggaa

SEQ ID NO: 566498 - DNA, 581 bp, Homo sapiens
aaaaaaaaaaagaaagaaagaaaagaaaaatcagtgagatgcttcttttcttcctttcatgcaacccctcttgttaggcaacagatctggattaacaacctataytgtgcctgagataacattaagacaaaaagcatacatatagtgaattacctggtctttaccatttaaatgagttaagcctcagctgtggagcatgtcatcctatactgtatgtaagactaaaatgtagacaaataccatattgagattactgatacttacagagaaacttcttcttcttttccaatggaaactcatgaaatgtttcccaaaatagttttacagtgggatgtgtggccgagtaatctcccttgtagatggcagtctgtccaaaaaagagaaaaagaaaaaaatgtatcttggaagaatattatagtggacattatatatcatttgcatttgaggctaagaaataagtgctgagatacaggacacctctaaatctaactcaaccacagtatgcttggaacgagaccaggctctgggaacacctccccaggctgctgctgcttcgccggagttaaaggagttaaaggatc

SEQ ID NO: 566499 - DNA, 365 bp, Homo sapiens
tcaacaagaaagtccctaaagtgttttcagttctaacaatccataagtcttggagttttgactttagctttgcatcatctcacacaggctttaggaaagaagcatagagttgcacacaacagtctgaatcagctagcatcacccgcacactcagcatgtggaatgtacttgtagaaagtttctgggtgggcccacgtaaactgtgtttgctatactgaacagagtccctgtgctcagctggttacaagtttgactcaaggtacgagccttgcattgtcatcaaatagatgcctgtgcagaatcaataatacctgtgtggataagcaagccatcctcctgtakagccattctgaaagttttgctgg

SEQ ID NO: 566500 - DNA, 576 bp, Homo sapiens
aagtattggatagctttcattacatctttttttttttgagacaaggtctccctctgttgtccaggctggagtgcagtagtgcaatcatggctcacagctgactgcagccttgaactcccaggctcaagtaatcctcccacctcagcctccagagtagctggtactacaggcacacactaccrcatccagctattttttttattattattatttgtagagatgaggtcttcctatgttgctcaggctggtctcaaacttctgggctcaagtgattctcccacctcagcctcccaaagtgttgggatcccaaaggagtgagccactgcacctggtctgtatttttattttattttgatgagaattctttgttcacactgtatacttcttgcagctttagacagcataagaacgtttatcttgtgtgtttatttttattttttcttgaggcagggtctcgctctatcacccaggctggaatgcagtggtgcgatctcggctcactgcaacctctgcctcctggtttcaagtgattctcctgcctcagcctctccagtagctggaattacaggcgcccac

SEQ ID NO: 566501 - DNA, 576 bp, Homo sapiens
aagtattggatagctttcattacatctttttttttttgagacaaggtctccctctgttgtccaggctggagtgcagtagtgcaatcatggctcacagctgactgcagccttgaactcccaggctcaagtaatcctcccacctcagcctccagagtagctggtactacaggcacacactaccacatccagctattttttttattattattatttgtagagatgaggtcttcctatgttgctcaggctggtctcaaacttctgggctcaagtgattctcccacctcagcctcccaaagtgttgggatcccaaaggagtgagccactgcacctggtctgtatttttattttattttgatgagaattctttgttcacactgtatacttcttgcagctttagacagcataagaacgtttatcttgtgtgtttatttttaytttttcttgaggcagggtctcgctctatcacccaggctggaatgcagtggtgcgatctcggctcactgcaacctctgcctcctggtttcaagtgattctcctgcctcagcctctccagtagctggaattacaggcgcccac

SEQ ID NO: 566502 - DNA, 623 bp, Homo sapiens
gcagaaaagctggccacaggcgagaagttgaaggggaaaagctacctttgggaacagggagagcactccagcagctacagtctagttcaaattttcccacaaatagtttggaaagaaggccagctgagtggaaggatctgtctgtgcatcaagtgttggcamtggattatttagcccaactctcttattcatcaaactaagacagtgaggcccagagaagaggtctgattgaggcagtagctaaacggatcctaggacttggaccaaaggtcaggcccctccatgcagagtccagggctttcttccacaatgccatgtggcctttaacagctcaggtggagtcacagggtttaaagattacatctcctttatcatgaaactaataccaatcatgcaggccaacactgtctggcttcctctggctgtccgtgaaatctataagcctctggatgcaggggtcctgggggtgggaggcagttaagggcaggtaacaggagctgaaccacagactagtatttgcaatgagcacaatatatgaggggtcagaaacagccctctcttccttaggtggtttcctatgaagaaactcaatcaataattccaatttctcagggcttccaaat

SEQ ID NO: 566503 - DNA, 623 bp, Homo sapiens
gcagaaaagctggccacaggcgagaagttgaaggggaaaagctacctttgggaacagggagagcactccagcagctacagtctagttcaaattttcccacaaatagtttggaaagaaggccagctgagtggaaggatctgtctgtgcatcaagtgttggcactggattatttagcccaactctcttattcatcaaactaagacagtgaggcccagagaagaggtctgattgaggcagtagctaaacggatcctaggacttggaccaaaggtcaggcccctccatgcagagtccagggctttcttccacaatgccatgtggcctttaacagctcaggtggagtcacagggtttaaagattacatctcctttatcatgaaactaataccaatcatgcaggccaacactgtctggcttcctctggctgtccgtgaaatctataagcctctggatgcaggggtcctgggggtgggaggcagttaagggcaggtaacaggagctgaaccacagactagtatttgcaatgagcacaatatatgaggggtcasaaacagccctctcttccttaggtggtttcctatgaagaaactcaatcaataattccaatttctcagggcttccaaat

SEQ ID NO: 566504 - DNA, 496 bp, Homo sapiens
  misc_feature 107: n = A,T,C or G
tctctttctcaaaactatcttattgttctatactcactctcttcctgtatatgatttgagatgataaaatgtccacatgatgagatgaagtgaggtgaatgactcangcctggtggcrtagcattaggctactactgctctcctgacagtaggtcaggaggaggatcatctgcttcagatgaccctgggtcaccgagccaagatgaggtggatgtctagatgtcaggagcagaagatgtggctgctaacaggcgggtagtgtacacagcatggatgtgctgggcaaggggatgactcatgagtgggcaggatggagcgggctgctgtgaggtttcatcacgctcctcagaacggtgctcaacttaaaacttatcagtggtctatttctggaatttcccatttatattttgagatggtggttgaccacaggtaactgaaaccttggaaagcaaaacctcggactagaaagggactactgcattttgtatcggattga

SEQ ID NO: 566505 - DNA, 496 bp, Homo sapiens
  misc_feature 107: n = A,T,C or G
tctctttctcaaaactatcttattgttctatactcactctcttcctgtatatgatttgagatgataaaatgtccacatgatgagatgaagtgaggtgaatgactcangcctggtggcatagcattaggctacyactgctctcctgacagtaggtcaggaggaggatcatctgcttcagatgaccctgggtcaccgagccaagatgaggtggatgtctagatgtcaggagcagaagatgtggctgctaacaggcgggtagtgtacacagcatggatgtgctgggcaaggggatgactcatgagtgggcaggatggagcgggctgctgtgaggtttcatcacgctcctcagaacggtgctcaacttaaaacttatcagtggtctatttctggaatttcccatttatattttgagatggtggttgaccacaggtaactgaaaccttggaaagcaaaacctcggactagaaagggactactgcattttgtatcggattga

SEQ ID NO: 566506 - DNA, 496 bp, Homo sapiens
  misc_feature 107: n = A,T,C or G
tctctttctcaaaactatcttattgttctatactcactctcttcctgtatatgatttgagatgataaaatgtccacatgatgagatgaagtgaggtgaatgactcangcctggtggcatagcattaggctactactgctctcctgacagtaggtcaggaggaggatcatctgcttcagatgaccctgggtcaccgagccaagatgakgtggatgtctagatgtcaggagcagaagatgtggctgctaacaggcgggtagtgtacacagcatggatgtgctgggcaaggggatgactcatgagtgggcaggatggagcgggctgctgtgaggtttcatcacgctcctcagaacggtgctcaacttaaaacttatcagtggtctatttctggaatttcccatttatattttgagatggtggttgaccacaggtaactgaaaccttggaaagcaaaacctcggactagaaagggactactgcattttgtatcggattga

SEQ ID NO: 566507 - DNA, 496 bp, Homo sapiens
  misc_feature 107: n = A,T,C or G
tctctttctcaaaactatcttattgttctatactcactctcttcctgtatatgatttgagatgataaaatgtccacatgatgagatgaagtgaggtgaatgactcangcctggtggcatagcattaggctactactgctctcctgacagtaggtcaggaggaggatcatctgcttcagatgaccctgggtcaccgagccaagatgaggtggatgtctagatgtcaggagcagaagatgtggctgctaacaggcgggtagtgtacacagcatggatgtgctgggcaaggggatgactcatgagtgggcaggatggagcgggctgctgtgaggtttcatcacgctcctcagaacggtgctcaacttaaaacttatcagtggtytatttctggaatttcccatttatattttgagatggtggttgaccacaggtaactgaaaccttggaaagcaaaacctcggactagaaagggactactgcattttgtatcggattga

SEQ ID NO: 566508 - DNA, 541 bp, Homo sapiens
actgattattatgtacaaatacctagaacatagccccatgcctgccatttcataggtggccaataaatatttttgaatgagtaaacagagctctcaaacataccataattctaagtgtctcaattctctggcttttgagctttgacataccttgaatcaaataaatcattcttaytagaacgttaagtgtttacccaacccattaatttttggtttagatgttgaatccattatttacttgtttctttaaaagcttttttgtttatgaaagttgtacaatatttgaaaaatgaagaaaaaccaaatgtaaaaaggtcatctgtaattttgttacctagatgagattatcactgttagcatttggtatatacttttccaattgttttcctaatgcatgtgtctgaatttttttttttttttgagacagagtttcgctcttgttgcccaagctggagtgcaatggtgtgatcttggtcactgcaacctctgcctcctgggtttaagtgattctcctgcctcagcctcctgagtagccaggatt

SEQ ID NO: 566509 - DNA, 546 bp, Homo sapiens
acgtgtgcctgttatattattatttagaacaagtgctctcatacttttcatcatcatcagcagcaacaggagcatgataagttgttttctcctgtttttatcatatgctctgatttaggacattagtaacaatgaggacacttagggttttgaatgtactttttagccaagaatcacaaaatcgttatttatctttctagctggggcatctttgctctatctttgtgtggtttctccatgcaattcttccaccatggctacttcagagcaaycagaagtcttaatgttatctgaggatccaaagatacatggttcaagaaagagggagtcagacagaagctacatctccttttgagactatcttgaaagaaatataacataacttctgccatactctattaattgaggcaagcagtcacaaaggctactatactacaagtgctataaaaggttcaagggaaggattcatagactctgcatctcaataggggtgataaacgttagcaagagcatgtggaacaaaaagtattgcaaccatttctggaa

SEQ ID NO: 566510 - DNA, 546 bp, Homo sapiens
acgtgtgcctgttatattattatttagaacaagtgctctcatacttttcatcatcatcagcagcaacaggagcatgataagttgttttctcctgtttttatcatatgctctgatttaggacattagtaacaatgaggacacttagggttttgaatgtactttttagccaagaatcacaaaatcgttatttatctttctagctggggcatctttgctctatctttgtgtggtttctccatgcaattcttccaccatggctacttcagagcaatcagaagtcttaatgttatctgaggatccaaagatacatggttcargaaagagggagtcagacagaagctacatctccttttgagactatcttgaaagaaatataacataacttctgccatactctattaattgaggcaagcagtcacaaaggctactatactacaagtgctataaaaggttcaagggaaggattcatagactctgcatctcaataggggtgataaacgttagcaagagcatgtggaacaaaaagtattgcaaccatttctggaa

SEQ ID NO: 566511 - DNA, 546 bp, Homo sapiens
acgtgtgcctgttatattattatttagaacaagtgctctcatacttttcatcatcatcagcagcaacaggagcatgataagttgttttctcctgtttttatcatatgctctgatttaggacattagtaacaatgaggacacttagggttttgaatgtactttttagccaagaatcacaaaatcgttatttatctttctagctggggcatctttgctctatctttgtgtggtttctccatgcaattcttccaccatggctacttcagagcaatcagaagtcttaatgttatctgaggatccaaagatacatggttcaagaaagagggagtcagacagaagctacatctccttttgagactatcttgaaagaaatataacataacttctgccatactctattaattgaggcaagcagtcacaaaggctactatactacaagtgctataaaaggttcaagggaaggattcatagactctgcatctcaatagggrtgataaacgttagcaagagcatgtggaacaaaaagtattgcaaccatttctggaa

SEQ ID NO: 566512 - DNA, 548 bp, Homo sapiens
tttagattgtttttatttttaatcttttattttagattcagggttacacatgcaggtttgttacatgggtatattgcatgatgctgcgttcatactgggtatgaatgattccatcaccccagtactgaggttagtactaaacagttagtttttcaacccttatctcccctgctccctgtctagtagtcctcagtgtctattattggcatttttawgtctacaagtgcccagtctttagctcccacttataaatgagaatatgcagtatttgtttttctgttcctgtgttaatttacttaggataatggtctctagctgcatccgtgttgctgcaaaggacatgattttgtttttttctgtggatgtgtagtattccatggtgtgcatgtagcacattgtctttatccaacccactgttggtgagcactaggttgatttcacacctgctgttacaaatagtgctgctgtgaatgtacaagtgcatattttggtagaacaatttgttttcttttgggtatacaccaagtaatgggactgctgggttaaat

SEQ ID NO: 566513 - DNA, 540 bp, Homo sapiens
ttatatttttgacgaagaactaaacacagtagctagtgcctagaagatgctgctgtacacaggtttattgattcaatgaatgttttgcaactcaacaaaaactcttccctaagagggaaaatacaatggtactggctgctttactcttatgccatcccctagctttagtgtttcaattttcaccaatcaatccctcctagttaattatcttgagttgaaaacataactagaataaaartctcctgtcacttacaatcaatatttacatgtattctctgacttcataattaatatttagatttctgtttatggacttaggccaaaactgtcttcataactttattatagatatatatgtagatagatagatacagacagataaacagatagtagataggtagatgttatcattaaagaaagtatgatgttagtaatttgtttataattttgcttcaataattactttgtcttaacattctagaatgaggttttcttaaatctggtattttatgaaggtaaatggttgaatttgtggttcat

SEQ ID NO: 566514 - DNA, 540 bp, Homo sapiens
ttatatttttgacgaagaactaaacacagtagctagtgcctagaagatgctgctgtacacaggtttattgattcaatgaatgttttgcaactcaacaaaaactcttccctaagagggaaaatacaatggtactggctgctttactcttatgccatcccctagctttagtgtttcaattttcaccaatcaatccctcctagttaattatcttgagttgaaaacataactagaataaaaatctcctgtcacttacaatcaatatttacatgtattytctgacttcataattaatatttagatttctgtttatggacttaggccaaaactgtcttcataactttattatagatatatatgtagatagatagatacagacagataaacagatagtagataggtagatgttatcattaaagaaagtatgatgttagtaatttgtttataattttgcttcaataattactttgtcttaacattctagaatgaggttttcttaaatctggtattttatgaaggtaaatggttgaatttgtggttcat

SEQ ID NO: 566515 - DNA, 540 bp, Homo sapiens
ttatatttttgacgaagaactaaacacagtagctagtgcctagaagatgctgctgtacacaggtttattgattcaatgaatgttttgcaactcaacaaaaactcttccctaagagggaaaatacaatggtactggctgctttactcttatgccatcccctagctttagtgtttcaattttcaccaatcaatccctcctagttaattatcttgagttgaaaacataactagaataaaaatctcctgtcacttacaatcaatatttacatgtattctctgacttcrtaattaatatttagatttctgtttatggacttaggccaaaactgtcttcataactttattatagatatatatgtagatagatagatacagacagataaacagatagtagataggtagatgttatcattaaagaaagtatgatgttagtaatttgtttataattttgcttcaataattactttgtcttaacattctagaatgaggttttcttaaatctggtattttatgaaggtaaatggttgaatttgtggttcat

SEQ ID NO: 566516 - DNA, 540 bp, Homo sapiens
ttatatttttgacgaagaactaaacacagtagctagtgcctagaagatgctgctgtacacaggtttattgattcaatgaatgttttgcaactcaacaaaaactcttccctaagagggaaaatacaatggtactggctgctttactcttatgccatcccctagctttagtgtttcaattttcaccaatcaatccctcctagttaattatcttgagttgaaaacataactagaataaaaatctcctgtcacttacaatcaatatttacatgtattctctgacttcataattaatatttagatttctgtttatggacttaggccaaaactgtcttcataactttattatagatatatatgtagatagatagatacagacagataaacagatagtagataggtagatgttatcattaaagaaagtatgatgttagtaatttgtttataattttgcttcaataattactttgtcttaacattctagaatgargttttcttaaatctggtattttatgaaggtaaatggttgaatttgtggttcat

SEQ ID NO: 566517 - DNA, 584 bp, Homo sapiens
gacacttctcaaaagaagacatttatgcagccaaaagacacatgaaaaaatgctcatcatcactggccatcagagaaatgcaaatcaaaaccacaatgagatatcatctcacaccagttagaatggtgatcattaaaaagtcaggaaacaacaggtgctggagaggatgtggagaaataggaacacttttacactgttggtgggactgtaaactagttcaaccattggggaagacagtgtgccgattcctcagggatctagaactagaaataccatttgacgaagccatcccattactgggtatatacccaaaggactataaatcatgctgctataaagtcacatgcacatgtatgtttactgtggcactactcacaatagcaaagacttggaaccaacccaaatgtccaacaatgatagactggattaagaaaatgtggcacatatacaccatggaatactatgcatccataaaaaaatccatgagttcatgtcccttgtagggacatggatgaagctggaaaccatcattctcagcaamctatcgcaaggacaaaaaaacaaacatcactcataggtggaaa

SEQ ID NO: 566518 - DNA, 458 bp, Homo sapiens
aaaatttattgaaacaaatgaaaatggaaatacaacatatcaaaatctatgggatacagcaaaagcagtactacgagggatgtttatagcaatatacctccaagaactacaaaaacaaggacaaaccaaaccccaaattagcagaagtaaacagtaaagatcagagtaggaataaatataattgaaacaacaaaacatacaaaagatcaacaaaacaaaaatttggttttctgaaaagataaaatcaggaaacctttggctagactaactaaaaaagagagagaaatccaaataaataacatttaaagcaacaaaaaatgatataacaactgagacgtcagaaatacaatgaatmgtttcagactattatgaacttgacaacaacaaactgcaaaaccttgaagaaataaataaatttctagatacataaaacttaccagtactgagacataaaaaaa

SEQ ID NO: 566519 - DNA, 564 bp, Homo sapiens
ttgtcctctcatttcctttttttaattctaactattaaaacttccccartcttctatataaagtatttttaacttattcagggaagattgcagaggtacctattgtcttctcagcctaactttcctctcttttctcttcccaggaactactcacatctattgcaatatccaccaaattatagtaaagaatggcaaggattatggcaggattgtagccaccattgaaacaagattaatctagctttcattggagatcaatttgtaatgagaaaagataaaaggaaagaaaaaaatgcaacaagaaaggcaaatgtgcggaggcggtttaagttcctacttctagttggtctgaaggtctgttaacattcctgctacacataatattaaattattaaatggaggggttctaacctgacttggattccattaggcaataaatttcttgtcaaagctagtgtaaataaaatttctagtcatgaaaagccgaaagattaataactaatatgaaaaaactatgtacttggttaggctaacttggttaggctagtttctgtaatcttgtca

SEQ ID NO: 566520 - DNA, 564 bp, Homo sapiens
ttgtcctctcatttcctttttttaattctaactattaaaacttccccagtcttctatataaagtatttttaacttattcagggaagattgcagaggtacctattgtcttctcagcctaacwttcctctcttttctcttcccaggaactactcacatctattgcaatatccaccaaattatagtaaagaatggcaaggattatggcaggattgtagccaccattgaaacaagattaatctagctttcattggagatcaatttgtaatgagaaaagataaaaggaaagaaaaaaatgcaacaagaaaggcaaatgtgcggaggcggtttaagttcctacttctagttggtctgaaggtctgttaacattcctgctacacataatattaaattattaaatggaggggttctaacctgacttggattccattaggcaataaatttcttgtcaaagctagtgtaaataaaatttctagtcatgaaaagccgaaagattaataactaatatgaaaaaactatgtacttggttaggctaacttggttaggctagtttctgtaatcttgtca

SEQ ID NO: 566521 - DNA, 608 bp, Homo sapiens
tgagaagtcctatgatctgttttccttaatttattttccctgagagtatgcctcagtaattaatcactttcacaagaatcccaaactygggctctgtttttagggtatcaaacctaagatagctgatgccaggagtggtcctaggaagtaaactcaatgacaaatattccagaggtggaatataaactgaccagaatacagtgaggatggcatctctactagtacgtggagtattgattgcctctggcatgtataggatttcaattgctgactttcaccattagtaaaggagagttggtgaaggcaacaaggggaaagacaggcactagctggggcaatgtctggcttttaaggtgtataagaaaatagtaactaagaaaactgtggaattatgttatttctaagtgccagtgatgcattaaaaagagaaaacaggctcaactgtatttttaatcagtaatttagattttattaatcattattttattttatttttattttttatttatttatttattttttgaaaaggggtttcactcttgttgcccaggctggagtgcaatggctcgatctcggcttattgcaacctccacctcccaggtacaagt

SEQ ID NO: 566522 - DNA, 567 bp, Homo sapiens
tgtatttcaaatatggattgaaatttagaagtcrcaatacacatatgttaaggggaaagtgagatatacacagacatactttgcattaaacatgggaattgcaaatattatttactggctgttactagattttacagggtgactacagataaaaaggcatttttcaaatcaattttatagatgtatattttatgtacaataaaaggcacttgcatgaactgatacaaaataattctgacaaatatattaatctatatagtaaccatacaatcgagatgtagaacattttcatcaccttaggcaactattaattggatttatttcactttatatttgtttgtctgcactagaatctcttataaatagattcacacagtatgtggtcttttgtgtctgggttctttaacttatcataatcttgttgagatttatccatattgctttattcatatacacacacaaacacaaatgtgtgtatatatatctcaataatttatttctttttatggtaagatgtaatccttatatttataggccaaaatttgtttcatttacctgttgatgcat

SEQ ID NO: 566523 - DNA, 567 bp, Homo sapiens
tgtatttcaaatatggattgaaatttagaagtcgcaatacacatatgttaaggggaaagtgagatatacacagacataytttgcattaaacatgggaattgcaaatattatttactggctgttactagattttacagggtgactacagataaaaaggcatttttcaaatcaattttatagatgtatattttatgtacaataaaaggcacttgcatgaactgatacaaaataattctgacaaatatattaatctatatagtaaccatacaatcgagatgtagaacattttcatcaccttaggcaactattaattggatttatttcactttatatttgtttgtctgcactagaatctcttataaatagattcacacagtatgtggtcttttgtgtctgggttctttaacttatcataatcttgttgagatttatccatattgctttattcatatacacacacaaacacaaatgtgtgtatatatatctcaataatttatttctttttatggtaagatgtaatccttatatttataggccaaaatttgtttcatttacctgttgatgcat

SEQ ID NO: 566524 - DNA, 661 bp, Homo sapiens
acattcccaccaacagtgtatgagggttcccttttcttcacaccctcaccagcatttgttattgcctgtcttttgaatataagccattttaactggggtgaggttatacctcattgcagttttgatttgcatttctctgatgaacatcttttcatatggccatttgccatgtatttctttttttgagaactatctattcaaatctttagcccattttttgattgaattattagatttttttcctatagatttgttgcagctccatgtatattctggttatcaatctttttttttcagatgggtagttggcacacatattttctcccattccttaggttgtctcttcactttgttgattgtactctytgctgtacagaagctttttaacttaatataatcccatttgtttgttttttctttggttgcctatgcttatggggtattgctcaagaaatttttgtccaaaccaatgtcctgaagattttctctaatgtttccttgtagtagtttcatggtttgaggtcttaaagtctttaatctatttttatttgatttttgtatatggttagaagaagggatctagtttctttcttccacatacggatatttgttttttccagaaccgtttattgagcagattgtcttttccccagtgtatgtt

SEQ ID NO: 566525 - DNA, 661 bp, Homo sapiens
acattcccaccaacagtgtatgagggttcccttttcttcacaccctcaccagcatttgttattgcctgtcttttgaatataagccattttaactggggtgaggttatacctcattgcagttttgatttgcatttctctgatgaacatcttttcatatggccatttgccatgtatttctttttttgagaactatctattcaaatctttagcccattttttgattgaattattagatttttttcctatagatttgttgcagctccatgtatattctggttatcaatctttttttttcagatgggtagttggcacacatattttctcccattccttaggttgtctcttcactttgttgattgtactctctgctgtacagaagctttttaacttaatataatcccatttgtttgttttttctttggttgcctaygcttatggggtattgctcaagaaatttttgtccaaaccaatgtcctgaagattttctctaatgtttccttgtagtagtttcatggtttgaggtcttaaagtctttaatctatttttatttgatttttgtatatggttagaagaagggatctagtttctttcttccacatacggatatttgttttttccagaaccgtttattgagcagattgtcttttccccagtgtatgtt

SEQ ID NO: 566526 - DNA, 603 bp, Homo sapiens
agacgaggaagatgtcaagggtgacttccaccatttttggcttgagaaaaacaggtgggtggagttaccacttaacaagttgggaaagaatagacattgtggtgttgggaatccaattcagagtttacttttggacatggtaaatgtgaaatatctgctaaattcaaatatttaaatatggttctgaatatttatcgtttgtcagctatattcactacagatgtcttctgtgcataaccatttataattttattaatgtagccatattgaccagtaatgtagccttgaatctgtcttcaagactgagtgctgtcagaaataaagaaattctttgaaactagtgagaacaaagatacaacatacctgaatttcygggacaccgctaaggcagtgttaagagggaattttatagcactaaatacccacatcaaaaagttaaaaagatatcaaattaacctaacctcaaggaactagagaagcaggagcaaatctacctcaaagaagacaagaaataaccaaaatcagagctgaactgaaggaaattgagacatgaaaaaccatacaaatgatcaatgaattgtagaattggtttggtgaaaaaat

SEQ ID NO: 566527 - DNA, 592 bp, Homo sapiens
taaaagataatatctcaattactttttcctctctcatcattacttacaaaaatctcaattatttaggcatatccttggcatgttcataaaattgttccataggcattctataattatagtcatattatttttaatccctactcatctcacctataattttcaaatgttttttattcaatttttatatcctgttcatatatttttcagctacagtaaaacatgatttttcgtgtgtattattatctttttttgagatggagtcttgctctgttgcccaggctggagtgctgtggcatgatctcagttcactgcaacctccaccttccaagttcaagagattctcctgccttggcctcccaagtagctgggattacaggtgcgcgccaccacgcctggctaattttttttttttgagatggagtctcgctctgtcactcaggctggagcgcagtggtgtgatcttggctcactgcaacctccayctcctgggttcaagcaattctcctgcctcagcctcctaagtagctgggattacaggcttgtgccaacatgcctggctaatttttttgtatttttagtagagatggggttt

SEQ ID NO: 566528 - DNA, 412 bp, Homo sapiens
agattgcttgaccccaggaattaaaaagaccagcctgggcaacatagagaaactctgtctctaccaaaaaaaacacaattaactgggtgtggtggtgcatgcctgtagtcctagctactcaggaggctgaagtggraggatcacttgagcccaagaggcagacgttgcagtgagccgtgacctcaccactgcactcaagcctgggtgacagagtgagaccttgtctcagagaaaaaaaaagaaagaaaggaaaagtgacgtatcttgagttccttctatggtccagaagctatcattagtcccatttgacaaatgaggaaactgaggctcatctggttatacaactccatggtagaaacagcagtggaaccaaagtccatttctactgccgccactcactaaaaggagaaaa

SEQ ID NO: 566529 - DNA, 576 bp, Homo sapiens
ggggactgttgtgaagacatgattgtattttgaaatgtgagaaagatgagatttgggaagggtcaggggtggaatgatatgatctggctctgttttcccattcagatctcatcttgaattgtatttggatttgtaatactgatgtcttgtgggggacctcatgggaggtgattggattatggaggtggtttcctccatgctattctcatgatagtgagtgagttctcatgagatctgatggttttrtaaggggctttctctgcacttttctctcttgacaccatgtgaagaaggacatgttcgcttccctttctgccatgattgtaggtttacggaggcctccccagccatgcagaactatgcatccaataaacctcttttttaataaattacccagtcttgggtattttcttacagcagtgtgaaaatggactaatacagggccagattacaaagcagtctcttaaatgttgatctactgcatttgaattttcttatggacttggcaaaatgtcagtggcagtggccaaattaaacctgtgattagagacataattctgaaattaccttgtttac

SEQ ID NO: 566530 - DNA, 549 bp, Homo sapiens
atggcgtgaacccaggaggtggagcttgcagtgagcctagatcacaccactgcacgatgagaaagggaagagattgttttcacaggaattccaaagaacaaakgataatgtgcattttctcctcttttcacttttccactgcagtgaggggctttgttggcttttatgttgccatgtggccacagagggtgaggttacaaagttcctgggaaaacttgacatcgtttccctggatttggagaggggcataatgaagactggtgcctggctattacataagaaatttgcaggcaagcttggctgtgttgcagctcaaagatgccagtgtagctctcatatactaagtgaaaccccaggactgggattgagttttcttgagaggacatcacccataactgcatgctggggagtgttgtcaccagacgaaaaaaggctagaagtagagtagaatagagatatttaaaatacttaaaactagtgagaaagcagaactaaataatcaaacaatcattatatattccagtaaacaatgaaacatccaccatagat

SEQ ID NO: 566531 - DNA, 436 bp, Homo sapiens
taggaattctctacatttctctatgtttaaagttatgggccgggcgcagtggttcacgcctgtaattccagcactttgggaggctgaggcgggcggatcatgaggtcaagagagcgagaccatcctggccaacatggtgaaaccccgtttctactaaaaatacaaaaattagctgggcgtggtggcgggcgccagtagtcccaaatactcaggaggctgaggcaggagaattgctcgaacccgggaggcagaagttgcagyaccgagattgtgccactgctctccagcctggggacacagtgagactcagtctcaaaaaaaaaaaaaaaaaaaaaaagttttttattggggacccctagttacttgaaggatagcttggctgaaatgaatttttagttcaaacttttttggagtctgttgaaaattttttgttgtt

SEQ ID NO: 566532 - DNA, 549 bp, Homo sapiens
atggcgtgaacccaggaggtggagcttgcagtgagcctagatcacaccactgcacgatgagaaagggaagagattgttttcacaggaattccaaagaacaaatgataatgtgcattttctcctcttttcacttttccactgcagtgaggggctttgttggcttttatgttgccatgtggccacagagggtgaggttacaaagttcctgggaaaacttgacatcgtttccctggatttggagaggggcataatgaagactggtgcctggctattacataagaaatttgcaggcaagcttggctgtgttgcagctcaaagatgccagtgtagctctcatatactaagtgaaaccccaggactgggattgagttttcttgagaggacatcacccataactgcatgctggggagtgttgtcaccagacgaaaaaaggctagaagtagagtagaatagagatatttaaaatacttaaaactagtgagaaagcagaactaaataatcaaacaatcattatatattmcagtaaacaatgaaacatccaccatagat

SEQ ID NO: 566533 - DNA, 494 bp, Homo sapiens
actttttatgttacgtatatcttacaattaaaagtgaaaaaagacatgaactaaatatataaagataaaaattgtgtgcacatgatgacttaaaatgtgtagaataaaaaaattaaaatcytaggaaaaaaatacacatattaagtctattttttttgaggagtagagttgtggttactttttaaaatttttcatttatatactttctaagtagttcacaataaaggtactacttttatagtaacataaacttaaggccaggcacgatgactcacgcctgtaatcccagcactttgggaggccaaggtgggtggatcacaaggtcaggagttcgagaccagcctgactaacatggtgaaaccccatttttactaaaaatacaaaaattagctaggcatggtggtccacacctgtaatcccagctactcaggaggctgaggcaggagaattgcttgaacccggaaggcagaggttgcagtgagccaagatcgtgc

SEQ ID NO: 566534 - DNA, 236 bp, Homo sapiens
agactcatcaatgaggcagtaattcctctatatccagtcatatccaacccctataccctgctctctcaaataccagaggaagcagaatggttcactgttctggacctcargaatgtcttcttctgtattcccctgcactctgactcccagtttctctttgcctttgaggatcccacagaccacacatcccaaattacatggacggtcttgccccaagggtttagggatagccctca

SEQ ID NO: 566535 - DNA, 236 bp, Homo sapiens
agactcatcaatgaggcagtaattcctctatatccagtcatatccaacccctataccctgctctctcaaataccagaggaagcagaatggttcactgttctggacctcaggaatgtcttcttctgtattcccctgcactctgactcccagtttctctttgcctttgaggatcccacagaccacacrtcccaaattacatggacggtcttgccccaagggtttagggatagccctca

SEQ ID NO: 566536 - DNA, 236 bp, Homo sapiens
agactcatcaatgaggcagtaattcctctatatccagtcatatccaacccctataccctgctctctcaaataccagaggaagcagaatggttcactgttctggacctcaggaatgtcttcttctgtattcccctgcactctgactcccagtttctctttgcctttgaggatcccacagaccacacatcccaaattacatggacrgtcttgccccaagggtttagggatagccctca

SEQ ID NO: 566537 - DNA, 561 bp, Homo sapiens
gcaccatcatgcctggctaattacaattttagtagagatggggtttcaccatgttggccaggctggtcttgaactcctggactcaagtgatccacccacttcagcctcccaaagggctggggttacaggtgtgagccaccatgcctggccctgaattcatttttggtatgttagagtccttgattgaagagtaaagcaaagagtagaaataaatagtcaagtatgcaaatgaagcrgcactcacagtgaggactgctccacggggatgaggaatatttgatgtgaggaagggaagacacaggtaaaggcagaagatgggggcaggggccttcatggtggtcttcaaatgcattaccttacagctgcaaataaaagagacatcctgcatattttctagggttcccagagggtagaaatagatccactaggtggcaggtacaagaaagcattttggtttaacattctcaactaatcagagttgtccaaaatggaatgagctcccttaggaaaccgtgagttttctgcctctagaggtgtctgaacctatattgatatgaccac

SEQ ID NO: 566538 - DNA, 561 bp, Homo sapiens
gcaccatcatgcctggctaattacaattttagtagagatggggtttcaccatgttggccaggctggtcttgaactcctggactcaagtgatccacccacttcagcctcccaaagggctggggttacaggtgtgagccaccatgcctggccctgaattcatttttggtatgttagagtccttgattgaagagtaaagcaaagagtagaaataaatagtcaagtatgcaaatgaagcagcactcacagtgaggactgctccacggggatgaggaatatttgatgtgaggwagggaagacacaggtaaaggcagaagatgggggcaggggccttcatggtggtcttcaaatgcattaccttacagctgcaaataaaagagacatcctgcatattttctagggttcccagagggtagaaatagatccactaggtggcaggtacaagaaagcattttggtttaacattctcaactaatcagagttgtccaaaatggaatgagctcccttaggaaaccgtgagttttctgcctctagaggtgtctgaacctatattgatatgaccac

SEQ ID NO: 566539 - DNA, 592 bp, Homo sapiens
ttttttaattttctgagctctccaagtagataaaaattatttttaataaaatagttcttgcattctctaatttaaaagtaaaatttaggattagattgtgtagatatatggccttcacatttaagaattctatcttctaataaatatacttagatatacatatatacaattatacatycatatataggtcccaatgttctatggttaatagacgagttggatttagcattatacactgctttaagtaattttagatcagttagatttgcttagtcggatctgatattttttccatttcaggaaactgtgtttaaaatatggaatttccatatggcttagaaatagttgaaagaaatacagatattactttctaaacattccaactaataaaagagatgaagtctcagacataataaaacttcagataattgtatttaaatacttagatttgaaattgaattctttacacttgtcttcagataatagcagtgcttgtaatatattctgagaatttgccacttctcaaaacaaaatcacaactagtaagcaaactgtgaaactgtgattactcaagaggtaaatatcacctgtt

SEQ ID NO: 566540 - DNA, 619 bp, Homo sapiens
atttctgtgattacaagtcctttgataagtgatttgcaaatgttttcttctgatccataaatggtcctttcattctcttaataaatgcttttgcagacaagagtttttctattttcaatttttttaagtctaatttttcaatttattttttacaaatttttattttggtgtcatatctaaggactatatatctaatccaaggtcatatcaattttcttattttcttatagtttcatgtgtatatttatatctataatctattttgggttaatttttacattagtcctgaaagagagatttagtctgatttttgatttattttgtatatgaatatctgattgccccaatatcataatctggaaaagttgrttgtttctccatcaaatcgcctttgcatttgtcaaaaaacaattgattgcatttgtgtagttttaattctagactttttactgtttcattgatctatgtgtctttccttttacagtaccgtgctgtctgggttatactagctttataaaataaacttaggtagtgtgagtgatccactttgttttttttcaaaacatttttggctttctaattcttttcaactttcatgtaaatttaaaaccagcttgtc

SEQ ID NO: 566541 - DNA, 654 bp, Homo sapiens
ttgtaatccccaatgttggaggaggggcctggtgggaggtgactggatcatgggggcaaatttcccccttgctgttcttgagatagtgagggagctctcacgggatctggttgtttaaaagtgtgtagtacctccccctgctctctcttcctcctgttcctaccatgcaggacatgcctacttccccttctgccatgattgtaagtttcctgagtctccccagccatgcttcctgtagagcctgcaggactgtaagccaattaaaccttttttctttataaattacccagcctcaggtagttctatatagcagtgtgagaacrgactaatacagggtgcaaatgcaggctgttgaccaagggtgtctgtgagggatattgatgagggggaacagcagtaaagagctgggggcaggagggtagaggtaggggatgcctaaggatgctggaggccagtgttggctttagacatgttttctgtattttaaaagaaactccaaaaataagtcctctcaccttgacagttttgccacctgggaaggagagtgattgtatagaaagagtgctccaggcatctcccaaaccccacattctaatgcatggggactctggttcccaagcagcctgatgaaccctggtattgctctgacatgat

SEQ ID NO: 566542 - DNA, 654 bp, Homo sapiens
ttgtaatccccaatgttggaggaggggcctggtgggaggtgactggatcatgggggcaaatttcccccttgctgttcttgagatagtgagggagctctcacgggatctggttgtttaaaagtgtgtagtacctccccctgctctctcttcctcctgttcctaccatgcaggacatgcctacttccccttctgccatgattgtaagtttcctgagtctccccagccatgcttcctgtagagcctgcaggactgtaagccaattaaaccttttttctttataaattacccagcctcaggtagttctatatagcagtgtgagaacagactaatacagggtgcaaatgcaggctgttgaccaagggtgtctgtgagggatattgatgagggggaacagcagtaaagagctgggggcaggagggtagaggtaggggatgcctaaggatgctggaggccagtgttggctttagacatgttttctgtattttaaaagaaactccaaaaataagtcctctcaccttgacagttttgccacytgggaaggagagtgattgtatagaaagagtgctccaggcatctcccaaaccccacattctaatgcatggggactctggttcccaagcagcctgatgaaccctggtattgctctgacatgat

SEQ ID NO: 566543 - DNA, 535 bp, Homo sapiens
acatatatatatatagaaaaagaaagaaaattaaacaaaagaaaagcaaactgtccctgaggggcttaaagcaatcaataaggagaagattctgaagagatagactagaacctcagaatcacttgatttgaatraaaggaaagtgacttaattctttatcttatgctgataagtgggacatactgattaaattagaatggaggtctaatagtgataatataaaattctatgggatcatagtttcaagcaatagcagtattaaggtgatgttgataaaatttttggagtggtaattcactctttatggagtaagaactaccacatattttaacagctaatttattttatgttttagggatatgggttttgtcaatttttgtcatcatatccagtgtgccttttcaaatactgcaccatttatttagaattttgtcaaatctccccactgatcttcctggcaaaagcccgttcgtctttgaaatctggctcaggtgtgacctctttcgggagtctttcacaaattatgccagaaaga

SEQ ID NO: 566544 - DNA, 535 bp, Homo sapiens
acatatatatatatagaaaaagaaagaaaattaaacaaaagaaaagcaaactgtccctgaggggcttaaagcaatcaataaggagaagattctgaagagatagactagaacctcagaatcacttgatttgaatgaaaggaaagtgacttaattctttatcttatgctgataagtgggacatactgattaaattagaatggaggtctaatagtgataatataaaattctatgggatcatagtttcaagcaatagcagtattaaggtgatgttgataaaatttttrgagtggtaattcactctttatggagtaagaactaccacatattttaacagctaatttattttatgttttagggatatgggttttgtcaatttttgtcatcatatccagtgtgccttttcaaatactgcaccatttatttagaattttgtcaaatctccccactgatcttcctggcaaaagcccgttcgtctttgaaatctggctcaggtgtgacctctttcgggagtctttcacaaattatgccagaaaga

SEQ ID NO: 566545 - DNA, 535 bp, Homo sapiens
acatatatatatatagaaaaagaaagaaaattaaacaaaagaaaagcaaactgtccctgaggggcttaaagcaatcaataaggagaagattctgaagagatagactagaacctcagaatcacttgatttgaatgaaaggaaagtgacttaattctttatcttatgctgataagtgggacatactgattaaattagaatggaggtctaatagtgataatataaaattctatgggatcatagtttcaagcaatagcagtattaaggtgatgttgataaaatttttggagtggtaattcactctttatggagtaagaactaccacatattttaacagctaatttattttatgttttagggatatgggttttgtcaatttttgtcatcatatcyagtgtgccttttcaaatactgcaccatttatttagaattttgtcaaatctccccactgatcttcctggcaaaagcccgttcgtctttgaaatctggctcaggtgtgacctctttcgggagtctttcacaaattatgccagaaaga

SEQ ID NO: 566546 - DNA, 535 bp, Homo sapiens
acatatatatatatagaaaaagaaagaaaattaaacaaaagaaaagcaaactgtccctgaggggcttaaagcaatcaataaggagaagattctgaagagatagactagaacctcagaatcacttgatttgaatgaaaggaaagtgacttaattctttatcttatgctgataagtgggacatactgattaaattagaatggaggtctaatagtgataatataaaattctatgggatcatagtttcaagcaatagcagtattaaggtgatgttgataaaatttttggagtggtaattcactctttatggagtaagaactaccacatattttaacagctaatttattttatgttttagggatatgggttttgtcaatttttgtcatcatatccagtgtgccttttcaaatactgcaccatttatttagaattttgtcaaatctccccactgatcttcctggcaaaagcccrttcgtctttgaaatctggctcaggtgtgacctctttcgggagtctttcacaaattatgccagaaaga

SEQ ID NO: 566547 - DNA, 520 bp, Homo sapiens
tgctttcatttttaaaactactggctaagataagtgctgcttataactctgaagggtaaggtaagaacattagttggttacctaccatctaccagcacctcacatatatcattttatttaaaccttacaataagtccatttttatgaattactgtctcaattttatgggcgagaaaattgagcatcatagatattatatttcttgttcaaagttgcagatttagtcagtgataaagactggatttgaaaccagatatgtcagaatacttggtaatagatttggtacaataatggctctcgggactttagccattgaccattttaatttgtattctaagggtctttttgatgaccttgtagataaagttaatatattactattaaagaragtttacagataccataaagattatagctttgttacatataaaatttgatgtatacaggtttgtaaagaataatttataacatatatctttcatgttctttacctttcttttttaaaaacaagataactaac

SEQ ID NO: 566548 - DNA, 625 bp, Homo sapiens
aaaaaaagcaagcttaattttctcgcttcaaataagctttgtttaactgcagtattagaagatttttttaaagtacaggcatatcttgaagatattcaggttcagttctagaccactgcaataaagtgaattacaataaaaccagtcaaataaattttttggtttcttggtgcacataaaagcaatgtttacattatgctgtagtctagtaagtgtgcaatagcattatgtctaaataatgttcataccttaatttaaaaatacttcattgataaaaatgctaatgatcatctgagccttcagtgagtcataatctttttactgatggaggagcttcctgcaatgttgatggctgctgactgagcagggtggtggtggaaggttggagtggctgtggcaatttcttacrataagataacaataatatttgcaacactgatttgactcttacacaaaagatttcactgaggcatgagttgctgctttattcacattgaaacttctttcaaaattagtcaatcttctcaaacccttgtggctacttcatttatcaaccatgcttatgtaatattctaaatcctttgttgtcatttcaccaatgtttgtagcatctttaccagcagta

SEQ ID NO: 566549 - DNA, 640 bp, Homo sapiens
cttgtgtccctgtgagaccagccccttccctcctctcctcctcacctcttcccactctccccttcctcactccctttctgcacaggagtcttccctctgtgctggaacacaccaagctcaytggggctcaggacctctgcccgggatcttgccactgcccctggtctctgagatgagctctgtgagggtgggatgatggatgatgctgaggatggggcggctctaatgcgaggagtcctctgggtgggtgctggtgctctctgttcacatttaatcaggaaattcttgagcacattaactgggaactgattattccaaaagttaaggatggattcagcttcttttctttcttttggcctaaagcctttgaagtctcacaacttttcctgataataatggcatgaaagagatatttgtatttttttaacttttatataaaactacaaaagaaagaacaagagctatcaataagcttaaaagaaatgggaaacttacaaacaggagggaaattatgttattttgccatttggtttacagaccggtgggaggacatgaataacacataagaaaccatactggggaggaggagccaagatggccgaataggaacagctccggtctacagctcccagcgtgagca

SEQ ID NO: 566550 - DNA, 640 bp, Homo sapiens
cttgtgtccctgtgagaccagccccttccctcctctcctcctcacctcttcccactctccccttcctcactccctttctgcacaggagtcttccctctgtgctggaacacaccaagctcattggggctcaggacctctgcccgggatcttgccactgcccctggtctctgagatgagctctgtgagggtgggatgatggatgatgctgaggatggggcggctctaatgcgaggagtcctctgggtgggtgctggtgctctctgttcacatttaatcaggaaattcttgagcacattaactgggaactgattattccaaaagttaaggatggattcagcttcttttctttcttttggcctaaagcctttgaagtctcacaacttttcctgataataatggcatgaaagagatatttgtatttttttaacttttatataaaactacaaargaaagaacaagagctatcaataagcttaaaagaaatgggaaacttacaaacaggagggaaattatgttattttgccatttggtttacagaccggtgggaggacatgaataacacataagaaaccatactggggaggaggagccaagatggccgaataggaacagctccggtctacagctcccagcgtgagca

SEQ ID NO: 566551 - DNA, 429 bp, Homo sapiens
ggccataggaccctgttgtggccaacaggacgtaagcggagatctacttgggaaggctttcactcttggaaagaagaagggattttgccctctgccttcttcctacatggaaaacagatgtctggaagtgcagcagctatcttgtgagtaggagggcaatagtctcagtggaaggatggtagaggacaaagagagatacagaggctggaaccctcatggcttcgttgagcagccattggcctgggataacctacccccaagttacacaaggaagagagactcttaattgttagccactcttggtcacatttcctcttgttccagttgcattccaactggtcctggaacattgtggttgctcagtaagtgtgagctcctttcccttctccacttgcttgctgcctgacrtagtcactctctccatttcct

SEQ ID NO: 566552 - DNA, 537 bp, Homo sapiens
gcagtaacctgtgtgtagacccacctttctgaaattagacccagatgctatctcaaagctaaaagtcattttcttgacatcaagcatttttggcctggaaagctccattttagaaaacggctgttttgcaaacattatataagctgtcaccagcaagaattccgtcactgcaagaattccttcactgcaagaattccrtcattgcaagaattctgtcactgccgtaatcactcatcagagactgaggaagtctcagtcaagtgcacggggcctcgggactctcggaggtgcccagctccacagacccttccacatgggaaggcagcagagtggctgctctctttcccattccctgctctgggagtgtcagccctgactcacacagccctccttccatgtcacgccaggagcctcaccacgcagcactgcagctggaatgagtgaaatacctgatggaggacttggagaagagagtcgaattcacaagcctccagcactcggtgtggccagcattcaccactcagggatttctaagat

SEQ ID NO: 566553 - DNA, 537 bp, Homo sapiens
gcagtaacctgtgtgtagacccacctttctgaaattagacccagatgctatctcaaagctaaaagtcattttcttgacatcaagcatttttggcctggaaagctccattttagaaaacggctgttttgcaaacattatataagctgtcaccagcaagaattccgtcactgcaagaattccttcactgcaagaattccatcaytgcaagaattctgtcactgccgtaatcactcatcagagactgaggaagtctcagtcaagtgcacggggcctcgggactctcggaggtgcccagctccacagacccttccacatgggaaggcagcagagtggctgctctctttcccattccctgctctgggagtgtcagccctgactcacacagccctccttccatgtcacgccaggagcctcaccacgcagcactgcagctggaatgagtgaaatacctgatggaggacttggagaagagagtcgaattcacaagcctccagcactcggtgtggccagcattcaccactcagggatttctaagat

SEQ ID NO: 566554 - DNA, 537 bp, Homo sapiens
gcagtaacctgtgtgtagacccacctttctgaaattagacccagatgctatctcaaagctaaaagtcattttcttgacatcaagcatttttggcctggaaagctccattttagaaaacggctgttttgcaaacattatataagctgtcaccagcaagaattccgtcactgcaagaattccttcactgcaagaattccatcattgcaagaattctgtcactgccgtaatcactcatcagagactgaggaagtctcagtcaagtgcacggggcctcgggactctcggaggtgcccagctccacagacccttccacatgggaaggcagcagagtggctgctctctttcccattccctgctctgggagtgtcagccctgactcacacagccctccttccatgtcacgccaggagcctcaccacgcagcactgcagctggaatgagtgaaatacctgatggagsacttggagaagagagtcgaattcacaagcctccagcactcggtgtggccagcattcaccactcagggatttctaagat

SEQ ID NO: 566555 - DNA, 560 bp, Homo sapiens
aggcagttacgaagttataagatagcattcatcatttaaactgtctaactacagataggcttcaaatgtttaggttattcaaaacatcacagtctgagartagaaaaatccttgagaaatcatctagcttatcttttttattttacagtaaaaaaaaacctgtatgcctttgataagggctatttaatttttcaatcctttatacatagacttgttcaagaaacaataagttagtacagagtaagaaaattatttgagttaaatattgaagctggccctaaatgactgtgatcatttttcttctctaaaccagtttcttcattttacttatagggaaggtaaaattcctcatctaacctgttaggatatccagctgggactgatataaaacagattagcaggagaaaaacatacaaattttatttagtagtttttacatgtatatgggagccctcactagaaaaatgaagacccaaagaagtagataggcctgagtggttatatactaggttaaagaaagaataacaattgcagaaaattaaaatatatgggaagacaaa

SEQ ID NO: 566556 - DNA, 560 bp, Homo sapiens
aggcagttacgaagttataagatagcattcatcatttaaactgtctaactacagataggcttcaaatgtttaggttattcaaaacatcacagtctgagagtagaaaaatccttgagaaatcatctagcttatcttttttattttacagtaaaaaaaaacctgtatgcctttgataagggctatttaatttttcaatcctttatacatagacttgttcaagaaacaataagttagtacagagtaagaaaattatttgagttaaatattgaagctggccctaaatgactgtgatcatttttctkctctaaaccagtttcttcattttacttatagggaaggtaaaattcctcatctaacctgttaggatatccagctgggactgatataaaacagattagcaggagaaaaacatacaaattttatttagtagtttttacatgtatatgggagccctcactagaaaaatgaagacccaaagaagtagataggcctgagtggttatatactaggttaaagaaagaataacaattgcagaaaattaaaatatatgggaagacaaa

SEQ ID NO: 566557 - DNA, 494 bp, Homo sapiens
aactaatttacatttccaacaacggtatataaatgttcccctttctctgcagtcttgcctgcatctgttgttttttgactttttaatagtatccattctgcctggtatgagatgatatctccttgtagttttgatttgcacttatccaatgattagtgatatggagtattttttatatgtttcttggccacttgtatgttttcttttgagaagtgactgttcaggtcttttgctccttttttttttttttttttttttttttttttttttttttttgagagggagtcttgctctgtcacccaggccacagkgcagtagtgctattttggccctctgcaaacttggcccccggggttcaagcaattcccctgacttctgagtaccttgtattaaaggggggcaccaccatgcccagcaccacttattgaaaagagagttcttcccccattgtttatttttattgacttcaccaaaggtcagatggctaaaggggg

SEQ ID NO: 566558 - DNA, 568 bp, Homo sapiens
accacatgttctcacttataagtgggcatatgcaggtacaaagattggaacaacagacactgggaactccaaatagggtgagggagggagccaagggttaaaaaactacctactgagtactatggtcattatttgggtgatgggaacaagaaaagcccaaacctcagcatcccaccatatactatgtaccttggggatgtctacatccagagcatgtgtcccctgaagctaaaataaaaaaacacaaacaatcatgttgtacaccttaatatatataataggttgaatgtggtgtctctcacctgtaaccccagcactttaggaggcaaggtgggtggattgcttgagcccagaagtttgagaccagcctgggcaatgtggtgaaacactgtctctaccaaaaaaaactaataataaataaacaaaataaaataaattagttggtcttgggtggtgtagtcccagctacttgggaggttgaggtgggagatcacctgagcccaggaagttgaggcttcagtgagccatrattgcgccactgcactccagactgggtaacagagtgaga

SEQ ID NO: 566559 - DNA, 454 bp, Homo sapiens
tctttctcatccttcctagtagattaggcaacctagttgggggatgggacgtgatgtatttgtctcccccaaaggaatgtttaatgatcctcctccttttaagatattattaagtcaagttagtaataagtaggaaataagtaaaattatctttttaactttaaacagaaacagttattttaatacaacttgatatatataaataataaaatatatataatatatgttatacatatatatatatatatatatatatatatatatatatatatwttttttttttttttttttttttttttttttgagacaggatcttgctttgtcacccaggctggagtgcagtggtgtgatcatggctcactgcagccctgacctcctgggctcagatgttccttccaccttagcttcctgagtagctgggactataggcacatgccaccatgcctggctaatt

SEQ ID NO: 566560 - DNA, 454 bp, Homo sapiens
tctttctcatccttcctagtagattaggcaacctagttgggggatgggacgtgatgtatttgtctcccccaaaggaatgtttaatgatcctcctccttttaagatattattaagtcaagttagtaataagtaggaaataagtaaaattatctttttaactttaaacagaaacagttattttaatacaacttgatatatataaataataaaatatatataatatatgttatacatatatatatatatatatatatatatatatatatatatatattttttttttttttttttttttttttttttgagacaggatcttgctttgtcacccaggctggagtgcagtggtgtgatcatggctcactgcagccctgacctcctgggctcaratgttccttccaccttagcttcctgagtagctgggactataggcacatgccaccatgcctggctaatt

SEQ ID NO: 566561 - DNA, 466 bp, Homo sapiens
tttcggggtctgccagctcggagacagacactctagcattgctgcctgacgggctttgccgcacctgaccttgaggggtggtgacttggccaaggtggcttccctgtgtccatcccaaagacaattctcttggacactccccacctgctacccgcatacttagtgcctgccatgccaaatccactgcatgactcagctggcaaggtgtaatctccatgtaaccggagcacttagtgtgggsttaaggatgacagtaactgactttattgatcattcctggtaacaccctcaagcatgtacacattttaaaaaacaaactccagccgggcatggtggctcatgactgtaatcccagcactttgggaggccgaagtgggtggatcacgaggtcaggagttcgacaccagcctggccaacatggtaaaaccccatctctactaaaaatacaaaaattagccgggcatgg

SEQ ID NO: 566562 - DNA, 466 bp, Homo sapiens
tttcggggtctgccagctcggagacagacactctagcattgctgcctgacgggctttgccgcacctgaccttgaggggtggtgacttggccaaggtggcttccctgtgtccatcccaaagacaattctcttggacactccccacctgctacccgcatacttagtgcctgccatgccaaatccactgcatgactcagctggcaaggtgtaatctccatgtaaccggagcacttagtgtgggcktaaggatgacagtaactgactttattgatcattcctggtaacaccctcaagcatgtacacattttaaaaaacaaactccagccgggcatggtggctcatgactgtaatcccagcactttgggaggccgaagtgggtggatcacgaggtcaggagttcgacaccagcctggccaacatggtaaaaccccatctctactaaaaatacaaaaattagccgggcatgg

SEQ ID NO: 566563 - DNA, 602 bp, Homo sapiens
aactaatgctgaatggtttcatcaccctgtgaataagaagttataatagaataagcttcttatggtaagtataatggtggtggagggacagaattttcccagaggagccaatgtttaaactgaatcgtgaaagataaagtatttactgatcagacaaaagaatgaagggtggattacaggcaagaagaaaatttcccaacaaatgtactttgtaaattaattgggaaatgacctagtgcacttatgaggaacccccacctgttccttggagaaaaaggagcagaaaggtagaccagaactccagggccgagaccttccatctatgtagaaatacgagtaagtgaccacagagtaaactatctagagttctcactccagagtgtggaatcatgatttctcagcataaaatttgcttctttctctgaagttcttcctccaagagcacttttgttagatctcttgactgattctaccatgttttggctattgctggcaggactctgaccctatgtactgggggaaaacaggcccatacacactgtccttagagaagtcaggcctaaaactgcttattaaacaygagatcctgaccttctctaaca

SEQ ID NO: 566564 - DNA, 464 bp, Homo sapiens
tgtgccctcctaaacttcatatgttgaaatctaacccccatggtgatgatatgaagatatggggactttggagccttcatgaatgggattaatggccttttaaatgaggtctgagggagcttgtctgccttttctgccatgtgaggatgcatagaaggtgccatctatgagaaacaggcctacaccttccaccaaatctgttggcaccttgatcttggacttcccagcctccagaatagtgagcaataaatttctgttgtttataaattacccaacctaacgtattttttatagcagccstaagatatctattttataattttaaaatatctacatatttttatacagttagccctctttatttgtgggttcctcctctagagatttaaccaactatggattgaaaatatttgaaaaaaaaagtaacaatacaaaaatgaaaaaataacacaaatttaaaaata

SEQ ID NO: 566565 - DNA, 525 bp, Homo sapiens
ccatttgtttgtgttgtctatgactgctttcagcagtgtttagtagttttccttgtagatgtccttcacctgcttggttaagtatatttctaatttttttttttttttttttgccgctgttgtaaaaggaattgagttcttaatctgatgctcagcttggtcgctgttggggtatagcagggctactaatttgtgtacattaattttgtaacttgaaactttgctgaatcatttaccaattctcagagctttttgaatgagtctttaggcttttctaggtatacgatcatgtcattagcaaacagcgacagtttgatttcctstttactgatttggatgccctttatttctttttcttgtctgattactctggctaggacatccagtactatgttgaataaaagtggtgaaagtgggcatccttgacttgttccagttctcagaaatgatttcaaattttccctgttcagtataatgttggctgtgggtttgtcacagatggcttttattaccttaagttatgtt

SEQ ID NO: 566566 - DNA, 534 bp, Homo sapiens
aaattttttaatttccacttttatttcattgttgaccaaatcattcaggagcaggttatttaatttccatgtatttacatggttttaagcattccttttggagttgatttccaattttatttcactgtggtctgaaatagtacttgatataattttgattttcttaaatttgttgagacttgttttgtgctctatcatatggtctatcttggagaatgttccatgtgctgatatactgaatgtatagtctgcagttgttgggtagaatgttccgtaaatatctgttaagtccatttgttctaaggtatagtttaagtccattgtttctttgtttgactttctgtctcgatgacctgtctagtgctgtcagtggagtattgaagtcccccactattattatgttgctgcctatttcatttcttaggtctagtagtaattgttccataaatttaaaagctccagtgtaaggtgcatatatatttaggattgtgatattttcctrttggacaaggctttttatcattatataatgtc

SEQ ID NO: 566567 - DNA, 557 bp, Homo sapiens
aacaaatttaaaagaaaaaaaaaaccatcaaaaagtgggcgaaggatatgaacagacacttctcaaaagaagacatgacgtactctttaataaatattataccctacagggaagttgattcagagagctccgagttatatggaatgccccacaactcacagcaattcagctattcaccttttttttttaattcaaatcctgctcaggtgcagtttgtgaccccagccctgtggtacttcatgttcttatattctaatagtacactcaaaagaagcaatggtctcacagtgattgtaaagggaatcacacrtccccagagctatcccaacactgtggctgcaggtgaccacatgaacttcccctttatgttgaaaatccaacacagcgaagcagcagagatcacaagatatcttttgtttggtaagcgcaaactttatttcatacatgaaataatttattaaatttaatgatatatttgaaattaaaagtttttctttttaaataatttattgtcttaaactaaagaatgactcaagaaaccattactggttattgca

SEQ ID NO: 566568 - DNA, 557 bp, Homo sapiens
aacaaatttaaaagaaaaaaaaaaccatcaaaaagtgggcgaaggatatgaacagacacttctcaaaagaagacatgacgtactctttaataaatattataccctacagggaagttgattcagagagctccgagttatatggaatgccccacaactcacagcaattcagctattcaccttttttttttaattcaaatcctgctcaggtgcagtttgtgaccccagccctgtggtacttcatgttcttatattctaatagtacactcaaaagaagcaatggtctcacagtgattgtaaagggaatcacacatccccagagctatcccaacactgtggctgcaggtgaccacatgaacttcccctttatgttgaaaatccaacacagcgaagcagcagagatcacaagatatcttttgtttggtaagcgcaaactttatttcatacatgaaataatttattraatttaatgatatatttgaaattaaaagtttttctttttaaataatttattgtcttaaactaaagaatgactcaagaaaccattactggttattgca

SEQ ID NO: 566569 - DNA, 551 bp, Homo sapiens
ttgtgaattttcttattgcattaattgttatggaaccccaaattacggacttccagaccaaggtataagamtctttgtagcacaacataagacttgtaattaaatcagctgctattcaggtctactcaattgaatcaaaacacctagcctaggacttgattcagaaacttctgttggcatgtgagaacatgtgagaaggccataatcaggtcttctctaatcttggaaccatggtgtattagtctgttctcatgctgctgtaaggacatacccgagactgggtaatttataaaggaaagaggtttaatggactcatagttccacatggctggggaggcctcaaaatcatggtggaatgtgaaggaggagcaaaggtatgtctgacatggcagcaggcaagagagtgtgtgcaagggagctgccctttataaaaccatcaggtctcctgagacttattcactatcacgagaacagctcaggaaaacttgtctcccaccccatgattcaattacctcccaccagcttcctcccatgatatctggggactatag

SEQ ID NO: 566570 - DNA, 514 bp, Homo sapiens
tttcttcattgacccactggtcattaggagcatattgtttaaattccatatgtttgtatagtttccaaagttcctcttgttattgatttctagttttattccattgtggtcagaraagatacttattatggtttcattttttcttttttgaaacttgtaagatttgttttgtggcctgacatatggtctccttgagaatgagccatatgataaggagaagaatgtatattttgcagccgttggatgaaatattctgtaaatatctattaggtccatttgttctgtagtgcacattaagtctgatgtttctttgttgatttctgtctagatgatctttccaatgctgaaagtgaggtgttaaagtcatcagctattattgtattggggtctatctctctctttcactctaataatatttgcttgatatatctaggtgctccagtgttaggtgcacatatacttacaattattacatcctcttgctgaattgacccctttatcattatataatgac

SEQ ID NO: 566571 - DNA, 569 bp, Homo sapiens
ttattatagctttgcgttgaagtttgttgttttttttctcaactagttaagtcaactgcttctgaaataactctgtattgtagattatgcagatctttacaggcataaatatttaaactgtaatatgctaacttgaagagattgcaataaagctgcttcagctaaccctgtttatgtttaaatactagggtttgttctatattttatacatgcattttggatgattaaagaatgcctggttttcgtttgcaatttgcttgtgtaaatcaggttgtaaaaaggcagataaattgaaatgtttgtggtatgaggaaataaaagaatggaattagctttcattcagaaacctttgagtgtgtgtgagttccacagctaaacaaatagtagaagagtttggtttttgtaattaacccaaataccatgaaattattttttcatcattgcgacctcagatgtttctagaaagaagcatagtgatgaagacaaacagatgccstatctcccctagtagctatcaaccccggtggggagaaagaacttgaagtgtgactgaattgactgctgtgcca

SEQ ID NO: 566572 - DNA, 262 bp, Homo sapiens
cttgggaggctgaggcaggagaatcacttgaacctgggaggcagaggttgcagtgagccaagatcacaccactgcactccaacctgggcgacagagtgagactctgtctcaaaacaaacaaaaaacgtaatttctctgttacatgggaattcttagaaataaaaacccgaaactaataacccaataaaaaatgagcaaagggtataagagtttatayacaggaaaaaaacacaatgagctttaaatatatgaaaagatgttc

SEQ ID NO: 566573 - DNA, 523 bp, Homo sapiens
gattgcaaaaagcaaccaatcagaggtactttcaatttcccatctgcggggcagaaaagttgggggtttgcaaagggagtaacctctggtccttttgttattaggagtggacagttagggctttcctatcaatttagttctaggaagtcagtgtgaaatggccttaggttccctgcctccagaccttgttctgcctcacccccacccctttaggaccccttagttattaatagtggttacctccagagcaggggtgagggaagggggctataataaaagtcttaaaaggatacttttttttttttttctgtagagccagagtcttgctctctcgcccaggctggagtgcagtggcgcgatctcggctcactgcaacctctgcctcccggattcaagcaattctcctgcctcagcctcctgagtagctgggacaacaggcgcaygctgccacgcccagctaatttattttgtattttagtagatacagggtttcaccgtgttgcccaagctagtctggaactcc

SEQ ID NO: 566574 - DNA, 560 bp, Homo sapiens
tttgtacttgcacatttcatcatgtgtgttctaacagggcaggggccagccattcatctctgtatcccagcaataaataatgtttggcatatagtaggtggttaacgaccaatatgaaccactaaaagaatataaacacaattgctttccccgcctacactacttctgctccatatgttctggtcaaaggcaatggattcrgtatgaataagcctttgttattcaccatgaagttacctgaaaacaaaaatccatggttctctttatgagtactccaacgaaataggaaatacatgacaggtgtacaacagaaggaacaggaaagaaaaggtttctgcctgagcagaagtcaaagggctgtccaggcagaaatgcagggcaagaaacaagcagaaatgcagggcaagggccaggcgcggtggctcaggcctgtaatcccagcaatttgggaggccaaggtgggtggatcagctgaggtcaggagttcaagaccagcctggccaacattgggaaacccagtctctactaaaaaacacaaaaattagctggatgtggtggtg

SEQ ID NO: 566575 - DNA, 646 bp, Homo sapiens
ttatattaaaagaaaaatcagataaagtagattaatgatttcttgtgaagcattctaatagagattagcctcagttaccaaaagttaccaaactgattagcctcaaaaatttgagatgccctcaaagtaacgtttgacttttaatttattttagaaataagagatatgtatgatgatacacaaaatttgtaaacatggtcttcagctataaattacacaacattataacaaatagaactaccagaaagaatgaactatgtgtcttttaaggaatatgttgaaggtgggataaaagcttattaagttttcttccaccagaggtcrtcacaaaaattcagtttcctttctttgttttttctgttttggtttggtttttgagacaaggccttgctctgttgccaagattggagttcagtggcaccatcttggctcactgcagactcagcctctcaagtgatcttcctgtttcagcctccagagtagctgagagtacagacacataccaccatgcctggctactttttgtatttttcagtaaagatgaagtcctgctatgttgcccaggctggtcttgaactcctggccctaagcaatcctcccacctcaaccttccaaagagctgtaatagcaggcatgagtcactgtg

SEQ ID NO: 566576 - DNA, 578 bp, Homo sapiens
ccatcagatctcatgagaactcactcactatcatgagaacagcatgggagaaaaagcccccatgatccaatcacctcccacctcatccctccctcaacgtgtggggattatgacaataacaattcaagacgagattcaggtggggactcagagtcaaaccatatcacaggggatttgtttctaccataggtgaaatccaaatgagtgaggcttctggaggtcttacccccttccaccatgattktaagtttcatgaggcctcccctgccatgcaaaactatgagtcaattgcatggaatgctgttgtgtgaacacactgtgatttctgcccttgctcttctttgtctagtgtacactccgtgttttcagagtagtggctataacatttttctccattggaatcctcagagacagcactctgggactatctgctggtgaacatctgatgagtccattaccagtaggaaccaaaattaacaccacaggtgactgaattccacttcttagtggcataatgactttgggtagatatttaagctcttcaagccacgtttttctcatatgtggcataggaatta

SEQ ID NO: 566577 - DNA, 578 bp, Homo sapiens
ccatcagatctcatgagaactcactcactatcatgagaacagcatgggagaaaaagcccccatgatccaatcacctcccacctcatccctccctcaacgtgtggggattatgacaataacaattcaagacgagattcaggtggggactcagagtcaaaccatatcacaggggatttgtttctaccataggtgaaatccaaatgagtgaggcttctggaggtcttacccccttccaccatgattgtaagtttcatgaggcctcccctgccatgcaaaactatgagtcaattgcatggaatgctgttgtgtgaacacactgtgatttctgcccttgctcttctttgtctagtgtacactcygtgttttcagagtagtggctataacatttttctccattggaatcctcagagacagcactctgggactatctgctggtgaacatctgatgagtccattaccagtaggaaccaaaattaacaccacaggtgactgaattccacttcttagtggcataatgactttgggtagatatttaagctcttcaagccacgtttttctcatatgtggcataggaatta

SEQ ID NO: 566578 - DNA, 578 bp, Homo sapiens
ccatcagatctcatgagaactcactcactatcatgagaacagcatgggagaaaaagcccccatgatccaatcacctcccacctcatccctccctcaacgtgtggggattatgacaataacaattcaagacgagattcaggtggggactcagagtcaaaccatatcacaggggatttgtttctaccataggtgaaatccaaatgagtgaggcttctggaggtcttacccccttccaccatgattgtaagtttcatgaggcctcccctgccatgcaaaactatgagtcaattgcatggaatgctgttgtgtgaacacactgtgatttctgcccttgctcttctttgtctagtgtacactccgtgttttcagagtagtggctataacatttttctccattggaatcctcagagacagcactctgggactatctgctggtgaacatctgatgartccattaccagtaggaaccaaaattaacaccacaggtgactgaattccacttcttagtggcataatgactttgggtagatatttaagctcttcaagccacgtttttctcatatgtggcataggaatta

SEQ ID NO: 566579 - DNA, 507 bp, Homo sapiens
acctcccccagataaccttgctgaaaaccttctcattcaaaatgaagctrttatatcctagactcaaataaaatgattgaatgtacatttgattttgaagaactcagcccaagggaatttgaatcacttgttagtctctcactctgtttgtaaaaatgtatgactaggaaatctagattcccttgggtatggtgatgatttctgaggtacaacactaatgacatgatccaaggaagaaaaaaaatgataagctgaactttattaaaatagaaaaatgtctgctctgtgaaagacattgtcaagagaatcaaaagatgagccaaagactgggagaaaatatttgcaaaagacatacctggtagaggacctttatccaagatatgcaaaatgctcttaaaactcaagtataaggaaaaaataggacaactatagttaacaattattgtttatttcaaaataacaaaaagagtagaattgcaatgtttctaccataaagaaatgataaat

SEQ ID NO: 566580 - DNA, 591 bp, Homo sapiens
gatggatagcccagttgccctgaattgatcattacacattgtataygtgtaccaaaatatcacatgcgctccataaacatgtattaatacaactattatgtattcataataattaaaatcttttaagaaagcaaacaaaagaaataaaataaaccaattaaaaatgggtcaaagatcttaacaccacactaaataaaatatacagatggcaaataagcatatgaaaagacgcttcatatcatatgtcatcaaggaaatgcaaattaaaataatactgagataccactacacacctattagaatggccaaagtccagaacactgacactaccaaatgctgacaaggatgtgtgacaacaggaactctcattcattgctaatggaaatgcaaaatggtacagccactttgggggacagtttggtgtttttttaaaaacaaaaacaaaaacaaaaaaaaactaaacatatacttaccacatgacccagcaatcacactccttggtatttatccaaatgaattctcacagaaacctacctactgatatttaaagcagctatatttataattatcaaaatttggaagcaaccaaga

SEQ ID NO: 566581 - DNA, 564 bp, Homo sapiens
cagtatgtcaaagagatatctgcacttacatatttaatatggcactatttacaatagctaagatatgatctatcaatggatgaatggatggagaaaatgaggtatatatacatgatggaatacaattcagcctttaaaaagaaggaaatcctgctatttgggataacatggatgaacctggaggacattatgttaagtgaaataagccaggcacaaaaagacaaatttgcayagtgtcactgatatgtggaacctaaaaaagttgatctcataggagcagagaaaagaatggtggttaccaacagctgggacagagggggtgggggtggagtttgaggagatattgttcaaaggatacaaattttttattagacaggaggagtaagttcaagagatctattgtacaacatggtgactataattaataatatactgtattcttaaaaatgctaagagagtagattatatgtgttctattacaaaatcacgagatatgtgaagtaatacatgtgttaattctcctgatttagccattccacaaggtatagttgttttaaaacatca

SEQ ID NO: 566582 - DNA, 363 bp, Homo sapiens
tactgcgcttacctttcatcagcttcattgcagacctcagccctacactccagccaagctaaaaactctttgtggtttctcraagttgtaattctgtatgatgtatcttgggcttttcctcctgcctagaatagtgatacctccgcctcttttagccttctgattaactattcatttgccaggattcaatccaaacgtcctttacacctggccacaacttctctaaatctgattaatatgaatacatttcaagcattttaatatacagattgtcagtcttttaggtgactaacatattgaatttactaaatttaataaatgcttataacatttttatagagtgagtggaattaagtctctgga

SEQ ID NO: 566583 - DNA, 515 bp, Homo sapiens
accactgcccttctcattttcaattctggttgcagtttttattttataaaaatgtcttatttctatgctttatttgggcatcattctagctagtctggagctaactcgcctttaaagccgatctgggctcttcatttttatttttatttttttgtaaatgggggttaagagaaatactgtttccagatgaacactgttcatttccaaactttagcttcctagccatgtgcttatgacaagttgctctcagcatttggaggagaggagctctggattctggaattgccctcagagttccactggagtaaccacattggcagtcattctttgtgatttcagaggtagtacaaggtgaataaaaaaatttggatctaaatagtgtgactattcaatattaagataagctccatgtgtggtttagaagtagttctaaatccatttccaaaagaggcttctaaaacattttgtggatsgataatattatttattccctactctgaaagggaatctttgat

SEQ ID NO: 566584 - DNA, 392 bp, Homo sapiens
taagaggcccgctgaaaaaatcctagtactccatgccaggagcttacaataaatcatcagagcaagcaagcaagagtgatggaagagccaaacagagacatgactgacttagtcaggattttggaaacatcaagaggtgttgtgtgacggagttctgaaggcaggcactagccagatactggaaggtgatgtagggcaaagcaagaagttattggagcttttctgagattyctgatggcacaacatggctccaaccttacttttctctggcctcaggtaaggataaccactcagaagtgggcacactcctaagtgttgattggctttttgataaaaccctgataaaccgaggctgaaccacagcctaggaaaggaataaacagacggcaggc

SEQ ID NO: 566585 - DNA, 503 bp, Homo sapiens
ccaattttccatcagatttcccaggaaatgtccctctttccttcttggatttagttacttctagcccctgattttctcttcctcgtcatgggtctgcaccgcccaaatgaaataagcattaatgaagaggaagggtccttaataggtgcctagaacattctattgttcatcctgaaacacataagcatatggaaattgagcatctgtatatctcaggtgcctccttcacataatgggaggttttaattaaatctacggttaataaatgactgtttttggaacwcttagaacaacctttcagcacaatcctttggacagccttgcagctgcctcagaagtcaaggcatagccaagtgggctcttacttcccacattctccctctgaactagagaagtttttttttttggtttgtcttttttttttttttttttttttgagactgaggctcactctgtcgcccaggctggagtgcagtggcaggatctcggctcactgcaagctc

SEQ ID NO: 566586 - DNA, 611 bp, Homo sapiens
ataacacaaaacacattataaagtcatgttttatttatcatcaaaagaaacagaaaaataaagattcatacaataatcagaatattaaaataaatcttatctaagggtaaagtagacctccaccttcttttaaagaggaagacaatcaagtccagaaaataacactgattactaatgggttacatacaatttgacctttattgtccgggagggcttttaaacctagcgtagttgtcgtagaaatgtagcaagaacctcaagcaattaaataaaaggcaaagcattcctatcactcccccataaaatgatgyatttgttttagattagcaactggaaaagaaatgtagaggagacgtgtagcaaaagcactggaagagggattcctaacttagtcccaagagacttcctttgaagagtgattccaggagctactgtgcaaagtgacagcatggcaacaagggaaatcaattctgcaaatctagatggcttggagaagatagtagaatggatcaattatatgagaaataaagacactcgattgggtagcatgatgtgagtagaaaaacacatatggtgtcatataaatatgactttgaagataaaggtgtgga

SEQ ID NO: 566587 - DNA, 620 bp, Homo sapiens
actgttaaattgctatcagcttaaaataatggatcatatgctagtatttgcaagcctcgtggtaacctcaaaaaagcatatgatggatacacaaaaagtaaaaaaggaaggaattaaatcatcaccagagaaaatcatcrtcactaaaaggaaaagagaaaagaaataaagaaagaaagaagaaaagaccacaaaatgaccagaaaagaaataataaaatagcaaaagcaatccttactcatcaatagtaacattgaatgtaaactgactaaattctctaatcaaaagacatagggtgatttaatgaataaaaaaacaagatgcattgatctgttgcctacaagaaacacacttcacctataaagacaaacatagactgaaaatgaagggatggcaaaaggtattccatgccaatggaatctacaaaagagcaagagttgctatatttatatcacacaaaatagatttaaggacaaaactataggaagagacaaaagggttatgatataataataaagtggtcaattcagcaagaggatataatgatagtaaatatatatatgcacccagcactggatcacccagatgtataaaacaaatattattagatctaaagagag

SEQ ID NO: 566588 - DNA, 619 bp, Homo sapiens
cctttagccagaataagaaaaataaaagagacccaaataaataaaatcagagattaaagatgagacattacaaccgatactgcagaaatgatcattaccagctactatgagcaactatataccaatatgtagaaaaatctagaaaaaatggacaaaatagtagacacatacgacctactaagattgaacaatgaagaaatctaaaacctgaacagaccattaacaattaacagtattaaagctgtaataaaacacctcccagtaaagaaaaacctgggacccgatgaatttactgctgatacttgccaaacatttgaagtaaaactaataccaatcttactcaaactattccaaaaaataaaaggggagaaactactttcaaactcattctacaaggctactattaccctgttaccaaaaccaygcaaagacaaaaaataaaaataaaaataaaaactacctgcagtccaatgatcattcatcatgaccaagtgggatttatacctcgcatgctataagcaaattaatcaatgtgatacatcgtgacaacagaacaaaagacaaaacccatatgatcatttcaattgatgctgaaaagcatttggtaaaattcaacatc

SEQ ID NO: 566589 - DNA, 590 bp, Homo sapiens
ttgtttgtaacacaaaggataaatgcttgagggatggatatcccatatcccataatgtgattattatgtattgcatacccatatcaaaacatttcatgtcctccataaatatatacatcttctatgcactcacaaaattaaatagaattttttttaatttaaaaaattcttgactgacagtyaattctctttaaggagtctaaagatagaatcccattcctttctggctttgaaggattctgctgagaagtttgctgttagttcaataggcattcctttctaggttacctgatgttttgttctcacagctcttagaattcttcccttcacattgactttagattgtccaatgaacatatgcctaggtgataccctttttgcactgaatctcccaggagttctttgagcttattgtatttggatgtttaaatctctagcaaggtcagggacgttttcctcaattgttccctcaaataagttttccagggctggatgtggtggttcatgcctgtaatcccagccctttgggaggctgaggtaggtggaccacatgagcccaggagttcaagaccacgctgttgcaacaggtg

SEQ ID NO: 566590 - DNA, 492 bp, Homo sapiens
tgatttctatggcactctcttgcaaaatgacttttaatgggtcagcgaacccttaattcactcttctctttctggtccttacaatataaaaaggtcagactgagagagtgttcagtcagtcattcatctgcaaaataaacttttacttcttggccggttacccaggtgctgatcttcttctgttctatttcctaatgtgtgtacatattttgattttttaatgaaatcttaaggtgcacacttcatacctaactgcatccccacagcaggtatctccttagtgtgacaggcgagagcattatgctaagtagataatcacaacaattaactgaaaaggttataatttcatcctgtttggtactgttggcctgtcaaaaataattaggttaaaatagatctcaagactccctctgcaaatttaggggagaaaatagaagaagaaagraagaaaaaggtgacagctaagaactttttacttggccaaattaaatg

SEQ ID NO: 566591 - DNA, 611 bp, Homo sapiens
tatctttctgatgtgctgttggatttggttagcttgtattttcttgagaatttttgcatctatgttcatccggaatattggtctgtagttttcttttgttttgttatgtcctttcctagttttggtattaaggtgaactgtcttcatgcaatgatttggacaggattcccactttctcaatgttttggaataatttcagtaggattggtacgaattcttctttgaatgtctgatagaattcagcagtgaatctggtccttggtttttatttttttrttggcaatttttaaattactgatgcaatcttgctgcatgttattgatttgttcaggatttctacttcttcctgattccagctaggaggttttgtgtttccaggaatttatccatttcttctagattttttattttgtgcacataaaagtgttcatagtagttttgaatgattgtatttctgtggtgtcagttgtaatgtctctagctttatttctaattgattttatttggatcatctctcttctttttttggttaatctcactaatggtctaacaatgttttaatatcttcaaagaaccagctttttgtttcatttatattttctatgtttttg

SEQ ID NO: 566592 - DNA, 427 bp, Homo sapiens
tatacaataatagtgaaggacttcaatgccccattcacagttttagataatcaaggcagaacactaatagaagttttggacttaaacttgacacttgatcagttacgcctaatgggcatctacagacccctccacccatcaaccacagattatgcattcttctcatctgaacacagaacagatcatgagattgaccacatgctctactataaatcaagtctcaataaattcaaaaaaatttaaatcataccaaccatactcttggaccacagtgaataaagatagaaagcaatactaagatgatctctccaaactatacgattatatggaaattaaacaacttgttcttaatgccttttgagtaaacaaaattatggtgtaataaaatttaaaaactytttgaaatgaataaagacagagacacaac

SEQ ID NO: 566593 - DNA, 491 bp, Homo sapiens
acataaaatcagcctgcatgccyatcaatggtggattggataaataaaatttggtaaatatataccatggaatgccagccataaaaaaatcaaaattacttatttttttttacaataacatgaatataggtcggggccatatcctaagtgaattaacttaggaacagataatcaaataccacatattctcacttgtgtgtggagctaaacgttgggttcataaataggtaagaggggaacaacagacctggggattactagagggaggagagggagaggcaagcaggggctgaaaacaccctatggggtgttatgctgagcacctgggtgatgggatctttcatacccctaatctcagcatcatgaaatatagtcatgttacaaacctgcacatgttccctcaaatctaaaagttgaaattattaaaacattaaaacataaaaataaaagataagaatatgataaaggaaagctttttgaaattaaaataa

SEQ ID NO: 566594 - DNA, 629 bp, Homo sapiens
agaatatactacagatcaaacttcatcaaaccaagagataactaggacaacttcatcaaaaggaatggtaatgagcattagatatatttaatatacatgtaaggttaattcaaaagtggatacatgagtggaagaagaggaagtaaatgtcatgtattcataaaataaaatagaaataattcaatttaaaaatcagaatggaaggaagaaaagggcaaataggatcatctcttagtgattgctacattgaatcataattataagcagaagtgaaaggatattacttaaagctgataaaccaagaagtgaaaacttaggttttcctcatcaaaaggactgagggtaccatgaaaggcaatatataaaagtaaccaatacaaaaaaaattcaaatcatcctaaatatcgaaataagtaaaaaagattttaaaaataaccaacagagcatataaaaaagtagttaatataacctaatacccaccrtagatataacttaagatcatctagcttgagaccaaatattttagtcatataataatataaatataaatgctataactacttaaaggaaacagttttcaaattggcttagcaaaaaaatgaatgaaaaaagaaacagcaacaacaaaa

SEQ ID NO: 566595 - DNA, 544 bp, Homo sapiens
ggaagaaagaagtaggcatttcaggcatagcagatgacycaataaaagacttgcctgtccctaattgttgtaaacttaaaggccacatttaagagttgtctcagaggggtttgaagtctcattgctgatttttgtagtttccttataatgtcaggggcagatggagtaaaaaatgtatacccaggagagcttgcctatatggggagtctgggtctccattagtatatttcctgagtgccccaaccaaacagctgaaaccgagtaggattttcatcctttccctgaattattgctctaatcttgtcataattgactggcttaacaacacactttttcctctactttttctctacggcacagcaagtggacaatacttgtaagtcatgacaagttaaattaaagaacgtggccaacttaacaaactcctccataaacttttctggatgctctgaaaactggccaaatttttgcttgtataaagccaaatcagatctagaaaatgcacatgtactctaagtgttcccccatttccatcagctacctc

SEQ ID NO: 566596 - DNA, 672 bp, Homo sapiens
aattacctcccaaagtccacacctcctaataccatcacattggtkattaggtttcaacatatgaatttgagagggacacaaacattcagaccatagcactagatacctacccaataaaaataaacatatgtcccacacaaaaaccttttcatgaatgttcataacaacattattcataatatccaagaagtggaaataatccatatgtccatcaactgggaaactgacaaaatataatgctctttcaatggaatattcttcagcagtaaaaagtaataaaatactgatacgtattttaatcagatgaatcttgaaaacattattctaagtgaaagaaaccattcacaaagcaccacacatactatcaagtcagagagtagatttatggttacccaaggtagaagggtggggaagttggaatgaaatggtgagtggctgctaatgggtacagatttttttggttgggtgattgtgatttaaatgttgaaaaattgattgtggtgatggttgcacaactctgtgaatgtactgaaaactattgagttgtagactttaaatagctgaattatatggcatgttagttatgtctcagtaaagccattattaagaaaataagaccacttcctggaaatagaaatgctattataataggtaacacataaataaagccat

SEQ ID NO: 566597 - DNA, 587 bp, Homo sapiens
gaatgctatacttctcctgggcagatgatgggaggatctcatgctttaaaaatagaccaggccaagattaaaacaaacagaccagaaaagataactgttggggactgggcttaatacctgggtgatgaaataatatgtataacaaacccccatgacatgtgtttgcctgtgtaacaaaccttcacatgtacccccaaacataaaataaaagttaaaataataagaataaacaaaaaaacaaaaggcggagcttgcagtgagccaagatcgcgccactgcactccagcctgggcgacagagcaagactccrtctcacaaaaaaaaaacaaaaaaaaacaaaactttagaatatgattattgtaaggtttcttaaggaaacatcccagccaaatcaacccataatatagcctacctgaagactataccctcactctctctctctcatttacatacaaggtgtccaatcagttctttagtggcttcctcttaaattcaatacaagactaccaatcacaggacatttggggaaagaaaggctaaacaatagagcaaaacaataaacagaaaaataaataaattaggaagaa

SEQ ID NO: 566598 - DNA, 318 bp, Homo sapiens
ttattcctttggatccatgtaaatttacctatttaaaaatcaagttagaaatttactaaatatatttaaatagattctaatttttaaagagctcacttgtacattaaagtaggctcagtgctgtaacaactggacccaaactcaatagaaatgtgtaactagctcaggtgtttccaggtactagagcattccctcttgcttttcctcgaccctacttaaacttttaaaaatctttccttttattttatttcaatagtttttggagaacaggtggtttttggttaaatggataygttttttagtagtgatttctaagat

SEQ ID NO: 566599 - DNA, 628 bp, Homo sapiens
attttaatatatgtatgtgtttagtatatacacatacatattttatacacacatatacatatatatcacatatattataaaatgatgtctcaacttttgattttaaccatgaggtgactctgttcatagcagatagttcttaatgtagtaggtctgtttcagttacttcagaaatatctgaatgctaagcatataggataaatgaaaattaatttggctattcttgtactgttcagatcagggtttggcagaatgctatccatggascacaccacatgaattatttttctattgccatagaggtaaaatgttttttacaccttaagggttgttaaaaacagaaaacaatatgtgacaggggcatttacctacaaagcttaaaatattgaagtgtcctttttcagaaaaaaaaattctgatctgtggttcaggcatgcctaaagtaagatatcaaaagaagaaaatggaatatagatttgtgttaaatattctaaatttattgtgaattaacatcaatggtttaaatggaagccccttgattttcgagtggtcatcattaatgacataactccacagattgttccacagattgtgttttatgcaattgacactattatgtaatagtgtc

SEQ ID NO: 566600 - DNA, 406 bp, Homo sapiens
atttaaaacactggagaatttggtgccttaggaaagcgagaaagtgttggtcagaatgtaagtatccctgggctataggcagtcctggactgcactggcccaggtrattcagacctgacatttagagttgtggcacaagccctcgctgggcaggtagctctttctcctgaaaagagataacagaatgactccaccatggttttttcaagggcaggcctgaagcagttactggggagaaatgtctcccatatggaggaaggcagagagggagtgaaaggaaatggagagcaggctctgagaaggcagaaataataatgtgaacaacaggagaggaaaggaggtgggcgggtgggtgaaagcacagatatatcgttattgttataatcaaagggagagcggatactgg

SEQ ID NO: 566601 - DNA, 588 bp, Homo sapiens
tctcggctcaccgcagcctctgcctcccaggttcaagtgattatcctgcstcagccccactagtagctgggactacaggtgcctgccaccacgcccagctaatttttgtatttttagtagagatggggtttcaccatgttggccaggcttgtctcaaactcctgacctcaagtgatccacccgcctcggccttccgaagtgctgggattacaggcatgagccatcgcagctgggggatctttcagcttttaagagaagccaggaatctacattttaatatgattatttccctatttgaaaacacttggagacgtgtactgtatctgattttttttcttggattttccagttatatcagcaaacctccgatttgaaaacatatttacactatgttgtatggaatgtactgcatccatggccattttctggcatcccattgggttcagccagtgagaggaagaggtaggaggtggagggagggaggagaatggcatctccaagcagattgctctcatggctgggcagtgaagatcactccttttggaccatggctttggctgtcacggaggaaattattaatcgaataac

SEQ ID NO: 566602 - DNA, 626 bp, Homo sapiens
ttaattcctaggtatttaattttatttgtggctattgtaaatgggattattttttgattgatttttcagatttttgacattggcatatagaaatgttactatgttttatatgttaatcttgtatcctgcaactctactgaatttgaatttatcacttctagtagttttttggtgaaatctttaggtttttccaaatataaagttatataggctgggagtggtggctcacgcctgtaatctcagcactttgggaggctgaggtgggcggatcacctgaggttgggagttcgagaccagctgaccaacatggagaaaccctgtctytactaaaaatgcaaaattagccgggcatggtggcacatgtctgtaatcctagctacttgggaggctgaggcaggagaaactcttgaacccgggaggtagaggttgtggtgagccaagatcacaccattgcactccagcctgggcaacaagagtgaaactccatctgagaaaaaaaaaaaaagattaaataatctggaaacaatgataatttgaccttttcctttccaatttggatgccctttatttctttccttctcttgtctgattgctctagctacgagttctagtactatgttgaataa

SEQ ID NO: 566603 - DNA, 643 bp, Homo sapiens
tagcccacaggaccatgcaagactacagttacatgggtaagccagaactcaaatagtaggaagcgggttgactagcagagctatactataaaaggtagaccaggaagcctgctgtctgtcccagagagagatgccaataaattaagcagccagtcctcatcgggccctaatattggtaccaggggagcagtagtgaacaaaatagatacattctctattctgcagtttccagccttgtgggggaagacagtaaaccaaataattgcttaatgcagatttcattagatgctgataagtgcctgcagaacaggtccctggttggccttggccagcccagctcttccccttttattgcttatagttctcacaataactgttgaatgtgctaggaatgcaatatccggagataaggaggaactacatggaagagcgtgggctctggtcatgttcctccaagaagaggatgccctctaacactttagcacagcatgttatgttcccccagcttatgaaacttcagggcaggcagctttccaggctctctgaactggtgcaagygggacacacacagacaggattctgtcgggacacacacagacgggactctgtcgggacacacacagacgggactctgtccaccctg

SEQ ID NO: 566604 - DNA, 582 bp, Homo sapiens
ggaatcttgtgagacaagccaaggaatatgaatataatttaacggcagtcatcascttggaagtggggtaagtaatgttatccaatttagagattttaaagatcacttttgactactgtctacagactgacttaaaagggggaaggaagctgctgggaaactcatgtagttaatcaaggaaagacatgatggtaggttagactagggtggtggcaataaagaaatacagaagtaattttaagatgtaatttagagatagaattgacaagattattccaaatgcaagtcgtcttttctatatgttatctgtcattcatccgtaattttgcatgaatttgtggagggttttttaatttagaaaataatcatttcaggttagaaatgaaaacatcttgaaacaagaggagacatttgtaattcaaccaatttgcaatgccatagcaaaagctattagggaatctaagagactttcaccagatgaaaatcatgctttaatcaaaatttactgtagcctcataacttttatggtacttgtattaagctactttcacagtatgtattttcaaaaaaaggttttttaaa

SEQ ID NO: 566605 - DNA, 447 bp, Homo sapiens
aaatgcaagtcgtcttttctatatgttatctgtcattcatccgtaattttgcatgaatttgtggagggttttttaatttagaaaataatcatttcaggttagaaatgaaaacatcttgaaacaagaggagacatttgtaattcaaccaatttgcaatgccatagcaaaagctattagggaatctaagagactttcaccagatgaaaatcatgctttaatcaaaatttactgtagcctcataacttttatggtacttgtattaagctactttcacagtatrtattttcaaaaaaaggttttttaaaaaaaatagcgagtgaaaataccttattgtgtcacttctagggatatgacatatacttgtctatcaaagaaaaaaaaatcttttaatggttactaataaagacttagtgtgtgtgtgtgtatatatatatatccatccatgaa

SEQ ID NO: 566606 - DNA, 482 bp, Homo sapiens
cactctactgatctattgaaaaccagattttattttttcctaagtatatatttgtacccgttaatcaacctctcttcatccctcctattttttctaggctctggtaatcaccaatctactctctatttttatgacatctccttttatagctcccacatataagtgaggacatgtgatatttgtccttctatgcttggctaatttcactcaacataatgacctccagttcaatcaatgttgctgcaaatgacaggagttcattctgtatagtggctgaataatattccattgtgtatatgtmtcacttttttttttttaagatggagtctagctctgtcacccaggctggagtgcaggggtgcaatctgggctcactgcaaccactgtctcctgggttcaagtgattatcatgcctcagccttccaagtagctgggattagaagcacctgccaccacacctagctaatttttatatttttact

SEQ ID NO: 566607 - DNA, 644 bp, Homo sapiens
gggattattactatgcagagagaggtaaaatgttttaggggttttgtcttctaaattaaatcctcccaaatagtcctgaggaataaatcactctgcagcccttaattatatggcatgtgatgtttcacatttaaaacaagttcttatccaaggtaaaaccaccaacctcccctcygcatgtaagaacagtacacctgaatgtgctcaatcatggatcggtttgggctgccttccatatggatacccaggaagatgatttcttgctccagtaaagtctggggctcctgccaaagttctacgtccaaagtgagcagcagtctgccaggaatgatcaggcctaggtcaggatcagagagtcgggctggttgaaaagatgcaagaggccaacactgataaaaccaaattaaatctgaagcatagccatatatttctgtgtaaacaaatattgtaatagaatggcagttatcctattttcacatcccaacatgctgctaatatagttaataaagcagtatcagaatgagcataagctacttctccatataaatttttcttatcccaaagtcatcttcatcctaaaatatatttgtatatctttggaaacaagaaattattaaaaacatcattaccctgctaggaaaaat

SEQ ID NO: 566608 - DNA, 644 bp, Homo sapiens
gggattattactatgcagagagaggtaaaatgttttaggggttttgtcttctaaattaaatcctcccaaatagtcctgaggaataaatcactctgcagcccttaattatatggcatgtgatgtttcacatttaaaacaagttcttatccaaggtaaaaccaccaacctcccctctgcatgtaagaacagtacacctgaatgtgctcaatcatggatcggtttgggctgccttccatatggatacccaggaagatgatttcttgctccagtaaagtctggggctcctgccaaagttctacrtccaaagtgagcagcagtctgccaggaatgatcaggcctaggtcaggatcagagagtcgggctggttgaaaagatgcaagaggccaacactgataaaaccaaattaaatctgaagcatagccatatatttctgtgtaaacaaatattgtaatagaatggcagttatcctattttcacatcccaacatgctgctaatatagttaataaagcagtatcagaatgagcataagctacttctccatataaatttttcttatcccaaagtcatcttcatcctaaaatatatttgtatatctttggaaacaagaaattattaaaaacatcattaccctgctaggaaaaat

SEQ ID NO: 566609 - DNA, 618 bp, Homo sapiens
ggttttgtcttctaaattaaatcctcccaaatagtcctgaggaataaatcactctgcagcccttaattatatggcatgtgatgtttcacatttaaaacaagttcttatccaaggtaaaaccaccaacctcccctctgcatgtaagaacagtacacctgaatgtgctcaatcatggatcggtttgggctgccttccatatggatacccaggaagatgatttcttgctccagtaaagtctggggctcctgccaaagttctacgtccaaagtgagcagcagtctgccaggaatgatcaggcctaggtcaggatcagagagtcgggctggttgaaaagatgcaagaggccaacactgataaaaccaaattaaatctgaagcatagccatatatttctgtgtaaacaaatattgtaatagaatggcagttatcctattttcacatcccaacatgctgctaatatagttaataaagcagtatcagaatgagcataagctacttctccatataaatttttcttatcccaaagtcatcttcatcctaaaatatatttgtatatctttggaaacaagaaattattaaaaacatcattaccctgctasgaaaaataaaatttattaca

SEQ ID NO: 566610 - DNA, 437 bp, Homo sapiens
gaatccatctgatcctcagctttttgttgttgttgagagactttatattactgcttcaaactcactatttcttattggtcrgttcaggatttctgtttgttcttggtttcattttgggaggttgtatgtttcaggaattaatccattttctctcagttttctcatttgtgagcatatagttttttcttaatagtctctgttgatcttttgtatttctgtggtatcagttgttatgtcccttttttcatttctgattatgtttatttggatcttctttcttcttggtttgttcagctagtggtttatcaattttttttaaaatctttttaaagaacaggccaggtgcagtggctcatgcctgtaatcccagcattttgggaggccaaggcgggcagatcacaaggatcagggattcgagaccagcctggccaacatag

SEQ ID NO: 566611 - DNA, 437 bp, Homo sapiens
gaatccatctgatcctcagctttttgttgttgttgagagactttatattactgcttcaaactcactatttcttattggtcggttcaggatttctgtttgttcttggtttcattttgggaggttgtatgtttcaggaattaatccattttctctcagttttctcatttgtgagcatatagttttttcttaatagtctctgttgatcttttgtatttctgtggtatcagttgttatgtcccttttttcatttctgattatgtttatttggatcttctttcttcttggtttgttcagctagtggtttatcaattttttttwaaatctttttaaagaacaggccaggtgcagtggctcatgcctgtaatcccagcattttgggaggccaaggcgggcagatcacaaggatcagggattcgagaccagcctggccaacatag

SEQ ID NO: 566612 - DNA, 437 bp, Homo sapiens
gaatccatctgatcctcagctttttgttgttgttgagagactttatattactgcttcaaactcactatttcttattggtcggttcaggatttctgtttgttcttggtttcattttgggaggttgtatgtttcaggaattaatccattttctctcagttttctcatttgtgagcatatagttttttcttaatagtctctgttgatcttttgtatttctgtggtatcagttgttatgtcccttttttcatttctgattatgtttatttggatcttctttcttcttggtttgttcagctagtggtttatcaattttttttawaatctttttaaagaacaggccaggtgcagtggctcatgcctgtaatcccagcattttgggaggccaaggcgggcagatcacaaggatcagggattcgagaccagcctggccaacatag

SEQ ID NO: 566613 - DNA, 567 bp, Homo sapiens
tgtgcatgcatcatgtagttctcrtgccacggttttcagctccataaggtcatttaacgtcttctctacactgtttattctagttagccattcgtctaatcttttttcaaggtttttagcttccttttgatgggtttgaacatcctcctttagctcagagaagtttatcattaccgactttctgaagcctacttctgtcaactcatcaaagtcattcttcatctagctttgttccattgctggtgaggagctgcactcctttggaggagaaggggcgctctggtttttagaactttcagcttttctgctctggttcctcgccatctttgtggttttatctacctttggtctttgatgatggtgacgtacagatggggttttggtgtggatgtccttttttttgatgtggatgctattcctttctgtttgttggttttccttctaacagtcaggtccctcagctacaggtctgttggagtttgctggaggtccactcctgaccctgtgtgcctgggtatcactagcagagtctgcagaatagcaaatattgcagaacagcatatattg

SEQ ID NO: 566614 - DNA, 585 bp, Homo sapiens
ttgtgtcctgctgaacatataggacatcctcggtgatgacaaaaatatattaaacgtattacttttaatactctatgttaagcttatcttgcatatcttctatgttaagcttatcttaatattctatattaagcttatattattaaatagcatctaagactcataccatgttctgacacttgtcatttaaatgttgaagttcttcagggaatgatcttaagccttcttctcactagacattgtccctctctatgagactagcagatctcatccaatcccaaggattcaattatcaatggtgatgtgaatgattaccaggcttgatctgaagcctgacttttccacttagctccagttgtctaccagagatctccactaggctattttgtcaggytcttcaaacttgacatatccagagttcaactgatgatctttccagtgtcctgctctactctcacaactaactcagtaagtggcatcaccatcaatgctgtgctcaaccagaaacctgggtgttgtcctggtttcgtctttccttttactcctatatccaattagtctttggcattctacttttccaacatc

SEQ ID NO: 566615 - DNA, 522 bp, Homo sapiens
cataaaagtaggaaatattgattatattaatcctgagaaaataacctagattaatttacttatattttcctgctatataaaataatagccaacatctcactggacagcttatgttctatctactgacactgtgctcgaataatgaaacatagtaccaaaaaggaaacagattttttttttttcaatactaaacaagctaagatccgggagaatcttgtgagttaaaatagcatgttgtgattttctcaatatttaaaaacctgctttttaaagtttatttaatgttttttcctttttcaacttttatggatacataatagttgtatatatttatggggtacatgtgatattttgatacaagcatgcaatgtgtaatgatcaaatcggggtaactgggctatccatcaccacaagcatgtatcttttctttgtgttgggaacattacaactcatactttttwgaaatgtacaacaattattgttatctatagttgccctattgtgctattgaatgctagatct

SEQ ID NO: 566616 - DNA, 490 bp, Homo sapiens
aaagacttctatttatactctaaattctacactttttcccctatggttttacttttactcttgaaatacagattatgtcagaacctaccaactcagaggagtaaaaaccttaattatctgctgggagtaatacatttatgcaatgttaacaacagtcaatgattataaatcccacttctactggctcactctctcctccccatcctctccccatcaaaattaccatatcataagaacctggtcgccttttctttttttttctttttyttttttttttttgagacagagtctcgctctgtcgcccaggctggagtgcagtggcaccatctcggctcactgcaagctccgcctccagggttcacgccattctcctgcctcagcttcctgagtagctgggactacaggcacccaccaccgcgcctggctttttgtatttttatagagacagggtttcactgtggtctcgatctcttgacctcgtgatcctccc

SEQ ID NO: 566617 - DNA, 360 bp, Homo sapiens
ctctgtctttaaagaaaaaaaaaaagattcaagataaaaataataatctctctaargaacctatctaggtcttttgaaatctggagtttattgatcataaccgttattggtcataagaatggaaaaatcactgggattgggaggagactgttacaaaaacagctttccaggcacctgctctggaatctgtagttcagtacacttagagtggattaaggaacgtgtatttgttaaaacaaaaatggtttatttttgctggttcttctgatcaggcaggtttgtgaatactaccagggttaagattcttgcccaatgaagccatcatttcttctgaagtcagccatggaaaaacttttctct

SEQ ID NO: 566618 - DNA, 360 bp, Homo sapiens
ctctgtctttaaagaaaaaaaaaaagattcaagataaaaataataatctctctaaggaacctatctargtcttttgaaatctggagtttattgatcataaccgttattggtcataagaatggaaaaatcactgggattgggaggagactgttacaaaaacagctttccaggcacctgctctggaatctgtagttcagtacacttagagtggattaaggaacgtgtatttgttaaaacaaaaatggtttatttttgctggttcttctgatcaggcaggtttgtgaatactaccagggttaagattcttgcccaatgaagccatcatttcttctgaagtcagccatggaaaaacttttctct

SEQ ID NO: 566619 - DNA, 360 bp, Homo sapiens
ctctgtctttaaagaaaaaaaaaaagattcaagataaaaataataatctctctaaggaacctatctaggtcttttgaaatctggagtttattgatcataaccgttattggtcataagaatggaaaaatcactgggattgggaggagactgttacaaaaacagctttccaggcacctgctctggaatctgtagttcagtacacttagagtggattaargaacgtgtatttgttaaaacaaaaatggtttatttttgctggttcttctgatcaggcaggtttgtgaatactaccagggttaagattcttgcccaatgaagccatcatttcttctgaagtcagccatggaaaaacttttctct

SEQ ID NO: 566620 - DNA, 459 bp, Homo sapiens
tcagcagtgataaatatccaaactatatcatggggcacacagtggagctgactktacaaatcttgttcactaaatcatttttcagtttgccaagtttccatttacaatggggagagaatttgcccaaaatatcatcatccactgcaatcatcccacacttcagaaaaacataagatggctggcagccattgctccaagggaaaccgtgatgatagaaatggccaaccagtttctcttctcagtcgccctcctaccctgaaggatttgtctattcacatcagccatttcaattgtaaacatttatgtctgatagtctcatagcttagcatcccgggagagagggagagaaaagaaaatgcagaacagaaaggggtagatggaagatccccaaaggaaagcctcagcagaaggtccagggaaataaagtggaaccgctcctccatcaaagtcgtggagctg

SEQ ID NO: 566621 - DNA, 613 bp, Homo sapiens
atgcaccaccatgtcctgccaatttttgtattttttgtagaaatagggtctccctatgtctcaaactagcctgggctcaagcaatccacctacctcatcctcccaaagtgctgggattgcaggtgtgagccactgcacccagcctgaataaatgtctatttaaagacctacttgaaacatattagaattctagcctatgacaagggctagggagaaaaaagggtacaggtatcagggttgaagggtaaaaagaaaaaaaatgaaaagaaataaactacaaatagaggggccctccctgggcagatgacagtgtgctatgcattaaagaatagtgaaccacttacatctgaggtcttttaaaaaattaaaagtcaaaatgtaaaactccaaatgttgggatatgaaaagagtagtaggaaattagatagaggagagcaaaaatggggcaatacarggaggagatgtaggaggaggcagatgactgaaggagaaccagcatttcaggtattgtatcagtcaggataaaataggttatactgagttaacaaatgacctcaaatctcagtggcttaaaattaaaagggtttcttgctacttgtccgttgcaggtgga

SEQ ID NO: 566622 - DNA, 520 bp, Homo sapiens
aatagagactcttttgtgggtcttttgtgacaggtttttagtcttagaaatggcttcagcagtctaatatttatttatttatttatttatttttatcaccagtctaatatttaaaaagcaaatgarcaagcttcttgctatggtttgcagaaattttgggggtagtcctacttgtttacttttccataggaacattataatcagcctggtttctttttaagttcattatttttacgtggattgcatttaaaatttacagattaacctaagaggaggtgaaattcatgaagtactgttgggactccctatttgttctagttttcttctgagttcattgcacagtggaagtccccaggaatttaatattttttccactattataatagaagaaaatatgccattaacatcttaaaaaaattttttttaaaagacagggtctcactctatcgcccagtctggtgtgcaagcggctcgatcatagctcactgcagccttgaactcctgggctcaagcgatcctc

SEQ ID NO: 566623 - DNA, 520 bp, Homo sapiens
aatagagactcttttgtgggtcttttgtgacaggtttttagtcttagaaatggcttcagcagtctaatatttatttatttatttatttatttttatcaccagtctaatatttaaaaagcaaatgagcaagcttcttgctatggtttgcagaaattttgggggtagtcctacttgtttacttttccataggaacattataatcagcctggtttctttttaagttcattatttttacgtggattgcatttaaaatttacagattaacctaagaggaggtgaaattcatgaagtactgttgggactccctatttgttctagttttcttctgagttcattgcacagtggaagtccccaggaatttaatattttttccactattataatagaagaaaatatgccattaacatcttaaaaaaawtttttttaaaagacagggtctcactctatcgcccagtctggtgtgcaagcggctcgatcatagctcactgcagccttgaactcctgggctcaagcgatcctc

SEQ ID NO: 566624 - DNA, 553 bp, Homo sapiens
aataattttaaggctgtacacattgcagacagcaccccactgtttgaaaaactcctcctcagtagaacatggcagaccttcatcttccttccctgaaccttttccaaccttaggcttgccattctccaccagtgctaatgtcatgtctcttgaaatctgtattgaagtcagtatttcattcttgccagtttccactgtgtgtttaaatttggagtctggtgtctagcattagctggggttggrgcttccactcctctcagcattggtaagcctcctcacccaccccatcccatgtccaagatcacccagttacacacttaccatctacccagttcattcacatcatcagtcccagagctgcagagatgctctttttctacctcctacttctctggctcttagagaggcagcatgggataatggggcaagcgaatagggccttaaagtagagggacaagggttctcttccctatctgccacttattagctatgtgacctcgtgtaagtctcttttctttttgagacagggtctccctctgtcacctaggctgga

SEQ ID NO: 566625 - DNA, 638 bp, Homo sapiens
tgaaatcaaaagataagaaaaatgacaataaaaaataaaacaaagtgcttatatctaatatatatgatraacttactatgaaaacatgtaaaaatcactgtaactcatctataggagaaaacctagacttatttattgttctttatatattatgatatcataatatataaaacctcaccaaatgctttatgtacattatttcctttactccttgtaacaacctgaaacaggtaatttttgtattcccatttacagaggaagccaatgcacagagacattgagaaacaaaggtagaaatttggtggtagagttgtcttgggaccattagaactcaggtagttgtggtgataaacatgttggatctacagacacatacgaaggcaataaaaaagatgcaatcttgatagacattaaattcaaatcaaaacaattatatttccattttatgttttagtgaaaaaaagaggaaaatgttaatagctatcaagactctggagaaaaaatctgtattgattatggcattcataagttagtgtagccagtcattaagaatttcactttgggaggctgaggcggggagatcacctgaggtcaggagtttgagaccagcctggccaacatggtgaaacctcatttct

SEQ ID NO: 566626 - DNA, 638 bp, Homo sapiens
tgaaatcaaaagataagaaaaatgacaataaaaaataaaacaaagtgcttatatctaatatatatgatgaacttactatgaaaacatgtaaaaatcactgtaactcatctataggagaaaacctagacttatttattgttctttatatattatgatatcataatatataaaacctcaccaaatgctttatgtacattatttcctttactccttgtaacaacctgaaacaggtaatttttgtattcccatttacagaggaagccaatgcacagagacattgagaaacaaaggtagaaatttggtggtagagttgtcttgggaccattagaactcaggtagttgtggtgataaacatgttggatctacagacacatacgaaggcaataaaaaagatgcaatcttgatagacattaaattcaaatcaaaacaattatatttccattttatgttttagtgaaaaaaagaggaaaatrttaatagctatcaagactctggagaaaaaatctgtattgattatggcattcataagttagtgtagccagtcattaagaatttcactttgggaggctgaggcggggagatcacctgaggtcaggagtttgagaccagcctggccaacatggtgaaacctcatttct

SEQ ID NO: 566627 - DNA, 653 bp, Homo sapiens
gtgtatgtgtgcatgtgtgtatatatgtaagaatgtatgcggtttarttgctaggtgtgatattattaccattcatagtctttccttaaggacattctctgtatctatattttaatgatgtttgtggggattttctggttatgaatgaaatacatattcatggtagaaaattcaagaaaaaaacagaaaatatatacaaaagataaaaagtataagtaggccagatactgacagttattgttaacactttgatatatattctttgcattctgttttctttatgtttatatatgtatattggaattgggttatgacttttttggctattattgtcattttaaaccaaattgagctttactaaatgctgttttgcaatttattgcatttccatattatccttttaatgtctatgtgacctgaaagtgtgtcccctttttcattcctagcactcactgataatatctcaagtagatgacttttaaagtttgtttaatatgctgttttaaagatgtgaggtcttctttcatttattcattcatccttaataaatgatttgttataattcctgctagggacctgggtcgagtactttaattatattgatctatgactattgtatgaatttactagggctgccatgacaaaatgccaca

SEQ ID NO: 566628 - DNA, 390 bp, Homo sapiens
atacttttttagtttgtttatatggtatgttactttgatttatttttaaagattatttatcattcattrtgttgaaatacgcatagcgagcacttatcatgttcaccactttaggtgcacagttcaatattgagtacattcacattgctctgcaaccaacaccaccattcatctgcagaactctcttcatcttcccaaactgaagcttgggacccattaaacaataattgcgcattcccctctcctccaagcccttagtgtaaccacccaaggggttctccttgtctgctgcctagacagaactgatttatcaagacaggggaattgcaacagagaaagagtaattcatgtggagctggctgtgcagtagattggagttttattattact

SEQ ID NO: 566629 - DNA, 585 bp, Homo sapiens
acagggtttcaccatgttgccaaggctggtcttgaattcctgagctcaagcgatttgcctgcattggcctcctaaagtactggaattacaggcatcagkcaccgtgcctagcctaccttttatctcttaataaacctattaaaattcttcagtaacaaaaaatgaggtgggaaaagctagcacacttcagtgtgtgcaagtgtgtgtgtatattaaaaagcaaaggcctttggaaggatgcagagaaaagcagctgcctgtcggggagaggacactgggtggctggacccagagacagtagggacacttgcttttcctggcccagcttttcataacacctggaattttgtattatgagtattgcctattcaaaaattaactttaaagatcattgtacaaaatataatagaattctacaaagttacgaaaatgaataaggtaggtgtgtatgtgctgatatgaggagctccgcaagatacagtaagtgaataaaagcaaacaaaacaagtgtaaaacaatgtagcgaatacattaaaaaggatatgcacatatttgccttcagcaaacaaatatgtgtaatgtttt

SEQ ID NO: 566630 - DNA, 434 bp, Homo sapiens
tcaactacggggtcacatagaattaacaaaaaacggaagtttcatttcttgctgtggtttttggtacttttctaaacatcgtattttaaaatgtagcctgaatatgatctataatttttaaattattacatatactttcaagaagggcagttttataaaatttgataattgatgagtacatgaattcgcasaaaataatttgttaaactggaaagaaatttgaaatgcaacaaacgaaaatgtcaaatcacagttcagtaaggaatccttttttaatttccaaagccagattattcttaatgtgctaaaggagaggtgacttaccataggcaatggctttccctgatgacagttgataccaccaatgaagatcatgttgggcatcacgggtttgggatagtccaaaacaaagtccgttcgcaacaaccaaattg

SEQ ID NO: 566631 - DNA, 572 bp, Homo sapiens
agttttagtttatttatatggtatgttacttagatttatttttaaagcttatttattttatcattaattatggtgaaatacacatagcataaaccttgtcatcttcaccactttaggtgcacagttcagtatccagtgtattcacattgctgtgcaaccaacaccaccattcatctgcagaactctcttcatcttcccaaactgaagcttgggacccattaaacaataattgcccattcccctctcctccaagccctggtgtaaccrcccgggggattcaccttgcctgctgcctagacagagtcaatataacaagacaggggaattgcaatagagaaagagtaattaatgcagaactagccgtgtggtagaccggagttttattattactcaaatcagtctccccaagcaatttggggaacagtttttaaggaatacttggtgggttgggggaatccagtaatccaggagtgctgattggtcagggatgaaatcttaggcagttgaagctgtcttcttgcactgaatcagttcctgggtgggggccacaagagcagatgagccagtttatt

SEQ ID NO: 566632 - DNA, 608 bp, Homo sapiens
gttttgtttttgaagggatgaggtctcactatgttgcccaggctggtctcaaactcctggcctcaagcgatcctcctgcctctgcctcccaaaatgctgggattacagacgtcagccaccgtgcctcacctatggcttcttttttaacccttggctgtcagaaccctgggaacacggtgttttaatttgagttctccaagaagcagatcccagagcaagaatttgagagcaagtcatttatttggacatgatcccaagaaacacttgtggggagtagggggtgtgagacagggaagggtggaagccagtacaggagtgtgatcaagcccattacctgggattcactcctgcttgggattatccatcaagaggggtgaggtagctggggtgtttwtaagccagcttcattagtcactgaacactgcatgaattcacagccatatgggcaggtacagtaggctctgagggtcagagaagacccccagaaggataaggaagcacaggagctggcagccagatgtcaggctggcatgtactgaagttgagaacatgggcagtcagtagcagtgtctggactcacatttggccacccaaatattaatgagatt

SEQ ID NO: 566633 - DNA, 608 bp, Homo sapiens
gttttgtttttgaagggatgaggtctcactatgttgcccaggctggtctcaaactcctggcctcaagcgatcctcctgcctctgcctcccaaaatgctgggattacagacgtcagccaccgtgcctcacctatggcttcttttttaacccttggctgtcagaaccctgggaacacggtgttttaatttgagttctccaagaagcagatcccagagcaagaatttgagagcaagtcatttatttggacatgatcccaagaaacacttgtggggagtagggggtgtgagacagggaagggtggaagccagtacaggagtgtgatcaagcccattacctgggattcactcctgcttgggattatccatcaagaggggtgaggtagctggggtgtttatamgccagcttcattagtcactgaacactgcatgaattcacagccatatgggcaggtacagtaggctctgagggtcagagaagacccccagaaggataaggaagcacaggagctggcagccagatgtcaggctggcatgtactgaagttgagaacatgggcagtcagtagcagtgtctggactcacatttggccacccaaatattaatgagatt

SEQ ID NO: 566634 - DNA, 608 bp, Homo sapiens
gttttgtttttgaagggatgaggtctcactatgttgcccaggctggtctcaaactcctggcctcaagcgatcctcctgcctctgcctcccaaaatgctgggattacagacgtcagccaccgtgcctcacctatggcttcttttttaacccttggctgtcagaaccctgggaacacggtgttttaatttgagttctccaagaagcagatcccagagcaagaatttgagagcaagtcatttatttggacatgatcccaagaaacacttgtggggagtagggggtgtgagacagggaagggtggaagccagtacaggagtgtgatcaagcccattacctgggattcactcctgcttgggattatccatcaagaggggtgaggtagctggggtgtttataagccagcttcattagtcactgaacactgcatgaattcacagccatatgggcaggtasagtaggctctgagggtcagagaagacccccagaaggataaggaagcacaggagctggcagccagatgtcaggctggcatgtactgaagttgagaacatgggcagtcagtagcagtgtctggactcacatttggccacccaaatattaatgagatt

SEQ ID NO: 566635 - DNA, 608 bp, Homo sapiens
gttttgtttttgaagggatgaggtctcactatgttgcccaggctggtctcaaactcctggcctcaagcgatcctcctgcctctgcctcccaaaatgctgggattacagacgtcagccaccgtgcctcacctatggcttcttttttaacccttggctgtcagaaccctgggaacacggtgttttaatttgagttctccaagaagcagatcccagagcaagaatttgagagcaagtcatttatttggacatgatcccaagaaacacttgtggggagtagggggtgtgagacagggaagggtggaagccagtacaggagtgtgatcaagcccattacctgggattcactcctgcttgggattatccatcaagaggggtgaggtagctggggtgtttataagccagcttcattagtcactgaacactgcatgaattcacagccatatgggcaggtacagtaggctctgagggtcagagaagacccccagaaggataaggaagcacaggagctggcagccrgatgtcaggctggcatgtactgaagttgagaacatgggcagtcagtagcagtgtctggactcacatttggccacccaaatattaatgagatt

SEQ ID NO: 566636 - DNA, 264 bp, Homo sapiens
cctttgttgatttttatattttttcttcttttttcttctcwgtgtattttaaaatagactgtcttcaagctcactggttctttcctctccttgatccattttgctgttgagagcctctaatgaatttttaagttcagcaaatgtatttctaagttccaagatttctgtttaatttcttttattatttcaacttgtttgttaaatttcttcaatggctttccgaattgtttttctgtgttatcttggagatcactgagttttctt

SEQ ID NO: 566637 - DNA, 670 bp, Homo sapiens
acttaattaaacaaaacattcctccaaagaagatatacagatagccaatagcacatgaaaagatgctctacgggactaatcattagggaaacacaaatcaaaactataatgagataccattgcacacccattgtgtaccaaaaaaaataagataacaagcattggtgaggatgtggagaaattggaactcttttgcatttgttggcgggactgtaaaatggtacaaactgtggaaaatagcatggaggtttctcaaaaattaaaaatagaattaccatatggtccagcaatttaacttctgagtatacctcaaaagaattgaaagcagggtctggagagatatttgtacatccatgtccgtaggagcatcattcacatcagttaagtgtgaaacagtccaagaaaccatcaatggatgaatggataagcaaaatgtgagatatcaaatatatatatatgcacaatggaatattatccagccataaaaaggaaattatcactgactacaacatgaataaatcctgaagacatgctaattgaagtaagccagtcacagaaagacaaatactgtatgatttcacttatatgaggtacttaggrtagtcaaagtcatagagaaagaagtagaatggtggttgtcaggagctgggaggaggggggaaataggcag

SEQ ID NO: 566638 - DNA, 497 bp, Homo sapiens
tgcttataatcttatgaatatcctttgtaaagtgatgaataatttctctctcttactgttttcaacattctctctctgtctttggcattcaagagtataatatgtcttggtgtggatctctttgagttcatcttacttggagttcattgggctctttgaggtctatattcatgtcttccatcaagtttgagaggtttttagmcattatatattcaaatattctctttgcacctttctttctctactctttttctagacttccataatgtatgtgtgtgttggcctgcctgatggtgccccacaagtcccatcaagggtctctgttcagttttctttaaacttttttctttctgtccctcagatttaatagtttctactgtcctatcttctggtttactgattctttcttttgcctgctctaatctgcctttaaatctttctagtagaattttcattttagttgtgcttttcagctacagaattacttttgttttttt

SEQ ID NO: 566639 - DNA, 367 bp, Homo sapiens
ttctctttctttctctctcccgcttccctcccctcccctcccctccttctgtttctttcaccttactgggttatttcaaatgacttgtcttcaggttctgaactaatatctccttattgaattatctcattyggattttgaattgtttttctgatttctttgtattatttatctgtgttctcttgtatctcattgagtatatttaatattgttattttaaattatttgtaggcatttcacacatttcttttacattggaatctcttgctggataattatcacattacttcgaagttgtcatgtttccttgctttttcatgttttttgtgtccttatgttgatatctgcacatctgctgtaacagttg

SEQ ID NO: 566640 - DNA, 502 bp, Homo sapiens
caattaatgatgaatgaatcaataaattaattactgaacaaaacatttgatagctggagaggcagatgaattcaacagatgattgttgagagccagctgcattcaagaaacaatgctatgtattggtmatacagagacgttccttttcctcaaagaagaaacagtgtagcatcagataaaacataaatgcataattccagttaagtgtaagaaaggttgtaaataggcatatacaggatttggtaggggtaaaaagaagagagtgatcactccagcctcaggagggtaatgcatggcagtgcaactatgctgacctttggcaagtgtatacagaaactgctgaggtaacaaggataaatggagctaagttagatttcttttttcttttcccagaaagagcaattattttgccgtgcctggtaatttcatttgtcttgtctctgatgttgctgttcctgtggatagaaacatccagtgaatactttaactttgactggtgagt

SEQ ID NO: 566641 - DNA, 567 bp, Homo sapiens
ccactttttctaaccaactcatgccctatctrcagaaattaaaatatttcaaattgtgttctcctataaaatttgtattattgacctgacctcagtctttaagattttcattttcagacacctacagctgtcaacacctgacttctagaatttttcttgaaatttacaattctaacttatgttaacagtatgtgcatttttgagaaaaagctacaatgaagtaattggataacttttaacatttttttccctttatttatactgctaacagtgacatcaataagacttactttacaattttgtagtatgcaatgtcacagagaaatgatgtattttatgtagtgtctgaacacaggtgttttcttagaaattctaaaggaaactaatctttctcccttgatgctaatgactttagacatactttatcaacaaattcaaaccctagactttacaaagccaattgttataagagaagtaggatctatctaatatcattgaatactaaacaaaactatgagaatgtctagtaaagtgtgtccattgaagtaaatatatgtttaacagagt

SEQ ID NO: 566642 - DNA, 540 bp, Homo sapiens
ccccatcacccttccgccatgattgtaagtttctgcggcctccctagccatgcctcctgtacagcctgtggcactgtgagtcaattaaacctcttttctttacaaattacccagtctcgtgtagttctttatggcagtatgaggatgaactaacacacccaaattttgataatctgtcacacacacagaatgtctatttgcaataacccaaattttctgaaacaaagaacaaaaacagctaccccaaaatgttgagagacagctaatcaaagtgaaaatgaacaacagaggggatattaggtatgaattaaaatatgctggctgctccgaatttgatttctgaagaactgatgagccacctgactaggaaatttcagtggattggccttgagccactgggtcatctgtaacattcagcagaatatggggctttgaagctgtgagaaaatgagaatgagaattttgygaagaatggaatgcctccataaggaaagaaatatgttctcgatatatatatttttttaaagagccagaggtgtg

SEQ ID NO: 566643 - DNA, 284 bp, Homo sapiens
gaggtggaggttgcagtgagccgagatcatgccactgcactccagcctgggtgacagagcaagactctgtctcaaaaaaggagaaaaaagaaaaaaagaaacttcatctacccaggtttgcaattactttgtgwcttccatatgctaagcactggggaggattattgacacatggtttttgcctactgggacatgtaggtctactaaggaagactgatgtgtcttctattactgcaagatgtaaggtataggaaaggaatggtgactactacaacaatggaagg

SEQ ID NO: 566644 - DNA, 561 bp, Homo sapiens
gaccctttttcaaaaaaaaaaaaaaaattgtagatggagagcragaggcaaaggggagcaagaaaaagggaaaacaagaaaggaagggcctccttcactggctgcctttgtcctgacacctcctttatttgagttactaacatggggttccagaaggtatttttccataaaaaaacattgaaatcattagctgaactggatagtctactccattatgtcttggataggttctgaccttcacacatggccccggagaataagaaactgaagaaagcagtttttatggcaaaaaaaagaaatgtaacgaggaaggacatatctggcttggtgagccaaggttttgcatgagagacagctttggcagaaaatatgtttggctgcatttttttaaaacccaaatgaaatagctttattttactaagtcccttgggtaaaatgtgtatgtttttacaatatatattacctacactattaagtagaaaaatgtcagtagcaaattggcacagcttcttagactcctaatatgtatgcctagtgttccattattggaatgctaagctt

SEQ ID NO: 566645 - DNA, 561 bp, Homo sapiens
gaccctttttcaaaaaaaaaaaaaaaattgtagatggagagcaagaggcaaaggggagcaagaaaaagggaaaacaagaaaggaagggcctccttcactggctgcctttgtcctgacacctcctttatttgagttactaacatggggttccagaaggtatttttccataaaaaaacawtgaaatcattagctgaactggatagtctactccattatgtcttggataggttctgaccttcacacatggccccggagaataagaaactgaagaaagcagtttttatggcaaaaaaaagaaatgtaacgaggaaggacatatctggcttggtgagccaaggttttgcatgagagacagctttggcagaaaatatgtttggctgcatttttttaaaacccaaatgaaatagctttattttactaagtcccttgggtaaaatgtgtatgtttttacaatatatattacctacactattaagtagaaaaatgtcagtagcaaattggcacagcttcttagactcctaatatgtatgcctagtgttccattattggaatgctaagctt

SEQ ID NO: 566646 - DNA, 561 bp, Homo sapiens
gaccctttttcaaaaaaaaaaaaaaaattgtagatggagagcaagaggcaaaggggagcaagaaaaagggaaaacaagaaaggaagggcctccttcactggctgcctttgtcctgacacctcctttatttgagttactaacatggggttccagaaggtatttttccataaaaaaacattgaaatcattagctgaactggatagtctactccattatgtcttggataggttctgaccttcacayatggccccggagaataagaaactgaagaaagcagtttttatggcaaaaaaaagaaatgtaacgaggaaggacatatctggcttggtgagccaaggttttgcatgagagacagctttggcagaaaatatgtttggctgcatttttttaaaacccaaatgaaatagctttattttactaagtcccttgggtaaaatgtgtatgtttttacaatatatattacctacactattaagtagaaaaatgtcagtagcaaattggcacagcttcttagactcctaatatgtatgcctagtgttccattattggaatgctaagctt

SEQ ID NO: 566647 - DNA, 607 bp, Homo sapiens
aataaaatctttgatgtgctcattttatatttatatatgacagtcataatgtttccttattttgaaaactgttttttaacactatatagtttctattttctagatttcctatcataaggatgtacaggtaatttagtaaactttttaaggataacatgcatgcagaaaagtaggtaagtttacagttcaatgaattttcacaaaatcaacacctatgtaacctatgtgagtatgatcaaggaaaagaacaatattaccacccaaaagtagctcttgtgccttcctcttggtcactactatctccaccatcccaacaggtaaacaccatcctgacttccaacatcactgatttattttgtctgattttcaattttatataaatggaatcatataatgtgttctcatttgtgcctggcttactttgctcaccattatgtttgtgagattcatacatgtgattgcacaaagttttagttccttcattctccttgttatgtagtgtccgttatatgaataggtcacaggtgatccactcgcctcagcctcctaaggtactaggattacaggcrtgagctaccatgcctggcctgattttaatttaaaaaaa

SEQ ID NO: 566648 - DNA, 586 bp, Homo sapiens
gttttttatttttatttttgtagagacagtgtctcactatgttgcctaggctggtcttgaactcctgaactcaagcaatccttctgcctggccttccaaaatgctgggattacaggtgtgagccatggttcscagccagagtttaaaattggatatgacagttggactggtgggttagaattccagtttctccccactgaggccagggtccataatctgagcatatctagttcatcttctccagatcagtttggtgactccctactcagtctccatctcagaagtagggacagaaggaagaatctgaaagcaggaggaccagaaaatatgctttcaatacctcttttactatcaaatatcatagagtctaagggacacattaaagggctatcatgagtgattaaaggccaaaaagagtggaaatgactagcagggtttacacttgactttctgcaagtgagcagtgatccaacaaagatggtgaggtagggtggagtgggtgagggtggtgcggagattcagtacaggcccagcccagcaggtttagtgggggtgaggcatgggaatagtggtgaagatagtattg

SEQ ID NO: 566649 - DNA, 586 bp, Homo sapiens
gttttttatttttatttttgtagagacagtgtctcactatgttgcctaggctggtcttgaactcctgaactcaagcaatccttctgcctggccttccaaaatgctgggattacaggtgtgagccatggttcgcagccagagtttaaaattggatatgacagttggactggtgggttagaattccagtttctccccactgaggccagggtccataatctgagcatatctagttcatcttctccagatcagtttggtgactccctactcagtctccatctcagaagtagggacagaaggaagaatctgaaagcaggaggaccagaaaatatgctttcaatacctcttttactatcaaatatcatagagtctaagggacacattaaagggctatcatgagtgattaaaggccaaaaagagtggaaatgacyagcagggtttacacttgactttctgcaagtgagcagtgatccaacaaagatggtgaggtagggtggagtgggtgagggtggtgcggagattcagtacaggcccagcccagcaggtttagtgggggtgaggcatgggaatagtggtgaagatagtattg

SEQ ID NO: 566650 - DNA, 546 bp, Homo sapiens
gactgttagaaggaaaactaacaaacagaaagcaataacatcaacatcaacaaaaaggacatcaacacaaaaaccccatccaaaggtcatcagcatcaaagatcaaaggtacataaatccatgaagatgaggaaaaaccagcacaaaaatgctgaaaattccaaaaacaagaatgcctcttctcctccaaaggatcacaactccttgccagcaagggaacaaaactggatggagaaggagtttgatgaattgacasaagtaggcttcagaaggtgcataataacaaactcctccgcgctaaaggagcatgttctaacccaatgcaagcaagctaagaaccttgataaaaggttacaggaactgctaactagagtaaccagtttagagaacataaatgacctgatggaactgaaaaacacagcacgagaactttgtgaagcatacacaggtatcaatacccgaatcaatcaagcagaagataggatatcagagactgaagatcaacttaatgaaataaagcatgaagacaagattagagaaaaaaga

SEQ ID NO: 566651 - DNA, 592 bp, Homo sapiens
ttttttcagtttgttttaatcatggcaggatgttgaattttatcaaatgctttttcagcatcaaataaaatgattatgtggcttttgtccttcatcctgttgatatgatgtatcacactgattgatttgcaaatgttgaaccatccttgcatccataaaatcaatcccacttggtaatkatgatctttgtaatatattattgaattcagtttgctagtattttgttaagaatttttgcattaatttttatcagagatgttggcctgtagttttctttttttgaacatgtctttgtctggtttgggttttaaggtaatactggcctcgtagaatgagtttggaagtatggaagtattccctcctatttttcaaaacaatttgagtaggattagcattagttcttctttacatgtttggtagaattcagcaatgaagccatcaggtcccaggtctctgctggcagacattttattaatggctttgatcttgtcaattgttgttggtctgtttaggttttggatttcctcatggctcaacattggtaggttttatgtgtctaggaatatatccatttcctctaggttttccaatt

SEQ ID NO: 566652 - DNA, 592 bp, Homo sapiens
ttttttcagtttgttttaatcatggcaggatgttgaattttatcaaatgctttttcagcatcaaataaaatgattatgtggcttttgtccttcatcctgttgatatgatgtatcacactgattgatttgcaaatgttgaaccatccttgcatccataaaatcaatcccacttggtaattatgatctttgtaatatattattgaattcagtttgctagtattttgttaagaatttttgcattaatttttatcagagatgttggcctgtagttttctttttttgaacatgtctttgtctggtttgggttttaaggtaatactggcctygtagaatgagtttggaagtatggaagtattccctcctatttttcaaaacaatttgagtaggattagcattagttcttctttacatgtttggtagaattcagcaatgaagccatcaggtcccaggtctctgctggcagacattttattaatggctttgatcttgtcaattgttgttggtctgtttaggttttggatttcctcatggctcaacattggtaggttttatgtgtctaggaatatatccatttcctctaggttttccaatt

SEQ ID NO: 566653 - DNA, 560 bp, Homo sapiens
ttcttcaaatcattgtttgtcattagctccctggagaaaatggaggggctgagatattagtgagaaaacataaagtyaattgggtgatggagactgggagaaggggaatgttagaagaaagtgagcgaggtctgctaaaagtgaactttatcttcttctcaattttgcctaagactcgtgttgcctgggcagtctctttttggaagagaaattttcatgacagtttgggccagagatggcaaataaatgcctgacatggttgctgccagcccctgtctcccgacacgttcacaagggtgcacaccacttctcctctctgtgaccatagactcagacccattgcaatccagcatcctgcatggccccattggtcagagttgacatttgcaatgaagctgcttccctatgcctggttaggccttttgctatgaattctctggagttaactatttccaaggggctccatcttattcttgtgatttccacgggatttggagccccagaagacaatcccatgtggattcacaaaatgccctctaaatttgatggctgtcagtgca

SEQ ID NO: 566654 - DNA, 432 bp, Homo sapiens
actacctagagacagtaaagtcttctatgaatagacttcttttttttgagataggggtcttgctgtgttgcccaggctgggctcaagcgatcctcctgcctcagcctccccagcagctgggaccacaggygtaggcaagcatgctccaccaaatggcctttaacggaatgtacagggtaagaggtaatacaacattgattccaaatactgaatttcagtatcaaacgatttaatctgtttgttctaattcatcactctatactaataaaatagtatacagttgtatcagcttaaaagtcacaaaataattaatcaaagatgctcctcaaatgctaaatgatagaagccatgggcaggactgtccatccagtgcctggcacacccaggaaaacgagatgtcacagccaatgaatgctgaacactcaagggaag

SEQ ID NO: 566655 - DNA, 545 bp, Homo sapiens
aagagtaaatattaaatagaccaatattatttgcttcagcttttttgtttaattattattattatttttttttttatttttttttttttgagaccaagtctttctctgttgcccaggctggagtggagtgcagtggtgcgaccttggctcactgcaacctccacctctaggttcaagcaattctcatgcctcagcctccygagtagctgggattacaggtgcccaccaccatgcctggctaatttttgtatttttagtagaggtgaggtttcactgtcttggccaggctggtctcaaactcaagtgatccacccaccttggcctttcaaggtgctgggattacaggcgtgagccaccatacccagcctgtttaattctttataattcacttctgttgtgaaaacagcattttatacttaagcttaatgattgcaacagtcaaaattatttattttttaaacttcacttatcatttaggaattattttcccgtaaggaccaaatctacttttattatttaaaaaatttactttttggaggagctaa

SEQ ID NO: 566656 - DNA, 545 bp, Homo sapiens
aagagtaaatattaaatagaccaatattatttgcttcagcttttttgtttaattattattattatttttttttttatttttttttttttgagaccaagtctttctctgttgcccaggctggagtggagtgcagtggtgcgaccttggctcactgcaacctccacctctaggttcaagcaattctcatgcctcagcctcctgagtagctgggattacaggtgcccaccaccrtgcctggctaatttttgtatttttagtagaggtgaggtttcactgtcttggccaggctggtctcaaactcaagtgatccacccaccttggcctttcaaggtgctgggattacaggcgtgagccaccatacccagcctgtttaattctttataattcacttctgttgtgaaaacagcattttatacttaagcttaatgattgcaacagtcaaaattatttattttttaaacttcacttatcatttaggaattattttcccgtaaggaccaaatctacttttattatttaaaaaatttactttttggaggagctaa

SEQ ID NO: 566657 - DNA, 514 bp, Homo sapiens
catcaacaatgttgagatttttaatttcaaatgatgtctgaagcactgcctgaaacctctttcaatatcaataaaatgacttatcagataaatttaatagttatcaaataaaaacaatttgaggaagaaactataatgtgttataagttgtgacaaaaacaattacttggagttgagtaacacgtttcacttgagtgaaatctaatattctccctttaaattctttttgtgcatttttccataaatttaccaaatagtgatatctatacttataatatcttaattactcagactaccacagcaaaaataacatatgaaaacatacatagtttacatataaactacacatatagtttacataaacatagtttacataaatacatagtttaatgcaattctactaaataaaatttgaaacaccaactcatctatgtgaaataaataacccaaactgactacaactaaataaagccacactgggatgggggtrgggggtgggtaggacagggagttc

SEQ ID NO: 566658 - DNA, 347 bp, Homo sapiens
gcttgaattctgtctgtacccctgataagcacatgtccctgaggaaatcccttaattttttaagcaaatttcctgtcatraaaagtgagaagaatgttacatatttcagagggccattgtgagatttaaataatataaagtgttaaatttcttggcacattccttgatatatactaggggtccttaataaatgtttattgaggtcaggcatggtggctcacgctggtaattccaacactttgggatgctgaggtgggcggattacctgaggtcaggagtttgagaccagcctggccaacatggtgaaaccctgtctctactaaaaatacaaaaattagctgggcatg

SEQ ID NO: 566659 - DNA, 545 bp, Homo sapiens
tttgttaaacataataaataaagtaaatgtttttatctccaagacctcttgagacctaagtcactaaagattaaattaaacagggtaaaattctaaaaggactaatgatgatgataacaaataagagatgtcacccaagacagaagggccagggtaactgattaagccaagtggagatagctgaagcctaaccagytccagtgataaaagtctccagggatggaaatcaaagaaagatgtcttacactttcacatgcacgagaatcacctggtgatgcccagattccaagtcaacagatctggggtggagcctgaagtgctgcatttctaacaagctccctggtgatggggcagaggctgatggtctatggttcacactttgagtagagaggctttagactagagaatgccagaaatgtttgacaactgtaggcaccagacacctctggaggtcagggtgtaaagttcagctggaacaggatactggtccaaagtctgtacaaggaacatgaacacctccagattgggtccccgaaaccaggtga

SEQ ID NO: 566660 - DNA, 611 bp, Homo sapiens
gggaggatcccttgagcccaagagtttaagactgcagtgggtaggtggggaggcaatcagtaagaaatttccaggctaggcttgagatagaaccaaccatccaagataacctctccctactgatgcccttgaagtcacctttgacagatgcaccctaaatggaaaatgaagtaaaaagatacaggcagcaggtaaacctggcactgcctagagctctagcattgtgtgggtatccaaaatattcaaacyatctaaagaggtgaccaaccctgacactgactcattggaggagttccacaaactcctacaaatctcagctttggaataaaataatcaacatgagaaaaaaatattggaaatctcttctatgttatgaattcataactcatgtttcaaaatgcattgcccttcaaaagataccataaataaaaggcaagccatagactaggggaaaatgtttgcaagtcattaaacccacaaaggatttgtataaagaactcttaaaactcaatagtacaaaaataaacacaactttaaaatgtgcaaaagatctaaacagatatctaccaatacataaattaccaataatcaaatgataatgcaacatcatt

SEQ ID NO: 566661 - DNA, 597 bp, Homo sapiens
ctgagctatatgaaactcaaaagcattatgccaagtggaagaagttagccacaaataccacatattgggtgattccacttatatgaaatgttctgaaaaggcaaatctattgcgacagaaaatagattagtggtggttgcctgggactgggagtacaagggagtgaaagcatatggcctgtccacagttgctctgtttgctccacagggaactcagctcacaactgaggttctctctctgatgcattcagaaggatggaacatacattaaagaacagataactgatactcaagatatttcatgatagaagcaaacactgaggtaatgttccattccgtgtgagcccagagccaactccttcatatggggagggtattttgtaattctcttctctttgtatgcttccaaaatatattgtaatgactactgattgatttaaaattttgcagcaaaccttttatactttctttattaacccctgaaaagactgcaaaaacataaracatttctattaagatatactagttttggcctggcacagtggctcacgcctgtaatcccagcactttggaaggccgaggcaggcggatcacaaga

SEQ ID NO: 566662 - DNA, 582 bp, Homo sapiens
ttcctctccaagggattcatagtcccttgcactagcccctgcagcatgcccatactgcctgtccagaaaccaaatggaaagggatggaggtctcaagacctaagagccattaacaatattgttatacctcagcaccccactacgccagacccacatacaatcctaacacacctgttgacacttgatgttcctcagctattgatctcagtggcacctctttcagcatccctgtcaacccaggaagtcagtttctctttgccttcacrtggaaaggcaaacagttcacctgcacagtccttctccagggatacagattgcctcacttgtttttctcacattttacaagctgatttaaggggcatgatcttcccccacaactctaccctgttacaatgcattgatgatttcctttttttttttgtttaaatgggatctcactctgtcacccagactggagtgcagtggtgcaatcttggctcactgcagcctcagcctcccaagtagctgggacggttggtagatgcacactaaagacccagctaatttttggagagatggggtctccctgtgtttcccaggctg

SEQ ID NO: 566663 - DNA, 582 bp, Homo sapiens
ttcctctccaagggattcatagtcccttgcactagcccctgcagcatgcccatactgcctgtccagaaaccaaatggaaagggatggaggtctcaagacctaagagccattaacaatattgttatacctcagcaccccactacgccagacccacatacaatcctaacacacctkttgacacttgatgttcctcagctattgatctcagtggcacctctttcagcatccctgtcaacccaggaagtcagtttctctttgccttcacgtggaaaggcaaacagttcacctgcacagtccttctccagggatacagattgcctcacttgtttttctcacattttacaagctgatttaaggggcatgatcttcccccacaactctaccctgttacaatgcattgatgatttcctttttttttttgtttaaatgggatctcactctgtcacccagactggagtgcagtggtgcaatcttggctcactgcagcctcagcctcccaagtagctgggacggttggtagatgcacactaaagacccagctaatttttggagagatggggtctccctgtgtttcccaggctg

SEQ ID NO: 566664 - DNA, 582 bp, Homo sapiens
ttcctctccaagggattcatagtcccttgcactagcccctgcagcatgcccatactgcctgtccagaaaccaaatggaaagggatggaggtctcaagacctaagagccattaacaatattgttatacctcagcaccccactaygccagacccacatacaatcctaacacacctgttgacacttgatgttcctcagctattgatctcagtggcacctctttcagcatccctgtcaacccaggaagtcagtttctctttgccttcacgtggaaaggcaaacagttcacctgcacagtccttctccagggatacagattgcctcacttgtttttctcacattttacaagctgatttaaggggcatgatcttcccccacaactctaccctgttacaatgcattgatgatttcctttttttttttgtttaaatgggatctcactctgtcacccagactggagtgcagtggtgcaatcttggctcactgcagcctcagcctcccaagtagctgggacggttggtagatgcacactaaagacccagctaatttttggagagatggggtctccctgtgtttcccaggctg

SEQ ID NO: 566665 - DNA, 639 bp, Homo sapiens
  misc_feature 616, 617, 618, 619, 620, 621, 622, 623, 624, 625, 626, 627,628, 629, 630, 631, 632, 633, 634, 635, 636, 637, 638, 639: n = A,T,C or G
tttgtataacaatgaagttttcaaaggttgtgtggctaaccacaaataaaagtcttaccatataaaaccccatggaacatactcaaacagaaagtgaagtcattagcccaaaatctgtatgataaatttttaaaaatcattttgctgtttgacttaagaaagacaaaataatgcttatagatactcccattcttgatgtgtatactttccttataatgaaaaatatgcatcaaaatcacacacttggaaaaggtctattttgttagactatttrcatttataattagggtagaggaatctattctttatttatcagagtttacaataaaattgctttgggaaagacaattaccttaatttctctcggttttctgactataattcaccttataagacacctctcctagaaggtgacatgaaaggatgcctgcaaattatcaagcctagcacttgttcctcatgtttgctgctaaaaccagatcttttattttatacagttcctgtcaggaatgtaggcagaagcagcagattttgatatgtattgctatcagggcacttagaaataaattataatttaatataaattaaacatttgaatttaaatacaggactgaannnnnnnnnnnnnnnnnnnnnnnn

SEQ ID NO: 566666 - DNA, 591 bp, Homo sapiens
gcacatacacccccgaatgtctgagaaaaaataaaataaaataaaaacaaaaatttgaaaatacacatgatgttaggttagtagttattaaggtaaagagaacaaactgtgcttctgggtgcttggtagtgttctgtttcacagtagtctactttatgaaaatttattctgtgttaaatattaaaagcagttattataaatatactatatcatacaaactaccttctctgctacgtaattgtggtttaagataatatcataatggtaattatcaaacacatagaactgaaaaaaatttccactaacaattcgtaagtatagccatccctcamgtgtgtttcattgtagtcagaaaaaatctcaggtctagaaattaatttaaagttgtctcagatttgtagtgtcctctttcaatagtcatgaaagtgaaaatctttcaggaataacttattttccatttaggccacacagaatttccaaaaataaaattccaatgaaaatgagaaacatatattttaaaatattaaaacaaacaagtaaataagacactatgagagacagcagaaaaaaatagataacagacttagaaca

SEQ ID NO: 566667 - DNA, 462 bp, Homo sapiens
gtttatcttttttctcaacttcttttgcattacatttgaattgtttgtttgtgtgtgtgttttgtcgttaacagtttcccccccattagcttgctaactaaatactttttctaatatatttttcatcccagaggtgacaatgtgaattatcgacttattaaaatatcatataaattaatatattttcaatagtcagataatttagggtcttcagaatggcacactctagccttttgttttattacattctgttaagcattacttcaaatctcttaaatctcaaaaagcattattatcattgttcataaaatcaatatttactcaaagttatttaaataattttactttttattgctctttatttctgcatttcatttttctcaccatctgagatcattttccttcyacttgaaaaaaatatatttctattagttagggttttacgttggctggtcataaatt

SEQ ID NO: 566668 - DNA, 644 bp, Homo sapiens
ctagctctgttgccagactggagtgcaatggcgtgatctctgctcactgcaacctccgcctcccaggttcaagcgattctcccgcctcagcctccagagtagctgggattacaggcacacgccaccacacccagttaattttgtttgtttttgtggttgtagtagagatggggtttcaccatgttggccaggatggtctcgatctcctgacctcgagatccacccacctcagcctcccaaagtgctgggattacaggtgtgagccaccgtgcccrgccaaacccaataaataactctattatacgtatttgccccactgatcctataaaaaagaaaacaaactttacccaaaacacaattgatagttttaagaattgaatctgtcgaggaaaaaagttttggggtagggacagggtgacaaggaaggaagttataattaaactgtgaactccaaactgtatgatattttcctactgatggaaacatactttttggaagaggttcaggtaggctttttgttttcagttgtctttcctattccccaaaagcagttccagtccttgctcaactgggtcctgtcagattctcctcatcagaaagaccctgttagtaactgtggctgctgtcagtggagggaggacggg

SEQ ID NO: 566669 - DNA, 644 bp, Homo sapiens
ctagctctgttgccagactggagtgcaatggcgtgatctctgctcactgcaacctccgcctcccaggttcaagcgattctcccgcctcagcctccagagtagctgggattacaggcacacgccaccacacccagttaattttgtttgtttttgtggttgtagtagagatggggtttcaccatgttggccaggatggtctcgatctcctgacctcgagatccacccacctcagcctcccaaagtgctgggattacaggtgtgagccaccgtgcccggccaaacccaataaataactctattatacgtatttgccccactgatcctataaaaaagaaaacaaactttacccaaaacacaattgatagttttaagaattgaatctgtckaggaaaaaagttttggggtagggacagggtgacaaggaaggaagttataattaaactgtgaactccaaactgtatgatattttcctactgatggaaacatactttttggaagaggttcaggtaggctttttgttttcagttgtctttcctattccccaaaagcagttccagtccttgctcaactgggtcctgtcagattctcctcatcagaaagaccctgttagtaactgtggctgctgtcagtggagggaggacggg

SEQ ID NO: 566670 - DNA, 383 bp, Homo sapiens
ttactaggtatatacccaaaggattataaatcatgctactataaagacacatgcatgcatatgtttattgtggcagtattcacagattctctttttttctatccatgaacatggaatgtttttccatttgtttgyatcatctctgatttctttgagctgtgtttgtaagtttcattgtagggatcttttcccttcttgcctagctgtattgctaggtattttattctttttatgacaattgtgaatgagattacatttcttatttggctcttggcttggatgctgttggtgtatatgagtgctagtaatttttgtatattgatttcatgttgtgaaactatgctaaagttgtttatcagctgaaggagcttttgggctgagac

SEQ ID NO: 566671 - DNA, 383 bp, Homo sapiens
ttactaggtatatacccaaaggattataaatcatgctactataaagacacatgcatgcatatgtttattgtggcagtattcacagattctctttttttctatccatgaacatggaatgtttttccatttgtttgtatcatctctgatttctttgagctgtgtttktaagtttcattgtagggatcttttcccttcttgcctagctgtattgctaggtattttattctttttatgacaattgtgaatgagattacatttcttatttggctcttggcttggatgctgttggtgtatatgagtgctagtaatttttgtatattgatttcatgttgtgaaactatgctaaagttgtttatcagctgaaggagcttttgggctgagac

SEQ ID NO: 566672 - DNA, 383 bp, Homo sapiens
ttactaggtatatacccaaaggattataaatcatgctactataaagacacatgcatgcatatgtttattgtggcagtattcacagattctctttttttctatccatgaacatggaatgtttttccatttgtttgtatcatctctgatttctttgagctgtgtttgtaagtttcattgtagggatcttttcccttcttgcctagctgtattgctaggtattttattctttttatgacaattgtgaatgagattacatttcttatttggctcttggcttggatgctgttggtgtatatgagtgctagtaatttttgtatattgatttcatgttgtgaaactatgctraagttgtttatcagctgaaggagcttttgggctgagac

SEQ ID NO: 566673 - DNA, 600 bp, Homo sapiens
ggcaaattgcttacctttcctgagtttcagtttcctcaactgttaagtggagataataatagataataatcaataaagttgtccttaaggtgaattgcaaataatcaacatgctaataattgctatttttatgtttatctgattatgttaaaattgtgtgttctaggctgatgtggtggcttatgcttgtaaccctagcacttggaaggctgaggctggcagattgcttgagaccaggtgttggagaccagcctgggtaacatactgagacctcatttctaaaaaaaaaaaaaaaaattgctgggcacacagtggctcaygcctgcaatcacagcactttgggaggccaaggtgggtacatcacctgaggtcaggagttcgagaccaggctggtcagcatggtgaaaccctgtctctactaaaaatacaaaaattagtcaggcctggtcgtgggtgcctgtgatcccagttacttgggaggctaaggcaagagaatctcttgaacccgggaggcggagtttgcagtgagctgagatcatgccactgcacgccagcctgggagacagagtgagactgtctcaaaaaaaaaaaacaaaaaaa

SEQ ID NO: 566674 - DNA, 600 bp, Homo sapiens
ggcaaattgcttacctttcctgagtttcagtttcctcaactgttaagtggagataataatagataataatcaataaagttgtccttaaggtgaattgcaaataatcaacatgctaataattgctatttttatgtttatctgattatgttaaaattgtgtgttctaggctgatgtggtggcttatgcttgtaaccctagcacttggaaggctgaggctggcagattgcttgagaccaggtgttggagaccagcctgggtaacatactgagacctcatttctaaaaaaaaaaaaaaaaattgctgggcacacagtggctcacgcctgcaatcacagcactttgggaggccaaggtgggtacatcacctgaggtcaggagttcgagaccaggctggtcagcatggtgaaaccctgtctctactaaaaatacaaaaattagtcaggcctggtcgtgggtgcctgtgatcccagttacttgggaggctaaggcaagagaatctcttgaaccygggaggcggagtttgcagtgagctgagatcatgccactgcacgccagcctgggagacagagtgagactgtctcaaaaaaaaaaaacaaaaaaa

SEQ ID NO: 566675 - DNA, 600 bp, Homo sapiens
ggcaaattgcttacctttcctgagtttcagtttcctcaactgttaagtggagataataatagataataatcaataaagttgtccttaaggtgaattgcaaataatcaacatgctaataattgctatttttatgtttatctgattatgttaaaattgtgtgttctaggctgatgtggtggcttatgcttgtaaccctagcacttggaaggctgaggctggcagattgcttgagaccaggtgttggagaccagcctgggtaacatactgagacctcatttctaaaaaaaaaaaaaaaaattgctgggcacacagtggctcacgcctgcaatcacagcactttgggaggccaaggtgggtacatcacctgaggtcaggagttcgagaccaggctggtcagcatggtgaaaccctgtctctactaaaaatacaaaaattagtcaggcctggtcgtgggtgcctgtgatcccagttacttgggaggctaaggcaagagaatctcttgaacccgggaggcggagkttgcagtgagctgagatcatgccactgcacgccagcctgggagacagagtgagactgtctcaaaaaaaaaaaacaaaaaaa

SEQ ID NO: 566676 - DNA, 586 bp, Homo sapiens
gactatgaacagaccaataacaagccacaagattgaaacagtgataaaaacacagccaagaggctgagcatggtagttcacgcctgtaatcccagcactttgggaggctaaggtgggtagatcacttaaggtcaggagtttgagaccttgctggccaacttggcaaaacctcatttctactaaaaacacaaaaattagccaggtgtggtggcatgtacgtgtagtcccatctacttcggaggctgaggcaggagaatcacttgaacccaagaagcaaaggttacaatgagctgagatcwtgccactgcactccagcctgggtgacagagtgagactccacctaaaaataaataaataaataaataaagccaacaacaaaaaaaagtctaggaccagacgggttcacagctgaattatatcagacattcaaataagaattggtaccaatcctattgacactattccaaaagatagagagagagggcatcttccctaaatcattctatgaggccagtatcaccctaataccaaaaccaggaaaggacattaaccaaaaaagaaaactatagaccaatatccctgatga

SEQ ID NO: 566677 - DNA, 551 bp, Homo sapiens
tgatgtaaaccacatacatcatttacaaatttttaagtaaccacattaaaaaaaaaagcaggtgaaaataatctaaataacatattttccttagtcaactatatccaaatattttcatttcaacatgtaagtataaaaattatcaattgaatgttttacattatttttcacactaaatcttcaacatttaatttgtattgcacacttactgcacatcttatccacaccatccacatttcaagtgctcagtagccacaagtggctcactgatgccataccggacagcttagatttctmcccgtacagaaaattctagaggaaaatgccaggattattgtttcaaaaatattatgtaagattgtagagcttcagtggtagagcaaacctagcaagagttgagacaggaggaattaagattgtcttagtctgttttgtgtcactataaagaatatctgaggctgtgtaatttattaagaaaaaatgattatttggcttatgattcttctggctagaaggttcaagactggcatctggtgatggcctcaggctgc

SEQ ID NO: 566678 - DNA, 592 bp, Homo sapiens
gggttttctgtgtatgagatcatgttgtctgcaaacaggaacaatttgacttcatgtttttcaatttgcatgatttctatttttttttcttgcctaattgctctggctaggacttctagtactatattgaataggattgatgaaaggaatatctttgtcttgttcctgatcttagataaaaagttttcagcttttcctgttcaatatgttcttagctgtgagtttgtaatatctggcctttatggtgtggaggtacataccttctgtaacaaatgtgttgrcagttgttaccataaagaaatgttgaaagttgtcaaatgctctttctgcatctgctgaagtgatcatatggtttctgtctttttgttaatatggcatatcatgtttattaacttgcatatgctgaatcattcttacatccctgggataaatcccacttagtcacagtgaatgatctttttaattttctgttgaatttggtttgataacatcttgttgagaatttttgcatctgtatttaccaaggatactggcctgtagttttcctttttgttcttgtgtctaccttatattgcaaccagggtaatgctag

SEQ ID NO: 566679 - DNA, 449 bp, Homo sapiens
ctgctgcataatatacacacacttctcctcttcgtgacaaagagtaatgtgccctgatttgctgtgtgaccctgggcaggwgactcaccctctctgttcttcacatctgtaaaaatgggggagcttcgtggggttactgtgaagatcaaatgagataatatatgtgagatgactaagaacagtgtctgtcaccaaaacaatctggatttctcccctgtcctcagtgatacaatccttctccaccttcagtataaaaaaaaaaagctttgggctcacatcagttttattcacaatagctaaaatgtggaagcaaacaaagtgtccatcaacagacacatggataaacaaaatgtgatctatccatacaatggaatataaatcagccataaaacggaatgaaattatgacacaggctacgtcatgtagaaaccttgaaaacattatgctaa

SEQ ID NO: 566680 - DNA, 359 bp, Homo sapiens
aggaaatttattttaacttatcaccttgcaggctgagcttgcattttccgggtttcagtggcaaggacaatttaataccatatcttcaaagtaattttayttaaattgtatttttgcactttcattttaaagtgagcgtgcctgatagttgaggagcccaaattgctctgagtcaactagtgaaacctgattatgaagacttaataagaaaaatttgaaaactaacttgaatctccatcttttctccatagccaaacaccttcactggctaagagtatgggccctggaatcagactgcctgggttttgatcctagaaccatcattttcttttctctttcttcttcttcttttttttttt

SEQ ID NO: 566681 - DNA, 423 bp, Homo sapiens
ggtgcacaccacaatgcctggctaatttttaattttattgtagagaggaagtctccctatgttgcccaggctggtcttgatttcctaggctcaagtgatccttctgccccagcctcccaaagtgctggggttactggcatgagccactgygaacagcctataatttcaacttttattttagatgtaggggatacatgtgcaggtttgttacatgggtatgttgtctgttgctgatgtttggggtatgactggttctgtcacccaaatagtgagcatagtttgtcagcccttttgtctctccctctctctcatctagcagtccccgttttttgtttttttttttttttgagacagagtcttgctctgttgcccaggctggagtgcagtggcatgatcttggctcactgcaacctccaccttcca

SEQ ID NO: 566682 - DNA, 423 bp, Homo sapiens
ggtgcacaccacaatgcctggctaatttttaattttattgtagagaggaagtctccctatgttgcccaggctggtcttgatttcctaggctcaagtgatccttctgccccagcctcccaaagtgctggggttactggcatgagccactgtgaacagcctataatttcaacttttattttagatgtaggggatacatgtgcaggtttgttacatgggtatgttgtctgttgctgatgtttggggtatgactggttctgtcacccaaatagtgagcatagtttgtcagcccttttgtctctccctctctctcatctagcagtccccgttttttktttttttttttttttgagacagagtcttgctctgttgcccaggctggagtgcagtggcatgatcttggctcactgcaacctccaccttcca

SEQ ID NO: 566683 - DNA, 399 bp, Homo sapiens
attgagttaagaaaatgtggtacatatacaccatggattactatgcagctataaaaaagaatgagatcatgtcctttgcagagacatgggtggaactggaggccattatccttagcaaactaacgcaggaagagaaaaaccaaatactgcgtgttttcacttataagtgggagctaagtgatgagaacacaggaamacacagaggggaacaacacatactgggaccttttggagagtggagggtgggaggagagagatgatcaggaaaaataactaatggacactaggcttaataccttggtgatgaaataatctgtacaacaagtttacctatgtaacaaacctgcacttacacccctgaacttaaaataaaagtgaaaaaaaaaaaaaaaaagaaac

SEQ ID NO: 566684 - DNA, 399 bp, Homo sapiens
attgagttaagaaaatgtggtacatatacaccatggattactatgcagctataaaaaagaatgagatcatgtcctttgcagagacatgggtggaactggaggccattatccttagcaaactaacgcaggaagagaaaaaccaaatactgcgtgttttcacttataagtgggagctaagtgatgagaacacaggaaaacacagaggggaacaacacatactgggaccttttggagagtggagggtgggaggagagagatgatcaggaaaaataactaatggacactaggcttaataccttkgtgatgaaataatctgtacaacaagtttacctatgtaacaaacctgcacttacacccctgaacttaaaataaaagtgaaaaaaaaaaaaaaaaagaaac

SEQ ID NO: 566685 - DNA, 187 bp, Homo sapiens
tcccagctacttgtgaggctgaggtgggaggatcgcctgagcctaggaggttgaggctgcartaagccaagatgcaccactgccctccagcctgggcaacagagtgagatcatgtctcaattaaaaaaaaaatcgggagtcatgctccacgtccttgagggtggacaatctacatacattatttgga

SEQ ID NO: 566686 - DNA, 478 bp, Homo sapiens
tcacagagaaaaatcgataattaaactccrtttgtaacactaaagggaagatcataattgacctatacacagtatcagtaggagtctccatggaagtcagccactgtgtgtcaatgaatcaaatatttcacatggaactataagaaaggatatctctgtcaattaactacagtcaagcattagaacggggatgtgttctaagaaatgtgtcatttgtcgagttggtcattttattgtcaatgaaaagagtcaaactctgtaaaatatttgaagagatttattctgggccaaatatggcccgggacacaatcttcaggaggtcctgagaacacgcacccaaggtggttagggtgcagcttggttttatacattttagggaggcatgagatagcaaatacatataagaaatatattggtttggtccagaaaggcaggtattctaagaggggtggggggtgaaggtaaacttaaacatttt

SEQ ID NO: 566687 - DNA, 294 bp, Homo sapiens
aataaagtataatgaaaaaaaaaagtaccattgatttctttattgaccttgtatactgcaaaacattactgaacttgttttckggttctagtcttatttgagtagtttccttaggattttctcctacacaagatcataacatttgcaaaaaaaaagattgtttgaatttctttccaatatggataatttccatttctttttctagactaatttccctgaatatatcctccagtacaatattggataggagtgacaagagtagaaatcttcatctttgttctaatcttgtggaaa

SEQ ID NO: 566688 - DNA, 294 bp, Homo sapiens
aataaagtataatgaaaaaaaaaagtaccattgatttctttattgaccttgtatactgcaaaacattactgaacttgttttctggttctagtcttatttgagtagtttccttaggattttctcctacacaagatcataacatttgcaaaaaaaaagattgtttgaatttctttccaatatggataatttccatttctttttcyagactaatttccctgaatatatcctccagtacaatattggataggagtgacaagagtagaaatcttcatctttgttctaatcttgtggaaa

SEQ ID NO: 566689 - DNA, 574 bp, Homo sapiens
tctggggctcattataagtcctccccagaatatgaagaaacaacaggctggtatttaagttctgatactgattaggaaaggtctgacactaccaaagaacacctgcaaaagctggaagaggtggatgtcttctcaaatgtgcaggcatcaagaaagattttgaaggcatcaagacagaaagattttgaaaactcagggaaatatgaccaaaagaaaccaacaaagctccaccaatggacmcagaagatttgaagatctatgaaatgtcagagaattcagaataatccccctaaagaagttaagggaatcacaaacaaatatgagaagaaaactaaatgaaatttgcaaaacaatccaggaacaaaatgagaaatttgacaacaaaacggaaacaatttaaaagccaaatagaaatcctagaaataaagaatgcaataactaaactgaaaaactcagtagaaagcttcaacagcagacttgatcaaacagaggaaagaattagtgagctttattacccaatcagaggagcaaaaataaaaataaaaaagagtaaacaaggcctacaagaattatg

SEQ ID NO: 566690 - DNA, 424 bp, Homo sapiens
tgggcccactttgctttcaaagaagtgttattggctgttggaagcagaatcctaatttgttgaatatttgatttgtcattctaaaccatattcacayacgtcttggtggcaggtcataaaaatcaaagtaccaactttttttttctttttctaattattcaaaaggctccaattcttacacaaatagatagacacatacacacacacttcaccaagtcaaattaaccttaaattgtaaaaaaccacccaaaagcattttaaattatgaacttattgtaaaatatttgtttctgattacatgcatgtaattacagagaattttctatcattttatgcgtggaaatttatgaaaataataaacatctacttttctttaaaaaaaacttcatctcacttaaagtaaatatttaaccctttgttataa

SEQ ID NO: 566691 - DNA, 424 bp, Homo sapiens
tgggcccactttgctttcaaagaagtgttattggctgttggaagcagaatcctaatttgttgaatatttgatttgtcattctaaaccatattcacacacgtcttggtggcaggtcataaaaatcaaagtaccaactttttttttctttttctaattattcaaaaggctccaattcttacacaaatagatagacacatacrcacacacttcaccaagtcaaattaaccttaaattgtaaaaaaccacccaaaagcattttaaattatgaacttattgtaaaatatttgtttctgattacatgcatgtaattacagagaattttctatcattttatgcgtggaaatttatgaaaataataaacatctacttttctttaaaaaaaacttcatctcacttaaagtaaatatttaaccctttgttataa

SEQ ID NO: 566692 - DNA, 424 bp, Homo sapiens
tgggcccactttgctttcaaagaagtgttattggctgttggaagcagaatcctaatttgttgaatatttgatttgtcattctaaaccatattcacacacgtcttggtggcaggtcataaaaatcaaagtaccaactttttttttctttttctaattattcaaaaggctccaattcttacacaaatagatagacacatacacacacacttcaccaagtcaaattaaccttaaattgtaaaaaaccacccaaaagcattttaaattatgaacttattgtaaamtatttgtttctgattacatgcatgtaattacagagaattttctatcattttatgcgtggaaatttatgaaaataataaacatctacttttctttaaaaaaaacttcatctcacttaaagtaaatatttaaccctttgttataa

SEQ ID NO: 566693 - DNA, 424 bp, Homo sapiens
tgggcccactttgctttcaaagaagtgttattggctgttggaagcagaatcctaatttgttgaatatttgatttgtcattctaaaccatattcacacacgtcttggtggcaggtcataaaaatcaaagtaccaactttttttttctttttctaattattcaaaaggctccaattcttacacaaatagatagacacatacacacacacttcaccaagtcaaattaaccttaaattgtaaaaaaccacccaaaagcattttaaattatgaacttattgtaaaatatttgtttctgattayatgcatgtaattacagagaattttctatcattttatgcgtggaaatttatgaaaataataaacatctacttttctttaaaaaaaacttcatctcacttaaagtaaatatttaaccctttgttataa

SEQ ID NO: 566694 - DNA, 602 bp, Homo sapiens
ctagtcaccacaggccttggatgagacccagtattttgctggcttcagtggagtgccagctgtggtagccataagagttcttgtgtcaatcctcccccaatgtcagtcagcccagcatggtgggaaactccttctaattgggagaaagagagggaagagagtgagagactgcctggttatccaggggattctgttacccaagcccatcaaggtgatatctctaggattcaggaagagttacaccattcctgggtttagggtacccatagtgtaatatggttgcagtgatcataggcttaggtcmcaaaactcaatccccttggaatatgtagaaagccttctaaagaaggacagatacaaacaagtccagactgtgaagatagaaacaaacacctaacttgcaaagctcagacatcaatcaacattcacaagcatcaagaacatccaggaaagcatgaactcaccaaataaactaagtaaggcacccatcaataatcctgaagttatggagaaatgtgatcttttagacagataattcaaagtagctgtcttgaagaagttcaacaaactttaaaataacacagagaagaaactcagaattc

SEQ ID NO: 566695 - DNA, 570 bp, Homo sapiens
attttaaagcatgtgtgtgatgggtcrtatcttctaataattttgtaagcagcagggccttatctgaaaatggtcattctgttcctatgtctagtgagggaagagctctcaggaaaaagtcagcaagacaaacaggacggggcaggtgctgcggccaagcagaacatcagaaaatgtgggcacagggggtgtctaactttggcataatggggggtactctgcaggacagctggccccagggccggactcacccatgaggtgaggggcagcctctgagcctcgtgccaggcattggcccctggtgtgaggagctcaagatgctcccactggactgtaaccccttctccagaatggggggtgctgagttcctgaaggcaggagggatgaagggcagctccaggacacagggctgggcaggggccaaaggatcccatcacagcctgtgctcttcctgccctccacatagaatttatttcttaaaaatcttcaccacgtatcttcatggtaaatctggggcaaagctttaaaagcatacagtaagcatttataatttatggctttccatttcaa

SEQ ID NO: 566696 - DNA, 632 bp, Homo sapiens
tgtaggacaatatcaatatcagaactatagaacaatattcatttagacatgtaattggagcctcaacagaaaaagatgtgtcagaagaaatattaaagagaatatggctcagaacatttcaaaattgatgaaagataccaaaacacagatcaaataaactcaaaccatatacaagataaaacaaacaaaaacaaatctaggtatgtcatatgtaaattgctaaaaccataaatgaaaatcaaatcttaagtagccacagggaaaaaacacacataatataaagaagataaaaacaatggatgatttaacattaaaaacaatggaggccaacagacaatggaatatctttaaaygttttgaataaaataatattaatcatcataatattcatttgtcaacctggaacaccatactcatcaagaagttcttcaaaataaaaacaaactaatgacaatatcatgcacacaagtattaaaataattcatctccagcagtcttacactacaagaaatgctaaaagtattcttcattctgacaaaaaaaggcaccaaatgaagccccattttgtaaaatttaagaggaccaaaagagagtaaatagttggataaacatgaaggccttctttcaaatat

SEQ ID NO: 566697 - DNA, 632 bp, Homo sapiens
tgtaggacaatatcaatatcagaactatagaacaatattcatttagacatgtaattggagcctcaacagaaaaagatgtgtcagaagaaatattaaagagaatatggctcagaacatttcaaaattgatgaaagataccaaaacacagatcaaataaactcaaaccatatacaagataaaacaaacaaaaacaaatctaggtatgtcatatgtaaattgctaaaaccataaatgaaaatcaaatcttaagtagccacagggaaaaaacacacataatataaagaagataaaaacaatggatgatttaacattaaaaacaatggaggccaacagacaatggaatatctttaaacgttttgaataaaataatattaatcatcataatattcatttgtcaacctggaacaccatactcatcaagaagttcttcaaaataaaaacaaactaatgacaatatcatgcacacargtattaaaataattcatctccagcagtcttacactacaagaaatgctaaaagtattcttcattctgacaaaaaaaggcaccaaatgaagccccattttgtaaaatttaagaggaccaaaagagagtaaatagttggataaacatgaaggccttctttcaaatat

SEQ ID NO: 566698 - DNA, 584 bp, Homo sapiens
atatatttttatttttacaaaaattaaaaatgcaaaacccaacattgtttctatagtatatcacatttcatrtaacaaagaaagagctatgagaaaatgtatatgcattagctcatttatgcaaaataaacacataaaggaagaaccagaaatgaatgagatttgttgcatccaagggttgttggaaagactatggaaagattagagaagggtaatggggtattaggaaggagtgctactattgtgagtattcccttttgtatagctttgactcctaggactacagcaatatcttatatacattctagatatatacatacatacatacataaaatatacaaggatactgagagagcataaaatggaataagcacaataggtttgaaatcaactctgttataaatggataacaaaaccctgctaaagggagtggttaagaaaagtacgaatctcagtaattttggaagagtatcttggctagataatgtgaggctaaaaacaaaagaaattgtacacaaatatcgtactccagacagtaaatttgtttttcacaggagtattggttagtgattctgaacatactt

SEQ ID NO: 566699 - DNA, 584 bp, Homo sapiens
atatatttttatttttacaaaaattaaaaatgcaaaacccaacattgtttctatagtatatcacatttcatgtaacaaagaaagagctatgagaaaatgtatatgcattarctcatttatgcaaaataaacacataaaggaagaaccagaaatgaatgagatttgttgcatccaagggttgttggaaagactatggaaagattagagaagggtaatggggtattaggaaggagtgctactattgtgagtattcccttttgtatagctttgactcctaggactacagcaatatcttatatacattctagatatatacatacatacatacataaaatatacaaggatactgagagagcataaaatggaataagcacaataggtttgaaatcaactctgttataaatggataacaaaaccctgctaaagggagtggttaagaaaagtacgaatctcagtaattttggaagagtatcttggctagataatgtgaggctaaaaacaaaagaaattgtacacaaatatcgtactccagacagtaaatttgtttttcacaggagtattggttagtgattctgaacatactt

SEQ ID NO: 566700 - DNA, 466 bp, Homo sapiens
atggcgacgacgcggtgagaagaagccagttccgcctcgtyacggtgtcccgcctggccggtgccgaggaggtgctggtaagggggaggctgggggaggtctgagccccctcccaggaccgcatgtccccgcacctggcgcacctgacctggctcccccaacctggcgcccctcacccacctggcctccccctccatgacctgccccccactgaaccccgcctgaccccccacaacttggcccctctaacctggtgccctgcaggaggcgcactgcgggcccaccacatccccgaggaccctggccacctggagctgtgccggctgcccccttcctctcaggcctgtgacgcctgggctgggggcaaggctgggagtgctgtgatctcggaggagggcagaagcccgggtccggcgaggccacgccagaggcctgggtcatccgggctctgccgcgggcccaggag

SEQ ID NO: 566701 - DNA, 304 bp, Homo sapiens
gaattcctaacctctggggaacccctattaaataccacaaggaaattatagagttattgcacacagtgcaaaaacccaaggaggtgacagtcttacaytgccaaagccaccagaaaggtgaaggagaaaaggcaggaggaaactgtcaggcagaagctgaggccaaaattgctgccaggcagaacctcccactagaaatacctacggaaggacccttggtatggaacaaccccctccaagagattaagccccagtattccccaactgaagcagagtggtgactttcatgggggcatagttttct

SEQ ID NO: 566702 - DNA, 551 bp, Homo sapiens
cagcctgaccaacatggtgaaaccctgtctctacgaaaaatacaaaattagctggatgtggtggctggtgcacacctgtaatcctagctacttggaggctgaggcaggagaatcacttgaatctgggaggcagaggttgcagtgagccgagatggcaccattgyactccaatctgggcaacaagagcaaaactctatctcaaaaaaaaaaaaaaaaaaaaaggcagggggaggagatttatagcactaaatacttacatgaaagctaggaagatctcaaattaacaacctaacattaaaagaactagagaaccaagagcaaataaaccccaaatctagaagaagacaaaatatatccaaaattggagctgaactgaaggagatagagacatgaaaagccattcaaacgatcaacgaatccaggagctggttttttcaaataaataaataaataaaatagaccacttagctagagtaacaaagaaaagagagaagattcaaataaacacaattagaaagagggatattaccatcaaccccacagaaatacaa

SEQ ID NO: 566703 - DNA, 565 bp, Homo sapiens
agattcaatgctattcccattaaactaccactgacattcttcacagaacctgaaaaatctgttttaaaattcatatggaattaaaaaagagcctaaatagccaaggaaatcstaagcaaaaagaacaaagggggagacatcatgctgccagactttagattatactacagggccaccagcaaccaaaacagcttggtactggtacaaaaacagaaacataggctaatgaaacagaatagagaatccagaaataagactacgcacagaaaactttctgatctgcaataaacctgacaaaaacaagcaatggagaaaggactactattcagtaaatggtgctgggataactggctagccatatgcagaaaattgaaacaggaccccttccttataacatatacaaaaattagctcaagaaggattaaaaactcaagtgtaaaagccagaactataaaattcccagaagaatacttaggcaatatcattcaggacataggcaaatatttcatgacgaagatgccaaaagcaattgcaacaaaaccaaaaattgacaatgggatctaat

SEQ ID NO: 566704 - DNA, 565 bp, Homo sapiens
agattcaatgctattcccattaaactaccactgacattcttcacagaacctgaaaaatctgttttaaaattcatatggaattaaaaaagagcctaaatagccaaggaaatcctaagcaaaaagaacaaagggggagacatcatgctgccagactttagattatactacagggccaccagcaaccaaaacagcttggtactggtacaaaaacagaaacataggctaatgaaacagaatagagaatccagaaataagactacgcacagaaaactttctgmtctgcaataaacctgacaaaaacaagcaatggagaaaggactactattcagtaaatggtgctgggataactggctagccatatgcagaaaattgaaacaggaccccttccttataacatatacaaaaattagctcaagaaggattaaaaactcaagtgtaaaagccagaactataaaattcccagaagaatacttaggcaatatcattcaggacataggcaaatatttcatgacgaagatgccaaaagcaattgcaacaaaaccaaaaattgacaatgggatctaat

SEQ ID NO: 566705 - DNA, 565 bp, Homo sapiens
agattcaatgctattcccattaaactaccactgacattcttcacagaacctgaaaaatctgttttaaaattcatatggaattaaaaaagagcctaaatagccaaggaaatcctaagcaaaaagaacaaagggggagacatcatgctgccagactttagattatactacagggccaccagcaaccaaaacagcttggtactggtacaaaaacagaaacataggctaatgaaacagaatagagaatccagaaataagactacgcacagaaaactttctgatctgcaataaacctgacaaaaacaagcaatggagaaaggactactattcagtaaatggtgctgggataactggctagccatatgcagaaaattgaaacaggaccccttccttataacatatacaaaaattarctcaagaaggattaaaaactcaagtgtaaaagccagaactataaaattcccagaagaatacttaggcaatatcattcaggacataggcaaatatttcatgacgaagatgccaaaagcaattgcaacaaaaccaaaaattgacaatgggatctaat

SEQ ID NO: 566706 - DNA, 646 bp, Homo sapiens
tgttttactctttccaagggaaaaatatatgaaaattgtgttaggaattttctttaaaaaytccacagctctgcgtgtgtgtgtgtgtgtgtgtgtgtgtgtgtgtgcgtgcttgtttctcatgttaggcaaaatgattccgaaaggaacacaaagaactctcccgtatacagtatgttatcctatacaacttaataaagtatcagttagagttgaaactaacagcactctgagctctgccctattgtactcaattttctgaccagtatgaacacttcatattctaggactatatagaaagatgtagaataaagagaactttctcatcccaagctatactcctttgtcaatgtcaaatgaattcaaaaggcaaccgtctcccattgggaagctatttgctaataacagtggcatcgtactgtaggaaaacaaaggctgtctgtaacatatcctgaggctggtagtttgttattataaactagatactcaggacaattttatgactgaagagtgtacattacaaatacacacacctatacatgaatatcacagatcttatactcacctatggagaaatttacaataagatcataaagtcctattgcattcaatttgtaagaaaaataacctatttttcttgggccta

SEQ ID NO: 566707 - DNA, 646 bp, Homo sapiens
tgttttactctttccaagggaaaaatatatgaaaattgtgttaggaattttctttaaaaattccacagctctgcgtgtgtgtgtgtgtgtgtgtgtgtgtgtgtgtgcgtgcttgtttctcatgttaggcaaaatgattccgaaaggaacacaaagaactctcccgtatacagtatgttatcctatacaacttaataaagtatcagttagagttgaaactaacagcactctgagctctgccctattgtactcaattttctgaccagtatgaacacttcatattctaggactatatagaaagatgtagaataaagagaactttctcatcccaagctatactcctttgtcaatgtcaaatgaattcaaaaggcaaccgtctcccattgggaagctatttgctaataacagtggcatcgtactgtaggaaaacaaaggctgtctgtaacatatcctgaggctggtagtttgttattataaactagayactcaggacaattttatgactgaagagtgtacattacaaatacacacacctatacatgaatatcacagatcttatactcacctatggagaaatttacaataagatcataaagtcctattgcattcaatttgtaagaaaaataacctatttttcttgggccta

SEQ ID NO: 566708 - DNA, 646 bp, Homo sapiens
tgttttactctttccaagggaaaaatatatgaaaattgtgttaggaattttctttaaaaattccacagctctgcgtgtgtgtgtgtgtgtgtgtgtgtgtgtgtgtgcgtgcttgtttctcatgttaggcaaaatgattccgaaaggaacacaaagaactctcccgtatacagtatgttatcctatacaacttaataaagtatcagttagagttgaaactaacagcactctgagctctgccctattgtactcaattttctgaccagtatgaacacttcatattctaggactatatagaaagatgtagaataaagagaactttctcatcccaagctatactcctttgtcaatgtcaaatgaattcaaaaggcaaccgtctcccattgggaagctatttgctaataacagtggcatcgtactgtaggaaaacaaaggctgtctgtaacatatcctgaggctggtagtttgttattataaactagatactcargacaattttatgactgaagagtgtacattacaaatacacacacctatacatgaatatcacagatcttatactcacctatggagaaatttacaataagatcataaagtcctattgcattcaatttgtaagaaaaataacctatttttcttgggccta

SEQ ID NO: 566709 - DNA, 607 bp, Homo sapiens
cactgcaacctccgccacccaggttcaagcaattctcctgcctcagcctcccgagtaggtgggattatagtgtaagattttatttccaatctcctaatgaattacagtatgcagagcttatctgcatactgtaaaagttgtcccacctcaagagatttgctcagttaaatttgtaatttcttcccagttcaattttaagccaagcactttaaggtttggggaaattaaactttccccaatttgggggatgcatccataggaagtgtcctgtggtatgggaatgcaattacccatcttcaaagagagaatagaggaggaaaaaggaaaaagaaggctttttttttttcaaaggagcctcagttattcaggatgtactcgagagaagtacaaactgaacctggttggttacccatcaggtaagagcggggaaaggcacttttgttcctttatctttccagcaaaagcccaggataggtgagggagagaaaaaaaagggcattgtctatttktcttccatccttatatactcaagtcccagagaccttggcaggtgccaccatggatgccagcgcaaacttcacccatgtagcagggaaatctaatgggt

SEQ ID NO: 566710 - DNA, 359 bp, Homo sapiens
tactttcaaaaaatgtaaaatgcaagataataatgaaataatgctaaaatactttatgccaaattcctcatttcaacattaatttttaggaaatttctttgagtatatgtagaaatcccttactaaaattttccttcaagtttaaattcaagattacttttactgaatgtcactkatctgataaacaatggttattggaaatgcaccatgaatcaaagatgttccattaatataagtattattttaattgtgatagaaccacaaaacatggcactaagcttgtaaaataattgcctcatacacagatcatccttagtaggagaaaaatcaacctggtcattgtatagaaaattctaaaa

SEQ ID NO: 566711 - DNA, 558 bp, Homo sapiens
  misc_feature 401: n = A,T,C or G
tgttgcaatgaacatatgcgtgcatgtgtctttataacagagcaatttatattcctttgggtggatacccagtaatgagattgctgggtcaaatggaatttctgtttttaggtctttgaggagccaaccacactgtcttccacaatggcagagctaatttatactcccaccaatagtgtataagcattcctttttctccacaacctcgctagcatatgttgtattttgacyttttaataatagccattctgactggtgtgagatgttattttattatggttttgatttgcatttctctaatgattggtgatgttgagctgctttccatatgaatgttggtcgcatgtatgtcttcgtttgagaagtgttacttcatgtccgttgcccacgtatttattgtnttcgttatcttgtaaattaagtccctacagatgctgaatagtagacctttctcatgcacatagcatgcaagagtgatctcccattgtgtaggtagtcactatgtttatagtttccattgctgtgcagaagctcattagttaattataccacatttgt

SEQ ID NO: 566712 - DNA, 558 bp, Homo sapiens
  misc_feature 401: n = A,T,C or G
tgttgcaatgaacatatgcgtgcatgtgtctttataacagagcaatttatattcctttgggtggatacccagtaatgagattgctgggtcaaatggaatttctgtttttaggtctttgaggagccaaccacactgtcttccacaatggcagagctaatttatactcccaccaatagtgtataagcattcctttttctccacaacctcgctagcatatgttgtattttgactttttartaatagccattctgactggtgtgagatgttattttattatggttttgatttgcatttctctaatgattggtgatgttgagctgctttccatatgaatgttggtcgcatgtatgtcttcgtttgagaagtgttacttcatgtccgttgcccacgtatttattgtnttcgttatcttgtaaattaagtccctacagatgctgaatagtagacctttctcatgcacatagcatgcaagagtgatctcccattgtgtaggtagtcactatgtttatagtttccattgctgtgcagaagctcattagttaattataccacatttgt

SEQ ID NO: 566713 - DNA, 529 bp, Homo sapiens
aatgactttcttcctcaaattctagaattggycaaaatattattcgaaagggaaagtagaaaaaagacatttcaaccactcaagttctcagaacaattttcagaaacctactaaagatgtgttcttgcaaaatagagtaagccaggacaaaagaaaatgtaagccaggtgcagtgggtgcacacctataaccccagctacttaggaggctgaggtagaaggatcacactagcccaggagttccagaccagcctgggcaacacaacgagactctgtctcatacaaaaaaaagaaagaaaaggctgggcacggtggctcacgcctctaatctcagcactttgggaggccaaagcaggcagatcacgaggtcaggagttcgagaccagcctggccaacatgatgaaaccccctctctactaaaaatacaaaaattagccagccatggtggtgcacacctgtaatcccagctactcaggaggctgaggcaggacaatcgctttaacctgggaggcaaagttttcagtgatctg

SEQ ID NO: 566714 - DNA, 529 bp, Homo sapiens
aatgactttcttcctcaaattctagaattggtcaaaatattattcgaaagggaaagtagaaaaaagacatttcaaccactcaagttctcagaacaattttcagaaacctactaaagatgtgttcttgcaaaatagagtaagccaggacaaaagaaaatgtaagccaggtgcagtgggtgcacacctataaccccagctacttaggaggctgaggtagaaggatcacactagccmaggagttccagaccagcctgggcaacacaacgagactctgtctcatacaaaaaaaagaaagaaaaggctgggcacggtggctcacgcctctaatctcagcactttgggaggccaaagcaggcagatcacgaggtcaggagttcgagaccagcctggccaacatgatgaaaccccctctctactaaaaatacaaaaattagccagccatggtggtgcacacctgtaatcccagctactcaggaggctgaggcaggacaatcgctttaacctgggaggcaaagttttcagtgatctg

SEQ ID NO: 566715 - DNA, 524 bp, Homo sapiens
tgaatcagccatacagcatcattctaaggccatgctcaagtcattgccatcaggtgagtttaccatacattccaacccagcataactttgcatggctctcacattcttatcatgccatttttckgcaattttccttgggccaggtatgctgaggagcattgcagccaggtgccagcagcagcaatacaatctacaactacaaaaagaacaacaaacacaataatgacgaagctcatccaagcactagggagtagatcttggatgcgccatggcaggcctgtggaggaggagggggcagctctctgcaggcctgaaattctgttttgttctcaagaaaggccatcttctgtggccagttggcaaagaagtttgctgcacaccatcaacgggtggatggtgagatgtttagtgggtgcaagaaacatggccatttagcaagacacaggaagttgtatgtattagtttgttctcatgctgataataaagacatacccaagactgggtaatttataaagaaaaaaggt

SEQ ID NO: 566716 - DNA, 524 bp, Homo sapiens
tgaatcagccatacagcatcattctaaggccatgctcaagtcattgccatcaggtgagtttaccatacattccaacccagcataactttgcatggctctcacattcttatcatgccatttttcggcaattttccttgggccaggtatgctgaggagcattgcagccaggtgccagcagcagcaatacaatctacaactacaaaaagaacaacaaacacaataatgacgaagctcatccaagcactagggagtagatcttggatgcgccatggcaggcctgtggaggaggagggggcagctctctgcaggcctgaaattctgttttgttctcaagaaaggccatcttctgtggccagttggcaaagaagtttgctgcacaccatcaacgggtggawggtgagatgtttagtgggtgcaagaaacatggccatttagcaagacacaggaagttgtatgtattagtttgttctcatgctgataataaagacatacccaagactgggtaatttataaagaaaaaaggt

SEQ ID NO: 566717 - DNA, 618 bp, Homo sapiens
cagctagagtgatcctaggaaattgtgccattctgctacctcataggatcagggagcagaggaaacagcatatcagcgtcaggatttaggattcaagattataatccatgagctttatcttacaaacaatatgtggatttgccattcctatgaaattagcagagaaggaaatatatttatcatccaaaccagcctgatcattattgatttgtttgttagttcagagaaatctagaggagccctacttctggggcattatttttcactcgcgtccatgtgaagagaccaccaaacaggctttgtgtgagcaataaagctttttaatcacctgggtgcaggcaggctgagtctgaaaagagagtcagtgaagggagatggggtggggacattttataagatttgggtgggtagtggaaaattatagtcaaagggrgttgttctctggcaggcagcggtgggggtcacaaggtgctcagtgggggagcttttgagccaggatgagccaggagaaggaatttcataaggtaatgtcatcagttaaggcagggactggcaattttcacttcttttgtgattcttcagttacttcaggccatctggatgtatacgtgcaggtca

SEQ ID NO: 566718 - DNA, 573 bp, Homo sapiens
caggtccagcctcatgagacagtgaacacttttgtaaaactcacttaccggagttttggtttttggtttggacatgtcttcttaagtatggcctttgttccatacttatgatactgactcttaacttttgagattttgcagatgtgtggaatggcgtaggaaagtgaaaagtctaatataagagaagcactgttgtaagttaaatggatgtaataaaaagcattctgcatttgagaatctagtawcttggttgttgcctggctaggggccaggttcgcatatcttgttagatatgtgagcctattcaagttattacttcagcttgcagtgaaatgaatcaatattaaaaccacagagattcccacagcaactcagcagcttatctaataacttaacctcactctcctcattttcttgcttgaaaactaatatctgctggttcataaaaccgttatatgcctgcctatcttgcagcctccttctgaggaacgtgtcttgggagtttgaactgtggtgccttcccacctactgccagggaccctgtcatcctgaccataacagtctggcctggac

SEQ ID NO: 566719 - DNA, 467 bp, Homo sapiens
gctgtggagaaaagagaacacttatacactgatggtgggaatacactatgggaacagtttggagatttctcaaataacttaaaatagaactccaatttaatctagcaatttcactactggatgtatatccgaaagaaaataattcattgtatcaaaaagtcacatgtgcccatacgtttactgcagtcctattcactatgaaaaggcataaaatcaacctaggtgcccatcaatagtggtttggataaaaaaatgtggtacatatacacccttgaatactatgcagccataaaaaagaacaaaattatgttctttgcagcaatatgaatggagctggaggccattatccaagtgaactaacacaagaacagaaaagcacatactgcatgttctcacttrtaagtgggagctaaaaattgaatacacatgaatgtgaagacaggaacaatagacactggggaccacta

SEQ ID NO: 566720 - DNA, 598 bp, Homo sapiens
catttacatttaatgttagtatygatatgtatggatttgatcctgtcatcgtgatgttagcagattattttgcagatttgtttatgtgattgctttatagtctcactagtctgtgtacttaagtgtgtttttgtaggggctgctaatggtcttatggtctctgtttctttttttttttttttttttttgagatggattctcactccgtcacccaggctggagtgcagtggtgtgatctcagctcactgaaacctccaccttttggcttcaagtgattctcctgcctcagtctcccaagtagctgggattataggcatctgctaccacacccggctaatttttgtatttttagtagagatggggtttcaccatgttggccaggctggtctgaaactcctgacctcaagtgatctgcctgccttgacctcccaaagtgctgggattataggcatgagccactgtgcctggccactaatggtctttcatttccacatttagtgctttcttcaggagctcttgtaaagcaggactggtggtaatgaattccctcagcatttgcttgtctgaaaagggttttatttcttcttcacttatgaag

SEQ ID NO: 566721 - DNA, 534 bp, Homo sapiens
gatttgatctctttacataatccygtacaaaaaaattttttttcattcgttttcattcatttttcctctattcttgtctgcctggcttatttcagaaacaccatcttcatgctctgagattctttctttcacttggtctattttgctatttatacttgtgattgcattatgaaattcttctattgtgtttttcagctctttcaggttggttacattcttctctatactggttattttgtctgtcagctctttcagtgttttatcacaatttttagcttctttgcattttatacagtgttcaaacccggcagcagacaataacatcctagcagaattctaaaaactgtttatcgtactaaagaagctccactcatttatctcagcagccaacttctcaccccagcagtggttagtgagtgaaccgaccattttctcatttccagccatctccagcctcagcccagttctaaacccttgctggagaggtgaggtggtcatttggtggaaagagggcactctggctttttgagtttt

SEQ ID NO: 566722 - DNA, 560 bp, Homo sapiens
taaaaacattttcgtctcattaacaaaacatttctgtctcatcattttgatgttggagggccagattgtgtgaccgttgggtagtcaaggactgcagcacccagactgtcaggcaccatctctcatctcatttcacaagaaagagtgtgtttgaatgacagattcagattagatccttggtcttctagtgaattttgaaaaactctttctgatttgactacacagatggtctagaagagaaaccagagagccccccaaaaccaaagattcaaagatcggggcaaggagaaaattaaaaaaaaaaaaaaaaaaacacttgcacttctttggctagacstgtgtgcttttcagtattcatcttcccctaataaagagaggaaagtggtattttttttaatgttaataaagttgtcattgaagggagaaatgcctaaatgccagctggaagatatccactatagccttgctatgcaaagtgttgtctttgtatctgtaacactgatgttacttgggagtttgtttattagaaatgttaagtcttgggcctcaccccaggccta

SEQ ID NO: 566723 - DNA, 507 bp, Homo sapiens
ggtaagttgtggataataaggagaatgaagtgctgatgatgggggaaattgtggctgtctgaagaacccaggagaagacagaacaagcaggcttgctagttccataaccagggcacaataccatctccccactttcagcgatgtccctggaatgtaaccagggcatcactgtcaccccttggggaactggtaaatctaagattgtactgaaagaaaatgttgtcctgtgaaacagcacaagaagtacgtaagtattaatagagaacagagaaagggaatgttttgcaaatgaatgcaggctgataaaaaaggcaacttgttttcttgattagacactgagacatgtctttgtctcttcgatacattaatgcaatgctaatggagaggccaaaaataggcagaggttaggattaatggcaataraatgttaacaggtctttaagcaaaaaatctctattttttttgtttttggagacaagagtcttgctctgtcgcccaggctggagt

SEQ ID NO: 566724 - DNA, 591 bp, Homo sapiens
ttattttcctccgagtaggtaccccgtagtgggattgctggatcaaatggtagttctacttttagttatttaaggaatctccacgctgttttcaatagtggytgtactagtttacattcccaccagcagtgtagaagtgttccatgatcactgcatccatgccaacatctactgttttttaactttttgattatggccattcttgcagaagtaaggtggtattgcattgtggttttggtttgcattttcctgatcattagttatgttgagcattttttaaatatgtttcttggccatttgtatatctttatatcctcttttgaggattgcctattcatgtccttagcccacattttgatgagattttgtttgtttatttttgctgatttgagtttgttgtagatgctggatattcatcctttgtcagatgtatagatagtgaagactttttcccactctgtgagttgtctgttgaccctgctgactgtacctttttctgtgcagaagcgctttagtttaattaagtcccagctatttatctttgtattgatatcatttgcgtttggggtcttggtatgaaactctgcctaa

SEQ ID NO: 566725 - DNA, 591 bp, Homo sapiens
ttattttcctccgagtaggtaccccgtagtgggattgctggatcaaatggtagttctacttttagttatttaaggaatctccacgctgttttcaatagtggttgtactagtttacattcccaccagcagtgtagaagtgttccatgatcactgcatccatgccaacatctactgttttttaactttttgattatggccattcttgcagragtaaggtggtattgcattgtggttttggtttgcattttcctgatcattagttatgttgagcattttttaaatatgtttcttggccatttgtatatctttatatcctcttttgaggattgcctattcatgtccttagcccacattttgatgagattttgtttgtttatttttgctgatttgagtttgttgtagatgctggatattcatcctttgtcagatgtatagatagtgaagactttttcccactctgtgagttgtctgttgaccctgctgactgtacctttttctgtgcagaagcgctttagtttaattaagtcccagctatttatctttgtattgatatcatttgcgtttggggtcttggtatgaaactctgcctaa

SEQ ID NO: 566726 - DNA, 605 bp, Homo sapiens
aaacataaactgggtttttttttgttttttgttttttgttttttcacagcagaaataggctcccaagtgaggaattcctttaaggaatttggatgaacaataacacattgttggaagctagttagcttcccaaaagatgagttattatagacatcaggttttgccatagttatctgtaaaggaacatcaaggataaacacattgcattcattaaattactcattaagaaaaaatttattgagcaaaatgtaaataataaaggcaggtggtgtgtaatgtctagagacacaaaaatgagtgagatataattctcctgcatgaaacaggcccttcagtrgatcattataacctggtatggaaaatacagcgatggacaaacacacagcaggaacccagaaagtgtaagctctaaccccaagcggcggggagagcagtgcagagcagagatgggagatgctctaagcagttttagaggctggaggttcaggctgagaaaggtgagaagtgacaccaaaatttaaaaaaaaaaaaaaatcactgggtccttaaagagtcactgacaagtgttaagtcaggaagggtgagagtcaatttgaggttttata

SEQ ID NO: 566727 - DNA, 580 bp, Homo sapiens
aaagtttgagaatgggaaggcataaaggaagatgtctatgggagactgaggcaggagaatcccttgaacccgggaggcggaggttgcagtgagctgcgatagtgccactgcatcttcagcctggacgacagaatgagaccctgtctccaaaaaaaagtatagtgtctagtactctttgatggaaataattctgacagtgtgaggtgggtcagatcatggagatatttgaatgacaaaccctctggtgctccaccagtcttgttacctggagcagaggttaccagttgtctctctggtatcagttctccccttcctttcaatatagaaccttgatttttatctgggcacatttcacagcctcctttgcagttgggtatgcctatgtgagtaagttctggtcagtgaggtgtaagcaaaagggttgcaygggactccaggaagtctatttaaaaggctgagtgtgctgttttttttgccttttcttccaactgctgctggaatgaagatacaagtgcagaggtcatggtggactgggaggtagggggtgctctctaggcatgtcctctaggatggatgcaaa

SEQ ID NO: 566728 - DNA, 555 bp, Homo sapiens
ttctcctgccttagcctccccagtagctgggattacagacatgcaccaccatacccgactaatttttgtatttttagcagaaatggggttttggcacgttggccagggtggtctcaaactcctgacctcaagtgatccacccgcttcgacctctcaaagtgctgggattacaggcatgagccactatgcctggtcaaatattgctttaaagcagcctcccctaccttttaggaactggtagctgctggggyctatcttcagagcatatatcaggacatcctttgcttggtgggggctaacaacacctttctaatattacttctcttgggtccagaagttaatgtgtgactctgtctttgtatactctttctataaaagaaagctgaaacacacaggaggattggatctgtttggggagcatattacatgagttgataaatacacttgatttttctctttttgcttctcaattcagcttcatccacaccctccccagtattcaaatctaatgtgtgacaaaatggtaagactctgggatgaagtggccaaaacaat

SEQ ID NO: 566729 - DNA, 551 bp, Homo sapiens
aaattgaatccagccttgtcacttttgagttgtgtaaccttgggcaggtaactgacttcactgagcctcactctccctagctctggaattggcacaataacaattgtaaaaaccccatggggctggttatgaggataaggattgcaaaaaccttaacaaagtgtctggactatagcaagcctttggtgacttaaagctatcatgatttcaygtattttacatatgctaaatagtaaggacaatttatggagtttctcaatgagttctttgcctcctgggctatcatctgggatggaatctctgtgcaattatccattttcatggacgtatggagtctgaatatcttcagtttgctttagcctcactcccccatcatctgcctaatggactcagacctgcaaaagatgagtgaacgagacaggtgaggcttgtcagccatccttggcagagatccatgacatggatataatttagcagccaattttatattgtacgttcttgccagcatgagcatactgcagacttggccctcatgtgtctttgtgtacact

SEQ ID NO: 566730 - DNA, 540 bp, Homo sapiens
ttttcaacgatattcacagcatcttcactagaagtargtttcatttcaagaaactactttctttgctcatccataagaaatatgtccttatccattcacattttatcatgagattgcagcaattcagtcacatctttagactctacttctaattctaattctctagctaccaaatctgtagctccctcctccactgaagtcttgaactcctcaaagtcatccataatggttggaatcaacttcttccaaactcctgttaatgttaatatattgacttcctcccatatgaatcataaatctttttaatggcctctagaatattgaatccattcaagaaggttttcaattatctttgccaagatccatcagagggatcactaatctatggcggctacagtcttagaaaagggatttcttttataataagacttgaaagttggaatttctccctgactcatgggctgcatcatggaagttgtgttagcaggtgtgaaaacgagatctccttacacatctccatcagaactcttgggtgaccag

SEQ ID NO: 566731 - DNA, 587 bp, Homo sapiens
acaccattccaaaggagtccattccattctatctcaacactttccattccactctgttcgagtccattccattccagtccatttaattcaagggcattccattccattccattccatttcatattattccattccattcaattccattccagatgattccattccattctataccattgctctctgttccattccattccatctgtctccattcctttcgtttcgattcctttccattccattccattacatttsatcctattttattaaattgcattctattcgagtgatttccattcgagtcctttccattcgattccattccattctattccattcctttggattccattccattccgttccgttcacatcaattccttgcgattccattacattcgatttcttcccattcgattccattccttttgactccatttcattcgattccattccattccattaatttccattccattcgagacctttccattgcagtcttttcccttcgagtccattccgttcgattcccttccattcgattccattccattggagtccgtaccagtcgagtccattctattccag

SEQ ID NO: 566732 - DNA, 511 bp, Homo sapiens
attcgattacatttcttttgattccctgccagtcgattgcattgcatactacaccattccaaaggagtccattccattctatctcaacactttccattccactctgttcgagtccattccattccagtccatttaattcaagggcattccattccattccattccatttcatattattccattccattcaattccattccagatgattccattccattctataccattgctctctgttccattccattccatctgtctccattcctttcgtttcgattcctttccattccattccattacatttgatcctattttattaaattgcattctattcgagtgatttccattcgagtcctttccattcgattccattccattctattccattcctttggattccattccattccgttccgttcacatcaattccttgcgattccattacattcgatttcttsccattcgattccattccttttgactccatttcattcgattccattccattcca

SEQ ID NO: 566733 - DNA, 682 bp, Homo sapiens
gtatgaagcccagcatcccttagctattcttcctgatgctctccctccccaactccccttccaacaggccccactgtgtgttgttcccccatcatgtgtccatgcattttcatcattcagctcccacttttaagaacatgtggcgtttggttaagaaatcactttccttgatcattcataagaagtaactcctcatcccttcaagttttgtcttgaaattgcagcaattcagtcccatctttaggctcccttctaaytctagttttctttgttttgttttgttttgtttttgctatctcccatacatctgcagttaattcctccaccaaagtcctgaactcctcaaagtcatctgtgaggattaaaattaactttttccagactctcttaatgttgatattttgacttcttcccgtgaatcaccaatgttcttaatggtaatcaccatctacagcaggtatagctttaaaaaatgtatttttcaatagtaaagttaaaagttactccttgatccatgtctgcaggatgaatgttgcattagtggacgtggaaacattaatctccttgtatatttccatcagagctcttgggtgaccagatgtattatcaatgaacagtgatattttgaaaggaattttttttttcctgagctgtatatttcaaaagtgggcttaaaatattc

SEQ ID NO: 566734 - DNA, 548 bp, Homo sapiens
ttgcaggattggattttgcaacttgcaaatttggcagatttccaggtaatggaggctaattgtaaagccaggcattgaactccttactaaaaacatttaaatgcatgcattttgtatttaacatttgatttttcattcatgttgggtgcatgttgaacctaggataaatggaaaataaaactaggttatttcagtttgctttattctgcttcaaactatcattatgtgttagtaattcttttgagcaggtcaaggacccaaccaacacattgtattgagtgatattccagtactataataatttggatggaaaagaatatagaagatgtggtgaaaataaagatgtttgtctttgaatctgtcttttttttacccgtgattttggcttcttattgttacttcttttgtatttcttaccaataggcttactataacccatttattgcttttattaaaaaagatgaggcaagascaaagtgaattataaccaatatttccttttatagaaagggcctcctaccctacatcactcaaattggaaaaaggtg

SEQ ID NO: 566735 - DNA, 613 bp, Homo sapiens
ctcattcctcataaacttgcaataatagaacacctgaaataactttggttatattaaggattaccaaaaaatttagatacaaatatattagccactaaaaatattatgaaagtcagtttactagtcagtgttctccagagaaacaaaaccagtaaamtgcagggtggggtgtgtgtgtatacatatatacatatatatatagagagagagagtgagagattatttaaggaattgactcgtgatgtggaggctagcaagctcaaaacctgtagagtaggctggcagattaaagacctaaggaagagatgcagtttgagtccaaagacacagttttattcttctggaattattatctcctcttcaggggaggttcagtgttttcttaaggtcttcaaatgattggatgatgttcattcacattacaaaggacaatttgctctgctaaaattctaccagtttaaatgttaatcccaccccaaaaataccttcacagaaatatatagaataatgtttgaccaaatgtctcatattttggcctagcaagttgacacataaaattaaacatcacaatcaggcagaagcgaaaaaaaaatagaaaatacaaaagaagcaa

SEQ ID NO: 566736 - DNA, 553 bp, Homo sapiens
ggccaggcgttgtggctcatgcctgtaatcccagcagtttgggaggccgaggtgggtagatcacctgaggcaggagttcgagactagcctggccagcatggtgaaaccccatctctactaaaaatacaaaaaaatttagccaggcatggtggctgtaatcccagctactggggaggctraggcaagataattgcttgaactcacgaggcagaggttgcagtgagctgagatcatgccactgcactccagcctgagcaacagagcaggactccatctcaaaataaataaataaataaataaataaataaataaataaataaatagcatggatattgaggggcatatgtaaactttatgcaaacatgaatgtctacatagaaaagtctgggccaagtgcaatggtacatgcctgtaatctcaacactttgggaggctgaggtgggcagactgcttgagctcaggagtttgagagcagcctggggaacagtggtgaacgctgtctctataaaaaataaaaaaattagccgggcatggtgttgtgcactgtagtccc

SEQ ID NO: 566737 - DNA, 553 bp, Homo sapiens
ggccaggcgttgtggctcatgcctgtaatcccagcagtttgggaggccgaggtgggtagatcacctgaggcaggagttcgagactagcctggccagcatggtgaaaccccatctctactaaaaatacaaaaaaatttagccaggcatggtggctgtaatcccagctactggggaggctaaggcaagataattgcttgaactcacgaggcagaggttgcagtgagctgagatcatgccactgcactccagcctgagcaacagagcaggactccatctcaaaataaataaataaataaataaataaataaataaataaataaatagcatggatattgaggggcatatgtaaactttatgcaaacatgaatgtctrcatagaaaagtctgggccaagtgcaatggtacatgcctgtaatctcaacactttgggaggctgaggtgggcagactgcttgagctcaggagtttgagagcagcctggggaacagtggtgaacgctgtctctataaaaaataaaaaaattagccgggcatggtgttgtgcactgtagtccc

SEQ ID NO: 566738 - DNA, 551 bp, Homo sapiens
acatgtagggtgattattttataaagcatgtaaaaaactataaaatatttttaattacgcagcataatgtggaaaatgcacagtattgtagacaatagattaaatttatatctattaatcttatcaaaatgaccttcaaactttaaaaacattttgtgcaatgtatagtcaatgtattattaatgattcataagatactattaattaccatatattacctatgatattctgctggaataaaattgtatttgttagaagtaattgaaatgctttcggattttttttttccaatttctatttctgtcctattctatatctaaaatgcatttgtggttgtgcaaagttgttcctaagaactcttaggatcaaggaaatgtgaacttcctctatgaaactattatttaggtttcttcagctgttaagacattaatgtaactaggtttgggcaaacccatttatcctgggtagagcatagctttcagcgcatatgtaattaggactgcattcatccctaaatgtaatcataatggmaatatcagctgggattagat

SEQ ID NO: 566739 - DNA, 587 bp, Homo sapiens
tggctagcaattatcttacgtttccaaaaataaatatagaaatatatggcaactttgtttgcctaagcaaacaattggaaactgattaaatgccaatcaatagaggcttcatcaagtaaataaactatgaatgtctaggtattcatttaaaaataatgagctagatctgtgtgtattgacacgaactattctcagagatgcaaagcgattgaagcargttgcaaaatactgtatatagtatgatctcagtttttgtaagagtgcgtaaacaaaacagctaatagaacttatttttggacagaagaacatggtcagagataaggaagagtctcatttttcattttatatttggcagtttgaattttttttttttaattcagtgatggggtttcactcttgctgcccaggctagagtgcaatggcatgatgttgactcaccgcaacctccacctcccgggttcaagcaattctcctgcctcagcctcccttgtagctgggattaccggcgtgcaccaccacgcccgtctaatcttttttgtatttttttttttagtagagacagggtttctccattttgatcaggctga

SEQ ID NO: 566740 - DNA, 587 bp, Homo sapiens
tggctagcaattatcttacgtttccaaaaataaatatagaaatatatggcaactttgtttgcctaagcaaacaattggaaactgattaaatgccaatcaatagaggcttcatcaagtaaataaactatgaatgtctaggtattcatttaaaaataatgagctagatctgtgtgtattgacacgaactattctcagagatgcaaagcgattgaagcaggttgcaaaatactgtatatagtatgatctcagtttttgtaagagtgcgtaaacaaaacagctaatagaacttatttttggacagaagaacatggtcagagataaggaagagtctcatttttcattttatatttggcagtttgaattttttttttttaattcagtgatggggtttcactcttgctgcccaggctagagtgcaatggcatgatgttgactcaccgcaacctccacctcccgggttcaagcaattctcctgcctcagcctcccttgtagctgggattaccggcrtgcaccaccacgcccgtctaatcttttttgtatttttttttttagtagagacagggtttctccattttgatcaggctga

SEQ ID NO: 566741 - DNA, 500 bp, Homo sapiens
acttagggaatctggcagaagaaatttctaagtggaaatgcattcaagaggaagcagagcataaagtttggaaaatttgcagcctgactatgtaatagaaaagaaaaaaccattttctggggagaaattcaagcctgctgcagaaatttgcataagtaacaagaagtcgaatgttaatcaccaacacaatggggaaaatttctccagggcatgtcagagaccttcayggaagctgctcccatcacaggcccagaggctatagagaaaaaaaatggtttcacaggccaggcctacgccccctgctctgtgcagccttgggacatgctgccctgcatcccagctgctgctgctccagctgtggctaaaaggggccaaggtatagctcaggccattgcttcagagggtataagccccaagccttggtgcttccacatggtaccgagcccgtgggtgaaaagaagtcaagaactgaggtatggaaacctctgcctagatttcag

SEQ ID NO: 566742 - DNA, 500 bp, Homo sapiens
acttagggaatctggcagaagaaatttctaagtggaaatgcattcaagaggaagcagagcataaagtttggaaaatttgcagcctgactatgtaatagaaaagaaaaaaccattttctggggagaaattcaagcctgctgcagaaatttgcataagtaacaagaagtcgaatgttaatcaccaacacaatggggaaaatttctccagggcatgtcagagaccttcatggaagctgctcccatcacaggcccagaggctatagagaaaaaaaatggtttcacaggccaggcctacgccccctgctctgtgcagccttgggacatgctgccctgcatcccagctgctsctgctccagctgtggctaaaaggggccaaggtatagctcaggccattgcttcagagggtataagccccaagccttggtgcttccacatggtaccgagcccgtgggtgaaaagaagtcaagaactgaggtatggaaacctctgcctagatttcag

SEQ ID NO: 566743 - DNA, 573 bp, Homo sapiens
tccctagggggtgggtgctgtttcagcacaggtgtcaaaagggcagggtgcagcagtgactgggatgggaagggcacagctgtctggcttgrcttgtatatggtgagccaccaggcagggatgttcagtggtgacaaaccctccgaaatggaagggtgtaatagctacttgcccctggagcagagcacactccagcaatggttctggttccagaatggtgcagagcagtagccacgtgggccaggaggggaggagaacaccattagttacttctctgggagaagcacagctatgtggactccagacagctcctttagctgggcacctgtgaggactacaggagtcatcaatggtgaagactgtgaccagggtggtgatgggggatgctgggttccttttgcttaccttttcccctcaggttccaactggtcctgactggggaataggatggcagaggtaagtgtttgcttcactttgctatactgccttcctgggtgtgcatctgctacaagacttctgctattcctttgctgtactttggtactcttctttagttattttcatcaaaataca

SEQ ID NO: 566744 - DNA, 658 bp, Homo sapiens
gtaattttgcacctgtgccaggcaaaatgtgagcaagagggaacagtgacccaagcctctgcctgccctcaattgtccttagtgtgtttaagtggaagcagatttacccagaagctaacaaagcataagcgtcaagaccccttacctgcacggtcctgtgttttctgtaaagtttgcaaaagtagcataygtttgcttttttttttttttttttcttaaagaggcacttcaaaattgtatgagctgcaggtgctacaaaacctaacccactcctgggtttaaatcagagctgtctcttggatcagtcctgcctggaagcctacttttcctattgttgccatcaagaactggcaaatgggtttggggcagaaggttaaggagggggctgcactgtgggctaaacatggtgatttgctggatcagaatggagccccagactttccagcattagggattcagagatccctgttctgccacctgctggctggaagacttgggtgccgccacacaatctcagcccaggagtcctcctcagtaaactgccatttagaagcctgacctgcctacagcacagccagaggttactatgaagagcaaacaagctctctgtcaatatgctgaagtggctgtttggtggtgactgcaaaaacacacaaaa

SEQ ID NO: 566745 - DNA, 658 bp, Homo sapiens
gtaattttgcacctgtgccaggcaaaatgtgagcaagagggaacagtgacccaagcctctgcctgccctcaattgtccttagtgtgtttaagtggaagcagatttacccagaagctaacaaagcataagcgtcaagaccccttacctgcacggtcctgtgttttctgtaaagtttgcaaaagtagcatacgtttgcttttttttttttttttttcttaaagaggcacttcaaaattgtatgagctgcaggtgctacaaaacctaacccactcctgggtttaaatcagagctgtctcttggatcagtcctgcctggaagcctacttttcctattgttgccatcaagaackggcaaatgggtttggggcagaaggttaaggagggggctgcactgtgggctaaacatggtgatttgctggatcagaatggagccccagactttccagcattagggattcagagatccctgttctgccacctgctggctggaagacttgggtgccgccacacaatctcagcccaggagtcctcctcagtaaactgccatttagaagcctgacctgcctacagcacagccagaggttactatgaagagcaaacaagctctctgtcaatatgctgaagtggctgtttggtggtgactgcaaaaacacacaaaa

SEQ ID NO: 566746 - DNA, 627 bp, Homo sapiens
tgttcataatattacaaaggctgtagctatagatagtgaaaggttatttgcttggagggaaaaccttctacttcttggaacagaaagagctggatctggcctcaaccctatggtcaatatcccaatcccagggacctggtagagttggactcccaaagaagatggtgccgaggggatgagccttctcatctgtccatgattgggctgtgactccatgccagcaacaaaacagactcttggcccaaaagtaagagatctccatttcatcagtcarctctttcactggctgccaaatgctatctctgactattcagggaatcccacaaaaggagtctcacttactgctaaagacacaaagctagtggcgaggtgtttgaaaaggcagctttcctggacctttctcatggactcaagctgcccctccaccttccaccatctccactgctcccattctgcactctgctcgccaacacccctccccagtagctgcacaggagactccaagctcctgtctgctgtccccatgggtgttcttctcacactaaccagtgctccctcccttcctagctcctttctcattagcgtagcacttgctttatctctgctagcaggttttaagggtcttat

SEQ ID NO: 566747 - DNA, 471 bp, Homo sapiens
aacagctaagactgttcataatattacaaaggctgtagctatagatagtgaaaggttatttgcttggagggaaaaccttctacttcttggaacagaaagagctggatctggcctcaaccctatggtcaatatcccaatcccagggacctggtagagttggactcccaaagaagatggtgccgaggggatgagccttctcatctgtccatgattgggctgtgactccatgccagcaacaaaacagactcttggcccaaaagtaagagatctccatttcatcagtcagctctttcactggctgccaaatgctatctctgactattcagggaatcccacaaaaggagtctmacttactgctaaagacacaaagctagtggcgaggtgtttgaaaaggcagctttcctggacctttctcatggactcaagctgcccctccaccttccaccatctccactgctcccattctgcact

SEQ ID NO: 566748 - DNA, 558 bp, Homo sapiens
agcccactctctgttgggtggactccacacttgggtttggggatgctggtttgcccctcacctcttgggtgctgtatcaatttcttgaggaggcatggcctgcattacagctggctgggatctggctattcgaagtggacgaggtgggaaagtggcagaagtgagtgctgtcctgaggaccccagacagatgaaagatgcagtccaggctgagtaaggggagaagtcagagtccagtagagccagaaagctgtggggtggtgtgcactgtgtgctggatgatcctgatgggcaggctggggcttccaaaaagagggaggactctgtctagctaggcctyttggtccctgatgccaatgatggatggtttttttcacaagctctacaaatccagagccagtcttttctgccagtttcccctcctgcagaccttagacaggatccagatctcccagccgttgtccaaggaagctgcaggcaggagacagtggacgtgcttgagaaactttaacttgggagtcacaagactgggatacagtcttggctctactagttactc

SEQ ID NO: 566749 - DNA, 558 bp, Homo sapiens
agcccactctctgttgggtggactccacacttgggtttggggatgctggtttgcccctcacctcttgggtgctgtatcaatttcttgaggaggcatggcctgcattacagctggctgggatctggctattcgaagtggacgaggtgggaaagtggcagaagtgagtgctgtcctgaggaccccagacagatgaaagatgcagtccaggctgagtaaggggagaagtcagagtccagtagagccagaaagctgtggggtggtgtgcactgtgtgctggatgatcctgatgggcaggctggggcttccaaaaagagggaggactctgtctagctaggcctcttggtccctgatgccaatgatggatggtttttttcacargctctacaaatccagagccagtcttttctgccagtttcccctcctgcagaccttagacaggatccagatctcccagccgttgtccaaggaagctgcaggcaggagacagtggacgtgcttgagaaactttaacttgggagtcacaagactgggatacagtcttggctctactagttactc

SEQ ID NO: 566750 - DNA, 531 bp, Homo sapiens
ggagacagtggacgtgcttgagaaactttaacttgggagtcacaagactgggatacagtcttggctctactagttactcatgcaacccctctgagccctgttaaattgaactaaatttggcctgaggctgccttcctactttgagttcatacatagcaaactgcaacttaactttgtatgtaaacaaactgcaacttcactaagagtatattyctgtaacaaatagctgagtttcagccagttagagcagctgagcttcagccaatcacaggctaccaactgatcagatcatgtccttataaggcaaatgcccagctgtaatcagtcaagcgttctgtgtgtcacttcctttttctatctgtaaatactgcctgctcacgttgccaagtgtagctctctgaacctctcctggttctgaggactgcctaattcatgaatcattatttgttcaaatacactgctcaatttaatttatctaatttttttctcttaccagcccaaattgacttccattatatcaggttttaggat

SEQ ID NO: 566751 - DNA, 597 bp, Homo sapiens
ccaagattctaaacacttcccccatctgctctgtattgatctccatacatccagctactggcaatcacttaaccagttttttgctcctatagtttgccttttccagaatgtcatatgaatggaagcatgcagtatttcgcctttcaagtctggcttttctcactgagcataataatgcttttgagattcatccctgcagcagtatgtgtcagtagtcactcctttatattgccaaatagtactccatgaacgtactacagtttatcaattgcccagctgagggacagctgggttgtttcctgtttggggccattgtgagtataactgcagtaaacacrcagatttctatgtgaacctgttttcccctacggtaaatcctaggaatagaataactgggctgtatgttagatgtttgtttataagaaactggtaaagtcttttccaatgtggctctaccctttttcattcccgccagcactgaatgagtattccaattgtttctctgtgggtggcaagccatccaggtgctgaggcaagagaccgagagcatgagctgttccagtataataaaatatataaaacaacaagagttatact

SEQ ID NO: 566752 - DNA, 600 bp, Homo sapiens
aataattgtattaactatatattgtcagaacagatttttatattttgacttgtgactcacatctccattgttcctttcgtttttatagtcctgctctcgagttcacaataaacagcttcaaataatattataccattaaacatgtagtttaagaagctcagcacagtgtaatcccatttcctccctcccattctttatgctatttttgtcatatattttacctgttgtaaagagacttttaaaaggaacaaaacgtcttttctatttatccccatttttaccagttctagcaatcttcattttttgtggagatctaagtttccatttgatatattccttctgtctgcaaaagttcctttacaagtttttatagtgaagacctgcgggtaatgaattctctcaggtttctttgcctgaaaaagtatttattttgcytttgttttaaaaagatatttttgctggctataaaattatgaactgacaggtttttggtttcctgcccctgccctccccagcactttaaagatgtttttctagctctggtttgcagagattaaaaatctgctataattctaatcttttctcctgtttgcatgatta

SEQ ID NO: 566753 - DNA, 623 bp, Homo sapiens
ctggctaattttttgttttgtagagaaagggtcttcctatgttggccaggctggtctcaaaatcctaggctcaagtgatcttcctactttggcctcccaaaatgcttggattgtaggcattagccactacacctggcttataatagactttttaaaaataagctttattttagaatagttttagatttacagaaaacttgcaaagacagtacacagagttcccatatatcccaagttcccctattactattatctttacattagtgtgatttatttatttattttttgagacagagtcttgctctgttgcccagactggagtgcaatggtatgatctctgctcactgcaacccctgcctcccaggttcaagcgattctcctgcctcagcctcctcccaagtagctgggaytacaggcacgcaccaccacccctggctaatttttgtatttttgggagagacggggtttcaccatgttggccaggctggtcttgaactcctggcctcaagtgatctgcctgcctcagcctcctcaagtattgggattacaggcgtgagcccccacacctggcctagagtgattttttttttataattaatgagccaatattggtatattagcta

SEQ ID NO: 566754 - DNA, 562 bp, Homo sapiens
ttttctttctttctctttctttcttgtctttctgtctttcctctctctctctctgtctttctttcctctctttctttcttttttcctacatggcaagatctcctcatggcagaaataatctgccttgacttctgtttccacgctgcttctgccaggaccatgcgctcgggtgtttttctttccgctataattatccaggcccatcccagctctggtcccctcagctgttccctggcagtcccttctgctggtgaaaacacatatggcgccggcctgaccagggtgtaagtgtgtgaatatcaggaagatgactgaacgtctttgggactccgtttcctcattgtaaaatggaggttaataccagccttcttctactccccaaacgcacgtgtttgtcccggccagagggcccaattgttggctgttcacgcrtcagttacccccacaggacgggtcagccaattaaaggcgaaccaggcccggtccatctcctgacgccttttctcatcccagggctggacaggcagctggcctgggcccggctctgccttgtcacgtgcgg

SEQ ID NO: 566755 - DNA, 394 bp, Homo sapiens
tatatatatatatgaatatatgtatatatattagactcttgccaggtggaaagtacagagtagaatcacattttctatctaccagaagcctctgggctcgttggggaaataagacatacttctcatccagctagagaaaggacagaaggaagcagcattttggaatggagacaaccactatgtgggacagtttcacaaccaggacagtgtgtgtcctgagcatgaatctgagtacgcaaacgagcagccagacatggagaggccagggtgccagagaaggaccaagtgagaagggcattcagccgaggtaggtgcttccatagaygctttaattcatagtttgggggagtttaataaacataattgagttgattgctcaaattccaaaatgaga

SEQ ID NO: 566756 - DNA, 549 bp, Homo sapiens
agaataggaatcaacacacccacctcttgcacaggaaagaggcaaagctgttgaaggagaaacaggacagaaacaggagtcaaagggtgtgattctggtagaacctcaacagttaactagccaatcacatgctaatcataaggctagtgtgccgtcttaaattcctcagtaacaggcagggatcactaacrcttcagctgttatttattgttatgaatattgttgtgaagatcacaagagataatataccatcaaatgagaggcccatgcgttgttaattaaccaaactggagtgccagccaaagcaagatatgctaaccagggagaaaaatgcctttcagagcagtttttccagaaatttccttttagtgattgtacaattcagtgctcttgattctaaaatgaatatgaggctgttttcaagaaagaaagggaatcagtgtgtgtaaaatgtgcactagaacaatatccaagaaatgaagaggaggagagtctgggaatggaaaaaatactccagaaaatacaagtaaaagaaagtggctgtaatta

SEQ ID NO: 566757 - DNA, 549 bp, Homo sapiens
agaataggaatcaacacacccacctcttgcacaggaaagaggcaaagctgttgaaggagaaacaggacagaaacaggagtcaaagggtgtgattctggtagaacctcaacagttaactagccaatcacatgctaatcataaggctagtgtgccgtcttaaattcctcagtaacaggcagggatcactaacgcttcagctgttatttattgttatgaatattgttgtgaagatcacaagagataatataccatcaaatgagaggcccatgcgttgttaattaaccaaactggagtgccagccaaagcaagatatgctaaccagggagaaaaatgcctttcagagcagtttttccagaaatttccttttagtgattgtacaattcagtgctcttgattctaaaatgaatatgaggctgttttcaagaaagaaagggaatcagtgtgtgtaaaatgtgcamtagaacaatatccaagaaatgaagaggaggagagtctgggaatggaaaaaatactccagaaaatacaagtaaaagaaagtggctgtaatta

SEQ ID NO: 566758 - DNA, 525 bp, Homo sapiens
agtggaaggatatgtccggtggatgcattgtctatgtgtttactttttctgctgtcatctgagtgctaaaaatcaggtcccctcgtgtgtctaaatatcagccttattttaatggcatttttctacttatctggacctgggataatatatttcagtaaaaaaaaatatgcaggtgcagctataattatgtamctgtactgagtgatgcgagagtagctgtttattactttgcctttgaggtttgcagatcaaagtttctttaaataaaaaaatggtatatgtttgagccaagaaggtgaatcacagtaaaatatttaacactaactgcatttggctaaagtcgggttgcttaaaggccaaatttaccatacaaagtttaggactctgaaaattccatactaaaaatctgtaataccaggggcaaatgttcagatattattttcaagtctacaacccatgatgatcccttaaagagccatagtcaacctttccagttgctttgcaaatcattccagtttgtcagtc

SEQ ID NO: 566759 - DNA, 525 bp, Homo sapiens
agtggaaggatatgtccggtggatgcattgtctatgtgtttactttttctgctgtcatctgagtgctaaaaatcaggtcccctcgtgtgtctaaatatcagccttattttaatggcatttttctacttatctggacctgggataatatatttcagtaaaaaaaaatatgcaggtgcagctataattatgtaactgtactgagtgatgcgagagtagctgtttattactttgcctttgaggtttgcagatcaaagtttctttaaataaaaaaatggtatatgtttgagccaagaaggtgaatcacagtaaaatatttaacactaactgcatttggctaaagtcgggttgcttaaaggccaaatttaccatacaaagtttaggactctgaaaattccatactaaaaatctgtmataccaggggcaaatgttcagatattattttcaagtctacaacccatgatgatcccttaaagagccatagtcaacctttccagttgctttgcaaatcattccagtttgtcagtc

SEQ ID NO: 566760 - DNA, 525 bp, Homo sapiens
agtggaaggatatgtccggtggatgcattgtctatgtgtttactttttctgctgtcatctgagtgctaaaaatcaggtcccctcgtgtgtctaaatatcagccttattttaatggcatttttctacttatctggacctgggataatatatttcagtaaaaaaaaatatgcaggtgcagctataattatgtaactgtactgagtgatgcgagagtagctgtttattactttgcctttgaggtttgcagatcaaagtttctttaaataaaaaaatggtatatgtttgagccaagaaggtgaatcacagtaaaatatttaacactaactgcatttggctaaagtcgggttgcttaaaggccaaatttaccatacaaagtttaggactctgaaaattccatactaaaaatctgtaataccaggggcaaatgttcagatattattttcaagtctacracccatgatgatcccttaaagagccatagtcaacctttccagttgctttgcaaatcattccagtttgtcagtc

SEQ ID NO: 566761 - DNA, 516 bp, Homo sapiens
gaatggcaaaacagatccaaaataaggcagatggaaagagatggaaaaaattttatacccatacagtttagctctggggaaaggcaaaatataaaggatgccttttttgcatgataagtaggaacagacccagcactgtcaccaggctttaaatgagttatttttaaatgtatttggcatattttcactttagccaggaaatctagatgaaaggggcatatatattctgtaattgcagataaattgcagatgggaattgtgaataccagaatctgcccaggtctggcatggagtaaggggaagatatgtgtcatctgacctttcctctggggctgctggctgaggctgacacagcgaaagcctccaaagggtagggggcatgacagtccrctcttctggagcttgtgcgattaagagtttctcagtgtcctttaacctgctcgcccttggctctcctagacactttctcttgaagtgctggagacaggacaaggcagggggaggtgtgatggcact

SEQ ID NO: 566762 - DNA, 642 bp, Homo sapiens
cagagacagggacaggggaggcctcctgaagaggggcgtcggggtggggcaggttggccaggtggggacgaggggacagcagagggaacagcagtggacacgcacagagagagacagcagagggaacagcagtggacacgcasagagagagacagcggtgccatgtccaggcagctgcaggacgttctcgaggctgccctgagtgaaggtgtggggaaaggaggggccgggcttcgctgggcattctaggctcaaaccaggggttggggcttttctcttagattgaatcctgaagagccatagacagttctaagcccagggtgagtgacaacactgaccatttggaagtgcccaccagaggccacgtgtcccagaatgagaggagttagaacagggagttgccgggaggggagatggcactgagctgagggcggggagggagaacaggcggcctaaggaggtctgagacgggactgggcggcaacatgaaccagctgggggtgagaccgggagcccacacactgaaggcacattggtttttaatgccttgcaattgcctttgattctgcaagagaacgacatttctggaagctctgctagaaaatctgattagtgcaaaacgagaatctattcatgagtgtg

SEQ ID NO: 566763 - DNA, 596 bp, Homo sapiens
gcatatatatttacaattgttatattctcttgctgaattgacccctttatcattatgtaatgaccttctttgtctctttttatagtttttgtctttttttcttgagacggagtctcactctgtcacccaggttggagtgcagtggtgcaatctcagctcactgcaacctccacctcctgggttcaagcagttttcctgcctcagcctcctgagtagctgggattacaggtgtgtgccaccatgccaggctaatttttgtatttttagtagasatggggtttcactatgttggccaggctggtctcgaactcctgacctcaggtgatctgcccgcctcggcctcccaaagtgctgggattacaggtgtgagccaccacacccagccttgattttgtcttgaaatctgttttgtctgttataagcacagctacttctgctctttttttagtttccatctgcataaagcatctttttccatccctttattttcagtttatgtgtgtctttataggtgaagtgtgtttcttgtaggcaacagatcattgagtcttttttaaaaaaaatccattcagccactctgcatcttttgattagag

SEQ ID NO: 566764 - DNA, 569 bp, Homo sapiens
caattgccataaaggttgaaaaattgcatgtttgttgagttgtgttacttagactacttctggtgattgttttgagagtatagcagaaaaaggagataagacagtgacataaagttatgagaggtatcttgtgaatattcaacttatcttttaatccaaaactgttgtcttcaaacttgcaatttaagttcttaatattggactatgattatattttatcatgtaatttggagtagccaagggactttatctcaccagmttcatttctagtataaatgacttacctgctatttctatgaataatttatgtgctttatttagagctgtagaattttatagactatatatatttagaatacttaattgcgacctttgtacacatatatcttaaagttacttgttacagaaaggggaagtacatgtagtttgatagttgatcttagaacacattaaatgcattactaacgtttgatattaagctttaaaatacatatagtgttactttggttttaatacttaaaggaaatttgaaggtttaaatttgaaaactgatggttattgttttctta

SEQ ID NO: 566765 - DNA, 589 bp, Homo sapiens
acagtacattattattaactgtagtcacatgctgtgcagatctccagaacttattcctcctaactgaaactgtactctttgaccagtatctccccaattgatgtaatatttaaccatgcacacttacagtgttctggctagaaaataatcaccatgaagactgatggaattgctattaacctaccaccacctaacaaatacctgaaaagacaaatcaggactacaaggaatcatctgagcagatgatctgttctttcccttactctccaacaaaccttttccacctaaatgtttttcaatgcttcaatatatgttgttaaaaatgaaaaaagatgtcttctcttaattttcaaatttacttcatttaggaggtactcaatgaaactgtaagacaacttgctttgttttgtgttttagaaaaaccgacttccttttacctacttacctatgcttatttatctgaaataattcaatgtaattctctaaaatatttttccaagggtttactgaaacaaataattttgtctcttacaayaacatacttaatagcacctgaatcaatgaagagttatttgggagtacttctcta

SEQ ID NO: 566766 - DNA, 535 bp, Homo sapiens
ataataaatgctattatcgtaacttaygcagcttcctaagaattttataaagataataaaaaaggattgtctttaaaagtctattaaacctagttagatatgtcaatacaactaaaaggacaaacatgtttcatttaacttaacctgacttcttacatccaatcaaaagctactgagtattcactaatagcaagcaggcaatacatagggaagtaaatactttaatttttgtcccatgaaacagcttgagaacattataggcagtacacatatttttagaactttttactacagaaaatttcaaatatacacaaaagtatagagaaacagttccccatgtaccaatcatccagcttcaactatcagttcatgaccaatattgtttcttatatttactacccatttcccccttcttcccgaccaggattattccgaaacagttgcaggtaacattctttttctttcaggctgtataccaaaaagatgggtcccagtttaaaaaatatgtaaacaaaattaataataattacttaat

SEQ ID NO: 566767 - DNA, 573 bp, Homo sapiens
gtccttttttttttttagatggagcctcgctctgtcgcccaggctggtgtacagtggtgcaatctcggctcactgcaacctccacctccctggttcaagcaattcccctgcctcagcctccctgggattacaggtgcacgtcaccatgcctggctaatttttttgtatttttagcagagacggggtttcaccatgttggccagactggtctcgaactcctgacctcaggcaatccrcccgcccgccttagcctcccaaagtgctgggattacaggcatgagccaccgtatctggcctagtgagagtcctttctaccccacacagaaatgaagtcatttgctttgagctctagccatagttgtacaaaagcaattgctctttctggattttccccataaataatcaacaagatatgaatgggtgcctaccatgtttagcataaaaagccataacagaagtatgatacatggtcctagcctctgggactacagtctagttgagaagagactacataacatacctaatacaattagagactagcacaaaacagtatataattaagtataaaattgc

SEQ ID NO: 566768 - DNA, 608 bp, Homo sapiens
tatgatttgactgtgtctttaccttctgctctagcctaatttgtattttagcgagccctctttactacctgattggttgggtgtgagctgagttacaagccctgtgtttaaaggtaggtgcggtcacctttcccagctaggcttaggaattcttaatcggcctaggaaatccagctagtcctgtctctcagtccccccgtcaacaggaaagcccaagtgctgttggcaaggttggccgacaaccactcttaactgcttcctgctgaattggggcatagtaggggttgtgcagttgagatttccttggaaagggtggcttcgatgtcattaacatcagagcatgggctagcaagccggtccaggggtccgtggtaggtcttagtcatggactgcatctgggggtccatttgaagaactgtttgcagttttacagcttygattctggaagagacaaacttaacaaggaggttaaagatacagggattgaaatgtatggcctgaagtgcaggggattatttctttggcacacttcacaggccctgactatctgctttatagttttgaaaaggcctggttcagtaaataatgatgtggcaatctgatgggtg

SEQ ID NO: 566769 - DNA, 178 bp, Homo sapiens
ccattctactatgaaacaagggcagcaaacatgttagaatctcttcaaggcttatttttgggcatatgggttgtataatcatataagtcctatagtttttaaattatactgtttgatagaaagtaataaatgaatttattttctgataatttarcatttctgttaaaagcaagagatg

SEQ ID NO: 566770 - DNA, 627 bp, Homo sapiens
attttataaaacagtaagcatattagaaatagatatataatttttgtctcattcagctttgaactggcttctattagttttctaattgtttggtatatcagagtttctatgttgcttcttgttagaattttttatttttgtatttgtagttgaaatttttatttcaactggcagcagaccattttattcccactgtgccttcttacagacacattaagaacaattctcagtggagcttttggcctgcttagaattcatcattagaacctttcaagctctggatacctaggaaattctccactcaacatgtgcagggaagtttggcaattccttactggcagggagtagaagattaaaggagctccactgctcctcacatgagctccccttsagatagaatgtttttcgttcactgaaaaatcctatttatattttgaaatgtttgaaagtgagcaattttgacctgaatattactggtgcatccagtaatggcatatccaaagtctactttcaatacacagggaagaatattaatttataacgtaagtgcttagaagtacttgtgaaacttgctgtctgacagaacagttgtactggaatcaagacttgtgtgtacgtgatgtaaat

SEQ ID NO: 566771 - DNA, 627 bp, Homo sapiens
attttataaaacagtaagcatattagaaatagatatataatttttgtctcattcagctttgaactggcttctattagttttctaattgtttggtatatcagagtttctatgttgcttcttgttagaattttttatttttgtatttgtagttgaaatttttatttcaactggcagcagaccattttattcccactgtgccttcttacagacacattaagaacaattctcagtggagcttttggcctgcttagaattcatcattagaacctttcaagctctggatacctaggaaattctccactcaacatgtgcagggaagtttggcaattccttactggcagggagtagaagattaaaggagctccactgctcctcacatgagctccccttcagatagaatgtttttcgttcactgaaaaatcctatttatattttgaaatgtttgaaagtgagcaattttgacctgaatattactggtgcatccagtaatggcatatccaaagtctactttcaatacacagggaagaatattaatttataacrtaagtgcttagaagtacttgtgaaacttgctgtctgacagaacagttgtactggaatcaagacttgtgtgtacgtgatgtaaat

SEQ ID NO: 566772 - DNA, 538 bp, Homo sapiens
ggggtttggtgtttacaggataggagggtgtggcaggccaaaagacaacttttgtatgcaaaaacaggaatgcctattctcacttagggccataagtatcgaggcttgagggtggggactttgctggggaacctccctcttttacccagtatttccctgtattctgtctgtatcaatttgttgggggatgtattgaggaacgtaccaaggcttgttaattcccagtactccaggaccatagcttggtctccaatactgttattataaagtttcaaatatyctaattgttgatgttttatgtaacttggtttctacctctatggcaaagttctttggaacatttttttatatatatagtgctctaaaatttctcaaggatgtactttaatttatagccacacatcaggtgtttcttttgctctgcattgcatcgtcttagctacacatggctgcagaagagaataccctgcaacttcttgcctatgttatcttctccagaagtggacatagaatgtttctgttttgttttgatttcttc

SEQ ID NO: 566773 - DNA, 538 bp, Homo sapiens
ggggtttggtgtttacaggataggagggtgtggcaggccaaaagacaacttttgtatgcaaaaacaggaatgcctattctcacttagggccataagtatcgaggcttgagggtggggactttgctggggaacctccctcttttacccagtatttccctgtattctgtctgtatcaatttgttgggggatgtattgaggaacgtaccaaggcttgttaattcccagtactccaggaccatagcttggtctccaatactgttattataaagtttcaaatattctaattgttgawgttttatgtaacttggtttctacctctatggcaaagttctttggaacatttttttatatatatagtgctctaaaatttctcaaggatgtactttaatttatagccacacatcaggtgtttcttttgctctgcattgcatcgtcttagctacacatggctgcagaagagaataccctgcaacttcttgcctatgttatcttctccagaagtggacatagaatgtttctgttttgttttgatttcttc

SEQ ID NO: 566774 - DNA, 591 bp, Homo sapiens
tcagatctttccaggaaagataactttaaaaggaagaaaaagttgttaaaaaacatgatgctttaaaagtattgaagataaatttatacaactgaagggaagtgttggaagtgactgaakgataagtatgtagaaaactaagtaaacacagacataagacaaatattaactgaagcagctaaagaagcaagcaaaattgtgtgagacaggaaaagtaaaattagcatataacgtgactcaactctgtaaaccttttcttaggagtgctctattcaaatttataatccggcaacttcaggctaatgaacgaacaggaggtaacatgagcttatggaagtgtgcagatttaccataaggctagtaaagtttgcatgagaccttagtctaatttgcatgagaccttagtcacgtgtttatacagtaaattttttttggtagaatttgcaaaagtaaaatattctaattgtaatttataaagaatatagttgttgtttttttcatttcaatttgcacttgggacagtttctacaccattctgacctctccgttgatgaagggaaagtctaccttggtattcacctcctatcttac

SEQ ID NO: 566775 - DNA, 591 bp, Homo sapiens
tcagatctttccaggaaagataactttaaaaggaagaaaaagttgttaaaaaacatgatgctttaaaagtattgaagataaatttatacaactgaagggaagtgttggaagtgactgaaggataagtatgtagaaaactaagtaaacacagacataagacaaatattaactgaagcagctaaagaagcaagcaaaattgtgtgagacaggaaaagtaaaattagcatataacgtgactcaactctgtaaaccttttcttaggagtgctctattcaaatttataatccggcaacttcaggctaatgaacgaacaggaggtaacatgagcttatggaagtgtgcagatttaccataaggctagtaaagtttgcatgagaccttagtctaatttgcatgagaccttagtyacgtgtttatacagtaaattttttttggtagaatttgcaaaagtaaaatattctaattgtaatttataaagaatatagttgttgtttttttcatttcaatttgcacttgggacagtttctacaccattctgacctctccgttgatgaagggaaagtctaccttggtattcacctcctatcttac

SEQ ID NO: 566776 - DNA, 591 bp, Homo sapiens
tcagatctttccaggaaagataactttaaaaggaagaaaaagttgttaaaaaacatgatgctttaaaagtattgaagataaatttatacaactgaagggaagtgttggaagtgactgaaggataagtatgtagaaaactaagtaaacacagacataagacaaatattaactgaagcagctaaagaagcaagcaaaattgtgtgagacaggaaaagtaaaattagcatataacgtgactcaactctgtaaaccttttcttaggagtgctctattcaaatttataatccggcaacttcaggctaatgaacgaacaggaggtaacatgagcttatggaagtgtgcagatttaccataaggctagtaaagtttgcatgagaccttagtctaatttgcatgagaccttagtcacgtgtttatacagtaaattttttttggtagaatttgcaaaagtaaaatattctaattgtaatttataaagaatatagttgttktttttttcatttcaatttgcacttgggacagtttctacaccattctgacctctccgttgatgaagggaaagtctaccttggtattcacctcctatcttac

SEQ ID NO: 566777 - DNA, 591 bp, Homo sapiens
tcagatctttccaggaaagataactttaaaaggaagaaaaagttgttaaaaaacatgatgctttaaaagtattgaagataaatttatacaactgaagggaagtgttggaagtgactgaaggataagtatgtagaaaactaagtaaacacagacataagacaaatattaactgaagcagctaaagaagcaagcaaaattgtgtgagacaggaaaagtaaaattagcatataacgtgactcaactctgtaaaccttttcttaggagtgctctattcaaatttataatccggcaacttcaggctaatgaacgaacaggaggtaacatgagcttatggaagtgtgcagatttaccataaggctagtaaagtttgcatgagaccttagtctaatttgcatgagaccttagtcacgtgtttatacagtaaattttttttggtagaatttgcaaaagtaaaatattctaattgtaatttataaagaatatagttgttgtttttttcatttcaatttgcacttgggacagtttctacaccattctgayctctccgttgatgaagggaaagtctaccttggtattcacctcctatcttac

SEQ ID NO: 566778 - DNA, 575 bp, Homo sapiens
cctccttgtccttgtcctctttcatagaatatacctctcttcaactaaaggaaattacttagaaactacattttttgtcatggttttactcaaaatctcttttcaatgtaatagacttaacatttaaaattctttagaaatgtacagattctagtgattctggaataaatataaattgcagtagtactgggatataattttccctttgaacacagatattaacaattctttttaaaatagtgattttcttcaacaatgcaagatttttttcttttcttttcaaggaagaaaagtggtagataagcatagtataatttttaagacataatgatgtggaccattactgccaatttctgtgcttagatagtayggcgacactgatctaaaaagtaaaaccacctaataaaaaatacatgaatacattttataggttttcttcctactttcattaaggttttagtatattcatataaagtattgaatttaagcagtttgcataagatagcatgattcttgtttttgttttgcatattttggtttggtttggtaaagagatatttaattttagtaaagtt

SEQ ID NO: 566779 - DNA, 659 bp, Homo sapiens
ctgggcaacatggcaaaaccctgtctatacaaaaaatacaaaaattagccaggtgtggtagtgcgcacctgtagccccagctacttgggaggcagaggtgtaaggataacttgagcctgggaagcagagattgctgtgagccgagatcatgctactgcactccagcctgggtgacagaatgagaccctatttcaaaaaaaaaaaaaaaaagaaaggtaaaaaaaattaaawgttttagctatgtatatgtatcagtccattttcacactgcttgacttacctgagactgggaagaaaaagtagtttaatggactaacagttccctgtggctggggaggcctcatgattacggtggaaggcaaggaggagcaagtcatgtcttacatggatggcagcaggcaaacagagagagcttatgcagagagactcctgtttttaaaaccatcagatctcatgagacttattcactatcacgagaacagcatgatgaaattacctcccactaggtccctcccacaacacgtgggaattcaagatgagattttggtggggacacagccaaaccatatcagtataaaaacatacattaaaacatacagctaagcataaggtaattgaagtgattattttaatatcagaaaagtagatttcaggaatat

SEQ ID NO: 566780 - DNA, 568 bp, Homo sapiens
ttcagcacctaataaaattcatatattcatgagtttaaaaatcagtgtactagaaaaagaaaagaactttcacaacttgatataaactgtaaactaaaaacctatagctaatattgtacctaagatcagaaaaaggacaaaagttgtccactcttgctatttctattcaacattgtaccagatattttttattttaacttttattttagstttcagggtacatgtggatgtttgttacataggtaagctagtgtcaagggggtttgctgtgcagattatttcaggtattaagcccagtacccagtagttatcttttctgctcctctccctcctcccatgctccaccctcaagaacaccccagtgtgtgttgtttctttcattgtgttcgtaagttctcatcatttgcctcccacttgtaagtgagaacatgtggtatttggttttctgttcctgcattggtttgctaaggataataccgtctagctccctccatgttccctccaagttcctacatgaacttgttctttttatggctgcatagtatcccatagtgtatatgtaccatat

SEQ ID NO: 566781 - DNA, 549 bp, Homo sapiens
ggtgcacttacaatcctctaggtagacataaaagttatccaagtccccactagattagctagacacagagcactgattggtgcatccaygaacccggagctagacacagagggttgattggtgcctttacaatcctttagctagacacaaaagttctccaagtccccactagattagctagacacagaacactgattggtgggcttacaaacctttagctagacacggagtgctgattggtacatttacaatcctctagctagacataaaagttctccaagtccccaccagtttagctagatgcagagtgctgattgatgcatccacaaaccccaaggtagagataaaagtcctccaagtgcccacccgactcacgagcccagctggcttggcctagtggatcccccactggggctgtgggcggacgtgcccaccagtcccatgccacctgcctgcactcctcagcccttgagcggtcgatgggaccaggtgccacagagcatggggcggtgcccatcggggaggctgggctgcgcgggagcccatggg

SEQ ID NO: 566782 - DNA, 549 bp, Homo sapiens
ggtgcacttacaatcctctaggtagacataaaagttatccaagtccccactagattagctagacacagagcactgattggtgcatccatgaacccggagctagacacagagggttgattggtgcctttacaatcctttagctagacacaaaagttctccaagtccccactagattagctagacacagaacactgattggtgggcttacaaacctttagctagacacggagtgctgattggtacatttacaatcctctagctagacataaaagttctccaagtccccaccagtttagctagatgcagagtgctgattgatgcatccacaaaccccaaggtagagataaaagtcctccaagtgcccacccgactcacgagcccagctggcttggcctagtggatcccccactggggctgtgggcggacgtgcccaccagtcccatgccacctgcctgcactcctcagcccttgrgcggtcgatgggaccaggtgccacagagcatggggcggtgcccatcggggaggctgggctgcgcgggagcccatggg

SEQ ID NO: 566783 - DNA, 549 bp, Homo sapiens
ggtgcacttacaatcctctaggtagacataaaagttatccaagtccccactagattagctagacacagagcactgattggtgcatccatgaacccggagctagacacagagggttgattggtgcctttacaatcctttagctagacacaaaagttctccaagtccccactagattagctagacacagaacactgattggtgggcttacaaacctttagctagacacggagtgctgattggtacatttacaatcctctagctagacataaaagttctccaagtccccaccagtttagctagatgcagagtgctgattgatgcatccacaaaccccaaggtagagataaaagtcctccaagtgcccacccgactcacgagcccagctggcttggcctagtggatcccccactggggctgtgggcggacgtgcccaccagtcccatgccacctgcctgcactcctcagcccttgagcggtcsatgggaccaggtgccacagagcatggggcggtgcccatcggggaggctgggctgcgcgggagcccatggg

SEQ ID NO: 566784 - DNA, 210 bp, Homo sapiens
acaatgtaaaaccctgatacagtagttctcaaattttgttttgcacgagagtaagctagagggatttgtwaaactctcattgatagattccacttccagagttttttattctgtaggtctgagatatggcccagggatttgtatgtctaaatgtccccaaatgatgctgatctaggaattacattttgaagaactattgatgtaataaaa

SEQ ID NO: 566785 - DNA, 210 bp, Homo sapiens
acaatgtaaaaccctgatacagtagttctcaaattttgttttgcacgagagtaagctagagggatttgwaaaactctcattgatagattccacttccagagttttttattctgtaggtctgagatatggcccagggatttgtatgtctaaatgtccccaaatgatgctgatctaggaattacattttgaagaactattgatgtaataaaa

SEQ ID NO: 566786 - DNA, 532 bp, Homo sapiens
ctctgcccttaagaccaaaacaaaacaagaaacaaagaccaaaaaaaaaaaagcaacaaacaaaaaaccctcaaacctcaacttctagaggtttgttcctgatttattatctcattttccaatgtgtcaataaaatctccartccaaactttctaacttgcctttgttatatttattaaaaagtgtccattttaaaggatagttatcaccttgattagattgtaaatctccttgagggcaggagactgtgtctaaccagtaataagcacccaaacatttattagagagctgtgcaacctctgggaggtcaataaatactcgttgactcactgactctataaatataaatagcaaaataatcagacattctgctggcacctaatttgctccctgtaggtaagtttgtctctttggtagcattgattcttttaggccaccagggttccatttagagaattacaattgccatgtgctaactggtactctggtagcctgaatgagtttcagagtctccccaaatgaaggacatttc

SEQ ID NO: 566787 - DNA, 571 bp, Homo sapiens
aatgcatttgtgttttaagctgttacttaaaaggattcaaaaagtttaccattttttttaagtttacaaagttaaaaagttagagtaagctaaggttaatttattattgaagaaagaaaaatattttttataaatttagtgtagcttaagtgtacagtgtttataaagtttagagtagtgtacagtaatgtcctaggccttcacattcactcaccactcattcaatgactcacccagagcaacttccagtcctataagctccatttttgataagtgcgtaatacaggtataccctttttttgtgttttatactgtatttttactgtatcttttctatgtttagatctgtttggatacacaaactctattatattataattacctacagtattcagtacagtaatgtgctatataggtttgtagctyaggaacaatatataccatatagactaggtacatagtaggctatatcatctaagtttgtgtaagtacactctatgatgttcacacaatgacaaaatcacctaataatgcatttctcagaacatattccacctgttaaccaatgcat

SEQ ID NO: 566788 - DNA, 545 bp, Homo sapiens
tgcctaataaggatcactgggaaagagctgcaccctttggaatagggattcaactagactgtggggacctgaaagagaaggagtcataaaataaatatctaaaacttactctctttcggccctttgaacttttcctggtgcctcccattgcctaaacccactggaagccaaagtacagtgatgaaaccaaaaataggtaacgatcctagggtacagagaaggttggaaagtatggagagggacaaacgaaaaatatctagcacagatgttatatctctagttttaactgctcttctgagatcttgaccaaaatttccattttcatctccaatctacttgcattacayctatgggtcttaaaattaatttgcccacttcttctgtttttcttatggaaactttttcatttagtgatgcaaatattttctctcaatccaaagaccatggaatgtccttgattttccttctcctatagctctcccattgaggtctggcaagtattttttcatagaaacatttttttgaattctgagctctccttttca

SEQ ID NO: 566789 - DNA, 620 bp, Homo sapiens
aactcttagtatctattcatctccaaactaacctttacacaaaaagagggggaggggaataaaataaaacaaattaaaccttcaagtttttattctcacccagatgttagcctgtaaagaagagacactcttgcataaacagtgcagggctctattgcttccagcacctgcatccaagttgctgaaattgtaaagaaaagttccctctatttaacccatgtctagtgcgtatgagtccttctatggtttcttaaacccrttagttgtcttcatgaagaaaataataccttcaagcaagaagacaacagaaaagttaaggtcttcttttgtttatatcatttcagtttacaaaaaataaaaagtaaaataaataaaacttggaactgttctataactgtcatttagcatatggtaaatttgaccagactgtttacttacacaggagtcttatctgaaggtcagaaatgtaatcaaaaactaaccaaatacaaagagaaactagtgaaagatgaaataacccaaactcaaaatgccctacttaaatcacttagggtttttgtttgaggacttttaaaattattatttctctggaaataattagagctttattaaaaaaaaag

SEQ ID NO: 566790 - DNA, 560 bp, Homo sapiens
cggctcactgcaagctccgcctcccgggttcacgccattctcctgcctcagcctcccgagtagctgggactacaggcgcccgccactacactcggctaattttttgtatttttagtagagacggggtttcaccgtgttagccaggatggtctcaatctactgacctcgtgatccgcccgcgttggcctcccaaagtcctgggattacaggcgtgagccaccgcacccggcagagatgtcasacttttcttctgccagcccgtccacaaactttaggagggcatctcttggcctaccttccttcagcttcaagaaagggaagcatttgagtgtttccttctttcctccatgaaagaggaggagataatccctaaaacactctactctcccagtcccccggggcttcttatctttctcactggtaaagatcatcagttcagtttggcttctttcacctgggaataaaccagaagtctcttaccaagaacagggcctctgttaaaactgagcactacaaacttcagtaattttattctcaatcaggtgttatctcttataacc

SEQ ID NO: 566791 - DNA, 630 bp, Homo sapiens
tctggcgtcagtagccatgatcaattgacacattgctgtccttagtaaaccaatcaggacccaaacgactacctgacaaacatttctactgtggctacaaatgccccacgtttgggggtctgctggcttgtggctttattttgttcaaagtaaccttttacgtatcttwaaaaattgtaacaatgactggactaggacatgacaagcagattttatctatcagtaacattttatagatgaagaaattaggagttgaagcatgtaaggcacttttcctataagcacataaatatcaataataggttgtacttctgaaactcaaactaccctctcctcattccatctcctacagtctttctaaaagtccactttactatgtcatccaaaagaattgctacaatgttggccacagtgtaggtaattttttacttaaaaaaattacagattcacaggaagttgcaaaagaagaaagaagactcctatgtacccttcacccagcttcccccaatgtacctttcactcagcttcccacaatgtacctttcccctagcttcccccaatgtaccctttgcctacctttccccaatgtattatctcgttctcacactgctgataaagacatatctcaga

SEQ ID NO: 566792 - DNA, 630 bp, Homo sapiens
tctggcgtcagtagccatgatcaattgacacattgctgtccttagtaaaccaatcaggacccaaacgactacctgacaaacatttctactgtggctacaaatgccccacgtttgggggtctgctggcttgtggctttattttgttcaaagtaaccttttacgtatcttaaaaaattgtaacaatgactggactaggacatgacaagcagattttatctatcagtaacattttatagatgaagaaattaggagttgaagcatgtaaggcacttttcctataagcacataaatatcaataataggttgtacttctgaaactcaaactaccctctcctcattccatctcctacagtctttctaaaagtccactttactatgtcatccaaaagaattgctacaatgttggccacagtgtaggtaattttttacttaaaaaaattacagattcacaggaagttgcaaaagaagaaagaagactcctatgtacccttcacccagcttcmcccaatgtacctttcactcagcttcccacaatgtacctttcccctagcttcccccaatgtaccctttgcctacctttccccaatgtattatctcgttctcacactgctgataaagacatatctcaga

SEQ ID NO: 566793 - DNA, 553 bp, Homo sapiens
cctcaggaataggggtgggagggggaatgtagcacctagagacatataaaagcacaggagaagaaaagcagcatgatatagggaaaaagagcacaggcttaggaggaagagaccgagattgaatcttctgctgactttgagttattaatctttttggcatctcactttccttatctatgaagtgattagaataacagctgtcttgtagttgcattttgcagatggagataaagtgtcatcctgcacaagcsttgaatatggtgcccagtggaggccatgttgtatctggaatgaagggagaacatttgccagcaggagatgggaaggctggagggaatctttttgagaatattttcagatatgtatagtttgtacaattatatctactttgtaatattgaccagggctaaactacttggctaaaatatctggcttctgaaagcccccactaatttctagatcttttagttattataatgaccttactataggaattgggtcacagtggtttaacaaatgtggagtgtaccttatagcagactatgaatttgga

SEQ ID NO: 566794 - DNA, 637 bp, Homo sapiens
ttatgttaaataactgcaaattactcctctacacagatccctgtctgaatcttttaatatgtgaagatgctttttgagtaggatctgaattaactttcccagtactcaaagaatgaacccttatgacacttttaaatagttgctggtttgttgccaaccacattagcaaaagtactggttactaagtaaaaaatattttaagactaaattacagtaaacatgaaagctccacagtttaaacccaatataaatcaaccatatccaattatcaagttaaaacaaagaatattaactcctgaaagctgaaagcaagattttttaaaaaacatcaccaatgggtattttagacttttgcagttttttgtccaaatcttcttgatattgtgaactgtaccccttccagtttagtttcttctggactttccttacttaactgacagttaccttttaaaatttgcacacattatgattaaaattgggcctctactgtgatgattcctatttcctctcatgttttaaagtgcaaactaacattcaagtgaacattagcatcaagtaatgcagacatttgtatgcatttccttkattcaatttgtgaccttaccagttttgaattggaattgcaccatttcgtaga

SEQ ID NO: 566795 - DNA, 623 bp, Homo sapiens
ctatggggcgttaaataatgtttatttaagtttaataaacttaaataacaatttaagttccaattaagtaacaattttaagtttaataaataacaatttaagttaataataaacattatttaaggttccaaagcctaggctctaaacagtctaggccacagggattacaactcctaggcatgtcctagtcctgaactggactcagagccagtggacctggagaacaggcaacctattgagacaccagccaggccagctaagggagtgcttgcaccgtccctcctccaaccccaggctgcacagcttacagttcccaaggagacccctttcttctgcttgaggagagggaagagtggggaggactttgtcttccatcttggataccagctcagtcacagtaggataggcaccagtcacagtcagagtcataaggcccccttgccatgccccagctcctgaacatcatttctggacacccccygagccagaagggaacctgctgccatgaaggtaaggacccagtcttagaaagacccttcacctgctgactgaagaggcttatggtaatagtggctgtgaggtgaggctcctctgcctgtggaaatgggagggaagggttggag

SEQ ID NO: 566796 - DNA, 332 bp, Homo sapiens
gagctttaatcctagctaattactcatgaaacaaagaagagtaaagttagttaggtgctgatatggtttagctctgtgtccccacccaaatctcatgttgaattrtaatccccagtgttggaggtggggcctggtgagaggtgattggatcatggtagtgatttctaatggtttagcaccatccagctagtgctgtctcgtgatagagttctcacgagatcgagccatttaaatgtgtgtggcacctttccccttgctctctctctcctgttggccatgtgaagactctggctgcttccccttcaccttctgccataattgtaagtttcctg

SEQ ID NO: 566797 - DNA, 645 bp, Homo sapiens
gaatgaatgctctttgaatgtgacacactgttaaaatgaatcttaaagagagaacaagacaagcagaataatttacgttatacaaataaaaccattttgaagagttatatctcccatgaccacaaaggcatgttgcagagtctcccctgcaacagcatgctcaccctgtagtggaattcacgtttatgatgagtatgaaggcagctaaaatcactttgaaacctgtggaaaagaatggggattaaattatgttccgctgcatcactttatccaaaagtcaaaactgatactgaatgaattaaaattaaaaagtgaaagaaattgaagaaagatgctccacttcctgattaaagccaagctcaaatacctggattccactagagagattatagtattaggattgcccctgcaggaatctrtaacagtcactaagggatgtccacaagcctaaagaaaaagttatagaaaatgcagtattaaattagacacaatggatgaagttctgcactcaatttttatattccaaatggtcatttaattttgatgaaaaatattttacagtagtgaagaagagccaagcagaacaacacttcagctgcagcacaactttctcacttgtgctgcaaatcttttcatcatataatg

SEQ ID NO: 566798 - DNA, 535 bp, Homo sapiens
aggttaaaaaaaaagtcttcttgtatttaagatcttgagtggggaatgctatgaatcaggacaagaagtccaaaagccacaaagtagaatcagcacttctttcctgcaaaacattgacagcaaagaaaggaagaagagaagtagtaaaaagaaaagtagataaaaaggacacaatttttttgcttgaaagataaaatgagaggaagaagagagaacacagaaagaggaagaaagttagggagtatattcattcaaatctgactcccttcagggccataactgataatttagatacaaattcaaattgcacttactttacaagcaatacatctcacatatagtaatttgctrtagggttatacttacaaaaatatgctttcatacacaagggtatggtttcccatattgcattaatagcaaaataattgtaacaatataaagttaaataagccgacattatgtttaaaaattctggtgaatatctgtgtatgtatacatgtgtataatacagttatttataatgaagcgttagatc

SEQ ID NO: 566799 - DNA, 595 bp, Homo sapiens
atatgaaaatatatccatcatgatgtattataaagaaccaacagatggaaaacattgtagtgaattttatgctgaaaataactagcataaaattatatttttatatcaaaaatatatgaactgacatgtttatttttgtgggatgcacaattttttagagtaggtatattaaacaagtgggagaaaaaattgtggaagggaatatgaaattttcctttttattttacatatttaatatatttgaattgtaaacatttatttatgtttttaaaataatgtgattatctggagagaggacttttatcatttcataattttacatctaaaaatttttaataataaaatttttatgaaatctgtgattttggtaaamattaaaaatgatgttagtttattaacaaccttgtgatttgtcttaatcttcttgaaaaacacataaaactattatttccttgtattatacaaaacaggatcatcgtatacggcctttgagttctagttataatttcttacctatagcaaaatctatgttatctgcttcatgagagactacttgtacagagtttaaaagacaaaatagtctgggtgtggtggc

SEQ ID NO: 566800 - DNA, 595 bp, Homo sapiens
atatgaaaatatatccatcatgatgtattataaagaaccaacagatggaaaacattgtagtgaattttatgctgaaaataactagcataaaattatatttttatatcaaaaatatatgaactgacatgtttatttttgtgggatgcacaattttttagagtaggtatattaaacaagtgggagaaaaaattgtggaagggaatatgaaattttcctttttattttacatatttaatatatttgaattgtaaacatttatttatgtttttaaaataatgtgattatctggagagaggacttttatcatttcataattttacatctaaaaatttttaataataaaatttttatgaaatctgtgattttggtaaacattaaaaatgrtgttagtttattaacaaccttgtgatttgtcttaatcttcttgaaaaacacataaaactattatttccttgtattatacaaaacaggatcatcgtatacggcctttgagttctagttataatttcttacctatagcaaaatctatgttatctgcttcatgagagactacttgtacagagtttaaaagacaaaatagtctgggtgtggtggc

SEQ ID NO: 566801 - DNA, 411 bp, Homo sapiens
tctaaatatcagactaattataaatagggaagagagttaaaatggaaatctgttatagaccgggctgaaagctataatgaagttattaaatcatcaaaagcaagtggactgaagggagtaatgcagtgggtaataatgtaatttaattaatattaaagaaaaataaacactggaacttaccaaaagagcaggactgtagattctgtaacatatcttcaaataggtttgcagcaatattggaagggaaattaaatttatcttccaatatgatagcaatatcagtgyagcaaagaaacagagacgaaccatccaaatttaataacattaatagcattataactgagacaatgatactgaatcgtgctagttactgcctttattatattgcttaggcacagatatcagagaatt

SEQ ID NO: 566802 - DNA, 527 bp, Homo sapiens
ttgagcaagggtccacaaactaaatcccatcacctgtttttgcatctctcacaaacatgttatgtacatgtgtaaatggtttttaaaatttaaaaataacatttcatgagatttaaattcagtgtccataaaatgctgttggaacacagctaagctcacccgtttacaacttgtttctgctttctattgttctgtaagagcagagctgagtagttttaatagagaccatatatcctggtgtattattccattttcatrctgctatgaagaaatacctgagactgggtaatttataaagaaacagaggtttaacatactcagagttttacgtgactggggaggtatcacaatcatgcggaaggtgaaagaagagcaaaggcacatcctacatggcagcaggcaggagagcgtggcaggggaactgccctttttaaaaccatcagatctcatgagacttatttactatcacaagaacagcaggggaaaaatctgcccccatgattcaattacctcgcaccgggtccctc

SEQ ID NO: 566803 - DNA, 527 bp, Homo sapiens
ttgagcaagggtccacaaactaaatcccatcacctgtttttgcatctctcacaaacatgttatgtacatgtgtaaatggtttttaaaatttaaaaataacatttcatgagatttaaattcagtgtccataaaatgctgttggaacacagctaagctcacccgtttacaacttgtttctgctttctattgttctgtaagagcagagctgagtagttttaatagagaccatatatcctggtgtattattccattttcatactgctatgaagaaatacctgagactgggtaayttataaagaaacagaggtttaacatactcagagttttacgtgactggggaggtatcacaatcatgcggaaggtgaaagaagagcaaaggcacatcctacatggcagcaggcaggagagcgtggcaggggaactgccctttttaaaaccatcagatctcatgagacttatttactatcacaagaacagcaggggaaaaatctgcccccatgattcaattacctcgcaccgggtccctc

SEQ ID NO: 566804 - DNA, 527 bp, Homo sapiens
ttgagcaagggtccacaaactaaatcccatcacctgtttttgcatctctcacaaacatgttatgtacatgtgtaaatggtttttaaaatttaaaaataacatttcatgagatttaaattcagtgtccataaaatgctgttggaacacagctaagctcacccgtttacaacttgtttctgctttctattgttctgtaagagcagagctgagtagttttaatagagaccatatatcctggtgtattattccattttcatactgctatgaagaaatacctgagactgggtaatttataaagaaacagaggyttaacatactcagagttttacgtgactggggaggtatcacaatcatgcggaaggtgaaagaagagcaaaggcacatcctacatggcagcaggcaggagagcgtggcaggggaactgccctttttaaaaccatcagatctcatgagacttatttactatcacaagaacagcaggggaaaaatctgcccccatgattcaattacctcgcaccgggtccctc

SEQ ID NO: 566805 - DNA, 479 bp, Homo sapiens
ggaaaaatctgcccccatgattcaattacctcrcaccgggtccctcccatgacacatagggattatgggagctacaattcaagttgagatttgggtggggacacagccaaactatatcacctggaaagcctaacatatttattacctagtcctttacttagaaaatttgctgaactctgatttagagaatgtgggtaattaaatacagtactgtggtaaatgaatcaggagagtaggtttgacaagaaagcatgatgcaaagggttgtacttatttactttttttttttttttttgagatggagtctcactctgtcaccaggctggagtgcaatggcacaatcttggctcattgcaacctccacctcatgggttcaagtgtttttcctgcctcagtctccagagtagctgggactacaggtgcatgccaccactcccagctattttttgtatttttagtatagatggggtttcaccttg

SEQ ID NO: 566806 - DNA, 603 bp, Homo sapiens
gagctacaattcaagttgagatttgggtggggacacagccaaactatatcacctggaaagcctaacatatttattacctagtcctttacttagaaaatttgctgaactctgatttagagaatgtgggtaattaaatacagtactgtggtaaatgaatcaggagagtaggtttgacaagaaagcatgatgcaaagggttgtactyatttactttttttttttttttttgagatggagtctcactctgtcaccaggctggagtgcaatggcacaatcttggctcattgcaacctccacctcatgggttcaagtgtttttcctgcctcagtctccagagtagctgggactacaggtgcatgccaccactcccagctattttttgtatttttagtatagatggggtttcaccttgttggccagaatggtctcaatctcttgacctcatgatttgcctgccttggcctcccaaagtgctggaattacacgtgtgagccaccgcacccagcttatatgcttctgtatgaaatggagtttccaaagaatttattttgtgccagcctgtggatagaagcaagacaatcagtccacacactttaaaggaaat

SEQ ID NO: 566807 - DNA, 479 bp, Homo sapiens
ggaaaaatctgcccccatgattcaattacctcgcaccgggtccctcccatgacacatagggattatgggagctacaattcaagttgagatttgggtggggacacagccaaactatatcacctggaaagcctaacatatttattacctagtcctttacttagaaaatttgctgaactctgatttagagaatgtgggtaattaaatacagtactgtggtaaatgaatcaggagagtaggtttgacaagaaagcatgatgcaaagggttgtacttatttactttttttttttttttttgagatggagtctcactctgtcaccaggctggagtgcaatggcacaatcttggctcaytgcaacctccacctcatgggttcaagtgtttttcctgcctcagtctccagagtagctgggactacaggtgcatgccaccactcccagctattttttgtatttttagtatagatggggtttcaccttg

SEQ ID NO: 566808 - DNA, 559 bp, Homo sapiens
ttttctagggcagaaagaatgtcctgagtttccctgcaagcaaagcataaaacttggataaagacagattattgtaaggcactactagaaagtgggagtgaaagaaggggaagagaaagggtcagggaagatggaggtcaatataagggtgcattattaaggcagcaggaactgacttagctgggamctttaagaactattatataaaaaagtctttgtagatgccaaacctgaatgaaacaaacaaacaaacaaacaaaaaccaaaaaacagtatatttatccagtaacaccatcatgacccattggtttgaaggttgcctctacaggtgatagcaatctcacattttcatgctgtacatgagtgtgggcaaatgagattgttttaccagcaaagagaccctatggcagaaggtggaaaaatgcacggcacacatttaagatagaatgcagtcaatgcagaataaaccttactagatgtgtctattaaaattctatatagccagaggagatgtgatattggaaccaagaatgtctgccacaggtagcataaattatgt

SEQ ID NO: 566809 - DNA, 559 bp, Homo sapiens
ttttctagggcagaaagaatgtcctgagtttccctgcaagcaaagcataaaacttggataaagacagattattgtaaggcactactagaaagtgggagtgaaagaaggggaagagaaagggtcagggaagatggaggtcaatataagggtgcattattaaggcagcaggaactgacttagctgggaactttaagaactattatataaaaaagtctttgtagatgccaaacctgaatgaaacaaacaaacaaacaaacaaaaamcaaaaaacagtatatttatccagtaacaccatcatgacccattggtttgaaggttgcctctacaggtgatagcaatctcacattttcatgctgtacatgagtgtgggcaaatgagattgttttaccagcaaagagaccctatggcagaaggtggaaaaatgcacggcacacatttaagatagaatgcagtcaatgcagaataaaccttactagatgtgtctattaaaattctatatagccagaggagatgtgatattggaaccaagaatgtctgccacaggtagcataaattatgt

SEQ ID NO: 566810 - DNA, 552 bp, Homo sapiens
gctttgtaacatattttgaaatagcaaagtgtgttgcctccaactttktttatctttcttggggttgcattggccattctgaatgttttgtggtttcatataaattttaggattttttttttctatttctgttaaaaaaggtcattgggattttgatggaataacattgaatctttagatgactttgagtaatatggacattttaagaacattaagtcttctaatccatgaacacaggatatctttccatttatagtgtctcctttatttcatctcttttatagttatcaaggtctaatcttcacctctttggttaaattattcctattttattcatttttatgctattggaaatggatgttaccttaacttttttcagataatttattgttagattacagaaacatgactaatttttgtatattaattttacaggattggtgtattttaaggctttgtgtgtggaaacattaaagttttccgtatataggatcatgtcatctgcaaacagagattgttttacctcttccattctgatttggatttatttta

SEQ ID NO: 566811 - DNA, 579 bp, Homo sapiens
acttgctatagttttccattaatttaggtcattaatttttcaaaawatattttagagtggtctgtgtctaagtcttgaacatattttgttgaatttctttctaaatatttgatgtttttgttgctttttaagtagttatattttttgaaaatttctgtaattaaattattggaaacaatccactgttttctccatatattttttaacaattgtgatttttgtaagaacttagcaatgttattccctaccagataactgtagaagcatttaaggaaataatcctgcatagttttattcattattaaatccacagtacctagctcaatgtatgtcacatagtaggcaataaataaatacttgctgcaatctttgcaagaaatgcttaacccccaggatttgaaaattgaccctcagttccacttacatagaatatttggttgatagatatattttcaacacataagtaccaaccttcaacatgtaattacataggaatatttttcttacaattttcctattctagaaacacatgggactgcttaatttaatttaggagatgtgggtgtgaatgttaaggat

SEQ ID NO: 566812 - DNA, 654 bp, Homo sapiens
ctggcattgtgtattcccctttatatttatttgcaatgataaaatcatgcatttataggcttgtgggttaatgtagatacaagtaatgcgatgtaccattttaatttaaatgcaaaacatttattgctcttacataaagtcaataatatctatactggtgaataagtgccactgatccaaatcaattttttaaattacctaaaaatttattattgctcataactttatatttctctagatactatgtaaatctttgaaaacaattagcaaatccaaaagcactttgtaaatctatgaatttttaatgctcctttacatgccatctttcttctaacttgaaaatataattcccttcaatgtcccttcccttctcaaaccttttaacttccagcactaaagacagctgtgcagagcataaataacayattaattttcatggtctatgaatcagacaataccaatggattttcaactattttaaataccttccaattacagctgaatctcacattgccattacctgaatatgtgggaaaacaaactttgtttggatgacataaaggcctatgaggaaataccatattatcctgagggtgcagtacaggaggtgattaaatgcaggatggaagcagggaagggaagtaatgaaactat

SEQ ID NO: 566813 - DNA, 563 bp, Homo sapiens
tgaatttttaatgctcctttacatgccatctttcttctaacttgaaaatataattcccttcaatgtcccttcccttctcaaaccttttaacttccagcactaaagacagctgtgcagagcataaataacacattaattttcatggtctatgaatcagacaataccaatggattttcaactattttaaataccttccaattacagctgaatctcacattgccattacctgaatatgtgggaaaacaaactttgtttggatgacataaaggcctatgaggaaataccatattatcctgagggtgcagtacaggaggtgattaaatgcaggatggaagcagggaagggaagtaatgaaactattactccatataataaacaactatatatattcttcagattctaatytatttgtaggcaagtgaatgtcttcagtagagcagactgataatcggagttggagagagggctcacaacattatccttgaagcgagtgtcttcactagagcagaatgataattaggatgtggagatgggcaaataatatcacccttgacaacgataat

SEQ ID NO: 566814 - DNA, 563 bp, Homo sapiens
tgaatttttaatgctcctttacatgccatctttcttctaacttgaaaatataattcccttcaatgtcccttcccttctcaaaccttttaacttccagcactaaagacagctgtgcagagcataaataacacattaattttcatggtctatgaatcagacaataccaatggattttcaactattttaaataccttccaattacagctgaatctcacattgccattacctgaatatgtgggaaaacaaactttgtttggatgacataaaggcctatgaggaaataccatattatcctgagggtgcagtacaggaggtgattaaatgcaggatggaagcagggaagggaagtaatgaaactattactccatataataaacaactatatatattcttcagattctaatctatttgtaggcaagtgaatgtcttcagtagagcagactgataatcggagttggagagagggctcacwacattatccttgaagcgagtgtcttcactagagcagaatgataattaggatgtggagatgggcaaataatatcacccttgacaacgataat

SEQ ID NO: 566815 - DNA, 588 bp, Homo sapiens
aattaatcaaaagtctatgtattttgggatcaattactggattctattggattgatttcttgcacaaatatcccaatgatataattgttgtaatgtaatgataagtatcgaggtcatcttactaaggtaagagaggaggaaggaggattagtcaggaagaggccatgacacaaacacgataaaatctagaccaacacaatgagattatctgtactaaaaaggaatttctcttttggagggaaaatctagatcctgctacccctattttgattagttactactgtgcttagttatttcctggtggctactcagatacagcactaccttttgttgagtccaacagtggattctgaaattataatgactaggggctgtaagtcaacttctctaacctagagagcaagttctttcttggaaggagtaataagcatctcacttctagggttgctgcatgtattaatgttttctgcctccagagaaaatttatgtttgcytctatcaggtgactatgtcagatcaccttaacctaatcagcagctgggaagatgtcaagctgtgcttcactaataataagaagccattcattac

SEQ ID NO: 566816 - DNA, 615 bp, Homo sapiens
caagttccttcaaatacagaaaaagaaacataaaagttgacaacatttgaccaaacttaataaataggtgaaaaaattagaatcatcaaaaaaatgaagacaaaattagagagagaataagtgtaaattgattttgttcacaattggcaaaatagtaaagagaatagaaaatggaaatttaaaaagtgagcaaaagaaaatgaataaaagataaaatggaccatagacaaaattataaagtctataatttgggacagaggtggaggagatcctatggcattgctcarttacccctgggacaatagacattagaataataattagctctatttgttaaaacagacaaatgtcaacacctcaagcattatataacgtgtttattttttcctaataaaagttacttgcctttatttggagttataccctctatgtcatctgaccatcaaaattaccattgtaggagaaaagagaaatagctgaggcaccactgcacacaaagctacgtgacagaacaagaccctgtctcaaaaacaaacaaaaaaaccaataaccaaagaaacaaacacaaaagggatgttatagaaaattaaatctgaatgatcaataaacatgaaa

SEQ ID NO: 566817 - DNA, 576 bp, Homo sapiens
acatcacaaaataaaatttaaaataaaaagagtaatatgtacacaacaccttcaaatatgtatccaatagattagacataaatgaacaaatagcctttcagtttcttaattgtgaaatagaaaggtgacttaaaatatatttgaaataacatggctgaaatcattacttagtttcatattactctatggatatatgtgttagactttgaaaatattgtacccttttgctctttgtaaaaactgacaaagtagaagttttgaatatttatttatatccagcagctttagaaatagtatgtacattgtgtttacagaaaattaatattcatccagatacataaacattcagttgaaatggtacaaaattcaaacattgtgagtataacttcctcttctgattcaagagttaaattattttgttgaaatgcctmgtatttgaaaaccagtacaatattttagttctgagtatttgtgaagaaccttggttgaagagtcatggagaaaaataaagaaagagaaaactgacatttttgttctcacttgccaaaggtattttacaaacctaagagctacaga

SEQ ID NO: 566818 - DNA, 571 bp, Homo sapiens
atataaaattgatcatttgcttgtcagaattgatgagcatggcataagaacagacttccaaaatgctttgtcatatagcctcaaaatcagattgtaaacaatagcaacacaagaagtattatctcaaggtttcaaaacaatcttgacatttaaataaggtcatatatagttgacagatgcctacacatccattaagatccagcttaactataacctcaargaggtttgtgctgcttagtctaccataaaaatactattttctgccaccatagtaacctgagaaccctcaagcatactatttctggcaaacatttaaattaattattctctttctaaattagactgtgcattcaatgaggcaaatttggcttcttatttatagtttaatctgtagcagtgaatatgctggctttcctcatatgtggtcagtacaattcaacatccaattagtttgctacaattcaaacctaatttttcaatttcctcttaactaccatgatatatattttcatcttcaaaagtgagtggttaggttcaataagtgttaactaagaattttgcagaaaaacag

SEQ ID NO: 566819 - DNA, 651 bp, Homo sapiens
ttttcaatttcctcttaactaccatgatatatattttcatcttcaaaagtgagtggttaggttcaataagtgttaactaagaattttgcagaaaaacagcagacaaaagtattctgaatatttttgctatgttggaaataggcagagttagacatctgtacctcctcaggccaatgtaaggaaacatctgcgaagtacacattaaacaaaacataccatgtattcagccasagtgagatggtgcagagccagaagggaaaactaaataaatttaaaaagagaattgcagggatagaactgtgatgtattgctctatctccactcttaatgttatgttgctatggtatgactggctgaattaatccaactgtattggttaacagataaaagaacaaattggactatctaacagaattgcaaggtttgccaattttcatcttaaccagttaaataaataaatacatcttttaatggaagaatctataaatctataaaatctactaagcaaaaatggcaccaattcagaaagaactatagaataataatttttttaatctgtattcaaaaacctggccatctgctgtgacaagcaggattagatcagtagtagcagttctgagtcagaggaagaaatgatgtaaatggtaattg

SEQ ID NO: 566820 - DNA, 651 bp, Homo sapiens
ttttcaatttcctcttaactaccatgatatatattttcatcttcaaaagtgagtggttaggttcaataagtgttaactaagaattttgcagaaaaacagcagacaaaagtattctgaatatttttgctatgttggaaataggcagagttagacatctgtacctcctcaggccaatgtaaggaaacatctgcgaagtacacattaaacaaaacataccatgtattcagccacagtgagatggtgcagagccagaagggaaaactaaataaatttaaaaagagaattgcagggatagaactgtgatgtattgctctatctccacwcttaatgttatgttgctatggtatgactggctgaattaatccaactgtattggttaacagataaaagaacaaattggactatctaacagaattgcaaggtttgccaattttcatcttaaccagttaaataaataaatacatcttttaatggaagaatctataaatctataaaatctactaagcaaaaatggcaccaattcagaaagaactatagaataataatttttttaatctgtattcaaaaacctggccatctgctgtgacaagcaggattagatcagtagtagcagttctgagtcagaggaagaaatgatgtaaatggtaattg

SEQ ID NO: 566821 - DNA, 651 bp, Homo sapiens
ttttcaatttcctcttaactaccatgatatatattttcatcttcaaaagtgagtggttaggttcaataagtgttaactaagaattttgcagaaaaacagcagacaaaagtattctgaatatttttgctatgttggaaataggcagagttagacatctgtacctcctcaggccaatgtaaggaaacatctgcgaagtacacattaaacaaaacataccatgtattcagccacagtgagatggtgcagagccagaagggaaaactaaataaatttaaaaagagaattgcagggatagaactgtgatgtattgctctatctccactcttaatgttatgttgctatggtatgactggctgaattaatccaactgtattggttaacagataaaagaacaaattggactatctaacagaattgcaaggtttgccaattttcatcttaaccagttaaataaataaatacatcttttaatggaagaatctataaatctataaaatctactaagcaaaaatrgcaccaattcagaaagaactatagaataataatttttttaatctgtattcaaaaacctggccatctgctgtgacaagcaggattagatcagtagtagcagttctgagtcagaggaagaaatgatgtaaatggtaattg

SEQ ID NO: 566822 - DNA, 317 bp, Homo sapiens
aagtttccattgaatgtaactgtgggtctacagtaaaatgtgaaataacactaaaatatttaaacaccatgtatgtagattgttatttgagaactgcagctacagggattgccttttcaggtcygaactgaaccagtaagtaagttttatattatgtatacagttttatacaatatatagtattggtatctaatgtatacattgaagcttttgttgagttctaattacagacaatcacccggtgtgctcagaatttatagataagagaatatagaaaactctcaaatagaaatcattgtaacgatataactaattag

SEQ ID NO: 566823 - DNA, 531 bp, Homo sapiens
ggattgccttttcaggtctgaactgaaccagtaagtaagttttatattatgtatamagttttatacaatatatagtattggtatctaatgtatacattgaagcttttgttgagttctaattacagacaatcacccggtgtgctcagaatttatagataagagaatatagaaaactctcaaatagaaatcattgtaacgatataactaattagtcacaggcatttttcaaggcattagaaggagtgaaataccttacgttgtaatttgtaaagctagagcagaatgttaatatggactctatctgtaactgttttctctgagtcccaaacgctaaaaaatatacaaagggccgggtgtggtggccgacgcctttaatcccagcactttgggaggctgaggcgggcagatcaggaggtcaggagatcgagaccatcctggctaacatgatgaaaccccatctctactaaaaatacaaaaagaaattagccgggtgtggtggcgggcacctgtagtcccagctactcgggaggc

SEQ ID NO: 566824 - DNA, 531 bp, Homo sapiens
ggattgccttttcaggtctgaactgaaccagtaagtaagttttatattatgtatacagttttatacaatatatagtattggtatctaatgtatacattgaagcttttgttgagttctaattacagacaatcacccggtgtgctcagaatttatagataagagaatatagaaaactctcaaatagaaatcattgtaacgatataactaattagtcacaggcatttttcaaggcattagaaggagtgaaataccttacgttgtaatttgtaaagctagagcagaatgttaatatggactctatctgtaactgttttctctgagtcccaaacgctaaaaaatatacaaagggccrggtgtggtggccgacgcctttaatcccagcactttgggaggctgaggcgggcagatcaggaggtcaggagatcgagaccatcctggctaacatgatgaaaccccatctctactaaaaatacaaaaagaaattagccgggtgtggtggcgggcacctgtagtcccagctactcgggaggc

SEQ ID NO: 566825 - DNA, 531 bp, Homo sapiens
ggattgccttttcaggtctgaactgaaccagtaagtaagttttatattatgtatacagttttatacaatatatagtattggtatctaatgtatacattgaagcttttgttgagttctaattacagacaatcacccggtgtgctcagaatttatagataagagaatatagaaaactctcaaatagaaatcattgtaacgatataactaattagtcacaggcatttttcaaggcattagaaggagtgaaataccttacgttgtaatttgtaaagctagagcagaatgttaatatggactctatctgtaactgttttctctgagtcccaaacgctaaaaaatatacaaagggccgggygtggtggccgacgcctttaatcccagcactttgggaggctgaggcgggcagatcaggaggtcaggagatcgagaccatcctggctaacatgatgaaaccccatctctactaaaaatacaaaaagaaattagccgggtgtggtggcgggcacctgtagtcccagctactcgggaggc

SEQ ID NO: 566826 - DNA, 593 bp, Homo sapiens
aagcacttatggacacaggtttacttggtggtggagaatggaaggagaggatcaaaatacttacagatgaaataatatgtaacaccaagcccctataacttgaaatttacctctataacaaacatgtatatgcacccctgaacctgaaataaaactttcaaacttaattattaaataaataaaacataccacccatcaggtcttccttggaaatagtagcwgttcttgtgttttaagccctaagggaaatatctagcatctatgtttgttgtaactgatttgttctttcatttattcatacacctaagagacattactttgtaagaagtatgacatgatgtgtgttatatccatttctttataatttattaaatgttaaaaaaaaacagtagtacattccaaacacttactatgcttggaggggaaagaaaaaaaggaaaactttgatatgatgaatttctgacacttacatttgatattaagaaaagtacacaacaatcaaaaggtaagtcaaaaaacattaaattttgagatttaaatatagtttcccctaataaaattttataaattacactttctctaagtctaatatt

SEQ ID NO: 566827 - DNA, 526 bp, Homo sapiens
gtacagagactgaataatatggtttggctctgtgtcctcacccaaatctcttgtcaaattataacccccaataatagaggtagagccaggtggaaggtgattgggtcatagcgtgggttctcatggtttaayagcattcccctgggtaccactgtggtaatgatgatttcttgtgaggtctggttgtttgaaagtgtgtggcaccttccccattttcttttttgctcctgatccagccatgtaagatgtgtctgctttcccttcaccttctgctatgattgtaagttcctgcggcctccagagaagccaagctggtgacaccatgctttctgtacagtctatgaaaccaagagccaattaaacatcttttttaataaattgctcaatctcaggtatttctttatagcagtccaagaacgaactaatacatatgtcagaaactgttcttttatctattgtgtgaacagaaaaagttgccttctaaccttggatcactctgtggggtaaaggtctgtatttaaatctg

SEQ ID NO: 566828 - DNA, 580 bp, Homo sapiens
tgtctgactgtgggcagtgtctggaccccacactcgctcacacacactttgctgttccaagcctgacttgcccttgggagttgtgggacccaggctggtagtgtgagccaagcacagtctgccagactgagtagctgaaatgagcccaacaggcctgagcaaaacttgggctaaggtgccactggccacagaggtgtccagctagaaaaacaacaayccagagatcctgtaatacctggagagtcgatatgattctattatacataatagttgttcatgatggattgccaaaatacctcattattaatgagttaaacaaaacacttgatatatgttcattttatatttacctgagtaaaaatttaacctctttgttaatgtactttcttagttttggaaggcatctgcggattcccaagtggactcatgtaacagtcaataaatgattgaggaagtatactatataaactcatgttggctaaataagtctttatagattcctaaagggtatcccaacaaaagaacaaaactttaccttcactgactttgttttcctgtcacacatactaccccatttttt

SEQ ID NO: 566829 - DNA, 580 bp, Homo sapiens
tgtctgactgtgggcagtgtctggaccccacactcgctcacacacactttgctgttccaagcctgacttgcccttgggagttgtgggacccaggctggtagtgtgagccaagcacagtctgccagactgagtagctgaaatgagcccaacaggcctgagcaaaacttgggctaaggtgccactggccacagaggtgtccagctagaaaaacaacaatccagagatcctgtaatacctggagagtcgatatgattctattatacataatagttgttcatgatggattgccaaaatacctcattattaatgagttaaacaaaacacttgatatatgttcattttatatttacctgmgtaaaaatttaacctctttgttaatgtactttcttagttttggaaggcatctgcggattcccaagtggactcatgtaacagtcaataaatgattgaggaagtatactatataaactcatgttggctaaataagtctttatagattcctaaagggtatcccaacaaaagaacaaaactttaccttcactgactttgttttcctgtcacacatactaccccatttttt

SEQ ID NO: 566830 - DNA, 589 bp, Homo sapiens
tttcctctgtttttctagtttgcccatggacatgaagttatttacaattggtaacagcagtttctgttatgtaagagatgatagagaatcccagtatctattttttaaattaagtctgagtttttctttaaatgaagcaattaaaacatctcaatttatgatgtcagaacaaatatctatcttatttaccatcgtatcgcaaatgtctaccacagctttgttctaccaagagtaggcatttactacttgttgagtaagtaatagtgttgcatcagcaattgtgttttcttccttgccacatttattatgttagtaggtggtgatgtttcttccagtgaactacccattttgcactttattgtycttctttctgagttctagcagactatatttcgaaccaaatggattaacttttgaaataccagtccgtgtgatcacagtgagttcttatctgccactaaaacctgtttaatggaagacatctcaagctgaaaaataccttctggaaaatattatattttagtaaaagtaaataaaaatggattgtggttaaaagtccatctagaatatattttgtttgttttttttc

SEQ ID NO: 566831 - DNA, 591 bp, Homo sapiens
tcatcctttaggcttagttaagagcattagataattatgttgttccttaaaataaattctaaaagtctgaaaatattagcaatgtattaagcttccattctctttgaagagtccttatttcttttttttttgtttgttttgttttttgttttttgttttttttttgagacagagtctcactctgttgcccaggctggagtgcagtggcctcccgggttcaygccattctcccgcctcagcctcccaagtagctgggactacaggtgcctgccaccatgcccggttaatttcttgtattttcagtagagactgggtttcactgtgttagccaggatggtcttgatctcctcacctcgtgatctgctgcctcggcctcccaaagtgctgggattacaggcatgagccattgtgcccggccgaagagtccttatttctaagcaaccatgttttaatctttattattttaaattgcaaaagcatcagaggatcttgtgcagagagattgtttccttccgcaatgttgacattatattttgaatttttaacggacgttggcagtaactcagtttgaaaattggatgaaatcaacac

SEQ ID NO: 566832 - DNA, 340 bp, Homo sapiens
gcaatagaagtaaaaggcattatgaaaacagcacaaagacttatgtatttgtttacttatttgttggtccttccagtgcacataattagatatttaattttagtgtttcagacatgtaccagaagaaggcataattatacttctattaatttcatacactgccactaagagcaatttaagatattgtattgatattaatattttaataatatataatgcatttattaaaattgatagctagttattcattcttagttaatgttttatttaatgatrgtcatcacagaaaatcacatcaagatttcaaaatattagttcttttaaaagacataatgctgca

SEQ ID NO: 566833 - DNA, 650 bp, Homo sapiens
cactacacaatttatgcatgtaccaaaaaatacatgtaccccataaatatgtacatctattatgtaacaattaaaaaatcctaaaaaatataaaattgaagaaaaatacatacaaatgaccaaaagttatatgaaaaaaatgtttaacataactaatcatcagaaaaatgcaaattaaaaaaattaaatggttttgaaataaagtttctgtaactgggaacatatctctccaaatctactacatatcttttmctttattttgtttttattttattttcctaaattataatttagctgatttatgctaagtgttgtctttgctattgttttcaataagatattaaccttttaaagttaccaggaaacttggctagacagtaggcagacaccaccaattggttatgagcattcagggagcatctactactggtcgagatgagcatttcttcattctcagtgacaaattactcttttctgaaagagtagagatgaatttcgttcaagtatgaagcacactttattttattttaagacttttttcttgttaactgaattcaatccgatcttgttgttgttggcaatttttatccagcctcctccattactcagccaatctgaactgtcattaccctgcttaaggcaggccctga

SEQ ID NO: 566834 - DNA, 590 bp, Homo sapiens
ttaaaaataataaagagtaattttaatttacattttgttccaaagagaacagcaattacgtttctcatttgattgttgacattatcccttagaagcccaagaagacagtgagagaacctgttattatgcacttaattcaccagaattgaatggtttgtaatgaggtagtgtcagaaaagtagtgaacatacttgtaaytttataagggaatgactcatatatttatttatgaaccccaagttttagaagaggtttcaataatttcttaaatgcataaaagtggtaacaggaagagttgcttaagcagaagaggacttagaatacatcaatgattatcttaattgagccatataataaatacagtgaagtatatgatgtgcaaacattttaagcgtgtattttttatgactgtttcctcaccgtctagatcatgatataaaacttcccatcacatcagaacgtttttgtatacatatagcccactcaagtcaatgcatcatgtccaaagagcaaagcagcataatttctatcatcatcagttagagatgtttgttttggaactccatataaatggaatcacagagtatata

SEQ ID NO: 566835 - DNA, 590 bp, Homo sapiens
ttaaaaataataaagagtaattttaatttacattttgttccaaagagaacagcaattacgtttctcatttgattgttgacattatcccttagaagcccaagaagacagtgagagaacctgttattatgcacttaattcaccagaattgaatggtttgtaatgaggtagtgtcagaaaagtagtgaacatacttgtaactttataagggaatgactcatatatttatttatgaaccccaagttttagaagaggtttcaataatttcttaaatgcataaaagtggtaacaggaagagttgcttaagcagaagaggacttagaatayatcaatgattatcttaattgagccatataataaatacagtgaagtatatgatgtgcaaacattttaagcgtgtattttttatgactgtttcctcaccgtctagatcatgatataaaacttcccatcacatcagaacgtttttgtatacatatagcccactcaagtcaatgcatcatgtccaaagagcaaagcagcataatttctatcatcatcagttagagatgtttgttttggaactccatataaatggaatcacagagtatata

SEQ ID NO: 566836 - DNA, 590 bp, Homo sapiens
ttaaaaataataaagagtaattttaatttacattttgttccaaagagaacagcaattacgtttctcatttgattgttgacattatcccttagaagcccaagaagacagtgagagaacctgttattatgcacttaattcaccagaattgaatggtttgtaatgaggtagtgtcagaaaagtagtgaacatacttgtaactttataagggaatgactcatatatttatttatgaaccccaagttttagaagaggtttcaataatttcttaaatgcataaaagtggtaacaggaagagttgcttaagcagaagaggacttagaatacatcaatgattatcttaattgagccatataataaatacagtgaagtatatgatgtgcaaacattttaagcgtgtatyttttatgactgtttcctcaccgtctagatcatgatataaaacttcccatcacatcagaacgtttttgtatacatatagcccactcaagtcaatgcatcatgtccaaagagcaaagcagcataatttctatcatcatcagttagagatgtttgttttggaactccatataaatggaatcacagagtatata

SEQ ID NO: 566837 - DNA, 613 bp, Homo sapiens
agggggaattcatggccttttaagggaacttttacaccaaagatgaactcytagcagtttatcagaaagtccactctgtaaatatacaggtgacaatgcaggagttagggacagtaacttcccgcatagtcagaaatctgcttatgacttttgactccccaaaagttaattactaatagcctactgttgactaatagcctactgttgcggcatcgtactgttttctgataatataaacagttgataacacatgttttgtatgttatatgtattacaaagtattctacaataaagtaagctagagaaaacaatattaagaaaatcataagggggagcaaatatatttattatttattaagtggaagtagatcatcataaagcttttcattctcattatcttcatattgagtgggctgaggaggaggaggaggaagatgaggggttggtcttgctgtctcagtgatggcagaggcagacgaggtggaggagttgaaaagggagacagaagaggcaggcgcactcagtgtactttagagaagtaaatcgtgatttctaggtgattttttgctttttcatttctctaaaaagatttctataccttaccagccatctg

SEQ ID NO: 566838 - DNA, 613 bp, Homo sapiens
agggggaattcatggccttttaagggaacttttacaccaaagatgaactcttagcagtttatcagaaagtccactctgtaaatatacaggtgacaatgcaggagttagggacagtaacttcccgcatagtcagaaatctgcttatgacttttgactccccaaaagttaattactaatagcctactgttgactaatagcctactgttgcggcatcgtactgttttctgataatataaacagttgataacacatgttttgtatgttatatgtattacaaagtattctacaataaagtaagctagagaaaacaatattaagaaaatcataagggggagcaaatatatttattatttattaagtggaagtagatcatcataaagcttttcattctcattatcttcatattgagtgggctgaggaggaggaggaggaagatgaggggttggtcttgctgtctcagtgatggcagaggcagacgaggtggaggagttgaaaagggagacagaagaggcaggcgcactcagtgtamtttagagaagtaaatcgtgatttctaggtgattttttgctttttcatttctctaaaaagatttctataccttaccagccatctg

SEQ ID NO: 566839 - DNA, 344 bp, Homo sapiens
tgcttccttccttccttccttctctttattcctttcttccttcctcctttattcttcaaataaaaatctattaaatgtatattttgtttactgcgtaagaatatatagagaatgtcctcatttgtttagcttttctttacctcactttgtggatatactgtacataatagacctcttaattttttattaaaaaatttaattattggtacataataagtgcatatgtgcatggggtacacataatgytgtgatacagacttatttgtgggcttttcatattacattcaacgccatgatgaataaccatgtgcttatgtcttttcatatttttctcaatacccatt

SEQ ID NO: 566840 - DNA, 457 bp, Homo sapiens
agcaagaaaaacataagttgagtctgtagcatcttgcagagacagaaaggaagtgcaaaagaaagaaggaaggaaagaaggaacattccaaataatacatgtgaatgaataaagcaaatagaaaattatcattagaatcttccactaatacttcctcaaagaggtccactaattaatgctaaaatttgtgagtacattttaaggagaaacaagatatttgcacagtttcaaatgtatttagcctccaatgtatttattaatgactggtaataacataagcttatggaagcaatgaacacttccctctcggaggtgaagcttaatttctctccccttgaatgtgggatgagctcagttacacacttacagtgaatagaatatggaaagagaaaaataattgcacagttgcgaasgctggcagacataactccagttggtgaaggctaacctcatcaat

SEQ ID NO: 566841 - DNA, 534 bp, Homo sapiens
gaaattagtaaaatgaaacaaacaagcaaaccaagcaaaacaaaacaaaagcaacagtaacacaataacactggataaatctaaataacctttgtagggtagcactgyaacaatgttccttagttttgattaatgtactatgattacatagtaccttaatggtaagatgctaatattgggggaactggagtgaaaagctgggtgaagtgtacacaaaatactctgtaaatctttgcaaacctgctataaatcttaagttattttaaaacagcaagttaaaaacaaagaaatataggtataacagacaactattactagcagccttaagagccacccacaaaaatttttcccttgtttaatatttttaaaatatttggaatatgactgttaatgggagatcttcaaaacaaaataaaattccactaaagatacacgcaaccaagtaaactttccactaaatcaggagaacatattagggtttttttgtttaaaaaatgaatgtcttcattggtaaatctaatgggattgtgttag

SEQ ID NO: 566842 - DNA, 534 bp, Homo sapiens
gaaattagtaaaatgaaacaaacaagcaaaccaagcaaaacaaaacaaaagcaacagtaacacaataacactggataaatctaaataacctttgtagggtagcactgtaacaatgttccttagttttgattaatgtactatgattacatagtaccttaatggtaagatgctaatatygggggaactggagtgaaaagctgggtgaagtgtacacaaaatactctgtaaatctttgcaaacctgctataaatcttaagttattttaaaacagcaagttaaaaacaaagaaatataggtataacagacaactattactagcagccttaagagccacccacaaaaatttttcccttgtttaatatttttaaaatatttggaatatgactgttaatgggagatcttcaaaacaaaataaaattccactaaagatacacgcaaccaagtaaactttccactaaatcaggagaacatattagggtttttttgtttaaaaaatgaatgtcttcattggtaaatctaatgggattgtgttag

SEQ ID NO: 566843 - DNA, 608 bp, Homo sapiens
tcgtgttgagtagtcttggtgtaaatcctggccctgccaccttttgtttgtgttaccttattgagtatcttacagtgacatatgtcaggttctgctactgcaaaattgaacataatgttggtaactatttcataggattattgtgaaaattaaattaaaatcatggaaagcaaatataacagttcatggcatatagtacaagcaaattaaatactattacatattagcataaaaaaataagagtaaaagagatcataattttaggatgtaagtttctggaaaaaaaatacccaaactcttgaaatttcaatttcaggtatccacattttaatacagttagatcatgtgcacatttacaaggcagaggacttgagaaattaaataaatattaaaggaagaggcaaaatatatactgaatgtaatttaacctgtaggaaatactctatgaacagtcttatwgtatatattttatacataatctatcttacaatttcaatacctaatttggccatttatcttttgcaatgaagcaactagaacaacaagatggtttcactgaataattgtttaatacataatctatcagttaggaaactcattagaaaatt

SEQ ID NO: 566844 - DNA, 652 bp, Homo sapiens
cttttgcacactttgttttcttagtattgagttttactccattttacttttaagtataatactctagaaagtattttttaagtatcagaatagattgagatgaaagattggcaagaggctytagttgatctcctttgtctatcgacttaatcatggtttactcaatgcagtattttggtattcaaacaaatgttccccttgcctttccctacctttctgccatgtatcacttcctgcaaatcctaagtattaatttcttctctcccttgaaactccaccaccttcatgaaacccaaatttatcaactgaaaagatagaaaattaagctagattacttataatgtaatatatagccagaattttgtgattttgtgagaacttccatgattttcaagagtatagatgcaatctgaattttctttctgaattatttgtttggaagggggcatgtattttctatgatattcatgggtacatatatttctctgtcaaaaagactcttaaatcacttgagaattttgattcttaattatctatatctagttaatgattatacatagataactaataaaaaagaaatattatggtttgacttcaaagtaaagcaagtttgatatgtttttaagtttatctggaatgaagtcatttctga

SEQ ID NO: 566845 - DNA, 652 bp, Homo sapiens
cttttgcacactttgttttcttagtattgagttttactccattttacttttaagtataatactctagaaagtattttttaagtatcagaatagattgagatgaaagattggcaagaggctttagttgatctcctttgtctatcgacttaatcatggtttactcaatgcagtattttggyattcaaacaaatgttccccttgcctttccctacctttctgccatgtatcacttcctgcaaatcctaagtattaatttcttctctcccttgaaactccaccaccttcatgaaacccaaatttatcaactgaaaagatagaaaattaagctagattacttataatgtaatatatagccagaattttgtgattttgtgagaacttccatgattttcaagagtatagatgcaatctgaattttctttctgaattatttgtttggaagggggcatgtattttctatgatattcatgggtacatatatttctctgtcaaaaagactcttaaatcacttgagaattttgattcttaattatctatatctagttaatgattatacatagataactaataaaaaagaaatattatggtttgacttcaaagtaaagcaagtttgatatgtttttaagtttatctggaatgaagtcatttctga

SEQ ID NO: 566846 - DNA, 550 bp, Homo sapiens
tggccaaacttatgaggttgtctagttgctttgatttgtgtcacatgcctacctcacccttcaggttatgaattggcttcatctaaactgtatggtatgtgttcccataaggaaagagagagaaggaarcaattacaacatctgatgtccactgtagtgccctttccaaaggcattttccattgctcgaggacattcactttccaatatctccatttttctctctacaccgaaaagaatagggtgtagagagaaagatgggctaaatcgatgagcactctttcccctgtctttgagttgcatttaggtaacagaatccctggacctggatctgcaggataatgagaattaggttgattattctaccaaattttccatgtacagtcacttaaagctaattaccttcataggtcatagattctctcaaggtgcactttttcgcattaatctcaccccatcattaattattcaaatctgatagcgctctttgtctcctcttggaaatctgattggtcactatatttgtctttattggtttcatgatttttaat

SEQ ID NO: 566847 - DNA, 593 bp, Homo sapiens
gttgggcttagtttgccatttgatttgttttggcctataggctttgagttgaagtgacagtgtgacagttccaggacaaagtattgaaatgcagtacaggtcaagtatttctgattcaaaaatctcaaatccaaaagctccaaaatgtaaatttttttgcactgattgatgctcaaagaaaatgctcattataacatttaggatgtcatactttcatattagggatactgaacctgtaagtataaaatgtaaatattccaaaatcagaaaaaacctccaaaatctgaagcatttctggtcccaagtattttggataaataatacacagcttgtatgtatttctgctcttcttatgctctgctctagtacatgccatgagaagaaacattggctgactaggcttttatccaaggayaaagagagatatgaggggtaattgtattcattttctattgttgtaataataaattaccacaaatttagtgtttatacaacatgacacaaatttattaccctactagatcaaaagcttatctgagttcttgctgggctaaaatcaaggtgttggcagggttgtattccttttggaggat

SEQ ID NO: 566848 - DNA, 593 bp, Homo sapiens
gttgggcttagtttgccatttgatttgttttggcctataggctttgagttgaagtgacagtgtgacagttccaggacaaagtattgaaatgcagtacaggtcaagtatttctgattcaaaaatctcaaatccaaaagctccaaaatgtaaatttttttgcactgattgatgctcaaagaaaatgctcattataacatttaggatgtcatactttcatattagggatactgaacctgtaagtataaaatgtaaatattccaaaatcagaaaaaacctccaaaatctgaagcatttctggtcccaagtattttggataaataatacacagcttgtatgtatttctgctcttcttatgctctgctctagtacatgccatgagaagaaacattggctgactaggcttttatccaaggataargagagatatgaggggtaattgtattcattttctattgttgtaataataaattaccacaaatttagtgtttatacaacatgacacaaatttattaccctactagatcaaaagcttatctgagttcttgctgggctaaaatcaaggtgttggcagggttgtattccttttggaggat

SEQ ID NO: 566849 - DNA, 652 bp, Homo sapiens
cttttgcacactttgttttcttagtattgagttttactccattttacttttaagtataatactctagaaagtattttttaagtatcagaatagattgagatgaaagattggcaagaggctttagttgatctcctttgtctatcgacttaatcatggtttactcaatgcagtattttggtattcaaacaaatgttccccttgcctttccctacctttctgccatgtatcacttcctgcaaatcctaagtattaatttcttctctcccttgaaactccaccaccttcatgaaacccaaatttatcaactgaaaagatagaaaattaagctagattacttataatgtaatatatagccagaattttgtgattttgtgagaacttccatgattttcaagagtatagatgcaatctgaattttctttctgaattatttgtttggaagggggcatgtattttctatgatattcatgggtacatatatttctctgtcaaaaagactcttaaatcacttgagarttttgattcttaattatctatatctagttaatgattatacatagataactaataaaaaagaaatattatggtttgacttcaaagtaaagcaagtttgatatgtttttaagtttatctggaatgaagtcatttctga

SEQ ID NO: 566850 - DNA, 611 bp, Homo sapiens
tgaactggtttacaaatgattccggcatttgtattattattatatttcagcatgatctagtggtggcaaatagcaacattacagcccctatcaggaggacctccaatgctactggtgaaggaaaatctcagtagacagaaattcaagcagcatatctaattgttcactttaccaggaagaataaataatctgagctataaatctgcagtgattcatgagccatgactcacatgttggctggatgtttatggagtagaaaagaaaacaattcacaaattggttacaagacatctagggaggaaaaaagtaaaaggatatctgagaatgggcaaaaggtgaaaccacaacagttaattccctcaatatccaggtaggaaagatgatcagttctgtaaatatctgatagcctcttttcccagaaatgcctgctctttctcaatggcttcttgagttaagtggccatgacagcaggagtagaacttagcagggagctctaacacagataytttctctattaaagatctgatttgatgcagcttacttggcagtaacagtgattagtcatgaactcccaatataataacatccctggagacaaacacgtcacctaa

SEQ ID NO: 566851 - DNA, 534 bp, Homo sapiens
agtgtctcttctccattttatatggtatcattttctataacttaaacatatttaagtcggcttactgcattggcattgtttatgtctctctagcatggttgaaatatttttgtctctctgacattcaagaaaacaatcctactgttgatttattatctattcatctatatatagtctgctgtttacaccattcattgaatttcaaattcatattccctccaatgtttatttgatgacattaagtatttttactttatatcctataattgtaaaacatagtatttgtagagctgttggttttgtgaaattcattttcttctactgatttttgcttatgttggtttatttccatgtaagggtgtgtgtgtgtgtgagagagagagagggagagagatagagagaagagatgsattaaaaatatataggagtataataaggcttgatgtgaaagttattatagataatttgcacattttttcattaatatttacagggagaagatttagactaagtccttgacttagcggggtttgg

SEQ ID NO: 566852 - DNA, 376 bp, Homo sapiens
tcccatatacctaagaactttttcatcacccttccccccaaattactgatcaacttaatgctgtttatttttgttcttttttattgcaaaatcaagaaattatgacaatttcaaataatagaatttgaggcaccataaaaataaatactacaattatcttcagaaatatttattgataattctatattaggtatataaccattttaagaatgagaagatttgaggttccaagaaaataagccatattcctactgttgtactaaagtagctagaaaaaatagraaaaaaatcagccctttctggctgattcatctggaaggtatgcttcacaaaattcagtaatggcagatatatacaaattaattgtaaagcaata

SEQ ID NO: 566853 - DNA, 570 bp, Homo sapiens
agaacaaatgactaaaacaattctctgtgtaataattatgtttatttttgctcatatcatatatgtcatatatgtcatatatmcttcctaataggcactaaggaatgttttgaatgtttaattcaaaaactggtatagccacctccaccacttagtatatcccaaatttaactcatgagttgtgtaactgtattctcattaaatagtgcccttgaatcattcaatgtaaaaatatgtctgtattttagtcatcttactgttcaccaaacgctgtatattctacctcttaatctttcaccttttttcccgactattatttctattccgcttctccaaactgaatttacaacacctccaagactatctttaaaaacatcacacatatcagatagtaaatgtcttccaatatgtgtccaggaaggtgtttgatgatagggaagatgacaaaagatattggagaaggagcattagtcactcaggtaaacaagtaaagtttatacaattaggtaaacacaatgctagagttaggcactaataactgctgccaaatttggcacttaatacagcctt

SEQ ID NO: 566854 - DNA, 579 bp, Homo sapiens
taattgtgtggttttgagagatcttcttggttttgatttctatttttattgcactgtagtttgagagtatgtttggtatgatttttatttctttgcatttattgagtcttgctttaccagtaaagcatgtagtagatcttagagtgtgttccatatacagacaagaggaatgtactttctatcaatgttggatagaatattmtgtagatgtttattaggtccaattggtcaagtgtctagtttaagttcatgattcctttcttagtttgctgcattgatgatctatctaatactgtcagtagaatgttgaagtctcccactattattatgtggctaagtattttcatagatctagaagtacctgttttacaaactgggtgctccaatgtttggtatgtatatatttaggatagttaagtcctctttgaattgaactcttcattatcatataatgcccttctttgtcacttttgacttgttattttaaaatctgtttgtttgtttgtttgttttttctgaaataagaatactgtcctctgctcttttttgttttctctttttttttttttcagacggagt

SEQ ID NO: 566855 - DNA, 547 bp, Homo sapiens
gagtgcagtggtgtgatctctcggctcactgcaacctctgcctcccgggttcaagcgattctcttgcctcagcctcctgagtagctgggattacaggtgccccaccaccacacccggctaattttttctctttctttttagtaaagacagggtttcactgtgttggccaggctggtcttgaacgcttgacctcatgatccacctgcttcagcctcccaaagtgctgggattataggcataagccaccatgcccggctgtgtctttccttttctaagtgtatcatatctcagccctaaattacttcccctcagttgtcacttggaagttccaagtttgtttaaatacacgaagagctggatgaactttgatgaactttacttttggtgacaaagtatagtttcctcttcatgaacagcattaatrgaaatgcattttgattatcctaatttctaccaagtgccctaaatgatgttttgcccccaagtattttattttggaaactcagtagcataaaactgaaacattaccaatctaatgagctgtcac

SEQ ID NO: 566856 - DNA, 559 bp, Homo sapiens
acttatatataatcatatatatgcatgtcacttataatcatgtatgattatatataagtgaaatgaataatacaagaaactatggcagaatggggaatattttgttataagacacttgtactatttgtgaagtggtggagtgttatttgaaagtgaacttggattggttgtaaatgtgtagtgcaaattctatggcaaccattgaaaaagtaaaagaagaagtataattgatatattaataaagaaaataaataatataaaatgccatttaaaacgaaaaaaggcagaaaaagtgtggaagacaaaaataggatgaaagaacaagaacagtaattagaacagtaattagaaaakggtaacagatatggcagatattaatccaagtagtaaatacatcaataatcactttaaatatcaatggtataaatacatcaattcaagagccaagattttcaaagtacattagattaaaaagcaagacatgactgtatgttgtctacaagaaaaacaccttaaatgtaaggagaactatacataaaaagtaaatgaatggagaaaa

SEQ ID NO: 566857 - DNA, 443 bp, Homo sapiens
aatattgctttaactgtggcaaatagatatacattaaaagtatattcaacatcttgtaatatccatagawcattcagaatcaactatgttgaactagttgaactagaaaagttaaaatgttgtatccaaaataataaaaatgatgcacctatcttctaaacttttccccaggattcccaaagaataatcttaaaaatgtcaaataatgttcccacaggctatgtatgttgctgtttatttaaatataagtactgggatattttattttaaagatgttttgtttgttaatatctctttataggtgtcataaatatttttatgtatataaaaattggtctaagaggaccaattgaattgctagtatcagaccaattttttgctttaatataaacccagactgacatatcttgtttacaaacaaataatattggcatgaaaaaagt

SEQ ID NO: 566858 - DNA, 561 bp, Homo sapiens
gctcttcatttccaattttctatttttagatcattcaatttgagcctattatctctgccatactgtttgttctcattaattttcatttgtgtttttaatattgtttatacatttgttaygccttctccagcatcttagattgcccatttattatttctatttcccactaattctcaaattacttcccaattaattacatacacaaataattgtttttaaacttaataaatgctctattaatgaagctttgggaaaataacgttatgaatttttatgttaacttttgaggaagaacattgttgcttaatgagatcacagtaatagctatgaactaaacccaactattactcaatagtgctgttttaaatcacaccaaatttcaaaggcatacaacaataatgaaaattaatttcacaaatatgcatcaactggaattaggctaggatcaggctgggatggactgtgattggctctagatcaaggtgtgaccagtatgctcccacagtggctacccaagccatgttcttcttatgataggcgttcgaaagaacaagcccaaca

SEQ ID NO: 566859 - DNA, 470 bp, Homo sapiens
aaggtgtgaccagtatgctcccacagtggctacccaagccatgttcttcttatgataggcgttcraaagaacaagcccaacacacaaatacatatcaagtcttgggtcacatcacatctactaacatcctgttggctaaagcaagtcatatggtcaagtccaaagtcaagaaactgaaaatataaactgctcagcatgagatcataatagatatttaatattactatagggaacaatttttttttttttttttttttttttttttttagagtcaggctctataacacaggctagggtgcagtggtgcaatcatagctcactgtaaccttgaactcctggggctcaagcgatcctcctgcctcagtcttctgactagctaggactataggcatgcatcaccatgcccagctaatttaattttatgtagagatgggagtctgtcatgttgcccaggctggtgttgaactcct

SEQ ID NO: 566860 - DNA, 482 bp, Homo sapiens
gaaaaaaaaaagaaaagcaaatactcattttatctagaactctaagtaaagcataatactactagagaaaatatggtgcaaagttaatatcaatattgttaaccaaagttgaaatgtaagcgcatatttgccagcttcttgaaattaaatcatctattcttcttcataagagagaattttaagcaacaattccctctaggcttcattattattctcagaaaattggttgatcagaatcatatgacttagtataacagcaaataaaaaagatacaagtgccccagagattggagtggctcctgattgtgaatgaaaccgtttggtaaacagacttgaatgggcagctctgggtgaattacaggcacaaagtacaggaagggcaggatttatacytagcatgcacagctggaagtcagtaggcacaaggactctaatatgtaacacaaaaccaactgccttattctgtttcattgagactgcca

SEQ ID NO: 566861 - DNA, 473 bp, Homo sapiens
ataatttgcagttacaaggggcctcaggtaaaagcctctgaaaaagcatagyaaaatttgttatattttcttggtaccaaaggtcaacagccctgcaagctctcaagtgaaagccttagaggctcatagtctaaaaatgggtgaaaattagagataggtgagccttattaaacttcaaggcaggctcagattagctcagtatctaattggtagtcctccctgactctataaatgcagcaaagaaaagtcttctttatgatagaataaaataccacctacatcctatacagatctttgttcttagtgtacagcaatcaaaaatattagccaaaccatacaaagaataaccaagagaaaaaaatcagacaagagaagaaacctataggatatccatatattttagctatcaacaattaatgtttaaaatagctatagtaaatttgttaaattacaggtatatatgtaatatataa

SEQ ID NO: 566862 - DNA, 611 bp, Homo sapiens
ttgcttgagtcacttctggttgggtccacaggagtggtggatgggtacaggtaaagccattggtcatcagacatgcaaaaaacctcaaaagatatctcaaaaggtcaatctttggtgttacaatagtgacattatctgcaagattaattgaggaagttgcatatcttgtgacctgtggaataatggctggcaatcctttatgtctacacctaagcacaggtgtccccaaacccctgggccacagactagtaccattccacaggctgttaaaaactgggcctcacagcaggagttgagcacaggcaagcaagtgaagcttcatttgtatttacagtggctccccatcattgcattactgcctgagctctgcctcctgtcagatcagcagcagcattagattctcatagaagcatgaatcctattgtsaactgcacatgtgaaggatctaggttgcctgttccttacgagaatctaatgcctgatgatctgttactgtctcctatcacccctggatgggatcatttagttgcaggaaaacaagctcaaggctcacactgattctacattatggtgagttgtataattacttcattatatattacaatgtaata

SEQ ID NO: 566863 - DNA, 569 bp, Homo sapiens
agttcaatatcattaaccattagggaagtgcacataaawcaacaagctacctaccactacacacctaacagaatggttaaaaattaaataaaaatagtgatgaatatctaatgctagaaagaatgtgagaaactggatcaatcatacattattagtaggaatataaaatgatatagccagtctggaaatgagtatggcagtttcttataaaactaaacatatttaccatattgcccagttgtattcctagttgtattcctgaaatttattccagagaaatgaaaatgtacgtctacccccaaacctgcacatgaatgtttatatcagctttgtttgtgaatctaaaaaatagaaaccatttaggtgtccttaaacaggtgaatagttaaactgtgggacatctatactttgaaatactactcagcaataaaaaggaactattgataacatgaaacagtttagataaagttcaagggaattatgccaagtcttgaagtatttcaaaagtttcattttataaaactattattttttgagacgggtttcactcttgttgccaggctggagtg

SEQ ID NO: 566864 - DNA, 569 bp, Homo sapiens
agttcaatatcattaaccattagggaagtgcacataaatcaacaagctacctaccactacacacctaacagaatggttaaaaattaaataaaaatagtgatgaatatctaatgctagaaagaatgtgagaaactggatcaatcatacattattagtaggaatataaaatgatatagccagtctggaaatgagtatggcagtttcttataaarctaaacatatttaccatattgcccagttgtattcctagttgtattcctgaaatttattccagagaaatgaaaatgtacgtctacccccaaacctgcacatgaatgtttatatcagctttgtttgtgaatctaaaaaatagaaaccatttaggtgtccttaaacaggtgaatagttaaactgtgggacatctatactttgaaatactactcagcaataaaaaggaactattgataacatgaaacagtttagataaagttcaagggaattatgccaagtcttgaagtatttcaaaagtttcattttataaaactattattttttgagacgggtttcactcttgttgccaggctggagtg

SEQ ID NO: 566865 - DNA, 569 bp, Homo sapiens
agttcaatatcattaaccattagggaagtgcacataaatcaacaagctacctaccactacacacctaacagaatggttaaaaattaaataaaaatagtgatgaatatctaatgctagaaagaatgtgagaaactggatcaatcatacattattagtaggaatataaaatgatatagccagtctggaaatgagtatggcagtttcttataaaactaaacatatttaccatattgcccagttgtattcctagttgtattcctgaaatttattccagagaaatgaaaatgtacrtctacccccaaacctgcacatgaatgtttatatcagctttgtttgtgaatctaaaaaatagaaaccatttaggtgtccttaaacaggtgaatagttaaactgtgggacatctatactttgaaatactactcagcaataaaaaggaactattgataacatgaaacagtttagataaagttcaagggaattatgccaagtcttgaagtatttcaaaagtttcattttataaaactattattttttgagacgggtttcactcttgttgccaggctggagtg

SEQ ID NO: 566866 - DNA, 569 bp, Homo sapiens
agttcaatatcattaaccattagggaagtgcacataaatcaacaagctacctaccactacacacctaacagaatggttaaaaattaaataaaaatagtgatgaatatctaatgctagaaagaatgtgagaaactggatcaatcatacattattagtaggaatataaaatgatatagccagtctggaaatgagtatggcagtttcttataaaactaaacatatttaccatattgcccagttgtattcctagttgtattcctgaaatttattccagagaaatgaaaatgtacgtctacccccaaacctgcacatgaatgtttatatcagctttgtttgtgaatctaaaaaatagaaaccayttaggtgtccttaaacaggtgaatagttaaactgtgggacatctatactttgaaatactactcagcaataaaaaggaactattgataacatgaaacagtttagataaagttcaagggaattatgccaagtcttgaagtatttcaaaagtttcattttataaaactattattttttgagacgggtttcactcttgttgccaggctggagtg

SEQ ID NO: 566867 - DNA, 550 bp, Homo sapiens
ttcctacagatttccagttttccaacaccatttattgaaaaatatattcatttcctgatgaaygaccttgggtcttttgtcaaaaatcaattaccagctgaacatggtggctcacacctgtattcccagcatgttgggaggccaaggggaaaggattgcttgagatcaggagttcaagaccagcctgagcaacatagtgagactctgtctctacaaaaatttaaaaattagccaggtgtggtggtgtgcacttgtagtcctagctactcaggaggctgaggtgggatgatcacttgagcccatgagatagaggctgcagtgagctaaaattgtgccactgcactccagcctgagagagagcaaggccccatctctaaaaaataaacaagtaaataaattaccatatattggagattcatttctggactctctattctgttccattgatctgtagtctatcaatacaccaatatcccatggtacttggttactataacatttataatcaggtggtataagctctccaactctgttcttctttttcaagatt

SEQ ID NO: 566868 - DNA, 550 bp, Homo sapiens
ttcctacagatttccagttttccaacaccatttattgaaaaatatattcatttcctgatgaacgaccttgggtcttttgtcaaaaatcaattaccagctgaacatggtggctcacacctgtattcccagcatgttgggaggccaaggggaaaggattgcttgagatcaggagttcaagaccagcctgagcaacatagtgagactctgtctctacaaaaatttaaaaattagccaggtgtggtggtgtgcacttgtagtcctagctactcaggaggctgaggtgggatgatcacttgagcccatgagatagaggctgcagtgagctaaaattgtgccactgcactccagcctgagagagagcaaggccccatctctaaaaaataaacaagtaaataaattaccatatattggagattcatttctggactctctattctgttccattgatctgtagtctrtcaatacaccaatatcccatggtacttggttactataacatttataatcaggtggtataagctctccaactctgttcttctttttcaagatt

SEQ ID NO: 566869 - DNA, 552 bp, Homo sapiens
ttcttgatgaggcaacttgcatcccttggttatttactaactgacttgtttttcgagccatagtttaagcattctattgtggccactttggtcttacaggaagtgtctttcaagataacctaggactgacacccatctgcaaagtccacaccatctatggggaaacatcaacctttgccctacttgtgctcatggtgtgctatgtccatgcagcctgcctccttttctgtccctggataggcacctcaagcctctttctcatggttagcctttttaggcatgagtgagtcaagtatccgtccttgcatcccacatgttaagctattttagtagttttcttgaagcaaccttatatgtagaagttctccgaagttcgcagaaaaartatctacataacttcctgaagaaatctttatgctttaatcttattctgttcgatctttaagcctcttctcatatactttaaaatgtgagctatgggcagaaaaataattttcttagtttatttatatcatattttatatagatgctttggcattttgctttaaagtg

SEQ ID NO: 566870 - DNA, 596 bp, Homo sapiens
cctttctgtttgtttgtttgtttgttttgtttttgcagacagagtctcactctgtcatccaggctggagtccartggtatgatcttggctcactgcaaacctttgcctccctggtccaagtgattctcctgcttcagcctccaaaagtagctaggactacaggtgagcatcaccatgcccagctaatttttgtacttttagtagataaatggtttcaccatattgacaaggctggtcatgaactcctgacctcaggtgatgcacctgcctcggcctcccaaaatgctgggattacaggtgtgagccactgcacccagcccactctatgtcttttgattggacagttttgtctattttcattcaatgttattattaataagtaaagacttaggcctgccattttgttatctgctttctggttgttttgtggtctttttgtccttctttccttccttcctgtcttccttttagtaaggtgatttctctggttgtatttttaacttcttgctttttattttttgtgttgttgtatgattttctattggtactatgaggcttccaagtactatcttacaattctttattttaaactgatg

SEQ ID NO: 566871 - DNA, 552 bp, Homo sapiens
tttttattaagtttaagagttatttatattttctagatactagttcaatatcaaatacagaatttgcaaatatattctcccattttatgggtttttcacttttttgatagcatcttttgaagcacaaaagagtataattttgataaagtataatttatctatttttttattttattgctctttttgggrtgtcatatttaagaaatcattgcctaatccatggtcagggagtgttatgcctacactgtcttttaagttttttttttttttttttttttgagacagagtcttgtttgtcccccaagctgggatgcagtggcacaatcttgttggctcactgcaacctccatgtcctgggctcaagccattcgcatgcctcagtctcccgagtagctgagattacaggcctgtgccaccaggcccagctaatatttgtatttttagtacagactggattttgccatgttggccaggctggtctggagctcctggcctcaagagatttgcctgcctgggcctcccaaattgttgggattacaggcatgaggcact

SEQ ID NO: 566872 - DNA, 493 bp, Homo sapiens
attgcattgaatctgtaaattgctttccatagcatcaacatttatacaatattgattcttccaatctatgagcatagaatatttttcattttattttgtcctctataatttcttttgttagtgtttcatagtttttccctgtagaaattgatttctagtttaaatccactggagttgtgagacttgatatgattttaactttttcgagtttgttagacttgttttttgactaacatgtgctctgtccaagagaatgttccatttgcttatgagaagaatgtgtattctgaagcagttggatgcaatgttagtaaatgtcagttaagttcatttggtctactgtgcagtttaaatacaactttctttgttcaatttctgtctggataatatgtcctttactaagaataggatgttgaagtaccmtgctattattgaatttcactttatttatctatctatttttacttttttttttttttttttgagacagagt

SEQ ID NO: 566873 - DNA, 629 bp, Homo sapiens
ttactgaccttctgaagcctacttctgtcaactcttcaaagtcattctctgtccagctttgttccgttgctggtgaggagctgcaatcctttggaggagaataagtgctctgctttttagaattttcagcttttctgctctggtttctccccatctttgtggtttttatctacctttggtctttgatgttgatgacctacactgtcacaaaggtgttttgttgtagatgtcctttttgtwgatgttgatgctattcctttctgtttgttagttttccttctaacagtcaggtccctcagctgcaggtccctcagctgcaggtctgttggagtttactggagttccactccagaccctgtttgccagggtatcaccagtggaggctgcccaacagcaaatattgcagaacagtaaatattgctgcctgatccttcctctggaagctttgtcccagagaggcagctgcctatatgaggtgtctgtccgctccaactggcaggtgtctcccagtttggctgcacggggctcagggacccacttgaggcagcagtctgtctgtcctcagagctcaaacgccctgctgggagaatgactactctcttcagagctgtcagacagggacgtttaag

SEQ ID NO: 566874 - DNA, 629 bp, Homo sapiens
ttactgaccttctgaagcctacttctgtcaactcttcaaagtcattctctgtccagctttgttccgttgctggtgaggagctgcaatcctttggaggagaataagtgctctgctttttagaattttcagcttttctgctctggtttctccccatctttgtggtttttatctacctttggtctttgatgttgatgacctacactgtcacaaaggtgttttgttgtagatgtcctttttgtagatgttgatgctattcctttctgtttgttagttttccttctaacagtcaggtccctcagctgcaggtccctcagctgcaggtctgttggagtttactggagttccactccagaccctgtttgccagggtatcaccagtggaggctgcccaacagcaaatatygcagaacagtaaatattgctgcctgatccttcctctggaagctttgtcccagagaggcagctgcctatatgaggtgtctgtccgctccaactggcaggtgtctcccagtttggctgcacggggctcagggacccacttgaggcagcagtctgtctgtcctcagagctcaaacgccctgctgggagaatgactactctcttcagagctgtcagacagggacgtttaag

SEQ ID NO: 566875 - DNA, 629 bp, Homo sapiens
ttactgaccttctgaagcctacttctgtcaactcttcaaagtcattctctgtccagctttgttccgttgctggtgaggagctgcaatcctttggaggagaataagtgctctgctttttagaattttcagcttttctgctctggtttctccccatctttgtggtttttatctacctttggtctttgatgttgatgacctacactgtcacaaaggtgttttgttgtagatgtcctttttgtagatgttgatgctattcctttctgtttgttagttttccttctaacagtcaggtccctcagctgcaggtccctcagctgcaggtctgttggagtttactggagttccactccagaccctgtttgccagggtatcaccagtggaggctgcccaacagcaaatattgcagaacagyaaatattgctgcctgatccttcctctggaagctttgtcccagagaggcagctgcctatatgaggtgtctgtccgctccaactggcaggtgtctcccagtttggctgcacggggctcagggacccacttgaggcagcagtctgtctgtcctcagagctcaaacgccctgctgggagaatgactactctcttcagagctgtcagacagggacgtttaag

SEQ ID NO: 566876 - DNA, 629 bp, Homo sapiens
ttactgaccttctgaagcctacttctgtcaactcttcaaagtcattctctgtccagctttgttccgttgctggtgaggagctgcaatcctttggaggagaataagtgctctgctttttagaattttcagcttttctgctctggtttctccccatctttgtggtttttatctacctttggtctttgatgttgatgacctacactgtcacaaaggtgttttgttgtagatgtcctttttgtagatgttgatgctattcctttctgtttgttagttttccttctaacagtcaggtccctcagctgcaggtccctcagctgcaggtctgttggagtttactggagttccactccagaccctgtttgccagggtatcaccagtggaggctgcccaacagcaaatattgcagaacagtaaatattgctgcctgatccttcctctggaagctttgtcccagagaggcagctgcctatatgaggtgtctgtccrctccaactggcaggtgtctcccagtttggctgcacggggctcagggacccacttgaggcagcagtctgtctgtcctcagagctcaaacgccctgctgggagaatgactactctcttcagagctgtcagacagggacgtttaag

SEQ ID NO: 566877 - DNA, 615 bp, Homo sapiens
atctagagaggattattttggaagctgaaatactgatcaatagatygaaaaaatgaaatatcagtgactatatgacaattacaaaacaggttatgacaaagtaaaggaacgagggagaaaaacctaaggaaaaagaacaagtaaaacactgtaagctctttgtaaatatttacttacgtccttttggcttctgaaatgcagaaggccatccagatttcggccaactagaggagtctgaaggaccagacaattgctcagaaacagaaggctgtttagaattttctaaattcattaagggcaattctggtacttttctggaaattggctttaagagctcatcctgcatttttaaaatctctccaactggatcaaattttttatatactcgtttgataggtttttttaaaacacatgactcttcaggactacaagcagtattagtctggtttcctacagaagcctgtcctgaggaagaatttggactagctggtctggaacttaagttagaacccacaacagctgtctttccatcactattatttttacattctgtatcaatgattaaacactcctcatctgtatcactgctgcagagaactgtatcttcagtttttg

SEQ ID NO: 566878 - DNA, 297 bp, Homo sapiens
tgttggccaggctggtctcgaactcttgacctcaggtgatccacctgcctcagcctctcaagtagctgggatcacagacagccaacaccaygccaatttttttttgtatttttaatagagacagggtttcaccatgttggccaggctggtcttgaactcctgacctcaagtggtctgcccagctcagcctcccaaagtgctgggattacaggcgtgagccaccacacccagccaatctcttccttttctgacagcttcaattacttttttctttctcttcttctgtaattcaacttt

SEQ ID NO: 566879 - DNA, 317 bp, Homo sapiens
agctaaatgcaaataaacaaaagaacttacagctataaatgacatcaaagattcatttaattagaaaataatagtacyctcaccccaatcaagactattttggagactctgattttgtgctttcttgcttaccaggcaaagaaattggtgcaaaataattcagcttcaggaaagatctggcaagatggctgaataggaacagctccggtcgcagctcccagcgagaccaacacaggagggtgatttctgcatttccaactgaggtacccggttcatctcattaggactggtcaggcagtgggtacagcccacggagg

SEQ ID NO: 566880 - DNA, 600 bp, Homo sapiens
tgtctctacaaaaaatagataaatacaaaaattagctgggcatggtggcacgtgcctgcagtcccagctactcaggaggcagaggtgggaggactacctgagtctaggaatttgaggctgcagtgagccatgactatgtcactgcattccagcctgggtgacaagctcttttaaaaatgtatatgtacacttctgttcatgtatgtattagtgtgtatgtgtctatgtattagtctgttctcacactgctaataaagatatacttgagactgaataatttataaagaaaaagaggtttgatggactcagagttccacatggctagggaagactcacagtcatggaggaaggaaaaggagaagcaaaggcatatcttacatggcagcaagcaagagaatgtgtgcaagcaagagaatgtgtgcaggggaactgctcttaataaaaccatcaaatctcatgagacttattcactatcacgagaacagcacagaagaaacccaccctcatgattcagttacctcccactgggtccctctcaygacatgtggggattatgggagctataattcaagatgagatttgggtgaggacacagccaaa

SEQ ID NO: 566881 - DNA, 569 bp, Homo sapiens
tctcaaaccatccaacttaagtttgaaattcatcctaagctgttgatccaaaagtggctaaagatgggagaatggggggagggggtgttgctgggctggtgcggagccaggggcctcacgggggggctcggccctcacacgcccggggtcccgggggtcccaggtgctgaaggaggccgcagggcccgccgcgcggagctgaaatgctgacaggcctctgactgcgctgggcaccacagtaactttccgaaacctcccacggcggggtgggggaggggaaacccaaaatcccaaatataatttaatttccagggtaaacattttcctgtgaaaatggccaaggcgttcctcgaggcgaggcggccctcttcggcaggaccacactgcccccttgagcatcccgcggaaaccctccgcagagtcgctgaggcccgsggacgccgtcctgggagcccgcggggaacggggatggagagacgctagggcctggctgcaccacggagacggaagaggctgaagtggtatctcttctcaagtgggcacataaccaaaacattaattattaggga

SEQ ID NO: 566882 - DNA, 456 bp, Homo sapiens
gaattcttagaaatgtttttaaatgatggtagaaataaatgcaataaaaatctcaaagatttaaagaagtggcttagaaaacagagaaggcaaaaagatgaaaaataagagaaaaataagaatatgggagaaaaattcaatagatctcatattcaaatactaggagttcagggtcagggaggagggtggaacataagagaaaaatgagagagaaaatcatcaaggaaataattttcacaagtaataaccaaaattgaaggatgtgagtttccagattgaaaagacctactaaatgcctcacacaatgagcaaaaatagatccaaatcaaggaaccttctgaaatttcaaaataacgaggacaaagaaaaactccwatagtaagagagaaacaaacagttttcacacaatagccttcttagcaatcctggaagcttgaagacaatggcacaagtcca

SEQ ID NO: 566883 - DNA, 441 bp, Homo sapiens
gaagtgccagcaagagcaatcaggcaagagaaagaaataaaaggcatccaaataggaaaagaagtcaaactaactcttcacaacgattcyatacctagaaaaccctaaagactccaccaaaaggctcctggaattgataacttcagtaaagtttcagtatacaaaatcaatgtacaaaaatcagtagcatttctatatatcaataatattcaagctgagaaacaaatcaagaacacaatcccatttgcagtagccatcaaaaaataaaaatacctaagaatacatctaaccaaggaggtgaaagatctctacaaggaaaactacaaaacactgctaaatgaaatcatagatgacacaaatggaaaaacattccacgctcagattggaagaatcgatattgttaaaatgaccatactgcccaaagcaatctatagattcaat

SEQ ID NO: 566884 - DNA, 441 bp, Homo sapiens
gaagtgccagcaagagcaatcaggcaagagaaagaaataaaaggcatccaaataggaaaagaagtcaaactaactcttcacaacgattctatacctagaaaaccctaaagactccaccaaaaggctcctggaattgataacttcagtaaagtttcagtatacaaaatcaatgtacaaaaatcagtagcatttctatatatcaataatattcaagctgagaaacaaatcaagaacacaatcccatttgcagtagccatcaaaaaataaaaatacctaagaatacatctaaccaaggaggtgaaagatctctacaaggaaaactacaaaacactgctaaatgaaatcatagatgacacaaatggaaaaacattccacgctcagattggaagaatygatattgttaaaatgaccatactgcccaaagcaatctatagattcaat

SEQ ID NO: 566885 - DNA, 540 bp, Homo sapiens
tttctgttcagtgcatatgtattgatttccaagttcccactatcaattccaattaagccattctctttcaggctgtgccccctgatatttccagtcatcaatgcctgctgatacaatgatgatgagtcaccttcctcctaactaccacctctgctccttctatcaaaattagcccaccatccctcagagttagtgatggcaggctactctgggaatcaactttatcttaacacactaaagagagaagactgtggtgcacatcgtgctttgccccaggtattacttctgtttttaggtcaagcatgttcagtytagattgtacacagccctgcaaatatagagacttggacgtgaagacatagacaattttaagggacttaaattcaggtgctatttcctaaaactaatatgtttgaaaaagatcttgcaattaggcttcatgctatctatgtctgccttttaacttttcttttaaagtacttccttctccaaattgcaaaaaaaaaaaaaaaaaaaaaaaaagagagagagagaaacaaa

SEQ ID NO: 566886 - DNA, 643 bp, Homo sapiens
agatctgtggaactttgaacttgagagagatgatttagggtatgacgcagaagaaatttgtaagcagcaaagcattcaagatgtgacttgggtgctcttaaaagcattcagttttactcatttacaaagacatggtttgaaatggaacttacatttaaagggaagcagagcataagagtttggaaaatttacagcttgatgatragatagaaaaaaaacattttctgagaagaaattgaagcctgctgcagaaatctgcataagtaagaaagagtcaaatgttaatcaccaaaacaatggggaaaatgtctccagggcatattagagaccttcctggaagcccctactatcatggaaccagaggccttggagagaaaaatggttttgtgggcccatcccagggtcccactgctctgtgcagcccagggacttgtggccctgtgtaccgctgctccagccggtggttaaaagggaccaagatacaactcaagccatagctttagagggtgcaagacccaagacttggcaacttccacatggtgttgagcctgcaggtatgcagaagtcaagaattgaggtttgggaacctctgcctagatttcagagaatgtatggaaacacctggatgtccagacagagatgt

SEQ ID NO: 566887 - DNA, 580 bp, Homo sapiens
gtgagtttgaaaaaaggctatttgaaaatacacaatcagagaaaataaaagaaaaaagtatgaaaaagaataagcatgactataagatctagaaaatagcctcaaaagaacaaatctaaaagttattggccttaaagagaatgtagatagagacagtggggcagcaagtatattcaaagtcgtaacagagagctttccaaatctagagaataatgccaatattcaagttaaagaaggttgtaaaacaccaagcagatttagcccaaataagtctacctccagacaattaataattaaactctcaaagatgaaagacaaagaaaggattataaaagtggtaagaggaaagaaaaaacatgcaaagaaggtccaatatgtctgtcagccaatttttcactggaaaccgtacaggctaggagtaagtggtgtgayatatttaaagtgctgaaggaaaaaactcttatccttgaatagcatatccactgaaaatatcctccaaacatttttcccaagcaaacaaagctgagaaatttcatcaatactagacctgtcctacaagaaatgctacagggagttcttc

SEQ ID NO: 566888 - DNA, 585 bp, Homo sapiens
tggtaatttgttacaatagaaaagggaaacaaatgtagtcatttgccttatggctattgtggattttgcataaagaaggacaatatttgtcatcattgtcctgcagtacactggaatatgtggggaatcacacatatgtacacttacatgtttggaatatcaagtttsacatattaagtctaaggttaggcaatgcttgtatgtgccataatattctgctcagaaaatgctcaacactttgtctgaacatgctgtgcaatgctaccaggaggttcccttgttcttgcttcttgtttatttttttacatcaataaatgaaagacattctttgtggtcaacaactgaacttaagttatataccaacaacattctccaaattggcactacaacaacaaataacacctctttccaatggattcatgttctttgaaaaacaaacaagtattctttctgccctttaaaaaaatcaattcaaaagtaactttaaaaccaccaaaggtgtaagtgtaaataaatactttctgcggtttaaagattagattgtaattaatgagtgaaaataaaatgttctttttaaaaatgatt

SEQ ID NO: 566889 - DNA, 603 bp, Homo sapiens
tggactgcctttaaaatatttaattttggtaatttggctcaattatttttatatcacagttattatttgtcaagggtaaattttagcttacatatatttaggtgggcttatattttgtcctgcaggaaaaagtgatgtaagaattaggcatatatawaagaatgttatatctttacctaattttaaaattgcaaatcacatttaaaattttggtggctcaaactaaagattaaaaaaaaaaacaattttgggcatggtggctcacgcctgtaatctcagcactttgggaggctgaggcaagcagatcacaaggtcaggagtttaagaccagcctggccatcatggtgaaaccctgtctctgctaaaaatacaaaatttacctgggcacagtgacatgcgcctgtaatcccaactatttgggaggctgaggcaggagaattgcttgaacccgggaggtggaggttgcagtgagctgagattgcaccattgcacacctgcctgggcaacagagcaagactgtgtctcaaaaaaaaaaaaaatacttggtaagtaataagagtttaatagtaattttttaaaaggaaaagattattttaagctttt

SEQ ID NO: 566890 - DNA, 543 bp, Homo sapiens
ccacaaaataaaattaagtacctaagaattaaccaaagaagtgaaagatctctacaataaaaacgataaaacccgatgaaaaaaattgaagaggacacacaaaaaatctaaagacagtccatgttcatgaatcggaagaatcaatattgttaaaatgtacatactatccaaaccaatctacagatttaatgcaatacttatcaaaataccaataacatccttcacagaaatagaaaaatcaatcctaaaatttatacagaaccacaaaagaccccaaatagccaaagctatactgagcaaaaagaacaaaacaggagaaatcacattacctgacttcaaattatactacacacctatagtaaccaaaacagcatgggactggtataaaaacagacacatagamcaatggaacagaatagagaacccagaaataaatccctgcatctacagtgcgcttattttcaacaaagatgccaaaaatatacattggggaaaagacagtctcttctataaatggtactggaaaactggatatccatatgc

SEQ ID NO: 566891 - DNA, 605 bp, Homo sapiens
ctattatacagatgaggaaattaagcctcataaaagttagkcaacttgaccaggattccattgtcaagttgctacaggatagttgtacgaataaataaaatggcctagctaaaattgctgtaagagatggatggctttattttcttgttacagtgtgaggtcctttgtgtgtggaccagcagcttacattacgcaagcagtgcctcaataaatctttgttgactggactgtctcccaatcccctgatgccaaaaatgagactcaccagttatctgcagtaaaagatgaaaagacccatccggaaggagtcaggataagccctgtgttcagtgcttagaagagcagcgattctaggccctggcctgagcccctcggaagtggggagatacataaggatggggacttattaagcactgagcactgtgctaatcaccttatatagatatatcccaaagtccagtatcttcaggtgcttgctaaacatgctatttctgatcactactatactatgtatactatactatgtatactgtagtaagtatactatgctatacctactgaataaacattgctgggaataggcctagaaaatagcgtcttaaatg

SEQ ID NO: 566892 - DNA, 596 bp, Homo sapiens
taagccagtggaagatggatactaataatttattatcaagtgtatggatatgttaaaaaaaaaaaaaacagcaccaggtagaatctgcttcttaggctcttggaccaccatgcagttagcttctgcctgctgttccacggaaagtctctctggaatcatctactacctyataggtagaggcagaatcaaagcgggtgccagctgcccatcttaatgaatcagtgctgatggggtgccaggaaataaatttcttatcctggggatggtttaaaaagtgagatttttaaacaaaattgtgcctgaaccattgaagtctttggttagcccatcagggttttggttgtccttctatttgttctcctaggaagggctgttatcacttttcaacatcttatgttctcttttattaatgctttgggctccttttgtgattatgaaatggtttgagctgtgatttttatgattcatgtcactttggtgtttatcaggactgcatgttgctgggtacagtttatcaaaactgcgtgtctcaggctcgggcctgtacttacagcattttgaggggctgaggtgggaggatcacttgagcccaggag

SEQ ID NO: 566893 - DNA, 642 bp, Homo sapiens
tgttgttgaatagcatattccacaaatgccagttagaaaaaattgactgatattgctgtttaggtcaactaaatctttactgattttctgcctgcttgatmtatcaattgctgaaagatagatgtttaagtctccaactataatagtaagtttatctattttgccttaaagttctatcagtttttgcctcacatggtttgatgctctattgttaggattgttgtgactttttggataatcagtccctgtatcatttaatcattgccttgtttatccatggcatttttcttattctgaagtctgcattgtctcaaattaatcgagttacttcagctttctttggatcagtgttagcatggtatatctttttccatccctttacatttatcctatcagagtctatatgtaaagtaaatttcttgtatgcaacatatagttcagttctgtttgttaattcactctaacaatgtgtgtcttttaattagtatatatggatcatttgtctttaaagtgattattaatatacttggattaatagcaaccatgtttttactgttttttatttgttgccaaaagctgtcttttctgccttctttcattttaattgagcattttatataattccattttcttttctctctt

SEQ ID NO: 566894 - DNA, 642 bp, Homo sapiens
tgttgttgaatagcatattccacaaatgccagttagaaaaaattgactgatattgctgtttaggtcaactaaatctttactgattttctgcctgcttgatctatcaattgctgaaagatagatgtttaagtctccaactataatagtaagtttatctattttgccttaaagttctatcagtttttgcctcacatggtttgatgctctattgttaggattgttgtgactttttggataatcagtccctktatcatttaatcattgccttgtttatccatggcatttttcttattctgaagtctgcattgtctcaaattaatcgagttacttcagctttctttggatcagtgttagcatggtatatctttttccatccctttacatttatcctatcagagtctatatgtaaagtaaatttcttgtatgcaacatatagttcagttctgtttgttaattcactctaacaatgtgtgtcttttaattagtatatatggatcatttgtctttaaagtgattattaatatacttggattaatagcaaccatgtttttactgttttttatttgttgccaaaagctgtcttttctgccttctttcattttaattgagcattttatataattccattttcttttctctctt

SEQ ID NO: 566895 - DNA, 597 bp, Homo sapiens
gggtttcagcatttcatatggggtgtcatactgaatattaaaatgcaatgtaataataaaatgtgtagaagagatgaaatgatggcgttgtgctaaataacttagagaaaaaaagactacttcaccttagactgctactttttatttatagcttcaactgatatcttggcttcaatcgcagaatctctagttagtttgcagagatggttctataaacctcctgggggaagggaaacggcctastctgattggtccaccaataggagactaactcaaggaagaaaaggagggaagatgaagaaaatttgtcagcaatgtgtaaggtggacaaaaattttctgagggaaatgtgtgtaagggcaagatcagtttaaagactaagaatttggaggacaatggaggggcaagatgataagctaagcctacagaagaaaaataggagactgctgcattctgagcagagcctggcttagagaagaaaagttcaaactggatatacagtattttaatgtcatagaccaaagaggggggacatggcaatacaatacctgtatagctatttgttcatagctacattaacagaatacatggcatttg

SEQ ID NO: 566896 - DNA, 548 bp, Homo sapiens
ttgttcttttacaactttttccccatagctttattgttttctaaaaatgtttcttcctatacctctcataacctgggtgagcctaattgcttatagctcaagataaaaaccactttgctgagccttacagttggagtggatcactctaaataatgaatgtgctagccaatgctgtttaatagaacatttttgataatggaaatattctatatattagccagtagccatatgtggcaattgggcacttggaatatggttartgtacctgagaaactaaatttttatttaaatttaaataaccacatatgattagtggctaccatatagaaccagcatagctatatacatatattcagtatactgttaactcttgtttgttgagcaaggtcaatatattcctttaaaaatatttttctaagtaaaatatcttttcttattttattaaaaattaatctaaataaactcttttttgtgtttgtgtttgctagtgttgggaaaagtgggtagtaggagagatagtgacaactatatttctacgtttatatatt

SEQ ID NO: 566897 - DNA, 554 bp, Homo sapiens
aggtgtgagccatgatgcccagccagagaaaacattctcgcagaagtaatagtgcaagtgccctaattgaggcagcaaaaggctggtagagtgagggaagagaagaatggtcagaaatgggttcaagaasatatttggggacatgattttgtagggctttattgggaatggtaaagatttcatgttttttcatggtatgacaaaatttggaagcatatgagcagataaggtataatcctacattttatcactggttactatttgaaaaataagctgttagggaacaattccagaagcaggtggaccaattggaattaaagcaaaggctttaatatgggtaagagaaaaaagtatagtttcttagattagggtaatagcagtggaaacaaagattccgagtttatttttaaggtaaagctaacttcgtctgttgctgtataggtgaatatgagaaaaagaaataaagaacatctccaaagtttttgacctaagaaaatgaagaaggaaaaaataagtcatctaataatgaaagaagactggggaatggggtggaa

SEQ ID NO: 566898 - DNA, 523 bp, Homo sapiens
ggagattaggaagtatacaaaacaaaccattaagtaaatcacaagtgtggaactaaaatttagccttgggatgaccagctgcgatgggtttttctggtgcattttaggtctgggttaataaggtcagccctcaagaggctgtgatttcctgctgcatagttatattttagaatcatccggggccttttaaaaataaaatccccaggtcccttccctggagattctgattcagtaggtcaagggtcagggctagaaattttcatatttgaaaagcttyacaggtgattctgatacacacctctggttaaagaccagaaggagccttggggggaaggtcagcctgggtttacatttttatctcgtgtcgatcccattgtataataggcagcttttcccatacctagcaggaaatgaatggtgaccctggggggcagggaaaggtgggtatcatttggaagagctgtggtgaagggcccaggagaaaaactactgagggggcactgctccagagctcagagatctt

SEQ ID NO: 566899 - DNA, 561 bp, Homo sapiens
acaactgggtatgctgtaaacaattgaggataaggagagaggaattaggaattaagtttagacagcaacttcttatacatcttgggcaaaatatttcacccctccagctattgaactccgttggagtgcttctagctttttatttttcttcttccttccttctttcattccttccttccttctttcattccttccttcctcccttccttccttccttgttccctccctccctcccttccttcctctcttcccttcttcctccctccctccctctgtcccttccttccttccttccttgcttcttttctttcttccttccttccattttttttaaagcggtggtcttttaaatatgtgaccttaagaatttcaaattttcacaaatattcattcattgtgtaatttgagaaatatttattgaggaccaacaatgtgctggacactgttcaaggtgctggtgcacgaaacataaagaggatcaaagcacatgatgatgtggtgaaaatagaattgagtagcaggaatcttgtcttcttgractatgccttgaacctggcagtt

SEQ ID NO: 566900 - DNA, 597 bp, Homo sapiens
tattttatttgtagctatggtaaatggggttactttcttgatttcttttttacattgttcactgttggcatacagaaatacaactgattgtttatgttgattttgtatcctgcaactttactgaatttatcagtttgaatagttttcttgtggagtcttcaggtttttccaaatataagatcatatcatctgcaaacaaggataatttaacttattcatttttaatttgaatagcttttatatcttcctatcatttgatgctgtagctaggacttccagggctatgttaaataacagtgatgaaagtgggcatcctgtctgattccagatcttagaggaaagtctttcagtttttccctgctcagtgtgatactagctgtgagactgtcatatatrgcttttattgtattgaggtatgttgcttctatacccattttttaaatcatgaaatgatgttgaattttatcaaatgttttttcagcatcaattgaaatgactgtatggtttttgaccttcattctgttgatgtgatgtatcacattgattaatttgcctatgttgaaacatacttgcatcccagggatgaattccactttt

SEQ ID NO: 566901 - DNA, 601 bp, Homo sapiens
tggtttgctagtactgtgttaagcattttcacatcagagttcattggaaatattggcctgtagttttctttttttgacgtgtcttcatctggttttggtatcacagtaatactaccttcttaaatgagtttggaattattccttcctctatttttttcaaatagtttgagacagattggtattcgttctttttaaataaaactaattggtaattggttggtaaaattcagcagtgaagcttttgggtcccaggcttttctttgctgggagactttttattacagctttgctctcattagttgttattagtctattcaagttttggattccttaatggtttaatcttggcaggttgtatatgtctacaaatttatccattttttgtaggttttccaatttattggcatatagttgctcatagtagactctaatgatcctttgaatttctgtgaaatcaattgtaatctcccctttacyatttttgattttatttatttgggtttcctctattttattccttagttagcctggctaaaggtttgtcaattttgtttatctttccaaaaaaacttttaatttagttaatattttgtatttttat

SEQ ID NO: 566902 - DNA, 594 bp, Homo sapiens
atatataggcaaatagaaacagrcgcagtgtgtgtatatatagtcgtgcacctacacacattgttttcacatagtatttactaaatgaactgcattttaatcctccaaaattgtacgttatatttcttatccattatttatgtttcattgtctgattcaaacattacatatgaacactcagtaaaggttttcctatacactatgctacctaatagtccttattaaaatctataattacttaataattttttgacaacggccaaaatgactactatttattgagtggcttctacatgtgagtttgtttcattagatatataattactacaatgtaatgcccacaagctggcactgattatcctcttatgttaccaagaaggaaactgagttcagatagatcattgcaatagcccagagtgcaaaacaagcaagtggcaaagctaggactcgaaacctattccttctgatgtgaaaatctgcaccctctctctgctaatgataggctgcccatgaccacaaatattttgtctgctatagtttggaagtttgtccccctaaatctcatatttaaatttgatctccagtgtggtgttg

SEQ ID NO: 566903 - DNA, 594 bp, Homo sapiens
aaatcagcctggccaatatggtgaaaccctgtctatactaaaaatacaaaaattagccaggtgtggtggcatgcacctgtagtcccagctacttgggaggctgaagcagaagaatcacttgaacccrggaggcggaggttgcagtgagctgagatcgcgccactgcactccagccgggatgacattttaagactatgtcttaaaagaaaaaaaaaattaaaacaacacatttaacaagcaacacaattaagcttgattgttaattgggggaggggggtatgattatgcatgcattaggaaatatacaattgtctcatgcacatgtgagacgttttagaaaagttgatcatatataatctattaaatcctcaaaaatttgagatcttacaatatctaaccataataaaattatgctagaagataatttaaaaaataaaaatatccctgatcatatggaaatttaaaacacacacacatacacacacatacacaacactatgtaactcttaggttaaagaaaaacatcatagtgaaatttaacaatgacaaacacagaatgtatctccgagtaccagatcttaggtactgtgcgac

SEQ ID NO: 566904 - DNA, 578 bp, Homo sapiens
aaccctgtctctactaaaaatacaaaaattagctgggtgtggtggcgggtacctgtaatcccagctactcgggaagctgaggcagaagaatcgcttgaacccaaaaaggggaggttgctgtgagccgaaatcctgccactgcactccagcctgggcgacaraatgagacactatctcagaaaaatattaaaaaatacacataatactttgggaggccgaggcgggcagatcacgaggtcaggagatcgagaccatcctggatagcatggtgaaaccccgtctctactaaaaatacaaaaaaatagccgggtgtggtggcgggcgcctgtggtcccagctactagagaggctgaggcaggagaatggcatgaacccgggaggcggagcttgcagtgagctgagatctcaccactgcactcctgcctgggtggcagagcaagactccgtctcaaaaaaaaaaaaaagtgtatatatacacatacataataataaatagatgactagatgaccttgggcacatcacttcaactttgtcaggtggcagtgatagtaccagcctcaccacaggggacatgagg

SEQ ID NO: 566905 - DNA, 554 bp, Homo sapiens
gcggtggctcgtgcctgtaatcccagcactttgggaggccgaagtgggcggatcacctgagatcaggagttcgagaccagcctggctaacayggtgaaaccccatctctgctaaaaatacaaaaattagccaggtgtggtggcggtgtgcctgtaatcccagctactcaggaggctgaggcaggagaatggcttgaacacgggaggcagaggttacagtgagctgagatcacaccactgcactccagcctgggcgacagagcgagacttcatcacaacgacaacgacaacaacaacaaaggcacttgaagaacttcaagactttctgaagcctgagcttgtattggaggtggtagaagttccccaggtgttgctggaacttcaactgcattagaaccacctggaaggcttgtgaaaccccagattgctgggtcccagccccgggtctgccgagtctgtaggttttgcttttctaagcagttcccagatgctgttgatgctgctggtccaaggactgtgctttgaggacactgctctcagtgttgcaagcttgca

SEQ ID NO: 566906 - DNA, 554 bp, Homo sapiens
gcggtggctcgtgcctgtaatcccagcactttgggaggccgaagtgggcggatcacctgagatcaggagttcgagaccagcctggctaacacggtgaaaccccatctctgctaaaaatacaaaaattagccaggtgtggtggcggtgtgcctgtaatcccagctactcaggaggctgaggcaggagaatggcttgaacacgggaggcagaggttacagtgagctgagatcacaccactgcactccagcctgggcgacagagcgagacttcatcacaacgacaacgacaacaacaacaaaggcacttgaagaacttcaagactttctgaagcctgagcttgtattggaggtggtagaagttccccaggtgttgctggaacttcarctgcattagaaccacctggaaggcttgtgaaaccccagattgctgggtcccagccccgggtctgccgagtctgtaggttttgcttttctaagcagttcccagatgctgttgatgctgctggtccaaggactgtgctttgaggacactgctctcagtgttgcaagcttgca

SEQ ID NO: 566907 - DNA, 555 bp, Homo sapiens
aggcatgcaccaccacacctgcctaatttttaaattttttttagagacagggtcttgctatgttgcctaggctggactcaatctgctggcctcaagcaatcctgcctcagccttccaaagtgctgrgattacagacatgagccaccacacccacctgtaaagttttattacttgtctgtactttagattttgcatagatattttccgtaatttatagtttcagaaatacacctgatggaagtaaataacacttgctcggcatcttgtaactcaaatttagggctgtctagctcctttatttcttctggaaaaatctagaaagaacatattgtcttctatcctgaatatataatctctagtaaccagggtttaagtaatagtagatgaattagactgaatgaagacttgaattatagctttgacagaactgcagagtttgcagaatactaagttttgtaatatgggaattataccggggtgtgaacacagggctaattgttcattcattcatctcctgtatatttaatgaacacttgatgctaggtccatttctag

SEQ ID NO: 566908 - DNA, 598 bp, Homo sapiens
  misc_feature 596, 597, 598: n = A,T,C or G
atgcttttgaaaggcaaattttcccagaacaaaattttatctgacaatgcaattatctagagacttagttgactgcagacatattgacattatatgtccacatttagagatgtacgaagccttgtgaaatcasctttaactgtgtcatcatttatgccctgggaagtcagctattaataaggtaaatgctgcatctcaaaatggagattctcagttgtgtagctgtggctagttactcaggtgggtctcagaacagacttaatgaaaccaagatttcagatcattttgttctgctcagttccatgactaaagtctgcccttattaggtgcaacccaggagatcatgggttattctgtgaaaattcatcacgattacaagtgggggaaataaaacaaaagagaaaaattcctgtttccaacggttaatggggtcatctccatcaataaaagtatgcattcgggctctctagagaaacagaacaatagaagacaaatacagttttgagaggggatttatatggggaactggctcacattactatggaggctgagaagtcacaataggctgtctgcaagctggagaatcaggaaagcannn

SEQ ID NO: 566909 - DNA, 552 bp, Homo sapiens
tctcctttgccatgccgctacaaggccataaagtagataaaacctaagttgcaattccagtcttcctcaaatctaagacatgtcacaaaataatttactgcctttgtttcttgctcctgtaacaagcttcctgcctcacgtatctcccaccttaaaatgtttaaaaggcgaatacccaaactagcagtggctaccctttcgggaccccttccacactgtggaagctttgtactttcactctgctcaataaaacttacagctttttctctctctcagttggtgtctctatcrctcgccgcagtcagccgccacaccaattctttggcgtcgctaagcaagaaccttaggcgttacagtgtcagggatgaaagccctaaagaaaataacttgagactgagaggaagttttctgggtaaaaggtctttggagtgaggatggaaatggggtgagaacattaagaataggaaacagcatgtggatggtatctgagaaaagggagaataaggagggctgcctgaaaatagctaatgtggtggagccaagagtgcgagg

SEQ ID NO: 566910 - DNA, 547 bp, Homo sapiens
aaaagagaaacaaaaggggattgatacattttaaagttacagaaacattcctaaaagccttccagcatttkcaagtgcttgagatcttaagccacttgagtgtgcttaaaaaagaaatttcaacctgtgtcggggctgcggcattactgctgtgtcggggctgcggcgtcactgctgtgtcggggctgcggcatcactgctggaggttttgggaactaacacagcaatcctgaacaatcccgacaaatgaaattactttacgggagaaaaaagctcccattcaactttttatagaagactagctggatttagaatatatgaacacaggttgtaagctattgaaagtctttaaagattttggaaatgggtccccacaacacataaaatctggctattttcaaaagtccatataagtttcagaacaatctagagttaacacttggagttaaataaaaataaattgtaaggcagatcaacttttaaaacacttttaagcatcagcaaaaatataagttgcaactattgatcttgccgccaatagttaaaa

SEQ ID NO: 566911 - DNA, 547 bp, Homo sapiens
aaaagagaaacaaaaggggattgatacattttaaagttacagaaacattcctaaaagccttccagcattttcaagtgcttgagatcttaagccacttgagtgtgcttaaaaaagaaatttcaacctgtgtcggggctgcggcattactgctgtgtcggggctgcggcgtcactgctgtgtcggggctgcggcatcactgctggaggttttgggaactaacacagcaatcctgaacaatcccgacaaatgaaattactttacgggagaaaaaagctcccattcaactttttatagaagactagytggatttagaatatatgaacacaggttgtaagctattgaaagtctttaaagattttggaaatgggtccccacaacacataaaatctggctattttcaaaagtccatataagtttcagaacaatctagagttaacacttggagttaaataaaaataaattgtaaggcagatcaacttttaaaacacttttaagcatcagcaaaaatataagttgcaactattgatcttgccgccaatagttaaaa

SEQ ID NO: 566912 - DNA, 597 bp, Homo sapiens
gcatggtggttggcacctgtaatcccagctactcaggaggctaaggcaggagaatcactagaacctgggggacagaggttgcagtgagctgagatcgcaccactgcactccagcctgggtgacaaagcgagactctgtctcaaaaagaaaaaaaagaaaaaaaccttgaactaactaggcatcagaggaacatacttcaaaataataaaagccttctatgacaaccccataaccaacatcataatgaatgggcaaaagctagaagcattcccctgtgaaccagaaaagacaaggatgtgcastctcaccactgttattcaacatagtactggaagttttgaccaaagcaattaggcaagagaaagacataaaaggcatccaaatagaagagaggaagtcaaactatctctcttcacaaatgatatgattctacacccagaaaactccacagtctctgcccaaaggctcctagaactgataaacaacttcagtaaagtttctgaatacaaaatcaatgtactaaaatgaggagcacttctatacaacaataacatcttagccgagagccaaatcaagagtgcaatctcattcacaatt

SEQ ID NO: 566913 - DNA, 553 bp, Homo sapiens
caatggtctattgggtatgacctcagaagtacaggtaacaaggtcaaatatatgaaagtagaattgcatcaaactaaaaagtttctgcagrgcaaagaagtcaacagagtgaaaagataaaatgggaatgggaaacactttcaaatcatatatctcatgagaggttaacacctaaaatatattaggaactgcaacaactcaatagcaaaaagagaaaaaaagccatgattaataaataggcaaatacttgaaaaagacatttctctgaggaagttgtacatatggacaacagctgtatgaaaactaattaatgtaaattcatcatcaggaaaatcaaaactgcaatgagatatcacctcatacctcttaccatgtctttatcaacatacagacacaaacacacacatacatatatacacacacaataaaagttgttggctaggaaatggagaaattgaaactttcatacactgtcagtgtgaatataaatttttacagccaaaatgaaaacagtgtagaggttgctcaaaaaattaaaaatagaacttccata

SEQ ID NO: 566914 - DNA, 612 bp, Homo sapiens
ctctcacttgccactgttcttaacagtattataaaataattacataagacaggttacttacatattctaggtcataaaaattattgcttgactagagtaattgtaaacataaaagaacaccaaacacactaaaataaatatgaggtcatcaatcttttgttggtctccttggcatgcacctattcagactgttagtattatgtatttacttcaaattttagcagttatattttaacttgattgatttttcctcagatataagtatgagaaatgacagaaagaaacaacaactggaaaagaagcattgcataagaccaggatgtctctgaaatggacgtcagtctttctgctgatacagctcagttgttactttagctctggaagctgtggaaaggtgctagtgtggcccacagaatacagccattggataaatatgaagacaatcctggaagagcttgttcagaggggtcatgaggtgactgtgttgacatcttcggcttctactcttgtcaatgccagtaaatcatctgctattaaattagaagtttatcctacatctttaactaaaaatkatttggaagattctcttctgaaaattctcgatagatggat

SEQ ID NO: 566915 - DNA, 552 bp, Homo sapiens
acctgccccgataatcacgtgggttcttttctagtttcctaagcatcggctggcttgagaaataaaaggacagagtacgaaagagagaaattttaaagctgggcgtcckggggagacatcacacattggtaggatccgtgatgccccacaagccacaaaaaccagcaagtttttattagggagtttcaaaaggggagggagtatatgactacgtgtgggtgacagacatcaagtacttaacagggtaatagaatatcacaaggcaagtggaggcagggcgagatcacaggaccacaggacggaagcgaaattaaaattgctaatgaagttttgggcaccactgtcgttgataacatcttatcaggggacagggttttgagatcaaccggtctgaccaaaatttattaggcaggaatttcctcttcctaataagcctgggagcgctatgggagactggagtttatttcacctctgcaatctccgaccataagagacaggtacgccccgggggcaggcttcagagacctacccctaggtgcgcattctctttct

SEQ ID NO: 566916 - DNA, 552 bp, Homo sapiens
acctgccccgataatcacgtgggttcttttctagtttcctaagcatcggctggcttgagaaataaaaggacagagtacgaaagagagaaattttaaagctgggcgtcctggggagacatcacacattggtaggatccgtgatgccccacaagccacaaaaaccagcaagtttttattagggagtttcaaaaggggagggagtatatgactacgtgtgggtgacagacatcaagtacttaacagggtaatagaatatcacaaggcaagtggaggcagggcgagatcacaggaccacaggacggaagcgaaattaaaattgctaatgaagttttgggcaccactgtcrttgataacatcttatcaggggacagggttttgagatcaaccggtctgaccaaaatttattaggcaggaatttcctcttcctaataagcctgggagcgctatgggagactggagtttatttcacctctgcaatctccgaccataagagacaggtacgccccgggggcaggcttcagagacctacccctaggtgcgcattctctttct

SEQ ID NO: 566917 - DNA, 416 bp, Homo sapiens
ccaacatggtgaaaacctgtctctactaaaaatacaaaaattagctgggcatgktggggggtgcctgtaatcccatctactcgggaggctgagacaggagaattgcttgagtccaggaggtggaagtggaggttgtggtgagcagagatcgcaccactgcactccagcctgtgcaacaaagtgggactccatctcaaaaaaaaaaaaaaaaatctatttaataggtgagtataaaaattcatctatttttatagactcagccaattgatcttcaacaaagcaaataaaaatataaactgggcaaaggacaccctattcaacaaatggtgctgggataattggcaagctacatgtagaagaatgaagctggatcctcatctcttaccttatacaaaaatcaactcaacatggatcaa

SEQ ID NO: 566918 - DNA, 602 bp, Homo sapiens
agccctggtcctggcccagaaaaccattctttcctcctaggcctctgggcctgtgatgggaggggctgctgtgaaggtctctgaaatgtctttgaggccttttcttcattgtctttgatattagcacttggctctcttttagctgcatgaataactggcaagtggttgctccacagcctgcttgaattcctctcctgaaaaagctttttctttctctgccacagggccagcatgcaaatttttcaaacttttatgctcagcttcccttttaaatataagttccaactttcagtcattcytttgctcctacatctgagcataggctgttagaagcagtaagaccacatcttgaaccttttgctgcttagaaatttcttctcccagataccctaaatcatcactatgaagtccaaacttccacagattcctacggcatgaacagaatgcagtcaagctctttgctaaggcataacacatatgactgccttagttcccaataagttcctcatttccatctgagatcttagcagcctggacttcattgtccatatcactttcagaattttggtgacaaaaatttaatcagtgtctaagaagttcca

SEQ ID NO: 566919 - DNA, 602 bp, Homo sapiens
agccctggtcctggcccagaaaaccattctttcctcctaggcctctgggcctgtgatgggaggggctgctgtgaaggtctctgaaatgtctttgaggccttttcttcattgtctttgatattagcacttggctctcttttagctgcatgaataactggcaagtggttgctccacagcctgcttgaattcctctcctgaaaaagctttttctttctctgccacagggccagcatgcaaatttttcaaacttttatgctcagcttcccttttaaatataagttccaactttcagtcattcctttgctcctacatctgagcataggctgttagaagcagtaagaccacatcttgaaccytttgctgcttagaaatttcttctcccagataccctaaatcatcactatgaagtccaaacttccacagattcctacggcatgaacagaatgcagtcaagctctttgctaaggcataacacatatgactgccttagttcccaataagttcctcatttccatctgagatcttagcagcctggacttcattgtccatatcactttcagaattttggtgacaaaaatttaatcagtgtctaagaagttcca

SEQ ID NO: 566920 - DNA, 532 bp, Homo sapiens
caatatcattataatattccaattaacttaaaaaactgaaattctaaaataaaaaaattgagaaagtcatgttatatcaatgacaagagtcaaatgaattattgaaggacactgcattatctacttgttttgagaaaactccaggagctgagaataaatactcagcagagagtaagggggaactactgaatcactggcaacagaaaataaaatcaccccagtggcattagatagagcgtcagaccttagcagctgtaggcctctgggtaatacagaatggatgactggttaaaatattataacatagactttttctgaaagaagacaaagaaaagggtaagtctgaactcatttaaaagagtagttactgggaaggatcttgtttcctttgcatatttttgtgaactttggcagaacttartttttacttttggagattttgttattcgctttccaataaccaggacaggtgtacactgtttaaaaacaaatatctgtaggaaagcagcacaggaaaaattgtaaacttttg

SEQ ID NO: 566921 - DNA, 532 bp, Homo sapiens
caatatcattataatattccaattaacttaaaaaactgaaattctaaaataaaaaaattgagaaagtcatgttatatcaatgacaagagtcaaatgaattattgaaggacactgcattatctacttgttttgagaaaactccaggagctgagaataaatactcagcagagagtaagggggaactactgaatcactggcaacagaaaataaaatcaccccagtggcattagatagagcgtcagaccttagcagctgtaggcctctgggtaatacagaatggatgactggttaaaatattataacatagactttttctgaaagaagacaaagaaaagggtaagtctgaactcatttaaaagagtagttactgggaaggatcttgtttcctttgcatatttttgtgaactttggcagaacttagtttttacttttggagattttgttattcgctttccrataaccaggacaggtgtacactgtttaaaaacaaatatctgtaggaaagcagcacaggaaaaattgtaaacttttg

SEQ ID NO: 566922 - DNA, 537 bp, Homo sapiens
aatgtgccttctttcatttatgactttatttatttaatatttttttctctcaatctagataagggtttgtcacatttgtttrgtcttaaaaataattgagttttgttgtttttttcgcagtttttctattctctatttgatttatttctaccctaatctttatcattatcttcattctcataactttgagtttaatttgttttttttttagcttcttgggatgtaatattatgttgtttatttcagatctctcttcttttttaatgcagacatttagcaccacaaaattccctcttagaactgcttttgctgtatcccataggatttaaaatgctgtgtttctattttcagttgtcttcagatatttcgagcttcttttttgatttttgacccattgacaattcagaaacatgttgtttaatttctacatagttgttcatttcatagtattccttctatcattgatttctaatttcataccactgtggtcagaaaagatacttggtacttggtatgatttcaatcttcttaaattgt

SEQ ID NO: 566923 - DNA, 311 bp, Homo sapiens
ctaacattgttttaatcactagtaatattaagaggctttatacacttcttatgctgtcaaaagtgaaaataagaaatgagatctctgtttgcataccagttgtagcagatacattttcttagctcaactaagtactgttgaccttccatatccatgagttctgcatctgtttttaaccagctttgaatcaaacatatctgggagaaacaratggcatctgtactgaacattcacagacactttttgatcattattctctaaacaatacagtataacaactatttacatagcatttacattgtattaggtat

SEQ ID NO: 566924 - DNA, 479 bp, Homo sapiens
aattaacattatttagagtaagatagagagtctccrcaaaataatattcatgaaatactgtacctaataataaccatgagaagaagaggaaatttgactcatagagaagagataaaacaatcagtagaaaacagctctaagatgactgaagatgttggaattagtgcacaagacttaaaaagcatatatatataaatatgcccaaggacttaaaatatgatcttaatgaaacaaaagatgggggaatttttaatagaaaaatagaaaacattaaaaaacaggtggaagtttgaaagggtaagtggccttgaagatagatcaatattaattatttaatctagaaaacaaagagaaaaattattaaagaaaaatgaataaaatctcagtgctgttggagtaatttcatgtaatttaacatatatgtaattgtagtctcagaaggtaagaagagagcaaatgtaacaagaaaaatgtttaaa

SEQ ID NO: 566925 - DNA, 564 bp, Homo sapiens
taggaggtcatggtgggaggatcgcttgagcccaggagtttgagattagcctcrgcaacgtagtaagaccctgtctctaccaaaaaaaaaaaaaaaaaaatttaattagctgggcatggtggcacgcacctgtagtcccagctactcaggaggctcttgagctcaggaggtcgaggctgcagtgaccgtgatcacagcactacactccagcctaagcaacagaatgtaacccaatctcaaaattaaaaatttaaaaagagaagttatcagggctgtgggtcattggtagagtaagtaggttttatgataggcaaggtcccttagaagtttagatgctactggctgggcacagtcgtcacgcctgtaatcctagcactttgggagacggagcccggtggatcacttgaggtcaggagttcgagaccagcctggtcaaaatagtgaaacctcatctctactaaaaatacaaaaattagccgagtgtggtggcaggggcctgtaatcccagttctcggaaggctgaggtaggagaatcacttgaacccagaggacagaggttacagt

SEQ ID NO: 566926 - DNA, 529 bp, Homo sapiens
ggtaaatcctctgctctcagtcaagccgtccacgctgatacatggagcagagacaagttgtccctactgagccctgtccaatttaaattgcaaaaccataagcaaataaatggttgtgttggttttaggtattttgtcatcttgcaggaataactgaatcttcccaaagagtcacttcacttcattccagggcttctgctaattccaccatgctgagcctgctgcattaactctcacagctgtggctgtatgaacaagtcgtcaaaataaaaatcagcacagatatgrttaataacttcatgaatcctgtgatgcagggagaagacccagcataggcctccatatccatgcattttcaagcactaaatactatcaaatacaaatgcaaagccagctttccaatgatttcctggccaagttaccaggtgcagaaaaatactcatctttgataatactagccaaaataaatactattttacaaattttatgtttatatatatatatatatatatatatattcctttttttt

SEQ ID NO: 566927 - DNA, 529 bp, Homo sapiens
ggtaaatcctctgctctcagtcaagccgtccacgctgatacatggagcagagacaagttgtccctactgagccctgtccaatttaaattgcaaaaccataagcaaataaatggttgtgttggttttaggtattttgtcatcttgcaggaataactgaatcttcccaaagagtcacttcacttcattccagggcttctgctaattccaccatgctgagcctgctgcattaactctcacagctgtggctgtatgaacaagtcgtcaaaataaaaatcagcacagatatggttaataacttcatgaatcctgtgatgcagggagaagacccagcataggcctccatatccatgcattttcaagcactaaatactatcaaatacaaatgcaaagccagctttccaatgatttcctggccaagttaccaggtgcagaaaaatactcatctttgataatactagccamaataaatactattttacaaattttatgtttatatatatatatatatatatatatattcctttttttt

SEQ ID NO: 566928 - DNA, 622 bp, Homo sapiens
gaaacactgctttgaaaacagtaatctgaattatacctgaagccacagaagccaaatatttactaaaggttcttttaagaaaaacaagttggccgggcacggtggctcacgcctataatcccagcactttgggaggccagggtgggtggatcacgaggtcaggagattgagaccaccctggccaacatggtgaaaccctgtctctactaaaataaaatataaaaattagccgggcwtggtggcacgagcctgtagtcccagctactcaggaggctgacgcaggggaatggcttgaaccagggaggcggaggttgcagtgagctgagactgcaccactgcactccagcctggtgacagagcaagactttgtctcaaaaaaaaaaaaagaaaaaaacaagttgtatggaaggaggacatcattaacagtatatctcttcaataatggtttattttactattctcattcttctcattcctctcttactatgtcccaaatcccttcacaggctaaaagaaactcttcagaattaatcctattcataaagaacaccacttactgagtattgcattttcttcttcaaattcttcagcatacattgggaatacaccctatggaccattt

SEQ ID NO: 566929 - DNA, 497 bp, Homo sapiens
aacatcatggtagaactatccatttagacacgttgtaatggaagacagctgcttcactatctttcctctctcccggtttattcctcacgctggtaactgaaatgctggctgcatatcaatctcaggagaagtaggaaggaaatgcacatagatttaaatgcagctagaaaaaatgcaacttgataacttatataagaagacattaaatgtatctaaataaatatatttcattatttgatttgaacatttaatctcatcaacatgtaacttatgttttgctatctgcagaatagaattctgttcaaaaccacactccagaatgctattttctgggatgcataatttaggaaaagcaatttcttctttcctatatctgcccgtcctctctaccaactgtgggctcctaggtgacaggcaccaagtcttacttttttgtatcctcaggttcttgcttacattgtatcatccataaatwtttgttaaaaatgaaagaggat

SEQ ID NO: 566930 - DNA, 606 bp, Homo sapiens
aaccaaaagtgaacaggagccgttatacttatrtcagataatagagacttgaagtcaagaacagtaaaaaagaagacaaagaatgttattatataattttaaagggataaatccagcaagcagatataacaattctaagtatgtatgtacccagattcatgaagcagatattactagttctagagagagagcaagactgcaatacaataatagtgggagacttcaacatccccctttcagcattagacagtttatctagacagaaaatgaacaaagaaacattggatttaaactgcaccttagaccaaatggacctaacaaacatatacagaacattctatccaacaactgcagcatattcatcctttggatcaacacatggcacattcttcaggagagatcatgtgttaggttgcaaaataagtctcaacaaattttataaaattaaactcatatcaagtatcttctcagaccacaatagaataaaactagaaatcaataccaagaggaaatttggaaactatacaaatacatgggaattaaacaacatgcccctaaacaaccattgagtcaaggaagaaatgaagatggaaatttaaaaaaaag

SEQ ID NO: 566931 - DNA, 550 bp, Homo sapiens
aggaaatataacacctccaaaggaacacaataatcttccagcaatagatattaaacaaaaataaaatttttaaatcccagatatagaattaaaatattagttttaaagaaccttggggagatacaagagaactctgagaaacaatataaataaatcaggaaaacaattcaggatatgaatgagaaatttaccaaagagatagatatttttaaaaagagacaaacagaaattctggagataaagaactcattgaagaaaatmcaaaatacatttaaaagcttaaggaatgactaggtaagcagaagaaagaatctcagaactggaaaacaagtcttttgaaataatctagtcagataaaaataaagaaaaagaataaaaaagaatgagccaagtcttcatgacatttgggacaacataaggtgagtgaatttacaaattatcagtctccttaaggacaaagaaacaaagaaaggattagaaaacctatttaacaaaataatagatgaaaacttctcatgtccagcaagagatttagacattcaaacaccag

SEQ ID NO: 566932 - DNA, 533 bp, Homo sapiens
attaattttaaaataacaataataaaacaattacagtttaacctaaatatttttatgaaaaacagctagctgccaaaacaaactcatggcagtgttttatatttttgcaaatctctggattaattgaagacagctgaattctgatatctgcttctgcatttaatcagttgcagtctgttttgttgttgtttttgttgttgagatatgtgaagaaaatctggcctcacacagataacatagttgaaaagaagtgtattttagtatcctcttctgataatcgtggatattctttttagacactacatcaaaactctttaagtggtagtttctttttatttcttttttcttttcttttctttttttttttgtccttttttttaaatttatttttattttttattgagacagagtctctctctgttgcccaggctggaatcttggctctctgcaacctgtgctgctcgggtaccatcrattctcatgcctcacctcctgagtagctgggattacaggcgcccaccaccatgcccagc

SEQ ID NO: 566933 - DNA, 519 bp, Homo sapiens
gggaggggaatattacacaccagggcatgtggaagggtggggggctagagaagggatagcattaggagaaatgcctaacrtagatgacaggttgatgggtgcagcatactaccatggcacatgtatacctatgcaacaaacctgcacattctgcacatgtatcccagaccttaaagcataatttaaaaaatatatatatatatcttgtcatgctgttcttttaaggaaacagcctgaggcagtgggcatggaaggagattatacttgatggattttttaataaaaaatgataaatgaatataaaaataaagttaacagaattgacaaaactgcattttaaatagttttactagatatttatttggtatgtttactagatattctaggcatacaagaacttggttaagctctctaatagccccaattgagtaggcattattaatcctactttatatataaggcaaagtaactttttttaaaatatgccattaataagagataaaacagaggtttttaagc

SEQ ID NO: 566934 - DNA, 602 bp, Homo sapiens
tatttccataattctaccacattataaaacatagcatctgaacccaggggaatggattaatttatcagacccactttattctccacaaaacccatcttaattcccatacttgyttttgaaatttcaaaatcactttatatattctttaagtgaaactatcaagaatataaagtcaagatgtcaagttaatttttaaaattagctttaaaaatttgatacatcgaatgttactttctatatattatcttataaatgagtcttgcaaaataataactgcagcaataacaatttataagtaaatgaagtacattagaaattagaaatcaacatcagcttaaacaaaacagaacaaggaagctactccatctgctccattggtatatgactcatgtgttgagcccaatcagcaagaagctgtcatttataattagcattggagaaggaagaaaggaagatggggggaataaccaaattgagttgaatgtgtattaaattaatattttgcataggttatgtaatttaatttgaaagtagaaatatgagtgctataaatatattgacaatgccttgtctttcctctgcattggctgttgctaacctag

SEQ ID NO: 566935 - DNA, 602 bp, Homo sapiens
tatttccataattctaccacattataaaacatagcatctgaacccaggggaatggattaatttatcagacccactttattctccacaaaacccatcttaattcccatacttgtttttgaaatttcaaaatcactttatatattctttaagtgaaactatcaagaatataaagtcaagatgtcaagttaatttttaaaattagctttaaaaatttgatacatcgaatgttactttctatatattatcttataaatgagtcttgcaaaataataactgcagcaataacaatttataagtaaatgaagtacattagaaattagaaatcaacatcagcttaaacaaaacagaacaaggaagctactccatctgctccattggtatatgactcatgtgttgagcccaatcagcaagaagctgtcatttataattagcattggagaaggaagaaaggaagayggggggaataaccaaattgagttgaatgtgtattaaattaatattttgcataggttatgtaatttaatttgaaagtagaaatatgagtgctataaatatattgacaatgccttgtctttcctctgcattggctgttgctaacctag

SEQ ID NO: 566936 - DNA, 595 bp, Homo sapiens
agactccgtctcaaataaataaataaataaataaataaaaattaaataaagaaatacagaagagccatgaggcaatgtaagagcctatctgctggccattacacttaagcgccatctcctggattgcatcccaaatggcaacaaaaaattcagccaataaataatcacctgtttaaaccaggtyaagaatccagttacaagaaaattctctacagagctttggcccactgaaagcacacaaaaatgaagccaactgactatatttgacttacatcacaggaaaaggaccactagtcctctcagatgaaaagggatcagcacaagaatgctgacaattcaaaaagtcaaatgtctctttacctccgaacaagtgcaccagcttcccagcaatggtgcttaaccagattgaaatgattgaaatgacaaagaattcagaatctaggtgtcaaagaagctaataaaaatacagtaaaaattcgaaacacaatccaagttatccaaggaatccactaaaatgatcctagagctgaaaggtgaaatagccattttaagaaaggaccaaactgaacttctggattgaaatattaactacagg

SEQ ID NO: 566937 - DNA, 595 bp, Homo sapiens
agactccgtctcaaataaataaataaataaataaataaaaattaaataaagaaatacagaagagccatgaggcaatgtaagagcctatctgctggccattacacttaagcgccatctcctggattgcatcccaaatggcaacaaaaaattcagccaataaataatcacctgtttaaaccaggtcaagaatccagttacaagaaaattctctacagagctttggcccactgaaagcacacaaaaatgaagccaactgactatatttgacttacatcacaggaaaaggaccactagtcctctcagatgaaaagggatcagcacaagaatgctgacaattcaaaaagtcaaatgtctctttacctccgaacaagtgcaccagcttcccagcaatggtgcttaaccagattgaaatgattgaaatgacaaagaattcagaatctaggtgtcaaagaagctaataaaaatwcagtaaaaattcgaaacacaatccaagttatccaaggaatccactaaaatgatcctagagctgaaaggtgaaatagccattttaagaaaggaccaaactgaacttctggattgaaatattaactacagg

SEQ ID NO: 566938 - DNA, 551 bp, Homo sapiens
agtcagagcagtcaggcaagataaaaaaataaaagccttctaaacatgaaaaaagaagttaaattctctctcttygctgatgacatgattctatatctagaaagccctaaagactctcccaaggggtttctaaaatggataaatgacttcagtgaaatttcagggtacaatgtcaaggtataaatatcagtagcattttctatacgctaataacattctagctgagagtcaaatcagaaacacaatctcatttacaatatctgcaaaaaaatgaaatacttaggaataattcaaaccaaagaattaaaaaaaaaaaaactctgcagggagagctacaaaacactgctaaaagaaatcaaagtcaacacaagtatatggaaaaccactgcatgtttatggatttagaagattcaatatcgttaaatggccatactgcccaaagcaatgtatggattcaatggtgatgtctaggagattaccaacgttatttttctagggaattggaaaactattctaaagttcatttggaaccaaaaaagtgctcaaatagc

SEQ ID NO: 566939 - DNA, 572 bp, Homo sapiens
tttctttttgaatatctgtgtttattctgaacattttatatattggaatccttctttcacttatcacaattttttcaaattttattcatgtggcatgtctcagtacttcctttttatttctgagcaatattccattttatggctacatcccattttatttattcattcatgaactgaggaacatttgatttttttacactattatgcataatgcttctaaagacattcacgtagaagtttttatgagatkttttattttattagagtgtggacctaggaatagaattgtttagtcatatggtaattatgtttaccttttgaagaactgccaaaccgtttttgtgaaacagctgcatcagtttatactcctaccagcaatgcatgagaattcctatttctccatatcttcaccgacatctgttttgtatttttgcttatagtcatcctagtgggtatgaaatggtatcttgtggttttcatttgcatttccttaatatatcattggaataatttctatttaaagttgatttttaactgggttatctttcattctccatttgtaagaattattt

SEQ ID NO: 566940 - DNA, 572 bp, Homo sapiens
tttctttttgaatatctgtgtttattctgaacattttatatattggaatccttctttcacttatcacaattttttcaaattttattcatgtggcatgtctcagtacttcctttttatttctgagcaatattccattttatggctacatcccattttatttattcattcatgaactgaggaacatttgatttttttacactattatgcataatgcttctaaagacattcacgtagaagtttttatgagatgttttattttattagagtgtggacctaggaatagaattgtttagtcatatggtaattatgtttaccttttgaagaactgccaaaccgtttttktgaaacagctgcatcagtttatactcctaccagcaatgcatgagaattcctatttctccatatcttcaccgacatctgttttgtatttttgcttatagtcatcctagtgggtatgaaatggtatcttgtggttttcatttgcatttccttaatatatcattggaataatttctatttaaagttgatttttaactgggttatctttcattctccatttgtaagaattattt

SEQ ID NO: 566941 - DNA, 366 bp, Homo sapiens
atactgttttccataatggctgcacctattcctgccaacattgtgcaaggattccaatttatttatatcctcaccaatactagttgtctttttttttttgatagccatcctgaaaggtgtgaagtgactgatacctcatagtggttttgatttgcatttccttgatgcctagtgacactgaacttttttttcatgtatctgttggccatctgwttggagaaatgtctattcaagttcttagcacatttaaaaaaacatttttaatttaatttttttctgcatcatttagactgtttttaattgggcagatattttttactatcagttgtgggagtttctcatatatttttgggattcattccttat

SEQ ID NO: 566942 - DNA, 559 bp, Homo sapiens
tcatttcttctgaattttccaatttactggcatatagttgttcatagtagccactaatgattctctgaatttctgaggtatcagtcataatgtcttctttttcatctctgatcttgtttatttaggacttctctccttttttttcttagtctggctacatgtcaattttatttatcttttcaaaacaccagctttttgttttgttgatctgcttttttcttcatttcaaatttatttcttctcttacctgtgtaatttcttttattctactaattttgggtttgctttgcttttgcttttctagttaattaagaggcattcttaggttgtttatgtgasatttttctcctttgatgtaggcattaatggctataaacttctctcttagtactacttgtattatatcccatagattttgggattttgtgtttttattatcatttgtttcaataaatttttcaatttcattcttaatttctttattgaaccactgattattcaggagcacattgtgtaatttccatgtgtttgtgtaatttttaaaaattctttttgttat

SEQ ID NO: 566943 - DNA, 673 bp, Homo sapiens
aagcaaatcaataatttcaaagaatgataagtactctgaaagaaattcaagaacaatgggatgaagtgaatagtgggrgaggtcagagataacttattagttaaatgaaatttggactgacaaataaatgatgtgatggaactgatacaataatgatgagagagaagacagcagaaacagaaggaatagcctggggaaaagcatcaaggtggggatgcactttacatacagaaaatacaaaaacaggcctgataactcagatgacatgacccagagggagtaaggagggaggtgaggttgaagagaaagcccagagccagaccatattagttggaacttagggtaacatttgctgtgaaatcgtggtatgcatcattatgttttgagaacatggtaaatttatcaacaattttatataaaatttatcttggagaggatgggctaaaggtgggttgcactagccttccttatatgtggttatcctctgtgtagcatcagatgttattttcttggcagtccccatgtttccacacattgactgttgttgctgctacctatactatcatgcttattttgtgtattcccattttagcacttcacagaaatcatataatcttaatgctggaaggcctccacggatcaggtaggccaatgtcttaattttacagatgtg

SEQ ID NO: 566944 - DNA, 673 bp, Homo sapiens
aagcaaatcaataatttcaaagaatgataagtactctgaaagaaattcaagaacaatgggatgaagtgaatagtgggagaggtcagagataacttattagttaaatgaaatttggactgacaaataaatgatgtgatggaactgatacaataatgatgagagagaagacagcagaaacagaaggaatagcctggggaaaagcatcaaggtggggatgcactttacatacagaaaatacaaaaacaggccwgataactcagatgacatgacccagagggagtaaggagggaggtgaggttgaagagaaagcccagagccagaccatattagttggaacttagggtaacatttgctgtgaaatcgtggtatgcatcattatgttttgagaacatggtaaatttatcaacaattttatataaaatttatcttggagaggatgggctaaaggtgggttgcactagccttccttatatgtggttatcctctgtgtagcatcagatgttattttcttggcagtccccatgtttccacacattgactgttgttgctgctacctatactatcatgcttattttgtgtattcccattttagcacttcacagaaatcatataatcttaatgctggaaggcctccacggatcaggtaggccaatgtcttaattttacagatgtg

SEQ ID NO: 566945 - DNA, 593 bp, Homo sapiens
tggtatgtatataccatggaatactattcagccataaaaaggaatgaagtaatggcattcacaggaacctgaatggagttggagaccattattctaagtgaagtaactcaggaatggaaaaccaaatsttgtatgttctcacttataattgggagccaagctatgaggacacaaaggcataagaatgatataatggactctggggactcagggggaaaggtaggaaaagggtgagggataaaagattacacattgggtgcagtatgcactgcttgggtgatggtggcaccaaaatctcagaaatcaccgctgcagaacttatccatgtaaccaaaaaccacctgtttccccaaaactattgaaattaaaaaaaaaaagcatggaagctgaaatatctaacattttgtgacaccatggtttgtgaattttaggggatggttcaatagaagatatagacaaaaatggaaatttaattagagagctgaagaaaaaatatgagttgcaagtaaagtaagaatgtctcattaggagagagaaaatatttggtcattttgatgaggacttaattacatagaggctgttaaagagggtga

SEQ ID NO: 566946 - DNA, 523 bp, Homo sapiens
gagattacaggtgtgagccatttcgtccagcctgaagcctggttttaaaagtcatctgtaaaagacctgggcaaagggccactgaagaaatttgaatatggactagattttaartgatattagacaattattgctaatttatgagctgggataagggtattgtagtttacagaagaatgtctttataaatgtgcgtgctgaagtatttaggagtgaagtgttaaaatgtctctaagatattttcaaatggtttagcaaaatgtgtgcatatgtgtgtgtgtgtctgtgtgtgtaaagtatatatggcaaaatgttaatgaacctaattggtatatttatgaatgttcactgtcctatttttctattttctttatgtttaaaagtctataataaatttttttttcataaaaaaagaaaagaaagtccttgataaagtttgtctctcattgggtctatgcatcctgccacccacaacaccgggtgtcatttccttagtcccagaatacatcagtctcctaagtaa

SEQ ID NO: 566947 - DNA, 523 bp, Homo sapiens
gagattacaggtgtgagccatttcgtccagcctgaagcctggttttaaaagtcatctgtaaaagacctgggcaaagggccactgaagaaatttgaatatggactagattttaaatgatattagacaattattgctaatttatgagctgggataagggtattgtagtttayagaagaatgtctttataaatgtgcgtgctgaagtatttaggagtgaagtgttaaaatgtctctaagatattttcaaatggtttagcaaaatgtgtgcatatgtgtgtgtgtgtctgtgtgtgtaaagtatatatggcaaaatgttaatgaacctaattggtatatttatgaatgttcactgtcctatttttctattttctttatgtttaaaagtctataataaatttttttttcataaaaaaagaaaagaaagtccttgataaagtttgtctctcattgggtctatgcatcctgccacccacaacaccgggtgtcatttccttagtcccagaatacatcagtctcctaagtaa

SEQ ID NO: 566948 - DNA, 542 bp, Homo sapiens
tggggaccaatattcaacattcttaaagaaaagaattttcaacccagaatttcatatccagtcaaactaagcttcataagtgaaggagaaataaaatccttttcagacaagcaaatgttgagggaattcatcaccaccaggcctgccttgcaagagctcctgaaggaaagcactaagtatggaaaggaaaaaccagtaccagccattgcaaaaacataacccttaagtgttatgaaataattaggaacccagcccagctctaggattcacccctgagcacaaaggcaatgttgggcatgctggtaaaggaccactagaatccagcagcccagacccctttctttgtggtcaagaaaagcaggaaaagggtgcaggactgctacatcggtgagcrtaactaatccgataagcagaagtccatgggtggttatgcaccctggaaaggaataagcattaggaccatagaggacgctctaggactaatgctcatgggaaaatgactaagggtgctggcatccctctgttcttttttcagatgggaa

SEQ ID NO: 566949 - DNA, 535 bp, Homo sapiens
tgtttccaggatttgtttcaagatttagagctccttttagcaattcgtatagtggtggcttggtagtggtgaattctctcagcatttgtttgtccgaaaaagactatctttccttcatatatgatgcttaatttcactggatccaaaattcttgagtgataattgttttgtttgaggaggctgaagatagggcccaaagatttctagcttgtaggrtttctgctgagaagtctgcgttaatctgaaaggtttcctttataggttacctggtgcttttgtctcacagctctaaagattctttccttcatcttaactttagatatcctgatgacaatgtgcctaggcgatgatctttttgcaatgaatttcccaggtgttctttgtgcttcttgtatttggacgtctaggtctctagtaagaccaggaaagtttcactcaattattcccccaaatatgttttccaaacttttagatttctcttcttcctcaggaacaccaattattcttaggtttggttgtttactataattccaga

SEQ ID NO: 566950 - DNA, 535 bp, Homo sapiens
tgtttccaggatttgtttcaagatttagagctccttttagcaattcgtatagtggtggcttggtagtggtgaattctctcagcatttgtttgtccgaaaaagactatctttccttcatatatgatgcttaatttcactggatccaaaattcttgagtgataattgttttgtttgaggaggctgaagatagggcccaaagatttctagcttgtagggtttctgctgagaagtctgcgttaatctgaaaggtttcctttataggttacctggtgcttttgtctcacagctctaaagattctttccttcatcttaactttagatatcctgatgacaatgtgcctaggcgatgatctttttgcaatgaatttcccaggtgttctttgtgcttcttgtatttggaygtctaggtctctagtaagaccaggaaagtttcactcaattattcccccaaatatgttttccaaacttttagatttctcttcttcctcaggaacaccaattattcttaggtttggttgtttactataattccaga

SEQ ID NO: 566951 - DNA, 380 bp, Homo sapiens
tagagctagactctgtctaaaaaaaaaaaaaaaattataatgatggttgtactacattgtgaatatataaaaatccattgaattgtaaactttaaatgggtgaattttatgtcaattaaagctattttttaaaaaagacctatatgaaaaacttgaattttggggagttagttgtattaaccaggccctatccagtctttttttcaaaattasagatgggggtctcactctgtcacccaggctggggtgcagtggcgtgatcatagctcacttcagcttcccaaagagctgggattacaggcggatgccacaatgtctggctaactaaaaaaaaatttttaagagatgaggggtctcactatgttgcccaggctggtctt

SEQ ID NO: 566952 - DNA, 290 bp, Homo sapiens
agggagttcctcctatgtctgattggacctttgtatggtgattaagatttagatcccctgttaggaaacctgctgggttaaggatttttgataggaaggctatgggttgtyagtggcctcagtgctttcgcgctacgcccttgtttacactgacaacaaggtggtattggagtgttacagggttacagagaagaccttcaattatcaattataggttttaactttaccctggcttttaaaggaatagggtacactgttttttctttactacttccatctctctttctctt

SEQ ID NO: 566953 - DNA, 290 bp, Homo sapiens
agggagttcctcctatgtctgattggacctttgtatggtgattaagatttagatcccctgttaggaaacctgctgggttaaggatttttgataggaaggctatgggttgtcagtggcctcagtgctttcgcgctacgcccttgtttacactgacaacaaggtggtattggagtgttacagggttacagagaagaccttcarttatcaattataggttttaactttaccctggcttttaaaggaatagggtacactgttttttctttactacttccatctctctttctctt

SEQ ID NO: 566954 - DNA, 290 bp, Homo sapiens
agggagttcctcctatgtctgattggacctttgtatggtgattaagatttagatcccctgttaggaaacctgctgggttaaggatttttgataggaaggctatgggttgtcagtggcctcagtgctttcgcgctacgcccttgtttacactgacaacaaggtggtattggagtgttacagggttacagagaagaccttcaattatcaattataggttttaamtttaccctggcttttaaaggaatagggtacactgttttttctttactacttccatctctctttctctt

SEQ ID NO: 566955 - DNA, 436 bp, Homo sapiens
ccagcttccttaaatttactctaacctaggagcccagaggtaagttacacaaccaacagcaaactgaatagcacaaagtaggatcaaatgttataatcatacatcactggagatgcccccatctactcaagatgattacttttcctcctgaccacakcttttggttccaaaatgtattacactgtttaaatgcttttacccttgccagaaggcttggcaacatgcaacagcttcctgtgtaagcaagtgaactcaagaagaagcacgatccaaggcagagaggacatggtgctacaatattgtcttggccatatgatattgaagcctgatattatttttgtgcaaggtctaacctacccacagcaagcttaagtgtaaacaagtacagaaccttctgtgcgctcctaccggagcaccaaagtgaaggggtaaagaa

SEQ ID NO: 566956 - DNA, 572 bp, Homo sapiens
  misc_feature 134, 183: n = A,T,C or G
ccaccaaagggcgataaaaattacaaaagttgtatatttwaaaaaataataactcctagtaaataataataatagtggggatagtgaacatatagaaagtactaatttacactgtataaaaaacaaggtctganaattttaaatgtcagtcaattagacacatgtttgcaatttccacaggtntggtagagtatagaaaaatatctctgactggtatccagttttgaactctccatacaaatttctcagccctgaatggaaaagccaacttacctataagtgaacaaaagtgaaaatccttatctaggggtatgtcaattttctatggctacagtaatacaacaacagtggcttaaactaacacagatttattgttacagctttgtagttccaaagtctgaaataggtctcagtatttaaaatttgctggtagagttgagtgcctttctgaatgctctaagggataatctatttctatgcctttttcagcttttagagcctgcccacagtccctgaatcatggtcccattattccatttctgaagccagaaagtcaatttcatctcacatca

SEQ ID NO: 566957 - DNA, 596 bp, Homo sapiens
tttctcactgcccaggacacgtcaggcttgatgccatccctgccatttgaggataatgaagcatcatccactgtcagaaataagaacttacttaatgaataagaaagctggcaatcataaacaagaaaagtgcytcagcagcatttcacatcattaaaacatctccaacttgattcctttttgtccttttgttacattcttgctatttctctaaatatcttaacagatgcttcttatttcagtaaaatttgtatcttttgcccacctccaacatgttctctcttattcttttttaatactccaaccattataaagtttacaattacatgcctacccagagtagagtgttataaatattggatcaatggccattttaatctttcctctctggctctttgaaataatcttaaaactactttgaaaacagtattttaagattgttttacatagaaattctatcatccctcaagaagcagtatggctccaatattcagatttcactgtgaggctcttacctatctaattcatatctattttcagattttgttaaaagaaattttacagaggctactcactcatatttggaagaaaaacat

SEQ ID NO: 566958 - DNA, 596 bp, Homo sapiens
tttctcactgcccaggacacgtcaggcttgatgccatccctgccatttgaggataatgaagcatcatccactgtcagaaataagaacttacttaatgaataagaaagctggcaatcataaacaagaaaagtgcctcagcagcatttcacatcattaaaacatctccaacttgattcctttttgtccttttgttacattcttgctatttctctaaatatcttaacagatgcttcttatttcagtaaaatttgtatcttttgcccacctccaacatgttctctcttattcttttttaatactccaaccattataaagtttacaattacatgcytacccagagtagagtgttataaatattggatcaatggccattttaatctttcctctctggctctttgaaataatcttaaaactactttgaaaacagtattttaagattgttttacatagaaattctatcatccctcaagaagcagtatggctccaatattcagatttcactgtgaggctcttacctatctaattcatatctattttcagattttgttaaaagaaattttacagaggctactcactcatatttggaagaaaaacat

SEQ ID NO: 566959 - DNA, 622 bp, Homo sapiens
aagcattgactttttttaagaaatggcctgtttgccctctcaccgtcaacataggtattaatctgattatcttctcagattataactgagaggattgatagtataaattcaaaaccaccctgctctctgatagcatttgaagtccatatagcctcagcagagtaacttttaccactatctgctccatgctttgcctgctccttctcctgtgtgtaatgaaactattatcttaaaaatatctttgtttgacctctactaaagcatctatagtcctaagggtgtgtccgtactgtgacctctataacgatcatgaatgaaggatggcatctgagttatgtttttagaaatataagggtaaggtctaacactagaagtcaaggtgaaagtatttgttgattcgttttgttccactctaagtttttaaaagcttgcttgtctcaagactcaaccttctgtgatctttacacatgataagtagttttcttataacttatgtattatctttaacattattgttggaagtgctctctcaaaccgaaccctcatgaatatttagcatggcttaacttaygatcaaaattggctcctgtgctttgttattgacttattaggactcacttta

SEQ ID NO: 566960 - DNA, 460 bp, Homo sapiens
gggggttaggggagggatagcattaggagaagtaatacctaatgcagatgacaggttgatggatgcagcaaaccaccatggcacatgtatacctatgtaacaagcctgcacattctgcacatgtatcccagaacctaaagtataattaaaaaaaggtaaaaaaaatcatgaaatgcaaaatgtttgattgtatataactgaagagctgtaagcagcaagcctagatacttctttcaaaamgcttaacttttgtttttaaaatggcagagatttcagaatatttaaagggtccacaatgagggagaaagtcagcatagaggttagagaaaagattcaaagtgtaataatattcttgagcaagtgagaaaggatgacattcagaacataggagagataagtctttgattggagtaggaagagtctactattgcagtcagaggaaaaaaggggtacagatgac

SEQ ID NO: 566961 - DNA, 584 bp, Homo sapiens
tttgaggtcaggagtttgaggctggcctgggcaacatagtgagactccatctctacaaaaaaaaaaaaaaaagaaagaaagaaaaaattagccggrtgtggcacatgcctgcagtcccagctacacaggaggatgaggcaggaggactgcttgagcccaggagttcaacctgcagtgagctatgattgcaccattgcactccagtctgggtgacagaatgagaccctgtctcttaaaaaaaaaagtaaaaacaaaacaaaaaaacactaatgctatgaattgaattgcgtccctccgaatttatatgttgaagccttaactctcactgtgctggcatttggagttgaggcctttgggagactttgagagataattagggttagataaacgcatgagggaagggtggagccctcactctgggactggagcccttataagaagagacttctgagatcttgctgtctctctctgccatgtgaggacacagcaggaagactgccctcaacaaggcaggaggatggccctcaccagaaccctatcatgctggcatccagatctctgacttccagcctccagaactatga

SEQ ID NO: 566962 - DNA, 584 bp, Homo sapiens
tttgaggtcaggagtttgaggctggcctgggcaacatagtgagactccatctctacaaaaaaaaaaaaaaaagaaagaaagaaaaaattagccggatgtggcacatgcctgcagtcccagctacacaggaggatgaggcaggaggactgcttgagcccaggagttcaacctgcagtgagctatgattgcaccattgcactccagtctgggtgacagaatgagaccctgtctcttaaaaaaaaaagtaaaaacaaaacaaaaaaacactaatgctatgaattgaattgcgtccctccgaatttatatgttgaagccttaactctcactgtgctggcatttggagttgaggcctttgggagactttgagagataattaggrttagataaacgcatgagggaagggtggagccctcactctgggactggagcccttataagaagagacttctgagatcttgctgtctctctctgccatgtgaggacacagcaggaagactgccctcaacaaggcaggaggatggccctcaccagaaccctatcatgctggcatccagatctctgacttccagcctccagaactatga

SEQ ID NO: 566963 - DNA, 461 bp, Homo sapiens
agccttctccctgtacctagttatagaaataaactctcttctatcccagttcatctgcatcttgttattgggccatgagaataagcataaaacaaaccttcctttgatgctggtacctaagcaccaaacaatagataccagcatcaaargaaggtttggatacaatcttctttcgttttgtctggatacaaggagctagtttgggtctgctcagttaatgtatctatgctcatattttccttcctcaattataaaataaatcagaggtgaacactgtggttagccatagattaaccaagaaagcagaaatcatctcaaatgttcacagtggaaggaatggaaagcagaggtgggtccatgaagagtggagaggttgagaattaaacagtgggctctaaaataatcctgggagattgaagatggcaggaagtctttatcattcttgggctggagagacaaaa

SEQ ID NO: 566964 - DNA, 564 bp, Homo sapiens
cctggcctcaagtgatcctcctgcctcagccttctagctagcaaggatttcaggcacaagccacagcacacctggcatatccaatttttcctacatctactcccatctgatccttctccattaatatgttaatgtagtgagttacactgttacatcatcctcaaagtcctagactatatactctctcagctccactctatggtataactattcccttttattggtatataactctgtcacaggtcttccaatacttggtctttttgactcccactttctcactagrttctaagttccttgacaagagggaccatatcttcttattcatgtttttatttctaaaaattaccatatttcctaacacaaatattgtctgaataaataaaaataagaataaacaaagactaagcatagtgttttttaaaccattgctttctatcgaaagttacgagctgacaacctccaagctaacaactcagctggcagcctggaataggtactttcattaagctgtgtctcaaaaatcagttgactaatagagtcctaaactacaatttgagatct

SEQ ID NO: 566965 - DNA, 565 bp, Homo sapiens
atgttgctcaggcttgcctcaaactcctggcctcaagtgatcctcctgcctcagccttctagctagcaaggatttcaggcacaagccacagcacacctggcatatccaatttttcctacatctactcccatctgatccttctccattaatatgttaatgtagtgagttacactgttacatcatcctcaaagtcctagactatatactctctcagctccactctatggtataactattcccttttattggtatataactctgtcacaggtcttccaatacttggtctttttgactcccactttctcactaggttctaagttccttgacaagagggaccatatcttcttattcatgtttttatttctaaaaattaccatatttcctaacacaaatattgtctgaataaataaaaataagaataaacaaagactaagcatagtgttttttaaaccattgctttctatcgaaagttacgagctgacaacctccaagctaacaactcagctggcagyctggaataggtactttcattaagctgtgtctcaaaaatcagttgactaataga

SEQ ID NO: 566966 - DNA, 564 bp, Homo sapiens
cctggcctcaagtgatcctcctgcctcagccttctagctagcaaggatttcaggcacaagccacagcacacctggcatatccaatttttcctacatctactcccatctgatccttctccattaatatgttaatgtagtgagttacactgttacatcatcctcaaagtcctagactatatactctctcagctccactctatggtataactattcccttttattggtatataactctgtcacaggtcttccaatacttggtctttttgactcccactttctcactaggttctaagttccttgacaagagggaccatatcttcttattcatgtttttatttctaaaaattaccatatttcctaacacaaatattgtctgaataaataaaaataagaataaacaaagactaagcatagtgttttttaaaccattgctttctatcgaaagttacgagctgacaacctccaagctaacaactcagctggcagcctggaataggtactttcattaagctgtgtctcaaaaatcagttgamtaatagagtcctaaactacaatttgagatct

SEQ ID NO: 566967 - DNA, 564 bp, Homo sapiens
cctggcctcaagtgatcctcctgcctcagccttctagctagcaaggatttcaggcacaagccacagcacacctggcatatccaatttttcctacatctactcccatctgatccttctccattaatatgttaatgtagtgagttacactgttacatcatcctcaaagtcctagactatatactctctcagctccactctatggtataactattcccttttattggtatataactctgtcacaggtcttccaatacttggtctttttgactcccactttctcactaggttctaagttccttgacaagagggaccatatcttcttattcatgtttttatttctaaaaattaccatatttcctaacacaaatattgtctgaataaataaaaataagaataaacaaagactaagcatagtgttttttaaaccattgctttctatcgaaagttacgagctgacaacctccaagctaacaactcagctggcagcctggaataggtactttcattaagctgtgtctcaaaaatcagttgactaayagagtcctaaactacaatttgagatct

SEQ ID NO: 566968 - DNA, 533 bp, Homo sapiens
cttctgaaaacggtttcattaactaatgaccttgaggaggcattagctagattcttgcttgccagtgaatttgaagaaccaaaggtyttgcccaggacattgaggtcataaaataaatagcttccaagagagcttttttccaagtaaatttttttcagagaaaagcttagaggaatacataaacatcatatcatcttttatttctcagtcagcatgtaatgacatatatccttctcaacactcaaactattttttattttttatcatgttgatggaaattttgtaaaaatgtatctaagctttgttgaacagtatattctgaacttaaattggtcttttaattgtatcgctacatttgacctaattgattgtgtggtgcttttaatgttgtgatcaattcagaggttctcaaaagtgcaagggtgtggccgggtgtggtggctcatgcctgtaatcccagcactttgggaggctaaggggggcggatcacgaggtcaggagtttgagaccagcctggccaatatggcgaaacc

SEQ ID NO: 566969 - DNA, 533 bp, Homo sapiens
cttctgaaaacggtttcattaactaatgaccttgaggaggcattagctagattcttgcttgccagtgaatttgaagaaccaaaggtcttgcccaggacattgaggtcataaaataaatagcttccaagagagcttttttccaagtaaatttttttcagagaaaagcttagaggaatacataaacatcatatcatcttttatttctcagtcagcatgtaatgacatatatccttctcaacactcaaactattttttattttttatcatgttgatggaaattttgtaaaaatgtatctaagctttgttgaacagtatattctgaacttaaattggtcttttaattgtatcrctacatttgacctaattgattgtgtggtgcttttaatgttgtgatcaattcagaggttctcaaaagtgcaagggtgtggccgggtgtggtggctcatgcctgtaatcccagcactttgggaggctaaggggggcggatcacgaggtcaggagtttgagaccagcctggccaatatggcgaaacc

SEQ ID NO: 566970 - DNA, 533 bp, Homo sapiens
cttctgaaaacggtttcattaactaatgaccttgaggaggcattagctagattcttgcttgccagtgaatttgaagaaccaaaggtcttgcccaggacattgaggtcataaaataaatagcttccaagagagcttttttccaagtaaatttttttcagagaaaagcttagaggaatacataaacatcatatcatcttttatttctcagtcagcatgtaatgacatatatccttctcaacactcaaactattttttattttttatcatgttgatggaaattttgtaaaaatgtatctaagctttgttgaacagtatattctgaacttaaattggtcttttaattgtatcgctacatttgacctaattgattgtgtggtgcttttaatgttgtgatmaattcagaggttctcaaaagtgcaagggtgtggccgggtgtggtggctcatgcctgtaatcccagcactttgggaggctaaggggggcggatcacgaggtcaggagtttgagaccagcctggccaatatggcgaaacc

SEQ ID NO: 566971 - DNA, 578 bp, Homo sapiens
cctgtcattggtttttgcatttttaaataggtcagtttttaaatagagttcactgtctatctagaattctgcctccttcagtatctatcttatctgcccagcccaggatcggcagaatttaaaacacagctaaagcaaagtgggattattttattttaagtaatagtggctcttttgacaatgtgtaacttggaagttaactgttactggcttatgaccttagtccacataatggtgatttaataaatgtcctgaaggaaaaaatrctcacttaccaagatcttaatctactaccatgaagtaactcctacttttaaataatccggttagacacttatagttaattgtaatgaatagtcaaaaatctcctctcaatgacaagacataattattacaaatctcaacactgcaaaataaaatgcattagactaataaggcatagagacacatcataaagtacttacagttacactattcatacacattttcattctgaaaaaccagtgattttttaatatattaaatagattcattgatggaatatcaaacatgttaaaatttagaaaagttataataaa

SEQ ID NO: 566972 - DNA, 611 bp, Homo sapiens
gtgaatctcagcaacttcctgcacagcctgctgtacagtccacaattcccagtccattgtaggtggtaagtacttattgaatgttattgaacactgtcaccactctttcttaaaaattgtccgtggctcaactctaaacacaaaatgaaatccaaattcttcagccagtcaytcagggcccttcatagccagacaacatcctcctttccaatctatccagacttatctcctgcaatcccatttgatatagtctggctctgtatccccacccaaatcttgtcttgaattgtaatcaaaattgtaatccccaagtgtttgggaagggacctcatgggaggtaattagatcatgaggcagtttcccccatgctgttctcatgatagtgatagtgagttctcatgagatctgatggttgtataaggggattttccccccttggctctgcatttctctctcctgccgccatgtgaagaagaaagtgtttgcttccccttccatcatgattgtcagtttcctgaggcaccccaccccagccatacagaactgtgagtcaattaaatctctttcctttataaattacccagtcttgggcagttctttatagcagcgtg

SEQ ID NO: 566973 - DNA, 611 bp, Homo sapiens
gtgaatctcagcaacttcctgcacagcctgctgtacagtccacaattcccagtccattgtaggtggtaagtacttattgaatgttattgaacactgtcaccactctttcttaaaaattgtccgtggctcaactctaaacacaaaatgaaatccaaattcttcagccagtcattcagggcccttcatagccagacaacatcctcctttccaatctatccagacttatctcctgcaatcccatytgatatagtctggctctgtatccccacccaaatcttgtcttgaattgtaatcaaaattgtaatccccaagtgtttgggaagggacctcatgggaggtaattagatcatgaggcagtttcccccatgctgttctcatgatagtgatagtgagttctcatgagatctgatggttgtataaggggattttccccccttggctctgcatttctctctcctgccgccatgtgaagaagaaagtgtttgcttccccttccatcatgattgtcagtttcctgaggcaccccaccccagccatacagaactgtgagtcaattaaatctctttcctttataaattacccagtcttgggcagttctttatagcagcgtg

SEQ ID NO: 566974 - DNA, 599 bp, Homo sapiens
ggatagttaaatcatcctgttgaattgaaacctttatcgttgtatagtgcccttctttgtcatgtttaactgctgttggtttaaaatctattttatctgatataagaattgtgaccccttctctttttgttttctgtgtgcatgacagatcrttctctaaccctttactttgagtctatgagtgtcattacatatgagattggtctcttgaagacagcagatggatgggtcttgcttttttatccagcttgccactgtgtgctttttaagtgaggcattaattggagatttctcaaagaacttaaggcagaaccaccatttgacccggcaattccattactaggtgtatgcccaaaggaaaataaatcagtccaccaaaaagacatgcaggcatatgctcactgcagcactattctcaatagcaaagatatgaaatcaacctagatgaccatcgatggtggattggataaggaaaatgtgtacatatacaccatggaataccatgcagccataaaaaagaacaaaaccatgttctttacagcaacatatatgcagttggatgccattatctgaagtgaattaatgcaggaacagaaaac

SEQ ID NO: 566975 - DNA, 566 bp, Homo sapiens
aggggaccggcgctcagcataccaaggacctgcaccagcaccggcctctgagttccctcagtttttattgattattattttcattatttcagcaaaaaggaatgtagtaggagagcagggtgataataaggagaaggtcagcaaaaaacatgtgagcaaaagaatctatgtcataattaagttcaagggaatgtactatgactggatgtgcatgtaagccagatttatgtttctctccacccaaacatctcagtggagtaaagaataacaaggcagcattactgcaaacatgtctcacctcccaccatagggcggtttttctcctatctcagaattgaacaaatgttcaatcgggttttataccgagacattcagttcccaggggcaggcrggagacagtggccttcctctatctcaactgcaagaggctttcctcttttactaatccacctcagcacagaccctttacgggtgttgggctgggggacagtcaggcctttccgccatatttcagactatcacatggggagaaaccttggacaataccctgcttccaaggcagaggt

SEQ ID NO: 566976 - DNA, 238 bp, Homo sapiens
gatacatggtcttaatagtatagtgtccctattagaaacctctgtgtttgtactgaatttcctataatgttgtgtgcacagtaagcccaccgggtattgyattttccactggctaaatgatgcatgtgtagaggcattgaaacaaatgaggaaaagagagagaggcactttaaacactttaattaaatattccccctcaggaaatctaaaaggaaaaaaaatctatttgtctttcagc

SEQ ID NO: 566977 - DNA, 642 bp, Homo sapiens
acctgtaatcccagttacttgggaggctgaggcacaagaatcacttgaacccaggaggtagaggttgcactgagcagagatagtgccactgcactccagcctgggaaacagagcaagactccatttcaaaataaaacaaacaacagaacagaacaaaacaaaacaaaaaactaactttataatagtcttaatactaatgttatactatcgtggctgccacagagaaaggtaaatattatttctttggaaggacagaatacatatagtagctctcttaaaagattgtcatacaatgagtcatgagattaaccaatgttctctttggttttaaaaaattatttattaaattaattaattaatttgagtaggggyattgctgttgcccaggctagagtacagtagcatcatcgtggctcactgtggccttcaacacgtgggctcaattgatcctcccatgtcagcctccctagtaggtgggattacaggtgtgtgccaacatgcctggctgttttttgttgttgttgttgttgttgttaatttttgtagagatggggtcttactatgttttctaagctggccttgaactcctggcttcaggcaatcctcccatctcaggctcccaaagtgctggaactacaggca

SEQ ID NO: 566978 - DNA, 566 bp, Homo sapiens
cagcatgatattcacatgaaaacaaacacataaatcaatggaataaaatagacaacccagaagccaatccatacatctatagtgaactcattttcaacaaagatgccaagaacactggggaaaggtcagtgtcttcaataaatggtgccgatggtgctgggaaaactggatatccatatgcagaatgatgaaactggactcctatctcttgtcatacacaaagatcaaatccaaatggattaaagacatgtctaacaccttagcctatgaaactctccaaaaaaaaaattggggaaattctacagggcattggacttggcaaagatttcttgagaccmcacaaggacaggcaatcaaagcaaaaatagacaaatgggatcacatcaagttaaaaaccttcttcacagcaaaggatacaatcaactaagtgaagagacaacccacagaatgggagaaaatatttgcaaactacccatctgacagggcttaataaccagaatatataaagagctcaaacaactgtttaggaaaaaaatctaataatctgattaaaatgggcaaaagat

SEQ ID NO: 566979 - DNA, 541 bp, Homo sapiens
tttgtttgaactctttatatgttctagttattaatcccttttctgatggatagtttgcaaatattttctcccattttgtgggttgtcttttcattttgctggttgtttcctttgctcttttctcttttctccatgtcttcatcagcatttattacctgtcttttggataaaagccattttaactggggtgagatatcacattgtagttttaatttgcatttccctaatgaccaatgatgttgagcaccttttcatataacttcttactatttgtatgccttctttgagaaatgtctattggaatcttttgtccatttttaatcagattattatacttttttcttatagagttgtttgagctatattctggttattaagccctgtcagacgggtagtttgcaaatattttctcccattctgtgggttgtctcttcactttgttgattgtatcctttgctgtatataatctttttaacttgatgtgatcccaatttgttcatttttgctttggttrcctgtgcttatggggtattacccaaga

SEQ ID NO: 566980 - DNA, 600 bp, Homo sapiens
ttctcttcacaaataactaatgataatcataattccatgttttctttagccattttttatcttcataggaatagtgtctattacttttttgcacatttttattgttttttttttagtttttagttttaagagtttttttatatacttagggaaacaagtcttttattatatgtataattttctgttgattgcctttctactttcttgatgttttaccaagcacaaaatttttaattttgatgtagtctaattatctatttttcwtttgttgtttgtgctttttgtcatatttaataattaatcacataatccaaaatcacaatgattacttctatgttttcttctaagagttctatggttttatttcttacgttgaggactatcatctatctggaattaatttttgtgcatcgcgtaaggaacagttccaacttaattgttgtgtatgtatttatccacttgtctccatatcacttcttgaaagatttaccccattgaaatctcgcaatactcttgttgaaaatcagtgaagaggcttatttttgaattctgaattctgtgtctatcctatgtcaagatcatactcttgattactgtggt

SEQ ID NO: 566981 - DNA, 600 bp, Homo sapiens
ttctcttcacaaataactaatgataatcataattccatgttttctttagccattttttatcttcataggaatagtgtctattacttttttgcacatttttattgttttttttttagtttttagttttaagagtttttttatatacttagggaaacaagtcttttattatatgtataattttctgttgattgcctttctactttcttgatgttttaccaagcacaaaatttttaattttgatgtagtctaattatctatttttcatttgttgtttgtgctttttgtcatatttaataattaatcacataatccaaaatcacaatgattacttctatgttttcttctaagagttctatggttttatttcttacgttgaggwctatcatctatctggaattaatttttgtgcatcgcgtaaggaacagttccaacttaattgttgtgtatgtatttatccacttgtctccatatcacttcttgaaagatttaccccattgaaatctcgcaatactcttgttgaaaatcagtgaagaggcttatttttgaattctgaattctgtgtctatcctatgtcaagatcatactcttgattactgtggt

SEQ ID NO: 566982 - DNA, 624 bp, Homo sapiens
cacatgtatacatatgtaactaacctgcacattgtgcacatgtaccctaaaacttaaagtatawtaataataaaaaataaaagaagtaggctttttatttatttattcaatttgataataaagaaagataacataacattttcccatcttgagggtaaaagtggtggtattatttccatctgtctatttcctccctatgcatttcctctgagctttggggttaaataaagttctatcatttgtcttccatggaaacaaataagagcaaatccaggcttctggggaatgctctgtcatttttaccaggtcaggggaatgaggcagaacttcatctaccatgtttttgcctcccatttcttcctattccacaaataattggctgacaaatatcacatagtagaggcctctgggaacttgttctttagaacagaaatgacagcaaaggctggagagcgcctcctgcctactcatgcatcctgactgttctgtgctctttcttcaaggtagcatatgggaaaaagcctcagtctaaccagagtagccatctaagatgcctgacatcttttccacagttgttcttttttcttctctgatgagttgtgaaaccgacagtaacttgggtca

SEQ ID NO: 566983 - DNA, 624 bp, Homo sapiens
cacatgtatacatatgtaactaacctgcacattgtgcacatgtaccctaaaacttaaagtataataataataaaaaataaaagaagtaggctttttatttatttattcaatttgataataaagaaagataacataacattttcccatcttgagggtaaaagtggtggtaktatttccatctgtctatttcctccctatgcatttcctctgagctttggggttaaataaagttctatcatttgtcttccatggaaacaaataagagcaaatccaggcttctggggaatgctctgtcatttttaccaggtcaggggaatgaggcagaacttcatctaccatgtttttgcctcccatttcttcctattccacaaataattggctgacaaatatcacatagtagaggcctctgggaacttgttctttagaacagaaatgacagcaaaggctggagagcgcctcctgcctactcatgcatcctgactgttctgtgctctttcttcaaggtagcatatgggaaaaagcctcagtctaaccagagtagccatctaagatgcctgacatcttttccacagttgttcttttttcttctctgatgagttgtgaaaccgacagtaacttgggtca

SEQ ID NO: 566984 - DNA, 547 bp, Homo sapiens
aagctctggaatgaaaataataactaactgaagagaatattctctttaaattcatatgttcacagacatataagctcttttttattaccatatttttacagataaacacttcagcacagtcaaggccttgcacaattaaatttggaaactttgcttcaattctaagggaggcacagtatgaatgtttttgcaggctttgtcctaattttcctttgaataaacacggggagagtctgttctccataattttcataaacatgtaatctggacatacccaagtactatgtcttctgggattttctttccattttctccttctgttgataaatggattccaccaggcacrgtggctcttgcctgtaatcccagcactttgggatgccaaggcaggaggattgcttgagcccaggagtttgagaccagcctgggcaacaaagtgagacttgtgattcccaataagtaaaaacattagccagatgtggtgaatcacatgcctgtagtcccacctactcaggaggctgaggcaggaggattgtttgagcccaag

SEQ ID NO: 566985 - DNA, 498 bp, Homo sapiens
cttgcttttattgtttgagttaaaaaagaacgagatcatgtcctttgcaggaacacagttggagctggaggccattatccttagcaaactagcacaggaccagaaaaccaaataccgcatgttctcacttayacataggagctgaatgatgagaacacacggacacaaagaggtgaacaacacacattggggcctttcggaaggtggagcgtgggaggagggagaggatcaggaaaaataactaatgggtatgtgaacccagaaagtctgagacaggtctcagttaacttactttcttttgccaaggttgaggacgcgccgtgacacagcctcaggaagtcctgacgacatgtgcccaaggtggttggggcacagcttcgttttatacattcagggagacatgagacatcaatcaatatatgtaagaagcacattgattcggtctagaaaggctggacagcttgaagcaaaggcaggaagactggaagcagggagggg

SEQ ID NO: 566986 - DNA, 498 bp, Homo sapiens
cttgcttttattgtttgagttaaaaaagaacgagatcatgtcctttgcaggaacacagttggagctggaggccattatccttagcaaactagcacaggaccagaaaaccaaataccgcatgttctcacttacacataggagctgaatgatgagaacacacggacacaaagaggtgaacaacacacattggggcctttcggaaggtggagcgtgggaggagggagaggatcaggaaaaataactaatgggtatgtgaacccagaaagtctgagacaggtctcagttaacttactttcttttgccaaggttgaggacgcgccgtgacacagcctcaggaagtcctgacgacatgtgcccaaggtggttggggcacagcttcgttttatacattcagggagacatgagacatcaatcaatatatgtaagaagcacattgattcggtctagaaaggctggacarcttgaagcaaaggcaggaagactggaagcagggagggg

SEQ ID NO: 566987 - DNA, 565 bp, Homo sapiens
agcttaattaataacacatccccacccctccttaaattgatcctgggacaataactagcccttaagcaaaacctcagcatagttctggattagaaagggctttagggactagagtctccagccctcgggggttagtggtaggagtgagactcagaaaggattaatgggtttttcagaatcctgagaaggttcaagcctcagcagggagtatataactccaagaccagtgcctgtcttcagtatgcctctattctggcttttggagatctgagggtctctttctcagttgtccagtgttgttctactgattctggtggaacaatagatgaactccagtcwagagttctattctagttgcctctcccctaaggataccagtgttccctttctcttcattaaaattttaattccttatctcatttgtgtttccaaacactcacagattgtcttggtgagtgcagagtaatttgtcattctttcaaggtaatatgcacataaaagccaccttcaacttttttttttttttttttcagacggagtctcgctctgtcgcccaggctggagt

SEQ ID NO: 566988 - DNA, 494 bp, Homo sapiens
caattttagtgtgacttttctgactagagagaacatgccagatcttttagctttcctttagaagtggtcttcaggatttttcttgtttgctttttcttccaattcttaagtgaatttaggctctctcttcatttttctgatgcaaatatccatgtggtctggacaaaggagatgcattcttcttttgtccttccctactattgggttcactttaatctgtaacacaaagcaagttatccctctattttctraacatttttgtgctctcagttttattcgtccagtttcttgtttagctgcctaaattctcccagctcattcactcacagccacttctggatgatacctgttgcttcaggttaatcactcctgtattagtccattttcatgctgttgataaacacatacccgagactgggcaatttacaaaagaggtttaatggactcacagctccacctggctggagaggcctcacaatcatggtggaaggtga

SEQ ID NO: 566989 - DNA, 566 bp, Homo sapiens
tttttcttaatatatgtgtgcatctatgtatgtgtgtatgtgcatgtctctatctttaatccatttagaaactaatgagtataaatttactgtaagtaaagcacttaaattattacttttagaagcaaggtctcattctaggttggccaagctggagtgtagtggctgtcatcattataattcactgcagcctcaaattcctggcctcaaatgattctcccacctcakcctcccaagtcattggaattataggtatgaatcaccatgcctgcctcctaaatgaatttgtttttaaacttcaccagacaacacagggggaaataaacaatcctagagttcaaatacttgcttgatttggagtattttccacatatgttaaatttgtcttcaccttgatatattagtccattctcacattgctataaagaaatacctgagactgggtcatttataaagaaaagaggtgtaatttgctcatgattccacaggctgtacagaaagcatgacgctggcatctgctcggcttctgcaaaggcctcgtgtcacttacaattgtggcaggaggt

SEQ ID NO: 566990 - DNA, 537 bp, Homo sapiens
aaaattgctggagagttcaaggagggttgcttgagtctacaccaaaactgcagaatttagccagaaagtctaaattaaaactttcctttacattcaccaaggtactgacaatggacattgaacttcagtagtatgcaaattggggttgtatcttcatastgctcaatgaaacaggtaaaattgctccagaacactttgtagcttaaaatctttcaagagagaaatgaaacctatttctgttacatagaattagaaatatggaacagattctggtgatctggtgactgctccaactgctaacccccagccccacactccatccctctttctggctggctgtgctctaaagttatcttggtttccatcttcctctgcttaaactatttggttttattaggaagttgttaccacttgcaggcccctcgggaatttttctaacccactcatggtggccctacacacttctagccaggaagacataaaaggaagtctgctaggaaccttccaggaaagcttttcctgactaataaaaagaaa

SEQ ID NO: 566991 - DNA, 597 bp, Homo sapiens
atatgcatgcaatctttttgactttttgcttaaaatgtttgctgatcctttgtttcatttttcatagtcttagaacttttaatctattgacaacttttaacaatttagtatactcctatgaacaaaatttggaacatatttgatgctctctacctgatttttccagaatttggaaatatttgtgagtattcttaacttatrgcaatacagttatttgcgcaagtgcaataagaatctgctttcatttgtaacaggacacaactggagaaactggttattttaccaaggatttgactggaatggtgtgctttcctttaaggaatcgaacttgacttatgaagacaataaagcccttgggaaaactggcctcatattttgtgcacacagtccctgtacagggtttctaatctatgataagtaaagaatgtgactctctgacaggcccagaagccccaggtttatcttggaacctcaagaggagaggaaattcacataactcataggtatttgatggcacaatctatggctgggcatggctttaaaaaggtcttatctgagattccttctatggaacaaagttccatcaaagccaatcta

SEQ ID NO: 566992 - DNA, 527 bp, Homo sapiens
tttctcatattagctttagtataaaagtgacttgaaaaactctttcagggggcgagtgtggtgcctcacgagygtggtgcctcacacctgtaatcccagcactttgggaggccgaggcaggcagatcacctgaggtcagcagttcaagaccagcctaaccaacatagtgaaaccccatctctactaaaattacaaaaattagctgggcgtggtggcaggcacctgtaatcccagctactcgtgaggctgaggtgggagaatcgcttgaacccgggaggcagaagttgcagtgaaccaagattgtgccacgccactccaacctgggcaacagagtgagactccatctcaaaaaaaaaaaaagaaaagaaaaagaaaaaagaaccctttcaggatttgcattgatgttgcagtttatttgtaaataaattagagaaaaattaaatctttatatttgtgcatcttgctatctataaatatagtaaatatctccatttatttaaattttctttgtcttcaataaattattc

SEQ ID NO: 566993 - DNA, 527 bp, Homo sapiens
tttctcatattagctttagtataaaagtgacttgaaaaactctttcagggggcgagtgtggtgcctcacgagcgtggtgcctcacacctgtaatcccagcactttgggaggccgaggcaggcagatcacctgaggtcagcagttcaagaccagcctaaccaacatagtgaaaccccatctctactaaaattacaaaaattagctgggcgtggtggcaggcacctgtaatcccagctactcgtgaggctgaggtgggagaatcgcttgaacccgggaggcagaagttgcagtgarccaagattgtgccacgccactccaacctgggcaacagagtgagactccatctcaaaaaaaaaaaaagaaaagaaaaagaaaaaagaaccctttcaggatttgcattgatgttgcagtttatttgtaaataaattagagaaaaattaaatctttatatttgtgcatcttgctatctataaatatagtaaatatctccatttatttaaattttctttgtcttcaataaattattc

SEQ ID NO: 566994 - DNA, 634 bp, Homo sapiens
cttttggttttattaatattcctttttattcctgtgctctaatttattattttttattcttatcttgtagtttccttcattctgtttttttggatttattctgtttttgtttttcccataaccctcttatttggatgtaattattaccttttagtctttcttctctaatacgggcaataatgctgcacatttacctctcagtgccactttagctgcatccaacagcttttatgttcagtggtttcacygttatttagttctcaatattttctcatttcctgatttataattttattttttctctcactcatacatcatgtagaagtgtcttcttgtgtgtccaaatgtatagaaaagaggatttgttttctctttatcactgttcagttctacttttatttcatctgatcagagtaaatgatctatgaaatgattttgttttttatttgtgacctagtatgtggtcatttttttttttgggtgaaatcatttgatttttatatgcaaatggaaagagggagaataattttacattgttgatttttaccttcattggaatccctttaacatttctgtcaccatactttgttcactttgtaagtaaaggagacttcatggaccgccccttcccact

SEQ ID NO: 566995 - DNA, 609 bp, Homo sapiens
ccagcttctctctttattctcccaggtttccaggtgcctttccttacaggatgggcagcaccttgattttctctctgggacccagaatatccccagctgcagaaggaatgattcttttccaggaaaatagagttgaggttccccagattgaactgactgtcaaacttaactggcaatattattaataacatgtattctcagcctctatcttatcccaggagattctgagtatgtcagtttgggatgctgcctggtaatctatagtcttaaaaatgtgcctgtatgggaggattgcgtgaggccaggagtttgagatcagcctgagcaacatagtgagaccctgtatatacaaaaaaatattaaaaaatagccaggtaggctrggcgcagtggctcatgcctgtaatcccagcactttgggaggccgaggtgggtggatcacgaggtccggagattgagaccatctttgccaacctggtgaaaccctgtctctactaaaaatacaaaaattacctgggtgtggtggcatgcgcctgtagttccagctactagggaggctgaggcgggagaattgcttgaatccgggaggcagaggttgcagtgagccgag

SEQ ID NO: 566996 - DNA, 401 bp, Homo sapiens
cttatcagggaggcaccagagaaaggtgaagcccaatggaaggaaatccaaaaaatgatacaagtgaagggagaaatattcaaggaaatakacagcataaagaaaaaacaataaaaattcaggaaacattggacacacttatagaaatataaaatgctctggaaagtctcagcaatagaattgaacaaggagaggaaagaaatttggagctcaaagacaaggtcttcgaattaactcaatccaacaaagacaaagaaaaaagattaagaaaatatgaacaaagcctccaagaagtctggaattatgttaaatgaccaaacctaagaataatcggtgttcctgaggaaaagaaaaatctaaaagtttggaaaacatatttgggggaataatcgaggagaatt

SEQ ID NO: 566997 - DNA, 360 bp, Homo sapiens
caaattgtaatttattgcatagtgtaatttcccaaaagcgtgccttctactcaaatagcagtgaattgggagaaaaatgtctattttgtaatttagaaaacctatgtcgagagtaagatctgagagattctgtctctataatgtgcatgatttcatctggaacgtgtctatactcctttaaaaagccaataccatagcagcaggtatcgtattacttaaaggyatatatttataactatggagctgatctgcagggctatcaaatggggaaaataacctgtcataattttgaaagcctaagttcctagggtgccttttctatttttttttcctaatataccacaaattggacaggatgga

SEQ ID NO: 566998 - DNA, 664 bp, Homo sapiens
tacattctgttggtctctaaatattcttttccctttgaatctctattttcagtaaaaataacaaactctctcccytcccccactaccaaagcgtccccaatcagatctactttatctatttatttagacaaagtctcactctgtcacccaggctggagtgcagtggcaccatcttggttcactgcaacctccgcctcccaggttcaggcgattctcccacatcagcctgcagagcagctgggactacaggcctgtgccatcaagtctggctaatttttgtatttttattagagagggagtttcaccatgttggccgggctggtctcgaactcctgacctcaagtcatctgcccacctcagcctcccaaagtgttgggattacaggcgtgagcccccgtgccaggcctagatccatttcaaagagacaagaagagaagatacaccaggtacctgccgatgactcatagtttgcttcctatttagtcatctgtaattatacataatacttgcaacaatccagcaaggtagagcaagtgtttatgtcctttcacttcacaggtaaagagctactcttggagaaatttaagtcatcagaggacacaagattaataaatgtcagttcaagaccatgtctttactgctgtcactgttggaaccatacaaa

SEQ ID NO: 566999 - DNA, 645 bp, Homo sapiens
gtgttctcatcatttagctcccacttataagtgagatcatccagtatctgattttctattcctgtgttagcttggtacggataatggcctccagctccatccatgtccctgcaaaggacatgatcttattcttttttttttatggctgcatagtaatctatggcgtacaggtatcacattttctttatccagtctgtcattgatgggcttttgggttgattccatgtttttgctattgtgaatagtgctgcagtgaacacaagcatgcatgtgtctttacaatagaatgatttacattcctttgtgtttatgcccagtaataggattgctcggtcaagtggaatttctttcttcctttttaaatttatttttaatttttagtttactttaagttctgggatacacgtgcagaatgtgcaggtttgttacattggtatacatgtggtatggtggtttgctgcacctgtcaagttgtcatctaggttttaagccccacgtgcattaggtgtttgtcctaatgctctcccttccctgattttaggtatttgaggaatcrccacactgttttccatgacagttgaattaatttacactcctcccaacagtgtgtaagcattactttgactccacaaccttaccagcatg

SEQ ID NO: 567000 - DNA, 578 bp, Homo sapiens
attatgctataactctaaaactcttctggtggtatccttctaggtattccacaagaagagagttcaagtggaaagagaaaagtcatgttacataagattgtctctaatcagtcaaccactggagtcagataaaaatagaagatgaaaatctgtcagatgaaatttcactttggaaatattgtttgtgttcttcaaatgtataagatttgtgtttctatccacaaattgtgtatacagcagcacattaaaagaggtagtttcagctgatgttccccaaagtgcatatcgtatgtcccaatgtttctgcatatcctatactttaatatctaaattatataaagaccccatctgttgcacaaaaatttgtccttctgaagatttctgagaattcctaggaaacgcttgcatgtctcaattatttctkgtcatgtcttcctctgaatttttgtttcaaactgcccttcattatttctggccatatcctttagccccagccatgccttcatggttcctctctgcatattttgcctgtgaaaatgaactcagcctttaactttattttctaagatagtgagaac

SEQ ID NO: 567001 - DNA, 574 bp, Homo sapiens
tttgctgtttgggcacagccattctgacctttgagctttagagagtccaagctgaccggaggctgaagtcatctcccagcacagcccagttgctctatgaaaatgtggccagactgcctttttaaacagatctcaatcccatccctcctcactagttgggcctcccaactgggacctccatccacccctgttggtrttctctgacagagatttgaaaactcctagaacagagttgctagagggagagacaggccactatctttactgtttgggcaacctggctgttctggcttcatgcattagagagtccaactgaccaggggctaaggtggttgtccagcacagcacagcttccctatgaaaaacatggccagactgctttttgaagtaggtccctgatcttatttctcatcatggtgtgaagcctgtcaacttgggtctccagataaccccaccagtgttctctagctgaaagagatttcaggactttctgggacacagctcccagggagagggacaggccactatcttttctatgtgggtggcttgttgaagtcgaccctggagtggaagc

SEQ ID NO: 567002 - DNA, 574 bp, Homo sapiens
tttgctgtttgggcacagccattctgacctttgagctttagagagtccaagctgaccggaggctgaagtcatctcccagcacagcccagttgctctatgaaaatgtggccagactgcctttttaaacagatctcaatcccatccctcctcactagttgggcctcccaactgggacctccatccacccctgttggtgttctctgacagagatttgaaaactcctagaacagagttgctagagggagagacaggccactatctttactgtttgggcaacctggctgttctggcttcatgcattagagagtmcaactgaccaggggctaaggtggttgtccagcacagcacagcttccctatgaaaaacatggccagactgctttttgaagtaggtccctgatcttatttctcatcatggtgtgaagcctgtcaacttgggtctccagataaccccaccagtgttctctagctgaaagagatttcaggactttctgggacacagctcccagggagagggacaggccactatcttttctatgtgggtggcttgttgaagtcgaccctggagtggaagc

SEQ ID NO: 567003 - DNA, 365 bp, Homo sapiens
ttagtgatgaaggtatgttgaaagctgagaaaggccaaaagctaggtgtcttgtgccaaatagttagccaagttgtgaatgcaaataaaaagttctttaaaaaagctaaaattgctactccagtgaacaaataaatcacagaaaagggaaacagccttattgccaatatggagaaacttttagtggactggatagaagatgaaactagtcacaacattttyttaatccaaaaccaaaacaaagccctaactctcttcaattctacgaaggctaagagagatcagaaatctgcagaagaaaagttggaagctaccaagagtttggttcctgaagtttaaggaaagaagccatctccatcacataaa

SEQ ID NO: 567004 - DNA, 425 bp, Homo sapiens
ctaacagactgagaacaaataaaattattttaaagattatttaataataggaaaaggtacaaataataatattaaaagaaaaaactatatgatctaatcgttttaaaattatatagaggaaagagtgttaagaactacttcaacttcacagaatttaggattgaataatgagaatataagtaatttaattttgttatttgtacctttccatactttacaaatgcttcaaaactatttgtaataaaagacacatttttaaaagtttaaaatcttcctaagagaggaattgctttcttccyaaatagaagcgccattttatctaatattctctaatctaagtatagccagactaatcctcagatatacttctctgtgaaaagaaattccagagtttcctgtatttatttcccaattatttcataagt

SEQ ID NO: 567005 - DNA, 302 bp, Homo sapiens
tgggaacaagacaaggatgcccactctcaccactcctcttcaacatagtactggaagtcctggccagagcaatcagatgagaaaaaaataaagggcatccaaattggtaaagaggaagtcaaactgtcactgtttgctgatagtattatcatttaccttgaaaaccctaaagactcctccrggaagctcctagaactgacaaaagaattcagcaaagtttccagatacaagattaatacacacaaatcagtagctcttctatacaccaacagcaaccaagtggagaatcaaattaagaaccc

SEQ ID NO: 567006 - DNA, 234 bp, Homo sapiens
aattcagcaaagtttccagatacaagattaatacacacaaatcagtagctcttctatacaccaacagcaaccaagtggagaatcaaattaagaacccaaccccttttacaatagctgcaaaaataaaataaaacacttagaaatatacctaactaaggagttgaaagacctctacaargaaaactacaaaactctgctgaaagaaatcatagacaacacaaacaaatggaaaca

SEQ ID NO: 567007 - DNA, 608 bp, Homo sapiens
tgctgctgggaatgcaaaatagtacarccactgtggaaaagagtatggagattccttaaagaactaaaagtagaactaccatttgatccggcaatcccactgctgggtatctgcccagaggaaataagccattatatgaaaaagatacttgcacatgcatgtttatagcagcacgatttgcaattgcaaaaatatgaaaccagcctaaatgcccaccaatgaacgagtggatgaagaaaatgtgatattttatatatatattatataatatatataattccatggaatacatatatgaattctactcagccattaaaaggaatgaaataatggcattcacagcaacctggctggagttggagaccattattctaagtgaagtaactcagaaatggaaaaccaaacattgtgtgttctcactgatatgtgggagctaagctatgaggacgcaaaggcataaaaataatataatggactctggggacttgggggaagggtgggggggcgtgagagataaaagtctacacattgggtgtagtgtacactgctcgggtgacaggtgcaccaaaatctcaccactaaagaacttatccatgtaaccaaacacc

SEQ ID NO: 567008 - DNA, 577 bp, Homo sapiens
aaacataaacaatttttgtcaattaaaartgaataaattttaaaaataaaaataaaattaactgtagccattttctatctacaaggtcaatatacaaaactaaattgtatttatatatatatatatgcagcaaacaactagaatttttaacgatgtaatttatagaaacagcaatgtaaccaagtaaatagtaataaatacagatgttcaaagcatctctgcaggaactatccaaaataaatggagggataaaatacaaatgaacaggaaaactcaatattataaagatgttgttctctccaaagtaatttatagattgaaggcaattgcataaattgtagggaatttgtttttggaaactaattagttgattcttttctatattaaaattcaaagccacatagagtcaagataatcttgaagaaaaattacagaaattgctctaatacttgtatagaattattaaggcctgtaactgtaaaactccaagaagaaaacataagagaatgcctcctgaatgttgattatggtgataattttttgggtatgataccaaaagcacaggcaacaaaagcaa

SEQ ID NO: 567009 - DNA, 467 bp, Homo sapiens
tttaaataacacaatttttatgacagctaattattttgatataatcagtaaattatgaattcctttttaaatttttaaattattattttaaacttctatgttagttttaggagtacatgtgcaggtttgttatataggcgaactcatgtcacagggtttgttgtacagattattttgtcactcaagtaccaagcctagtaccaaatagatattttttctgatcctctccctcctcgcaccttcctccctcaagtagactcccaatgtttgttcttcccttctttgtgtccatgtgttctcatcatttaacttccacttataagtgagaacatatgctatttagttttctgttcctgcatttgtttgctaargattatggcctccagctccatccatgtttctgcaaaggactgatcttattttttttaatgacttcatagtattccatggtgtgtatgttccacatt

SEQ ID NO: 567010 - DNA, 580 bp, Homo sapiens
attcctttttatggctgtatagtatttcatggtgtatatgtaccacattttctttatccagtctgccattgatgggcatttagattgatttcatggcttcactattgtgaataatgctacagtgaacatatgtgtctttatgacagaatgatctatatttctttgggtatatgcccagtaatgggattgctgggttaaattgcaattctgttttacattctttcagaaagcaccaaaagactttccatgatggctgaaaaactttatattccatccagcagtgtataagtgttcccttttctccacaacaycaccagcatctgttatttttttaactttttaattgtagccattctgactggtatgagatggtatctcattgtgattttgatttggaattatccagtgcttactgatgcaaacctttttcatatgcttcttggctgtgtgtatgtcttcttttgcaaagtgtccatcacatctttgctcactttttaatggggttgtttgctttttgcttataaatttgtttaagtttcttacagatgctgggtattagaccttcatcagatgcatattt

SEQ ID NO: 567011 - DNA, 563 bp, Homo sapiens
tatctgttaatataggttagtttgcattttctagaattttacatacacggaatcacagaatatacactcttttttgcctagtttcttccactcggcaaaattattttgagattcttcgatgttgatgtgtgtattaataatgcattcctttttactgatgagtaatattacatgtgtggatggatcaacaattatttatccaatccccytttgacggacatttggtttgcttccagccttcgggtattatacaaaaagcttctatgaatattcatgtacaagtctttgtgtagacattcattttcatttctcttgagtaaaaaacctaggagtagaacggctggatcataagacagatatatatttaactttttaggatatttaactttctaggaaactatggaactcttacccaaaatagttgtataatttcactttttcaccagcagtatatatgagagttccaggtcctccacatcctcaccaacacttagtatgagcacacagcacacatttttatatttttattgttcgaataagtgtgtggtcttgatttgtacatc

SEQ ID NO: 567012 - DNA, 563 bp, Homo sapiens
tatctgttaatataggttagtttgcattttctagaattttacatacacggaatcacagaatatacactcttttttgcctagtttcttccactcggcaaaattattttgagattcttcgatgttgatgtgtgtattaataatgcattcctttttactgatgagtaatattacatgtgtggatggatcaacaattatttatccaatccccctttgacggacatttggtttgcttccagccttcgggtattatacaaaaagcttctatgaatattcatgtacaagtctttrtgtagacattcattttcatttctcttgagtaaaaaacctaggagtagaacggctggatcataagacagatatatatttaactttttaggatatttaactttctaggaaactatggaactcttacccaaaatagttgtataatttcactttttcaccagcagtatatatgagagttccaggtcctccacatcctcaccaacacttagtatgagcacacagcacacatttttatatttttattgttcgaataagtgtgtggtcttgatttgtacatc

SEQ ID NO: 567013 - DNA, 257 bp, Homo sapiens
gtgatgccccctgaaccgtaaaaccagcaagtttttattagtgattttcaaaaggggagggagtgtacgaatagggtgtgggtcacagagattacatgcttcacaaggtaataagatatcacaaggtaataagatatcacaaggtaaatggaggcagggcgagatcacaggaccacaggaccagtgtgaaatttaaattgctartgaagtttgacgcatgtattgtcattgataacatcttatcaggaaacagggtt

SEQ ID NO: 567014 - DNA, 671 bp, Homo sapiens
ttgtatttttcttgatgcagcatttccttggtagttgtaaacttttcctgtttttcattgttctaaaaaagttggttatgacatttcctgcttcttttttaacgtttctgtcgtgtaatgggaacttgaaaatgccttttctgccattttgctgacataacttaggtctgtgtttcttttttagttttcattccccttgttttttcacttactgttttaatttagataattttatgttcagtgattatttttactaacctgtatgcctatgatgacattgtaataatgtttttttatctctgaaatcatctatttgtttccatttcactcttttttgtaggttccatatctgatggactccctcaactgtttgtgcatgttatacaacttttacattaggtcttctattatattagtcgtaggttttaaaaaataacttgtctgatatttataacatttgtgtcatctcttaaccatgttctattgttcacattgtcacttgacaatgtattgtgttcttttgtttgatttttarttgtctcagaatttttaaattttttaaactttcttttaggttcaggagtacatatgctggtttactgtataagcaaattgcatgtcacaggggttaggtgtacaggctattttgtcatccaggtaataagcatagt

SEQ ID NO: 567015 - DNA, 567 bp, Homo sapiens
taccacatctggctaatttttgtagtatttgtagagataaggttttgccatgttgccaaggctggtctcaaactcctgggctcaagtgagctgcctgcctcagcctcccaaaatgctaagattacaagcatgagctgctgcagctgataagattatttggatttatktatgtatttatttatttattttacagtcagtgtctcactctgtctcactgcactgaagtgcagtagcataatcatagctcaccacagccttgatcttctgggctcaagtgatcctcccacttcagcctcccaagtagctgggactacaggcatgtgccaccacgcctggataatttttaaattttttgtagggatgggggtctcgctgtgttgtgtaggctggtctagaactcttggactcaagcaatattcctgccttagcctctctaagcactgggataacaggtgtgagctaccatatctggctgggtttcttataagaagaagcaacaagagagtgtagtgcaaccctgccttaaatagtagatttgtctcagcagtgtttgtcagttattctcac

SEQ ID NO: 567016 - DNA, 377 bp, Homo sapiens
tacttgggaggctgaggctaagttgcccaggctgaacacaagtcctgccctcaagaaatcctccctccttggttttccaaagtgttggaacyacaggcatgagccacggtgcccagcctagatttaatttagagggcagtaggagtctctgaggatactgagtagagatgagacatggtgagaggtgtatttcagcagagttcatctgggaccaggcttggtaggcaggtgggtcgggggagctgagaggtaatgtagggagcagccacatgggacactgagactggcgagggcaagaagaggtagagtgaaagtgatggccaccagcccaggctccagagctgggtcacctactaagattgtaggtgaatctcgta

SEQ ID NO: 567017 - DNA, 584 bp, Homo sapiens
aggtaatttataataattcactactacctactatcatctaatataaagggaatcctcaaatctctacaagggccccaatattatacccctccccagtctgggatccaatcaaggatacgacattacatatagttttcagtttctttctttgtttctccaaatctcctgaatcacaaatacttcccaacctcattagtctttcaagataagtgacattttcagagtccagaacgattttgctttttttccagaatgtccctttgtctgattgttctcttgtgattagatttgagttcaccatgcttagcaagaaaactacatgtgatgaccttctccaagagtcacacagcagatgacatcagttggtttcatcactgggactgatgtttgaacacaacatcaataagactctctctagatttgtctactctatatactctgcgtaccaggagactgaggccatgggggctgcctcagattttccattagaggatcagatcagtggattgagtatattatgtttcttgtattttctcttagaaaaagaagaaatctawttatgttttatcgatgtctaaatatat

SEQ ID NO: 567018 - DNA, 515 bp, Homo sapiens
tatatcctaaataaattctctcatgagaatgagactaacatacgaaatattgttgattaggtggcatctgagtgccccctgtgggacactggagagggaaagtctggcagaggctcattagaagctgatatgctgaagttggaagcagcaaatgaagtgtacctataaaaatcttagaaatatgccaataagcgaaaaataataaatgaaataagatatacacccaatactttttggaagaattaaaaatrtatatacataaaattgtgtcgcatataagactgattgctacaaaacacacaatagaaataaaaataaaatagctagaagtaaagtagttactaataagaagaatctcagtagaagtaggaaaagagataaaaacgaataactgacagaatgcacctaattacataaaataggatcaaggcctgcacaaaacactgttgaaaatgttacatcaattaaacttattttctccttaggtataaaaatcatcgcacctttgaggtctc

SEQ ID NO: 567019 - DNA, 534 bp, Homo sapiens
ccattctcctgcctcagcctcccgaggagctgggactacagggacccgccaccacgcccggctaatttttttgtatttttagtagagacggggtttcaccgtgttagccaggatggtctcgatctcctgacctcctgatccgcccgcctcggcctcccaaagtgctgggattacaggcgtgagccaccgcgcccggccggtactccgaagccctcagatcggygacctgggcgctgtaggcaccgagaaaatacaggcaccgagccagaagcagtgccgcaaccaagagacctcggcttggcgaaatggcggcgtctggagcctgcgagtgacgccagctggtggggctgtcaaggagaacattcgttacggcgcaaccaacggtactgtcaccaagaaaccgtcgtctctgagaaaaaaagagacgttcggccgccgagaaactccgtacaagtgctgtgacagaaaaaccgccggctccgcagcggcaaaagagccaacgggaacgccgggtgctgcgaccatgaccccggc

SEQ ID NO: 567020 - DNA, 534 bp, Homo sapiens
ccattctcctgcctcagcctcccgaggagctgggactacagggacccgccaccacgcccggctaatttttttgtatttttagtagagacggggtttcaccgtgttagccaggatggtctcgatctcctgacctcctgatccgcccgcctcggcctcccaaagtgctgggattacaggcgtgagccaccgcgcccggccggtactccgaagccctcagatcggcgacctgggcgctgtaggcaccgagaaaatacaggcaccgagccagaagcagtgccgcaaccaagagacctcggctyggcgaaatggcggcgtctggagcctgcgagtgacgccagctggtggggctgtcaaggagaacattcgttacggcgcaaccaacggtactgtcaccaagaaaccgtcgtctctgagaaaaaaagagacgttcggccgccgagaaactccgtacaagtgctgtgacagaaaaaccgccggctccgcagcggcaaaagagccaacgggaacgccgggtgctgcgaccatgaccccggc

SEQ ID NO: 567021 - DNA, 551 bp, Homo sapiens
taacactttttctttggaaaaatgtttgcctacagtacttttgtaaagttgagaatgacccagacatttaatgactacctattatttcataaaatataactctaagattttttttttttgayggagtctcagtctgcctaggctggaggacggtggcacgatctgagctcactgcaacctctgcctccgagttcaagagattctcctgcctcagcctcctgagtagctgggattgcaggcatgcatcatcaccggctaatttttgtatttttagtagagatggggtttcaccacttgggccaggctggtctccaactcctgacctcaagtgatctgcccatgctggcctcccaaagtggtggctcacacagtaatatcacagtcttctgaattcaaaataggccgaggctggagctcaggcaccacctctgcggaatctcaagcaggcttcacatagccaagaaaatgttgctccatcgcttaattaagcctcagagcaggaggacataagcgtttgcgctgattgacgagatgaagcagaacctttagca

SEQ ID NO: 567022 - DNA, 313 bp, Homo sapiens
ggtggctcacgcctgtaatcccagcaatttgggagaccgaggtgggtggatcatttgaggtcagcagtttgagaccagcctggccaacatggtgaaacccagtctctactaaaaatacaaaacagttagcctgtaatcccagctactcgggaggctgagtcaggagagtcacttgaacccaggagatggaggttgcagtgagctgagatcgcctgggcaacagagcaagacaacagagcaagmcctcaaaaaaaaaaaaaaaaaaaaaaaagaatggaaccagtttctcctcttcttgtatttgtaccagact

SEQ ID NO: 567023 - DNA, 629 bp, Homo sapiens
cattacatgcatgggagcaactcaggagagtaaggacccaataacacaatgagacttcgaagcttatatgccttcttcataggggaaagagaagtgggaaatataggcgattgtagaggaagaataaatgatttttaggggagatgaatgggcccaaagaaccaaccacagcatgggacaaagtctatgtgggctctggtgtggcgtcaactctgctttttcttcctgtgatatatgtcatcttccctcctggtcgatgagctctctgggaaagggattcacaattgaacttctggaggacccagcctttgacgtagatagagcaacttcacagagagagccctttcctacatgtgatgctgcccagacgctctcagtttgaagtacaaagcagcacatttggggttatttttctgggccccaacagtaacttattatacatgagaggtactcccttgtactaaagtaatttgaatgtttttccaatttccactactagattgtgagctcctgcaaagcaggaaaaatcttacacagtgttgaatctttaaaacataataataataaaaaataactgaacagcgccttgtaaayattaattacagtacttagaaactttaaaagtagtg

SEQ ID NO: 567024 - DNA, 554 bp, Homo sapiens
gtgagtcaaattatgttctttggttaacaatgaatattttactaaatttgggaaaactaatttgctatcaagttcaaaccatagttcttttttgttatcaaaccagcaactatgatctttccttttcagcttctggtgcccattttgtgagtctttggtaattatttttcagtcatcttttgagggctcttttagtggggccacagtagagatttgattaagcgaacctttaatagcatcattctttgcagcattattagcaaggttgtttcttctagcttccatagagtctaccctggaatgtctggagttctggtaacaacccaggcagctggtagctagatggtattcaggaagtcctgtacatagaatcctccatttttaatttgatctcttgtggaagtgaggaaacccctttgtttccagagcattccacaatcctgagcaacaccaaaggcctatctgctgtctgtrtatatatatatatacacacacacacacacacacacacacacatatatatacgtatatatacacatatatacgtatatatg

SEQ ID NO: 567025 - DNA, 597 bp, Homo sapiens
aggaaaataaatgttgttgttttaagccactaaattttggggtgttttgttacacaccaatagataaccaaaagaccctgatacacattttttcacataaatgaaagtgatccttttgttgttaaattggaattggaaatattgtgttcttctctctctgcttgtyccgccattcagaaaaacagttcaactgcaaaattggactgttcttcctttatatgcacttttactatcattagagtttagcaggatattaccactaaaaacaatatcattcactaatatttactgagtgattatgattaagcatggtgttaagtattttgcctataatttctcatttattaccttcaataattatgtaaaatatataagagaaattccaaaaagttaagaaatattcaaaatttctcagctataagcagaacactatttaaaaccaatatgttgaaccacatggaaatatacaaccattctcacaaactcttacatcaatgagaaaataaaaatttcactgggagccctttggaaaataataacaaagacaccataataagataaaatagtatgtcaaaatttatgggatgtggccacagc

SEQ ID NO: 567026 - DNA, 604 bp, Homo sapiens
gagcaggggtggaaggggtgggcactaataatgcagaaaaagaaggtgtgtgtgtgcatgtgtktgcatacatatttatggtcacttttgccatgtaacacaggaagggggctcttgtttgggagcaactgcaaggtacctacagaaggattccagaaactgttgggaggcttactatagacggggatgaaccaaagggaaattgttatggaaagaaaaaattgtgtcactcagagtagttgtttccaaaaaggaataaaataaaagctatcatagtagcaaatactggcagtgtccatccaaatactgcctagtgaagaggacaaccggaaaatctaagcagatcttgtgtctaggtatctccacctatggagataaaggaattcatttatttgaagcatgtaagcaaccacctttgcttactttctttcttgtaaagaactccccatgctctagcttcatatgaatttgatctgcagaatgaaccatgaagtaaagataatatgaagacgacttgtgtttgatatttatatgtctcattgagaattaatacattaggattctggtttatatacttcactattgtatgagaatttaacaatac

SEQ ID NO: 567027 - DNA, 532 bp, Homo sapiens
cattgcaaaaacattaccacctagtcacatagtcatcaggttatccaaagtcaagatgaaggaaagaatcttaagagttataaggcaaaaacattaggtaacttataaaggaaaacctgtcagattaacagcagatttctcagtagaaaccctccaagacagaaggagtaagggacctatatttagcctcctcaacaaaacaattatcagccaagaattttgtatccagtgaaactaggctgcctaaatgaaggaaagatacaggctttttcagacaaacaaaagctgagagaatttgccaccatcaagccagtactacaagatctgctaaaaggacctctaaatcttgaaacaagccctcaaaatacaccaaaatagaacrtccttaaagcataaatctcacaggacctataaaacagtaacacagtgaaaaataaaacaaagtattcaggcaacaaccaacacaatggatagaataatacctcgcatcaatactaaagttgaatgtaaatggcctaaatgctccacttag

SEQ ID NO: 567028 - DNA, 606 bp, Homo sapiens
ttcccttgtatgtgatgaatctttttttctcttgctgttttaaatattctttgtctttgatttttgacacttttcttatgatatttcttggtaaactcatctttggattgatcttgtgtggaaacttttgagcttcatgtgcttgaatgtctacattttttctcttatttggaaagttttcagccatttttyaaaaataagatttctttcccattctgtctcttttctccagattctttcttcttcttagtaacatctgctcttgatcatctctattgcatttttattctattcattgtgttcttcaggtccaaaatttctgggttctttaaatgataaacttctcatttgttcatgtattgttttcctgatgttattgaacctgtgttctcttgtagctcactgaacttccttaaagcaattattttgaattgtcaggtacttcatagatctccatttcttcaagctcagttactgaaaaattattgcatttgtctagtagtgtcatgtttccttgatgtttcatgttccttgtagaattgggatacttttgcatttgaagaaatcatatcctctagtttttaattactggctttgggagaaaaa

SEQ ID NO: 567029 - DNA, 332 bp, Homo sapiens
acttggagaacttttctgtctagctagaggattgtaaatgcaccaatcagtgctctgtgtctagctaaaggtttgtaaacgcaccagtcagcactctgtaaaaatggaccaatcatctctctgtaaaatggaccactcagctctctgtaaaatggaccaatcagctctctgtaaaatggatgagtcagcaggatgtgggtggggccaaacaaagaaataaaagctggctgcccgagccagcagcggcaacccgctggggtccccttccacagtgtggaagctttrttcttttgcttttcacaataaatcttgctgcttctcactctttggtt

SEQ ID NO: 567030 - DNA, 476 bp, Homo sapiens
gccacccccatgattcaattacctcccactggtccttcccataacacgaggggatcatgggaactaaaattcaagacaacatttggatggggacacagacaaaccatataattccatccctggcccctcccaaatctcatatcttcccatttcaaaacaygatcatcccttcccagcagtcccacaaaatcttaactcattccagcattaacctaaaagtccaagtccaaagttcatttgagacaaggcagttctcttctgcctatgagcctgaaaatcaaaagcaaattagttacttcctagatacaatgtggggggacaggcattgggtaaatacacctgttccaaataggagacattggtcaaaatgaaggggctacaggccccatgcaagtctgaaatccagtggggcagtaaattcttaaagctccaaattaatctcctttgacttcatgtctcacatccaggtcatcccc

SEQ ID NO: 567031 - DNA, 371 bp, Homo sapiens
agctgggcgtggtggccggcgcctttaatcccagctactccagaggctgaggcaggagaatcactggacccggggaggcagagattgcagtgagctgaggtcatgccactgtactccagtctgggcaaccgagtgagactctgtctccaaaaaamcaaaaaaaaaaaaaaaaaaaacccagaagattgtaaccaagcttgcaagaaaaaaaattagattggatagactccatgagcaaaaatcaaaagaggaaaaaccatactttatgaaatagaaagaaggaagaaagaaaaagaaattagggagagcaataaagaatgagaagacaatttaaagaaggattagtaaataataatgcaatcaataatgaa

SEQ ID NO: 567032 - DNA, 494 bp, Homo sapiens
agctatcgcagggactttttcctctaacatgtaccaagttcctctccaccaaagtcaacaaaggtaaggtgctattcctcctgctatcaatgttatgtttaatcctgggtctgccactatgccaagtacagtataaatgaggactctgggatattttgtgggcaggatattccccagtggttgaatattgctagagaaatatcaagaaatacaattttttggttctcagctgtaaagaaatcatggcaaatttgagtgtccaaacctttttattgatccagtattgctggcaatgcatctagaaagaagttcccctgcaaaagattgatttgggaaagagtggaaatgctgacaccaggagmgttgattgccacaatttttaagctttttacttttaagtgattacatttacagtttatgaacaaaacctaaagttatatatatatatttttaagtagagtcttactctgttgcccaggctggagtgcagtggc

SEQ ID NO: 567033 - DNA, 564 bp, Homo sapiens
tctttatggtattttcagttctgttattaactttgagaatatcatttagttcctttaagcctcagttttctcatctcaacatgaaatatttagaatttacttccaattctaacattctttgatctttaataacatccaagacaggctggttggtggctcaagcctgtaatcccagcattttgagaagctgaggcaggcggatcacttgagctccgtcattcgagaccagcctgtgtaacacagagaaacccaatctctacaaaaacaatacaaaaaaattagygaggcatagtatcacatgcttgtggtctcccctcttcagaaggctgaggtgggaggaccacttgagcccagaaggtcaagggtggagcgagctgcgattatgcagctgcactccagcctgggtgtactggtccgttttcatgctgctgataaagacatactggagactaggcaatttacaaaagaaagaggtttactggactcacagttctatgtcgctagggaggcctcacaatcatggcagaaggtgaaaggcacatctcaccatggcagcagacaaga

SEQ ID NO: 567034 - DNA, 607 bp, Homo sapiens
gtggctccgaccccacatttcctttcctcactgctctagcagaggttctccatgagagccctgcccctgcagcaaacttctgtctggacttccaggcattaccatacatcctctgaaatctaggcagaggcttccaagcctcagttcttgacatctgtgcacctgcaggctgctagaaacgctagaccatatggaagatgccaaggcttggagcttgtatcctctgaagccatggcccaagctgtaccttggccccgtttagtcatggctggagtggccgggacagagagcaccaagtccctagactgcacacagcagaaggagcctgggctcagtccacaaaacaattttttcctcctaggcctccagcttgtgatgggaagccctgccgtgaagacctctgacatgccctgaagacatttaccccattgtcttggggatgaacattcagcccttcattacttatacaaatctctgcagccagcttgaatttcccctcagaaaatgggattttctttactattttattgtcaggctgcaaattttytgaacttttatgctccgcttcatttataaaactgaatgcatttgacagcatccaagtcac

SEQ ID NO: 567035 - DNA, 471 bp, Homo sapiens
cctactggacctttaagttgttaaaaataattaacaaacaagcaaacaaataaataaaatcactggccctggtctgtgaagggcagtaaccggtgcccatgtactctgtgggttttcaaaccctagtctcattacctgcattcctgcttcagactctggcttctctgaacgtagccaagtctaatgctacccttccttgatgctgagctgtgctttgagccccgtcagtaaaccatgaatgacatccccttgctcaataattcccagaaaagggagtggtgtatgccaagacaygaatgattatattattattattattactaccaccactactattacaactactgcttacaggatgatgatgatggtaagattgtagtcatagctacaataatcctatcatcatcaacaacaattttgatagctgtatacagtggaagaaataaaaagaagtgagtgattcagtttttg

SEQ ID NO: 567036 - DNA, 532 bp, Homo sapiens
atttcattaagttgatcttcagcctccagtatcttttcttctgctggatcgatttggctattgatactggtgtatgcttcacaaagttctcgtgctgtgtttttcagctccatcagctcatttatattcttctataatctggttataccagttagcagttcctgtaaccttttatcaaggttttaacttccttgcattgggttagaacttgctcctttagctcagaagagtttgttgttatccaccttctgaagtctacttctgtcaatttgtcaagctcattctccatccagttttttcccttgctggtgaagagttgtgattttttggaggagaggaggcattytagtttttgtaattttcagcctttttgttcttttttttttttttttcatcttcttggatttatctacctttggtgataaatgtttgatgttggtgacctttggatgcagtttctgtgtgagtgtcctttttgttgattttgatgctattgatttctgtttgttagttttctttctaactgtcaggc

SEQ ID NO: 567037 - DNA, 597 bp, Homo sapiens
aaacttttgtttatctttccactggaatggctaatagtttcttagtttaaaggaaatctttagattggtttcsagtcaggaaaaggttgaccaaaggtaagcccctgatgtgaaatgttagacaaattaatgtgagcacttcagaattctttctttggtggacatgtatgtcaaagttgaaggtagttctttcattctccctcacccaataattaaagtcaaaaatagatatgaaagcaaacctaatcatacaattccctaagtattctactcttcttcagaatttaccagcattagggtggttaaattagaataccaacactgtcggccgggcgcggtggctcacgcctgtaatcccagcactttgggaggccaaggtgagtggatcacgaggttaggtgatcaagaccatcttggctaacacggtgaaaccccgtctctactaaaaatacaaaaaattagctgggagtcttggcgggcccctgtagtcccagctactcgggaggctgaggcaggagaatggcgtgaacccaggaggcggagcttgcagtgagccgaaattgtgccactgcactccagcctgggcgacagagcaag

SEQ ID NO: 567038 - DNA, 550 bp, Homo sapiens
tcctgaaaaaaaaaaaaaaaaaggaaatagataaaaataataaaataataaaaaggacattattcttgagctttttctctaattattttccctgagataacttgaaagctttaaaaatacatctgagcaatgcttagtcaagttttacaagtttttatatgctagaccatcattttcatttagttgaaaatacgtgctgtattttaaaatattttgtttggatccattgcttatttaaaagtctagtgcttaatttttacacaagtttgcctcttctagttatttttattttttgtgtgttctactcactggtatttacattaaatatttaagtttaraatatgtgtatgtgttctggaaaaggtggtacatagttcctgtttttcctgttattaatatcttacattagtatgatacatttgtcataatattgaactaatgttgatgcattattaattttatcattgatgggtttttactattaccattcttaattggggacagcagtgtcagaggagtttgtttaagatttcaaacagaggcaagaatt

SEQ ID NO: 567039 - DNA, 675 bp, Homo sapiens
gtgatctgcccgcttcggcctcccaaagtgctgggattacaggcgtgagccaccatgcccgaccggaaatcttaatatctaatgaaaacttgtttcaagatgatcctgagtaatgtaacccagccatatacccaccacaaaaatgcaaatccatctatcagtcttgtttttctaatttttctaatgaggattattacataagtgttacataagtataaatgtttgattatgtaacttaaataattaataakcagagtcctatgcctcaaaagctaaacatatattatttatacagtgattggaaatctggtatgttggattggtttttacattgtttattgatatgaacataactatcccttacttaatatttagatttagagtacttatttatatcattggactaatatctaccatacttgcagctgttttctgtttgttgagcttgttctttgttactttttaattctcgttccctcttctggcttctctagctttagttgaccattttatattcaatttttgtgctgccttagcatggtaagtatatattttttttttatttgaccactaaaatgactagaagtaatcagtacatgcaatatatactattccatagagactagagaataatggtgaaaattattaattatatcaataaattcctttggtgtc

SEQ ID NO: 567040 - DNA, 552 bp, Homo sapiens
atctgcaaccaaacgcagatcgaaaatacagtattcctggaatgtgacacccacgtgtatcaagggccgacttttcatatatgcatgttcctcagggccaactgcaggacttaagtatgtggaaatctggatatgtgagggggtcctggaaccaataccttgtggataccaagagatgactgtatatatttgctccarcagtggagatgcagcatacataagtgttttgccatgactatgcccaatgtcatacttggggtcaggttgaagcccatgctgaggtccaaggggagtgggtggatgggcacatagcggtaagaacacttggagggccgtaagcaggtgaaaagtaggtttattcagcagctctcccatcagcagctctctcaccctgtctgcctttatcttggttgtgtgctgtgactctgtggctcctttcagcagttggctctgcacctctggctgcttccacacacaggtgtatggccagctttcccttccttcagggtcagcagcttaactctttccctctgggcacaaactggtttctgg

SEQ ID NO: 567041 - DNA, 552 bp, Homo sapiens
atctgcaaccaaacgcagatcgaaaatacagtattcctggaatgtgacacccacgtgtatcaagggccgacttttcatatatgcatgttcctcagggccaactgcaggacttaagtatgtggaaatctggatatgtgagggggtcctggaaccaataccttgtggataccaagagatgactgtatatatttgctccagcagtggagatgcagcatacataagtgttttgccatgactatgcccaatgtcatacttggggtcaggttgaagcccatgctgaggtccaaggggagtgggtggatgggcacatagckgtaagaacacttggagggccgtaagcaggtgaaaagtaggtttattcagcagctctcccatcagcagctctctcaccctgtctgcctttatcttggttgtgtgctgtgactctgtggctcctttcagcagttggctctgcacctctggctgcttccacacacaggtgtatggccagctttcccttccttcagggtcagcagcttaactctttccctctgggcacaaactggtttctgg

SEQ ID NO: 567042 - DNA, 552 bp, Homo sapiens
atctgcaaccaaacgcagatcgaaaatacagtattcctggaatgtgacacccacgtgtatcaagggccgacttttcatatatgcatgttcctcagggccaactgcaggacttaagtatgtggaaatctggatatgtgagggggtcctggaaccaataccttgtggataccaagagatgactgtatatatttgctccagcagtggagatgcagcatacataagtgttttgccatgactatgcccaatgtcatacttggggtcaggttgaagcccatgctgaggtccaaggggagtgggtggatgggcacatagcggtaagaacacttggagggccgtaagcaggtgamaagtaggtttattcagcagctctcccatcagcagctctctcaccctgtctgcctttatcttggttgtgtgctgtgactctgtggctcctttcagcagttggctctgcacctctggctgcttccacacacaggtgtatggccagctttcccttccttcagggtcagcagcttaactctttccctctgggcacaaactggtttctgg

SEQ ID NO: 567043 - DNA, 530 bp, Homo sapiens
tcagattaagcccaaccatccacccactccatacctccacttgagtagcagattcctgttggagaaaaatgcataactggtctcacaaaaaatgccagctggtctcacacttaattcatgatgaccacaagtcttaagggggccctgcctggagagcctgctacactgccagggcatgccccaccactcctcaatgcaaccattgcgagctttcttttctgtcctcaaactgcccacatcccttcctcttgcttcgctcccagatgagtatcttgcctgatattttactgagaaaatagaaaaagcaatcagacagaaactcttccatctttccaccaccaaatctcccaatttgtctgcatctgtctcttccacgttccctccattaaaatgatgaagtattgctgttcccatatacagccaatacctccccctcaccttctcaaggtagtcaccactgcaattatttcttmtccttaacactttggacaatcttaacatcaaactccatacactccagtgttcccagg

SEQ ID NO: 567044 - DNA, 520 bp, Homo sapiens
tgaatttgtaataattcatacaaagtacttgggaatttcattttctttgatgagaaatgtaactatagtataaagaacagcaattcctggatgccgaccctttaaattcatttaaacaactcagttatattagtgtcatgtaatgcttttctattaattttgtattcattgccaatatttctcccatgaaaattgatctgtatctttgtgttatagtagagttgtaaaaactaagggctgttatttgttatgtaatctcatgaaaacacatgtttgttgtttagctccccaaatgagacttgcattttattttcatgaaaatagttgactttgatatcttacaaaaaatcaaatagaagagttcataaaatctaccagttagttactggttagatagakatttttttaaaatttaaactgtgtatttcaatacaaactactgcagttatatattgtaaatgtgatattagtgcagattatgtgtcttataaataattcttgcataagaagataaatatat

SEQ ID NO: 567045 - DNA, 579 bp, Homo sapiens
tctagctcaggagtttgcccartttgcgatagttctttgctcagttaaactctttgaaatttaatttggcttaactttttcttttaacacacttcaatgagcaaatttttcaataaataaaaaattctaaaacaaacttatagcactggaaaaaaccctccacacatttaaattagctttccagttttaagtagtttagtttttctccccaaaatattttacgtcctttgcatatgggaagggttttttcctcctgttctcaatattttattccatgtggagagatctcaactcacctataatgtggtccctctccatgtcttcacatcactcctgttcagtaaaggaggtgtaatttttcttcaactgtatgagctttaaaggagccattcacatatgaaaaaaggaatcaactgccattgtacagcactgcctatcagcagcagatgtgaattaaatgcttcattattagcttgtgtatcttaagttgttccaaactttggtgaagaaaatcagtgatgtttaattgatctccttaagctccaacaaacatttcagtcctggtaataataatgtcct

SEQ ID NO: 567046 - DNA, 579 bp, Homo sapiens
tctagctcaggagtttgcccaatttgcgatagttctttgctcagttaaactctttgaaatttaatttggcttaactttttcttttaacacacttcaatgagcaaatttttcaataaataaaaaattctaaaacaaacttatagcactggaaaaaaccctccacacatttaaattagctttccagttttaagtagtttagtttttctccccaaaatattttaygtcctttgcatatgggaagggttttttcctcctgttctcaatattttattccatgtggagagatctcaactcacctataatgtggtccctctccatgtcttcacatcactcctgttcagtaaaggaggtgtaatttttcttcaactgtatgagctttaaaggagccattcacatatgaaaaaaggaatcaactgccattgtacagcactgcctatcagcagcagatgtgaattaaatgcttcattattagcttgtgtatcttaagttgttccaaactttggtgaagaaaatcagtgatgtttaattgatctccttaagctccaacaaacatttcagtcctggtaataataatgtcct

SEQ ID NO: 567047 - DNA, 529 bp, Homo sapiens
ccctctacgtgtccaaatgttctgatttagctctcacttataagtgagaatatgtggtatttggttttctgtcctcttgttcatttgctaaggataatggcctccagcttccagctccattcatgtccttgcaaaggatgtaatctcgctcctttttatggctgtatagcattccatggtgtacatgtaccacattttctttattcagtctatcattgatgagcatttargttgatgcatgtctttgctattggggatagtgctgcaatgaacataggcctgcatgtgtttttgtaatagaacaatttatattcctttgagtatatacccagtaattggattgctggctcaaatgctatttatgtgttacttgaggaaatagccacactttgaggaactgccaaggtgtcttccacaatggttgaactaatttacatttccaacagtgtacaagtgttcttttttcttcaaaactctccagcgtcttttttttaatttttagtagtagccattctgactattgtgagat

SEQ ID NO: 567048 - DNA, 549 bp, Homo sapiens
gcccaattctgattaggtcttggaaaaacaaaaacattgtgtagtacaattaatccaaaaacaaactaaaaagagcttacagaatatatctccatcctcaaatatttcaagcactctttcaagcagtgaatctatagccatcgtaatctgacatagatggtaatttcactataaaccatgtattgtgctaatgaatatacaggaaatatcttctatggtctgaatatttctgccccctcagaattcatatactgaaatctataatctccaatgcaatattattaagaggtttggcccttaggaggtgattagcccccatgagtaggaytcgttcccttatttaaaaggcccagtggagcttggggatgcagcaggaagttgctgtctacgagggagagagaaagccttcactagacaccaaatctgctgatgtcttgacctaggacttctgagcctctaaggctgtgagcaataaatttctactacttataaatttctcagtctaaggtatcttgttaaagcatcccaaatggactatacagtatttat

SEQ ID NO: 567049 - DNA, 453 bp, Homo sapiens
gggtttataatctcctgttttttcccagcatgttgtcctttcacacaatagtgccttgtcccttctytgtcttactctcccaccagaaaaacctccattcttggacatcgtggggaaggggcaatccatctaacagcaagaggaagagggggcctggagctttcattgtttcctgaactgattttcaatgcaacttactgtttttagccacaacttcacccttatttccaaaagtacctggtgccaccaattgctgagcatttgggggattctgaaatgtaaagtgagttgctttacctttctcatctgcaggcttaggattcagctttctcaggtctcttgattcagttaccactcattcatctatgttctagcttttatttgtttatttatttattttttgagacgcagtctcactctgtcacccaggctggagtacagtggtgcaatctc

SEQ ID NO: 567050 - DNA, 581 bp, Homo sapiens
tttatagttaatctaagcagtaaatgaatttattaaaaaatattaggtagttcacaagctctccaggaggactagaaacccaggtttagaggctacatagccagaagcaacacctaaaattgtactgcagaacaatatcatgaagtcatcaatgcccccactgcatggaaaccactgctcrgtgaatgccccaagcctggatgctggtccctgctgctagaaccaccagaaccaccaccactgtagcatctaaaaaatgaatgttgttattacaactaatgccactccctgctgcagaacagattcagcagtctttgctatttgaggtcactagctcctgagtcaaaaagcaatgcagatccttatgcctatgcatacctgtaagggaagctggaaaagaagtatctgacattttcagcttctaaagtaaaaggttgtcctctgtatcccatcaaggcctataaagtgatgaatgcttcaaatatagagcatttagataacagaggtggagagagagagagagaggaaaataaggaaggaagaaggagtttcacatcagttttcactttgctttgggggaa

SEQ ID NO: 567051 - DNA, 581 bp, Homo sapiens
tttatagttaatctaagcagtaaatgaatttattaaaaaatattaggtagttcacaagctctccaggaggactagaaacccaggtttagaggctacatagccagaagcaacacctaaaattgtactgcagaacaatatcatgaagtcatcaatgcccccactgcatggaaaccactgctcggtgaatgccccaagcctggatgctggtccctgctgctagaaccaccagaaccaccaccactgtagcatctaaaaaatgaatgttgttattacaactaatgccactccctgctgcagaacagattcarcagtctttgctatttgaggtcactagctcctgagtcaaaaagcaatgcagatccttatgcctatgcatacctgtaagggaagctggaaaagaagtatctgacattttcagcttctaaagtaaaaggttgtcctctgtatcccatcaaggcctataaagtgatgaatgcttcaaatatagagcatttagataacagaggtggagagagagagagagaggaaaataaggaaggaagaaggagtttcacatcagttttcactttgctttgggggaa

SEQ ID NO: 567052 - DNA, 581 bp, Homo sapiens
tttatagttaatctaagcagtaaatgaatttattaaaaaatattaggtagttcacaagctctccaggaggactagaaacccaggtttagaggctacatagccagaagcaacacctaaaattgtactgcagaacaatatcatgaagtcatcaatgcccccactgcatggaaaccactgctcggtgaatgccccaagcctggatgctggtccctgctgctagaaccaccagaaccaccaccactgtagcatctaaaaaatgaatgttgttattacaactaatgccactccctgctgcagaacagattcagcagtctttgctatttgaggtcactagctcctgagtcaaaaagcaatgcagatccttatgcctatgcatacctgtaagggaagctggaaaasaagtatctgacattttcagcttctaaagtaaaaggttgtcctctgtatcccatcaaggcctataaagtgatgaatgcttcaaatatagagcatttagataacagaggtggagagagagagagagaggaaaataaggaaggaagaaggagtttcacatcagttttcactttgctttgggggaa

SEQ ID NO: 567053 - DNA, 568 bp, Homo sapiens
gttttccattcctgagttatttcacttaaaataatggcctccagctccatccaagttgtgcaagacattatttcattcttttttgtggctgagtagtattccatggcatgtatataccacattttctttatccactaattggttgatgggctcttaggttagttctatacctttgccattgtcaattgtgctgcgataaacatacatgtgcagatataatgatttattttcctttttgatataatgacttattttcctttgggtagatacccaacagtgggattgctacttttagttctttgagaaatcgtcatactgttttccatagatgttatattaatttacattcccactagcagtgtataagtgttcccttttcaccacatctgtgacaacatctatygctttttggatttttaacaatggccattctggttggggtaaagtggtatctcattgtggctttgatttgcatttccctgatgttcagtgatgttgaaattttttccatgtttattggccatttgtgtatcttcttttgagaagcatctattcatgtaaattgccc

SEQ ID NO: 567054 - DNA, 531 bp, Homo sapiens
ggagaaattggaaagctcatacactgctagtgggaaagtaaaatggtgtagccacattggaaaagtttgacagtccctctaaatgctaaaaatagagttaccatatgacccagcaattcttttatcttgggaatctacccaaaagcaatgaaaacatatttccatacaaaagcttgtgcacaaatgttcacagaaactttattcacaataaccaaaaagtagaaacwacccatttgtcatcaactgatgaacagataaacaaaatgtgaaatatccatacaatgaaatattatttggcaataaaaaggaatgaggtacagatagatgccacaatatagatgaacctcaaaaacattctgctaagtgaaggaagccagtcacaaaagaccacatattatatgatctcatttatataaaatgtccagaataggcaaatccatagaaacagaaagcagattagtgtttgtctaggactagagggaataaaggggtggggtatgggagaatagaattgatgagtgactgctaatg

SEQ ID NO: 567055 - DNA, 548 bp, Homo sapiens
tgatcccctcacctagataatgagcatagtgaccaataggtaagtatttcaacctttgtcccccttcctccttcctgcctctagtagtccccagtacctattgttgtcatctttatgtccatgagtacccaatgcttaactcccacttgtgagatcttactaacacatttggttttctgtttctgccttaattcactcaggataatgacctctagctccatccatgttgctacaaaggatatgatttcactcatttttttgactgtgtattataccatgctatgtatataccctattttaaaaaatccaatccactgttgatgaacacctagattgattccatgttttgctattgtgaatagygctgtgatgaacatgtgagtgcatgtgtctttttggtagaatggtttattttcctttagatatatactcagtaatgaagattgctgggttgaatggtaattttgttttaagttctttgagaaatcaccaaactacttttccacagtagctgaactaatttacattcacaccgacaatagataagc

SEQ ID NO: 567056 - DNA, 548 bp, Homo sapiens
tgatcccctcacctagataatgagcatagtgaccaataggtaagtatttcaacctttgtcccccttcctccttcctgcctctagtagtccccagtacctattgttgtcatctttatgtccatgagtacccaatgcttaactcccacttgtgagatcttactaacacatttggttttctgtttctgccttaattcactcaggataatgacctctagctccatccatgttgctacaaaggatatgatttcactcatttttttgactgtgtattataccatgctatgtatataccctattttaaaaaatccaatccactgttgatgaacacctagattgattccatgttttgctattgtgaatagcgctgtgatgaacatgtgagtgcatgtgtctttttggtagaatggtttattttcctttagatatatactcagtaatgaagattgctgggttgaayggtaattttgttttaagttctttgagaaatcaccaaactacttttccacagtagctgaactaatttacattcacaccgacaatagataagc

SEQ ID NO: 567057 - DNA, 511 bp, Homo sapiens
ccctcagcccgatactcaccatgcgcgggggccgcgcagcacagccagagcgccagcagcgcccacagcagagcggggcgcagggcgggcatcttctcggtcgcctcctcckccgccgccgccgccgccgcctgggcagatccacatggggagggggtcccgatagaggagccccactctctcctcccctcctcctgcttcaaaggctcaggccctggcgctacgctccgaagcccaggcgcaaatgcctcgactccccgcgccccgagtccgccgctcctcggccgccgcctcagccgccgcccgaagtttggctgaaactttctcgggtgtgcaacgaagcagcctcgtgtgtccttccgcctcagccgcctcctcccaccgcaagccccgccccactgtcgccgcggcctcggccccgccgccttgggcacccaggggtttcccgcaggaagaagcgccggcccgagctccgcgcggagggatctactacgagtcactggacccgtcc

SEQ ID NO: 567058 - DNA, 517 bp, Homo sapiens
tttatttttatatatatatatatatatwtttagtttatgaacagatctacatatatatatatgcacacacacataatatactattgtcaacactaggttttatttttaaaaatctttaccatttgataagtggtaaatattacttaatcttaatatgcctctctcattacagtgatattgaatgttttttcatatcatcagtggcgtttgtattgcctttttttctacttcttttggtaaattgtgtcttttactcatttaattattttcttactggtttgaaaaagctctttaaatattaagggtgttagtcttttgtcttaaatatgtcacaatatgtatggaaataattagcagtatataacataacatcaaattgctaccaatgttgatataaaaattgttcatttcataggttaatttttttaatcctttggtttctaatgatattggttaattcatttgttaactgctattttctgtagctacttgaaagttcttatctgactgtatcgta

SEQ ID NO: 567059 - DNA, 575 bp, Homo sapiens
ctctggggctcaagcaatcctcctgcctcagcctcccaagtagctgggaccacaggtgtgcacccccactcctggctaatttttttattttcgtaaagatggggtcttgctatgtttcccaggttagtctcaaactcctggtgtcaagcgatcctcctgcctcagactcccaaagcactgcgattacaggtgtgagccaccaagcccagccccagcaccacttttaactagctgcataatcttgggtaaactactaacctttccaaagtacatcttttaaattaagactaatacaccagggttttttctaaggattagatgagataatgtatgtaaagcacttagccacactgtgtctgacataaaatacayactcaataaaaagttatagtgatgactaataacatcaatattattattattaaattcaagaattccaaaagaaagtaaattaagtggaagaaagctagaaagagaaataggctcacctataagcatcaataaacagtaggactgttgtcaggttaacccaggactatgctcactgaaattctacaaacaaaggggttttgctt

SEQ ID NO: 567060 - DNA, 576 bp, Homo sapiens
taggaaggcaataatgaaaagaaaagggttgagaaatattgtgataggtgatgaggctgcaattcctgtaacagaaggaacataaggagactggattgtgaggaaatggaggtagtcacagttatttgactgagaagtagactacagagagaattccgatgaagcaaacaaattatgagcacttattatgtgccatgaactgtgtgaaaccctttcacatttgttagcaaagagcttctcctttagtagtaatgtacatattccttgcagaaaaaacagygacattttccattgagacagtagcgcacctatctctcctctgcttcagcagcctttatgctaattactgttttggaagtaactcctcattcactttttgcaacataagataatgagaaacacagcccagattttgtttgtagaagctcctttcatggcagcctttcaacaggttgggtaatttaaaagatgcagttgtaatcgtgactaactcattaagatgcttgatgaacatcttaatgagttaaaaaacctggacatttttaacgcacttttggaaagaggcaagaaaaatat

SEQ ID NO: 567061 - DNA, 576 bp, Homo sapiens
taggaaggcaataatgaaaagaaaagggttgagaaatattgtgataggtgatgaggctgcaattcctgtaacagaaggaacataaggagactggattgtgaggaaatggaggtagtcacagttatttgactgagaagtagactacagagagaattccgatgaagcaaacaaattatgagcacttattatgtgccatgaactgtgtgaaaccctttcacatttgttagcaaagagcttctcctttagtagtaatgtacatattccttgcagaaaaaacagcgacattttccattgagacagtagcgcacctatctctcctctgcttcagcagcctttatgctaattactgttttggaagtaactcctcattcactttttgcaacataagataatgagaaayacagcccagattttgtttgtagaagctcctttcatggcagcctttcaacaggttgggtaatttaaaagatgcagttgtaatcgtgactaactcattaagatgcttgatgaacatcttaatgagttaaaaaacctggacatttttaacgcacttttggaaagaggcaagaaaaatat

SEQ ID NO: 567062 - DNA, 590 bp, Homo sapiens
tatcttctaaggtaaaagtaaagaactaagctgatgtccagccctctaaaacattttaaatagaaatcaaactttattaatacagtaggtctagtttcacataaagcaaatatatggttctgtacaygggctttaggagagtaagtctgttgtacctcatatgtaagtattatcccatttagaggaaaaccctaagtctttctttacagtggcttaaaggccccaattgatccacatcccagttacagctctcatctattttctgctgctccagatattcttgctgtttctcagacacgctagggctgctctctgtgttatggcctttgcatttgctgttccctttctcatgaatgtgtttccctaagatacctgcatgattactctcaccttatttaggtctcaactcaagtattgtcagtgaaggtcttctctgattttcctattctaaactgagatacttctctttgctcaccccacaccctcatccccagctccattccttcctgtttaattttttttcacagcacttaactccatctattgtgcatcttttacttagtaattttgttttcgtcttcagctattag

SEQ ID NO: 567063 - DNA, 585 bp, Homo sapiens
aagttcatgtgttagaaatttaattcccaatgcaacagtgttgggaggtacagcccagttgaaggtgaaygggtcataaggcagagcacttataaatggattaatgtcatcatcttcagaatgggttatttcaagagtgagctgttataaagtgagtccaaccctggtgcctttctctctgtctaatgtgctcccttgccctttttccacgtcatgacctagtaagaaggccctcaccagatgctggccccttaactttggccttcccagcctctagagctataagaaatattttttaaattacctagcctgcattattctgttatagcaacatacaatgaactgaagcagaaaattggtactgggagtagagttgttgctacaataaatacctaaaaatgaggaagcagctttggaagtgggttggaagctggaagaattgggagaagcaaattagaaaacacctgtattgctatgaatggagcattctgatgagggctcagaacaaaggaaaccctgaatctttttaggtattacttaagtggctataaccagaatatctgtagaaacatggacagtaaagga

SEQ ID NO: 567064 - DNA, 481 bp, Homo sapiens
aatcctattttcagtgcaccagatgagctctatccaagcaccaacaattcttatttagaatttaaataacaatgtagctcattaaaaaaaaaagaattatagttaaaaaatatagctcaatgtaaggtaaagmagctaaacatactgattttttaaaagcaaagcaaattttattacacataaaattaatatatcaatatacaataagttacactgttttatcttactgtacattaattcaagaggctatttttacttttatctttaatcccacttctatttttaattatatctgtttgatattttataaattaaattgtttttagcttttggtaaagtttttctggggttagcagggtttatcagctgcatttctaatgagtaaatgtttagtaatgtatctgaggtcactgacaagacatatggaaatagatgacacgagatacttcattcattccatgttctttctaataaggtaatt

SEQ ID NO: 567065 - DNA, 599 bp, Homo sapiens
atcaaaactacgagataccactgcttacccattatgagggctactatttaaaaaaaaaaacagacaatagcaagtgttgrcaaggatgtgaagaaattggaattcttgtgatgctgggaatgtaagatgttgccgctgtgtggaaaatagtacagcagttcctcagaaagttaaaaattgaattacaatatgatctaacagtttcacttctgggtctgtagccgaaagaacggaaagcagcatctcaaagagaaatttgtacaccaatgttcatagaaatgttattcacaacagctaaaatgtggaagcaagctgagcatgcatggatgaatgaatggataaagaacatggtaaatacagacaatgaatattactcagccttcaaaaggaacaaaagtctgagacacattgcaggaggcatgaaccttgaagacataatgccgagtgaaataagaaaggactgtgtgattccacttggatgagataactggaggagtcaaaatcatagagacagaaggaacagtggttgccaggggctgggcaagggaagagcggtatggggagttagtatttaatgtgcacagagttttgattttata

SEQ ID NO: 567066 - DNA, 599 bp, Homo sapiens
atcaaaactacgagataccactgcttacccattatgagggctactatttaaaaaaaaaaacagacaatagcaagtgttggcaaggatgtgaagaaattggaattcttgtgatgctgggaatgtaagatgttgccgctgtgtggaaaatagtacagcagttcctcagaaagttaaaaattgaattacaatatgatctaacagtttcacttctgggtctgtagccgaaagaacggaaagcagcatctcaaagagaaatttgtacaccaatgttcatagaaatgttattcacaacagctaaaatgtggaagcaagctgagcatgcatggatgaatgaatggataaagaacatggtaaatacagacaatgaatattactcagccttcaaaaggaacaaaagtctgagacacaytgcaggaggcatgaaccttgaagacataatgccgagtgaaataagaaaggactgtgtgattccacttggatgagataactggaggagtcaaaatcatagagacagaaggaacagtggttgccaggggctgggcaagggaagagcggtatggggagttagtatttaatgtgcacagagttttgattttata

SEQ ID NO: 567067 - DNA, 599 bp, Homo sapiens
atcaaaactacgagataccactgcttacccattatgagggctactatttaaaaaaaaaaacagacaatagcaagtgttggcaaggatgtgaagaaattggaattcttgtgatgctgggaatgtaagatgttgccgctgtgtggaaaatagtacagcagttcctcagaaagttaaaaattgaattacaatatgatctaacagtttcacttctgggtctgtagccgaaagaacggaaagcagcatctcaaagagaaatttgtacaccaatgttcatagaaatgttattcacaacagctaaaatgtggaagcaagctgagcatgcatggatgaatgaatggataaagaacatggtaaatacagacaatgaatattactcagccttcaaaaggaacaaaagtctgagacacattgcaggaggcatgaaccttgaagacataatgccgagtgaaataagaaaggactgtgtgattccacttggatgagataactggaggagtcaaaatcatagagacagaaggaacagtggttgccaggggctgggcaagggaagagcggyatggggagttagtatttaatgtgcacagagttttgattttata

SEQ ID NO: 567068 - DNA, 599 bp, Homo sapiens
atcaaaactacgagataccactgcttacccattatgagggctactatttaaaaaaaaaaacagacaatagcaagtgttggcaaggatgtgaagaaattggaattcttgtgatgctgggaatgtaagatgttgccgctgtgtggaaaatagtacagcagttcctcagaaagttaaaaattgaattacaatatgatctaacagtttcacttctgggtctgtagccgaaagaacggaaagcagcatctcaaagagaaatttgtacaccaatgttcatagaaatgttattcacaacagctaaaatgtggaagcaagctgagcatgcatggatgaatgaatggataaagaacatggtaaatacagacaatgaatattactcagccttcaaaaggaacaaaagtctgagacacattgcaggaggcatgaaccttgaagacataatgccgagtgaaataagaaaggactgtgtgattccacttggatgagataactggaggagtcaaaatcatagagacagaaggaacagtggttgccaggggctgggcaagggaagagcggtatggggagttagtatttaatgygcacagagttttgattttata

SEQ ID NO: 567069 - DNA, 572 bp, Homo sapiens
tacagctagctttactgctgaagcagcctccttacaggcttctgtttctacctttggctccctgtagtcttttctcaatatagcagctattgtgaatattttaaagcataaaaccacgttccttcactaaagacccagcaatgacttacctctcatccatttcactcaaaggaaaagccaaagtccttaaaatggcttcmggatttgacataatcttaccacgtgctacttctctgaattcatttactattatagtacatttcctttgcttgctcagaggctaccaactggccttgtgtctatccctcatacccattagcttttcttaccttacatttttctctagctataccctttacttggaacatcctatcacattgatttatttgttaactcattcttttatccatatttttgctcaaatctcatcttctcaatgaggcctactctgaccaatctatataatatggcaggaggggcacagtggctcatgcctgtaatcccaacactttgggaggctgaggcaggtggacctcctcaggtcaggagttcaagacaagcctggccaatat

SEQ ID NO: 567070 - DNA, 579 bp, Homo sapiens
tttgttttttcagtagagacggggtttcaccatgttggccaggcaggtttcaaactcctggcctcaagtaatctgcctgcttgggcctcccaaagtgctggggttacaggggtgagccaccactcccggcccaaaaactagaatttcaaagaagaagcccaaatccatggagtccaaatkctttttattatagatgaggaaactgaggcttggagagacaaaatgaattccccaaatcagagtgacagagctgtcaatgaaatctagttctgtgactttaaatccagaaatttgggtttttttaatgatgtcatatttctttacacttcaataaacttaactaaatatgctcccatattaccataaccttgaagtagctgaatataatagaaggaaaaattgagcttggaagtaggaagacctgctatccagctctgccattttagtagttctgtgatcctagataagttgcaacttctctgagttttcttgcttttatgaaacgttcctaactcacaggtactggagagatttaaaagagatcatatatatgaaagtactttgtgagctacaaggtag

SEQ ID NO: 567071 - DNA, 434 bp, Homo sapiens
atagaggtagaaatagacatgaatgtcttggagggatgctgaaaatataagcttaagtagcagaaaattcatctgacaatgaaaagaaaaagaagattgcatagctatggtcactaatgtagataatcttggacttcaggaagtatgtactccacaagagaagaataatgcatgtgatgtaataaaggaatgacatgagacagcaaaaactaaagtgataaaatgtgaggcactgtgtttatgtcctatcaggcactagtgatacagagataacgaagtttccattccyatcctggagaaattcaatctggagagagaatgaccggcaaatcaataatgatgatactatgccatcaatgtacagctatgattctatttaatctgttaaatggggtcttgagtttgtcaacaggtatgtctgagtacctaataat

SEQ ID NO: 567072 - DNA, 595 bp, Homo sapiens
aacaaaaaaacacacacacaatgagatactactcattccagttaaaatggctattaccagaaagacaaaagaaaacagtgttggtaaggatgtggagaaaagggaacatttacacacttggtgggatcctaaactagtacagtcattataggaaaacaatatggaagttcctctgaaaattaaaaagaaaattaccatacgatccagaaatcccactactgggtattattcaaaggaaatgaaatcagttatgatgaagagatatctgtactcccgtgtttatggcaacactatttacaatagtcaagttatgaaatcaacctatgtcaaacaacagatgaatagataaagaaaatgtggcatatatatatatatatatatatatatatatatataygtatatacatacacacagtgtgtatgtatatatatatacacagtggaatactattcagtcacaagcaagaatagccgagtgcagtggctcatggcctgtaatctcaacactttgggaggctgaggtgggcatattgcttgagctcaggagttcgtgaccaacctggcaaaacctcatctctacaaaaaaatacaaaaa

SEQ ID NO: 567073 - DNA, 636 bp, Homo sapiens
taggaacacatattaatcttgatccagaaataataatgcttttgctccatttcccttcattatgtaagatttggacagacatagtggagggtaaatgcaaattaagaaaaataatcaacaaattgaaaagcatgttagagacttgaaaggattgtagtaaaacagaactgcaggttactgaagtgaggggatgggtaagactgacgagatataagaaattgactggctgggcgcggtggctcacgcctgtaacgcctgtaatcccagcactttgggaggccgaggcgggtggatcacaaggtcaggagatcgagaccatcccggctaacatggtaaaaccccgactctactaaaaatacaaaaaattagccgggcgtggtggcgggcgcctgtagtcccagctactcgggaggctgagacaggagaatggcgtgaaccccggggggcagagcctgcagtgagccgagattgcgccactgcactccagcctgggtgayagagcgagactccgtctcagaaaaaaaaaaaaaaaaaaaattgattaagtcaagcaataggtactaaggaccagggaagagttttgaattagaaagtaacatgatcagagctgcattaaaaaaaaaattaatttgataa

SEQ ID NO: 567074 - DNA, 636 bp, Homo sapiens
taggaacacatattaatcttgatccagaaataataatgcttttgctccatttcccttcattatgtaagatttggacagacatagtggagggtaaatgcaaattaagaaaaataatcaacaaattgaaaagcatgttagagacttgaaaggattgtagtaaaacagaactgcaggttactgaagtgaggggatgggtaagactgacgagatataagaaattgactggctgggcgcggtggctcacgcctgtaacgcctgtaatcccagcactttgggaggccgaggcgggtggatcacaaggtcaggagatcgagaccatcccggctaacatggtaaaaccccgactctactaaaaatacaaaaaattagccgggcgtggtggcgggcgcctgtagtcccagctactcgggaggctgagacaggagaatggcgtgaaccccggggggcagagcctgcagtgagccgagattgcgccactgcactccagcctgggtgatagagcgagactccgtctcagaaaaaaaaaaaaaaaaaaaattgattaartcaagcaataggtactaaggaccagggaagagttttgaattagaaagtaacatgatcagagctgcattaaaaaaaaaattaatttgataa

SEQ ID NO: 567075 - DNA, 610 bp, Homo sapiens
accacaagatatggggaataaagaccttcctaataaaacaggttgcagtaaagaagctggctaaaacccaccaaacccgagatggcgactagagtgacctctggttgtccccactgttacactcccaccagcaccagcacagtttacaaatgctatgccaatgtcaggaagttatcckatacagtccagagagggtaggcataaataatccactccatgttgagcatatcatcaaaaaacaaccataaaagtgggcaaccagcagccctaggggctgctctatttatggagtagccattcttttattcctttacttccttaataaagttgtttttgctttacactgtggactcatcctgaattctttcttgggtgagatccaagaaccctctcttgaggtctcgactgggacccctttcctgtaacaaacaggtgtatttacaaattgttatagaatggagaaaagagcatcattaaatctatctaggtttggagggatgtcccacaatggtattgccatcttagatgaaaatgttaagattaaattagactctgccagaagaagcaaggagcataagggttgggggatgacattaaacactttataatg

SEQ ID NO: 567076 - DNA, 585 bp, Homo sapiens
aatgaaatcttgtttaatttttatcttttacctattttggggattcttatgaagcatgtggagttaatcatgcttgtcagttgatggcccattttcatcattggtctgggccaagctattctcttgcttatttgtctgcccatccatctgcctgtctattccttttgttatcatgccctattcccattctccttcttcccagctccccttttaaataactacactaatgtgatttagtgtgtactttttgtatgtatattctcttattgttttgtatgcctgggtagatatttccttctttttttttttttttagatggagtctcactctgtcacccaggctgtagtacagtggcgcaatcttggctcactgtaacctccgcctgcccaggttcgaacgattctcctgcctcagccttctgagtagctgggactacaggggtgtgccaccacacctggctaattttatttttttgtatttttagtagagacaggatttcaccatgttggccaggctggtcttgaactcgtgacctctagtgatccacccgygttggcctcccaaactgctgggattacaggcaca

SEQ ID NO: 567077 - DNA, 601 bp, Homo sapiens
tttcttgcattgtctttatttggttttagtatcaggataatgctgacctcattaaataagatagtaagtgttcctcctttgtttactgaaagaatttaggtagtactagcatcatttctttcttaaatatttgataaaattcaaatatttaataaattctgtaaatgtttaataaattctgtaaagttggcaaagtctgtagttttccctgtaggaaagttttaattacaaattcagtttttcaatagctatgaagtcagtttcaatttctttttattttcattatgaaaatattttattcaaggaatatgtttattttatttaaattaccacaaatattggcatacagttatttttaatagttattattcatttaatataattataatgcctctaggccctatagtgattmcctgtctttcactccttttttttttttgagacagggtcttcctttgttgcccaggctgaagtgcactgacatgatcgtggctcactgcagcttcaaccttctaggttcaagcaatcctcctacctcagccccccgagtagctggaactacagacatgagccaccatgtctggctaattttttaaatttt

SEQ ID NO: 567078 - DNA, 630 bp, Homo sapiens
cacggtcattaattgctcagtgctatctcagttacgatcacatggccaatggacttgatattttctggtactatgtgtatgacctaattttcatgttttcctattcaatgattccttgtttgaaattataaagccagagatctttatcacagcatctaagcatacaaaagtaggaaaagtattattaaaaaaacacatatgtcaaaattttaaaaagcatcccgtaacttaaaagaataaagggaggctgagtgyggtggctcacacctataatcccagcactctgggaggctgaggctggtggatcacctgaggtgaggagtttgagaccagcctggccaacatggtgaaacctcatctctactaaaaatacaaaaattagctgggcgtggtggcgggcacctgtaatcccagctacttgggaggctgaggcaggagaattgcttgaacccgggaggcagaagttgcagtgagccaagattgtgccactggattccagcctgggcaacagagtgagattccgcctcaaaataaatacaatacaatacaatacaatacaatacaataaaataaaataaaataaaataaaataaaataaaggggcttcatatttgtcccatgctgctaatg

SEQ ID NO: 567079 - DNA, 630 bp, Homo sapiens
cacggtcattaattgctcagtgctatctcagttacgatcacatggccaatggacttgatattttctggtactatgtgtatgacctaattttcatgttttcctattcaatgattccttgtttgaaattataaagccagagatctttatcacagcatctaagcatacaaaagtaggaaaagtattattaaaaaaacacatatgtcaaaattttaaaaagcatcccgtaacttaaaagaataaagggaggctgagtgcggtggctcacacctataatcccagcactctgggaggctgaggctggtggatcacctgaggtgaggagtttgagaccagcctggccaacatggtgaaacctcatctctactaaaaatacaaaaattagctgggcgtggtggcgggcacctgtaatcccagctacttgggaggctgaggcaggagaattgcttgaacccgggaggcagaagttgcagtgagccaagattgtgccactggaytccagcctgggcaacagagtgagattccgcctcaaaataaatacaatacaatacaatacaatacaatacaataaaataaaataaaataaaataaaataaaataaaggggcttcatatttgtcccatgctgctaatg

SEQ ID NO: 567080 - DNA, 630 bp, Homo sapiens
cacggtcattaattgctcagtgctatctcagttacgatcacatggccaatggacttgatattttctggtactatgtgtatgacctaattttcatgttttcctattcaatgattccttgtttgaaattataaagccagagatctttatcacagcatctaagcatacaaaagtaggaaaagtattattaaaaaaacacatatgtcaaaattttaaaaagcatcccgtaacttaaaagaataaagggaggctgagtgcggtggctcacacctataatcccagcactctgggaggctgaggctggtggatcacctgaggtgaggagtttgagaccagcctggccaacatggtgaaacctcatctctactaaaaatacaaaaattagctgggcgtggtggcgggcacctgtaatcccagctacttgggaggctgaggcaggagaattgcttgaacccgggaggcagaagttgcagtgagccaagattgtgccactggattccagcctgggcaacagagtgagattccgcctcaaaataaatamaatacaatacaatacaatacaatacaataaaataaaataaaataaaataaaataaaataaaggggcttcatatttgtcccatgctgctaatg

SEQ ID NO: 567081 - DNA, 579 bp, Homo sapiens
aaagcttttttccattcagttatcataactgattgaggacaccacactgcacaatctcaggagttatgcagaatgacagcccctgtacatgctgttcctgtctcaggactatgagccatcactttctgctcagaataattacttggtgtatctacacttaaggctgcaaacaacatgaactaactggaggaagccgggtattcatggatgacccaatctctgactcaaacaaatcaaatcactgaagaatcataaattcacctttctttgtagcttccaagccaaagraattatagaagtcacaagtgcgcctgtttcacaaaaatatcagcagtatatagcaaataagtatctctgcttttcaataagtaaagggtggagatgattaacgttaacgggaaaattaaattactctcaagcagtcagaaattactgtttggttcaccaagtcacacaaaagacagtctgaagtcaaacaactgcagctaattcgtcttgtcattgatgtatgttgtattaggattctccagagaaacaaaacaaatggatatgttggacgcaaagagagagagagagaga

SEQ ID NO: 567082 - DNA, 579 bp, Homo sapiens
aaagcttttttccattcagttatcataactgattgaggacaccacactgcacaatctcaggagttatgcagaatgacagcccctgtacatgctgttcctgtctcaggactatgagccatcactttctgctcagaataattacttggtgtatctacacttaaggctgcaaacaacatgaactaactggaggaagccgggtattcatggatgacccaatctctgactcaaacaaatcaaatcactgaagaatcataaattcacctttctttgtagcttccaagccaaagaaattatagaagtcacaagtgcgcctgtttcacaaaaatrtcagcagtatatagcaaataagtatctctgcttttcaataagtaaagggtggagatgattaacgttaacgggaaaattaaattactctcaagcagtcagaaattactgtttggttcaccaagtcacacaaaagacagtctgaagtcaaacaactgcagctaattcgtcttgtcattgatgtatgttgtattaggattctccagagaaacaaaacaaatggatatgttggacgcaaagagagagagagagaga

SEQ ID NO: 567083 - DNA, 452 bp, Homo sapiens
gaattccttcctcttcaggaaacctcagtctttccwcttaaggccttcaactgattggatgagtttcacctgcattacaaagcctactctgccttacacagaacctactgattcaaatactaatcacatctgaaaaatactttcacagcaatatctagactggtcaaacaactgtgcaccatagccttgccaagttgacacataaaattaaccatcatatatctcttgcttgtccaaatggtttgcttttcttgctattctaatcatatagataattttttcagagctttctccaaattttctgcatgtttgaaacactttttcctgaaataggaggtgactgtttttcagtgtaagcattgaatagtttgtaaataaagtagttcctattacctgtcatgtagttcatatttattacacagaggaaaatgtagaactttaatttcatgata

SEQ ID NO: 567084 - DNA, 452 bp, Homo sapiens
gaattccttcctcttcaggaaacctcagtctttcctcttaaggccttcaactgattggatgagwttcacctgcattacaaagcctactctgccttacacagaacctactgattcaaatactaatcacatctgaaaaatactttcacagcaatatctagactggtcaaacaactgtgcaccatagccttgccaagttgacacataaaattaaccatcatatatctcttgcttgtccaaatggtttgcttttcttgctattctaatcatatagataattttttcagagctttctccaaattttctgcatgtttgaaacactttttcctgaaataggaggtgactgtttttcagtgtaagcattgaatagtttgtaaataaagtagttcctattacctgtcatgtagttcatatttattacacagaggaaaatgtagaactttaatttcatgata

SEQ ID NO: 567085 - DNA, 598 bp, Homo sapiens
ggaaatttagatttcttataagttgtctttcctacaattttgtcttatcctcctaaattctctgatattcacacagaaaattgagcagtgtggataggcatcagaatctgtgccctaatttttccatctatttacaattcatgatgttaatgtgattgtcaaatcaaatcagggcattaaaaataaccacaaaatacaaatttcctagaatatgttgtcattcwgcaacatgacctttgaaaatattggactaattatttttttgtagcaattagtaaattcatccttaattacaaattaggtaatccattattctgaaatcggacagataattagtaatttcatttaaaagtaattgtaattgaatcagaaatatctttactaactcagaaaacacactgccaaatctaatgtgtgttatggaaatgatatccacattctacatttttcatataggccaccttttgtgtgctgcatgatcaagattttaatagagcaaaactgtagagaaattaaatgctcttgtaaccatctggaatttacgtctatgctaaaggcattgtcaagcaggtatttgaacacatcttccttctgtttc

SEQ ID NO: 567086 - DNA, 598 bp, Homo sapiens
ggaaatttagatttcttataagttgtctttcctacaattttgtcttatcctcctaaattctctgatattcacacagaaaattgagcagtgtggataggcatcagaatctgtgccctaatttttccatctatttacaattcatgatgttaatgtgattgtcaaatcaaatcagggcattaaaaataaccacaaaatacaaatttcctagaatatgttgtcattctgcaacatgacctttgaaaatattggactaattatttttttgtagcaattagtaaattcatccttaattacaaattaggtaatccattattctgaaatcggacagataattagtaatttcatttaaaagtaattgtaattgaatcagaaatatctttactaactcagaaaacacactgccaaatctaatgtgtgttatggaaatgatatccacattctacatttttcatataggccaccttttgtgtgctgcatgatcaagattttaatagagcaaaactgtagagaaattaaatgctcttgtaaccatctggaatttacrtctatgctaaaggcattgtcaagcaggtatttgaacacatcttccttctgtttc

SEQ ID NO: 567087 - DNA, 432 bp, Homo sapiens
aaaacatttattgcatatctgatgccatttaaaagcttgaggcaaaaacttaaaattatttcawtatctttcattactgttaacattatatatttattatttatcctgattcctagcatatctctgagttacaccaagtaaacaacataacccattaattggtttaagaatattgtcagagtggattattcgtaattatatttgctgtatgaattggaagggacattactaggacatgaactatatgctcttttctgcatctctagaactaaattaaatcaaagttttaataagttaggcacataacggaagttctgttcatctttcaggctgatgaaagactctcaatattgttacaaacaaaagaacatgtaacaaaaaaacatgtaataaggtgtctgaatttaaaatagttttaagataaaaatacat

SEQ ID NO: 567088 - DNA, 570 bp, Homo sapiens
ataaaatctgtggtggatatatgatttagaaaatgatgttaraagcctgtaacctacactatgcttggaggagccagccattttttttattgttcagtaaaactcttcttgtgcattgagcattcaaatattagtgacattttgtttctgatataataacagctcaagccaatttatattaattctgaatccaggtgctgagcctgtgaatccctgtaaagtatagcgttcaggagcattgaggatctgggtgccatatcctgtgtactcttgatgttcttgattattctacacagtagaatgctagactctccttgttccttcagttacttattttacaaataggaaatttttcttgttttctggggcttggctcttttcttcataaatatttgattaatagtgatttaatgaatatctgcacttataagtaaattatctttaggaaaaacaaccacaacaaaacctcagagattttaatgttcagctttaaaacctttcgtgaaacaatcctatattaataccaggaacaactcaagccactgaagagagtgatatcagtgtactgtt

SEQ ID NO: 567089 - DNA, 527 bp, Homo sapiens
tggctgttttttttttttttttttttttggtattttttgtagagacagaattttgccatgttgcccaggctggtctcaaactcctgcactcaggagatactctcgtctcggcttcccaaagtgctgggattacaggtttcttaatrcatattgtgaatcaaacatttttgaaatcttacaatactttccatccagtaatgccccatgactaatgcatgctctttatcctaaggttattttttctagttttggtcttgttatgctgaagtctaaattgaacacatattcagtgattgtaaagaaatacaaggttattttattacaagacctcatacattttaagatcaaagtggaataggaaaaggcactgtttggggagcatatttcttaggagcaggaaatgggtgggctatggtatgttggtaagtgtttagcaactgaatctccaaatagaatgaaagtccttatttgtagcatttgtggatttccgtggtgtaaatactcccctgacccatttcaagctgcca

SEQ ID NO: 567090 - DNA, 527 bp, Homo sapiens
tggctgttttttttttttttttttttttggtattttttgtagagacagaattttgccatgttgcccaggctggtctcaaactcctgcactcaggagatactctcgtctcggcttcccaaagtgctgggattacaggtttcttaatgcatattgtgaatcaaacatttttgaaatcttacaatactttccatccagtaatgccccatgactaatgcatgctctttatcctaaggttattttttctagttttggtcttgttatgctgaagtctaaattgaacacatattcagtgattgtaaagaaatacaaggttattttattacaagacctcatacattttaagatcaaagtggaataggaaaaggcactgtttggggagcatatttcttaggagcaggaaatgggtgggcyatggtatgttggtaagtgtttagcaactgaatctccaaatagaatgaaagtccttatttgtagcatttgtggatttccgtggtgtaaatactcccctgacccatttcaagctgcca

SEQ ID NO: 567091 - DNA, 507 bp, Homo sapiens
ttggaaaaaatattagataattttcactaattagtgggagacagagaagtgacaaggggtatgaactccaccatctatggtaggttgattggattaatggctcaatttttcacctctccaagccctttgccatgtaaccttgtcattccctcttaacctggccatgtgatttgctttgtccaagagaatacgagcagacaygatactataagcatggctctgcttattgctctttccctctgccatgccataagatggacctgcctagactagcaaggatggacaagaactgaagagaagaaaaactcctagtgatcccagttgaggtcatcctcaatcagtcagtaaccagtcaaaccctaggagcaagtccagccaagatcagcaaagccactgagccatcccagagctggacacaagagggggacgggctgagataaaccaagtccagattacattagctgaacccccacaaactcatgcacaaaaacaaacattcactattgt

SEQ ID NO: 567092 - DNA, 566 bp, Homo sapiens
tggccaatatggtgaaaccctgtctctactaaaaatacaaaaattagccgggcatggtggtgcacacctgtagtccaagctactcaggaggctgaggcagaagaatctcttgaacccaggaggcagaggttgcagtgagccaagatggcaccactgcactccagcctgggcaacaagagtgagactctgtctcaaaaaaaagaaagaaaaggaaaggaaaggaaggaaggaaggaaggaaggaaggaargaaagaaagaaagaaagaaagaaagaaagaaagaaagaaagaaagaaagaaagacaaacataaaaacatgtgaagacctcccatgattctttgtttaaagaaggctgtacagactccaatatttcaaactgtctctttgatcaccaaacaaacttagttttacagcctgaggcaatgaaatatagtaagatcaggaatgaatgggagatatgcctttctttctttttttcttaatcattatttttagttgacaaataataatggtatctatttatggtatacggtgtgatattttgatactgttaattagcatgtcc

SEQ ID NO: 567093 - DNA, 566 bp, Homo sapiens
tggccaatatggtgaaaccctgtctctactaaaaatacaaaaattagccgggcatggtggtgcacacctgtagtccaagctactcaggaggctgaggcagaagaatctcttgaacccaggaggcagaggttgcagtgagccaagatggcaccactgcactccagcctgggcaacaagagtgagactctgtctcaaaaaaaagaaagaaaaggaaaggaaaggaaggaaggaaggaaggaaggaaggaaagaaagaaagaaagaaagaaagaaagaaagaaagaaagaaagaaagaaagaaagacaaacataaaaacatgtgaagacctcccatgattctttgtttaaagaaggctgtacagactccaatatttcaaaytgtctctttgatcaccaaacaaacttagttttacagcctgaggcaatgaaatatagtaagatcaggaatgaatgggagatatgcctttctttctttttttcttaatcattatttttagttgacaaataataatggtatctatttatggtatacggtgtgatattttgatactgttaattagcatgtcc

SEQ ID NO: 567094 - DNA, 566 bp, Homo sapiens
tggccaatatggtgaaaccctgtctctactaaaaatacaaaaattagccgggcatggtggtgcacacctgtagtccaagctactcaggaggctgaggcagaagaatctcttgaacccaggaggcagaggttgcagtgagccaagatggcaccactgcactccagcctgggcaacaagagtgagactctgtctcaaaaaaaagaaagaaaaggaaaggaaaggaaggaaggaaggaaggaaggaaggaaagaaagaaagaaagaaagaaagaaagaaagaaagaaagaaagaaagaaagaaagacaaacataaaaacatgtgaagacctcccatgattctttgtttaaagaaggctgtacagactccaatatttcaaactgtctctttgatcaccaaamaaacttagttttacagcctgaggcaatgaaatatagtaagatcaggaatgaatgggagatatgcctttctttctttttttcttaatcattatttttagttgacaaataataatggtatctatttatggtatacggtgtgatattttgatactgttaattagcatgtcc

SEQ ID NO: 567095 - DNA, 566 bp, Homo sapiens
tggccaatatggtgaaaccctgtctctactaaaaatacaaaaattagccgggcatggtggtgcacacctgtagtccaagctactcaggaggctgaggcagaagaatctcttgaacccaggaggcagaggttgcagtgagccaagatggcaccactgcactccagcctgggcaacaagagtgagactctgtctcaaaaaaaagaaagaaaaggaaaggaaaggaaggaaggaaggaaggaaggaaggaaagaaagaaagaaagaaagaaagaaagaaagaaagaaagaaagaaagaaagaaagacaaacataaaaacatgtgaagacctcccatgattctttgtttaaagaaggctgtacagactccaatatttcaaactgtctctttgatcaccaaacaaacttagttttacagcytgaggcaatgaaatatagtaagatcaggaatgaatgggagatatgcctttctttctttttttcttaatcattatttttagttgacaaataataatggtatctatttatggtatacggtgtgatattttgatactgttaattagcatgtcc

SEQ ID NO: 567096 - DNA, 588 bp, Homo sapiens
tgggcaactggggaatcatgtgatcaaaccctctgcgatgaaagttttctatttcttataaacacgtttaagtaatattttgcgtgtcttacaatattgtaccgaaaaattatgtgagaattgagagtaaaaattaagagtaaaaatttggagttttctaaaataatcctttaggaacagctcaatatttaattatttctctgccaaagaagttagttttcatttttcaaaatttacttcttatttgtaatttttttttttcagtttgcaagatgctgaagaacatgcttaattagccctttccctctttagttttacctttatcaatttaaacataaaagttgtgcattcagcttcatccatgctctggtgtgcatgagcaacaattatggaaggagtgatatgctagcatgttgttcattttcttgttttttctttcttcaaatattgggttactgaattgtgaattccagggagttgctaggattttagaaacctgcttgaaagactattggcattttaytgggtagcatagtcatattttttcctttacattcatcaagtctattcctttcactaaaaaataat

SEQ ID NO: 567097 - DNA, 536 bp, Homo sapiens
agaagctgacacctaattagataacaaatgctttcatgtcaccaagagtgtactggtttgtagagagagtaggagagttttctgaccaatgcgagagacatgagccttcatgtctaaccctcagacctggactagagaaacgtgttttagaaatgatggtaaatactggaagattgccttaacatgacctgctctgatgtgggattcacacttagactttgtattgctttttagtaataaatgcgtatcagaaggatactgtgagccaagccgtgagctggaagacaaagcatatgaatgagaaaggttcaataatagtacatgaatggttgtgaggcagtccatcgtcaattgccagtaagaggtctaaacaatgagctctgtgagaatagaggaggaagcagtcactgtgaggtgggggaagaatgtgaggctttctgaagtaccagagaagctcactatatcctagggttccaccctataaattttacactcatgtaacatatgtcatgmaagtgtgaaaaatataaatcact

SEQ ID NO: 567098 - DNA, 598 bp, Homo sapiens
tgcattataaaacctagtattataaaaataatgtgtaactgttttttctaaatggtttaaaagactgatacatttaaaaataaacaagtattagtctaaaagctgttacgataatcatgttttgcaactccatgctttattctctgtgtaatttaagacactgatgtgttagaaagttattagcttatgtttttggacagtgtataaaaatataagtttatgacattgacaatcaaaagggttggggatagagctgttagagaagtagtgtatgttattaaagttaatctgctataaattcaaattagagtgttataactttagggtgttatgtaatcccatggtaaccacaagaaaataactgaagaatgtatacaaaatgwtatgagaaatttaaacatttcactacaaaatatcaactcaatacaaaagacagtaatgcaggaaatggacaaaaaagctataaggcatgtagaaaacaaatagcaaaataaaggaataagtctttccttatcaatgattattccaaatgtaagtggattaaattttccagtcaaaaaacaaagataggcagaatgggcccaaaaaaaaaaaaaaa

SEQ ID NO: 567099 - DNA, 610 bp, Homo sapiens
tcagaacctgctgctttatttccygttttagcaatttccatatggctcatatggtacctaccagcaggctttgtcaggcagggccactgagtcacctgtggcattttgaacatcctgctgggtttgtatcataaccaagaacaatttctattgttagcaaattctgtgaaaaattctcatgaggtaaatacagcccaaagagaaggctgctttgggatttccctgagtcagagtaaaaaattgctagcaaaaaaatctttggcagcagatacttttatcccgctgtgcaggaatagtctgggagaaaatattacaacagagaatatactgagggtgatttgcttgatttgaatccctttgggaaggctacttttcttcattttaaattattaattttaatgtttaatttactttactagagtagtacaatcaatgcatgaattcaatttatttccatgtaaataaattagaacattacacttgaagcagaattctgctctgaccatccaccacagagtgattctttattttcctactctccctcacccctacccattcccacaaaccctcactaactatgcttgagacttttgcttgtattcctggagac

SEQ ID NO: 567100 - DNA, 558 bp, Homo sapiens
cctgatccatcacttactgtgaatcacttactcagcttaagaaggtcacctaatttttgtcttccataaaatggaggaaataacctctctcaaagactcttgtaaagtttagagataatacatagaaagcttctgatgcatagtaagccgtcaagaaatgttagcaatcatcatttaggaaaatagtytccttttaaaattcagtcttgaaggttagttctagttgaagaaaggtagactcttcctagatgtaccagtgcactaagacaatatgtgtagaagattatttaaaggaaatatctaatggggttatacaaattagttatgtctggtcttcaaatgaacccttctcaaatttggatatctaaattacagcttaaaaaaattcagaataggtggggcatggtgtctcacacctgtaatcccagcacttcggaaggccaaggcgggcagatcacttgaggtcaggaattcaagactagcctggtcaacatggtgaaacctcgtctctactaaaatacaaaaattagtcaggtgtctcaaaaaaaaaaaaaaatt

SEQ ID NO: 567101 - DNA, 558 bp, Homo sapiens
cctgatccatcacttactgtgaatcacttactcagcttaagaaggtcacctaatttttgtcttccataaaatggaggaaataacctctctcaaagactcttgtaaagtttagagataatacatagaaagcttctgatgcatagtaagccgtcaagaaatgttagcaatcatcatttaggaaaatagtttccttttaaaattcagtcttgaaggttagttctrgttgaagaaaggtagactcttcctagatgtaccagtgcactaagacaatatgtgtagaagattatttaaaggaaatatctaatggggttatacaaattagttatgtctggtcttcaaatgaacccttctcaaatttggatatctaaattacagcttaaaaaaattcagaataggtggggcatggtgtctcacacctgtaatcccagcacttcggaaggccaaggcgggcagatcacttgaggtcaggaattcaagactagcctggtcaacatggtgaaacctcgtctctactaaaatacaaaaattagtcaggtgtctcaaaaaaaaaaaaaaatt

SEQ ID NO: 567102 - DNA, 558 bp, Homo sapiens
cctgatccatcacttactgtgaatcacttactcagcttaagaaggtcacctaatttttgtcttccataaaatggaggaaataacctctctcaaagactcttgtaaagtttagagataatacatagaaagcttctgatgcatagtaagccgtcaagaaatgttagcaatcatcatttaggaaaatagtttccttttaaaattcagtcttgaaggttagttctagttgaagaaaggtagactcttcctagatgtaccagtgcactaagacaatatgtgtagaagattatttaaaggaaatatctaatggggttatacaaattagttatgtctggtsttcaaatgaacccttctcaaatttggatatctaaattacagcttaaaaaaattcagaataggtggggcatggtgtctcacacctgtaatcccagcacttcggaaggccaaggcgggcagatcacttgaggtcaggaattcaagactagcctggtcaacatggtgaaacctcgtctctactaaaatacaaaaattagtcaggtgtctcaaaaaaaaaaaaaaatt

SEQ ID NO: 567103 - DNA, 558 bp, Homo sapiens
cctgatccatcacttactgtgaatcacttactcagcttaagaaggtcacctaatttttgtcttccataaaatggaggaaataacctctctcaaagactcttgtaaagtttagagataatacatagaaagcttctgatgcatagtaagccgtcaagaaatgttagcaatcatcatttaggaaaatagtttccttttaaaattcagtcttgaaggttagttctagttgaagaaaggtagactcttcctagatgtaccagtgcactaagacaatatgtgtagaagattatttaaaggaaatatctaatggggttatacaaattagttatgtctggtcttcaaatgaacccttctcaaatttggatatctaaattacagcttaaaaaaattcagaataggtggggcatggtgtctcacacctgtaatcccagcacttcggaaggccaaggcgggcagatcacttgaggtcaggaattcaagactagcctggtcaacatggtgaaacctcgtstctactaaaatacaaaaattagtcaggtgtctcaaaaaaaaaaaaaaatt

SEQ ID NO: 567104 - DNA, 585 bp, Homo sapiens
gatatatatgaactgacacaccaatgatccaggaataccagaacacgaaaagacaacaaaagctgccgaacagtatcttggtatcactacgtgtgtgttcgtatatccccacataaaaaaatagtaatctstggggttggcgacatgaggttttctcattttttggattatacaattccttgttgctggaatgtccaccaataaacatgcactagatggctaactttgaacatgtcttccctgccggtgtgtaggaaaagtgcagtagctaaccactctgtaaacactatgggcacaactggtaacctaatccattgacctggaagatgatgatggcccttggaaagggtcagcaaggagaataaagtgactggagttagcacatctgctatctttagcagggtgtgccaagttttgtaaacaaattattttgtaattgccttatgtttaatgttcttcaaagccgtagagcaaaagaacagattatttctgagaagtgaaaaacaattttcatttcactatgctgctctccattggtcacttgggtatgtccttggaaatagatgtcagagtcctgaatcaaac

SEQ ID NO: 567105 - DNA, 585 bp, Homo sapiens
gatatatatgaactgacacaccaatgatccaggaataccagaacacgaaaagacaacaaaagctgccgaacagtatcttggtatcactacgtgtgtgttcgtatatccccacataaaaaaatagtaatctctggggttggcgacatgaggttttctcattttttggattatacaattccttgttgctggaatgtccaccaataaacatgcactagatggctaactttgaamatgtcttccctgccggtgtgtaggaaaagtgcagtagctaaccactctgtaaacactatgggcacaactggtaacctaatccattgacctggaagatgatgatggcccttggaaagggtcagcaaggagaataaagtgactggagttagcacatctgctatctttagcagggtgtgccaagttttgtaaacaaattattttgtaattgccttatgtttaatgttcttcaaagccgtagagcaaaagaacagattatttctgagaagtgaaaaacaattttcatttcactatgctgctctccattggtcacttgggtatgtccttggaaatagatgtcagagtcctgaatcaaac

SEQ ID NO: 567106 - DNA, 554 bp, Homo sapiens
caacaattgttatctttcacttttactgtcaattaatttttggcaaggataccaagaacacaatggggagacaagggtctctgcaataaatgttgttaggaragctgaatatcctcaggcagaagaatgaaattagacccttatctcacatcatatacaaaaaacaactgaaaatgggttacagatttaaacataagacccaaaactgtaaaactattagaaggaaacacaggagaaaagctaagttccgtaacattggtctgggaaaaatgtgctcccaaaagcataggcaaaaaaagtgaaaataaacaaatgtattacatcaagccaaaaagcttctccacagcggagaaaaatagagtgaagaaacaacctacagaatgggagaaaatatttccaaatcatacatctgataaggagttaatgtccaaaatacataaagagctcaaacaattcaatagcaagaaaacaaataacctgattagaatatggacaaaggacctcaacagacatttctcaaaagaagacatacaaatacaaaacaggtgtatgaa

SEQ ID NO: 567107 - DNA, 554 bp, Homo sapiens
caacaattgttatctttcacttttactgtcaattaatttttggcaaggataccaagaacacaatggggagacaagggtctctgcaataaatgttgttaggaaagctgaatatcctcaggcagaagaatgaaattagacccttatctcacatcatatacaaaaaacaactgaaaatgggttacagatttaaacataagacccaaaactgtaaaactattagaaggaaacacaggagaaaagctaagttccgtaacattggtctgggaaaaatgtgctcccaaaagcataggcaaaaaaagtgaaaataaacaaatgtattacatcaagccaaaaagcttctccacagyggagaaaaatagagtgaagaaacaacctacagaatgggagaaaatatttccaaatcatacatctgataaggagttaatgtccaaaatacataaagagctcaaacaattcaatagcaagaaaacaaataacctgattagaatatggacaaaggacctcaacagacatttctcaaaagaagacatacaaatacaaaacaggtgtatgaa

SEQ ID NO: 567108 - DNA, 554 bp, Homo sapiens
caacaattgttatctttcacttttactgtcaattaatttttggcaaggataccaagaacacaatggggagacaagggtctctgcaataaatgttgttaggaaagctgaatatcctcaggcagaagaatgaaattagacccttatctcacatcatatacaaaaaacaactgaaaatgggttacagatttaaacataagacccaaaactgtaaaactattagaaggaaacacaggagaaaagctaagttccgtaacattggtctgggaaaaatgtgctcccaaaagcataggcaaaaaaagtgaaaataaacaaatgtattacatcaagccaaaaagcttctccacagcggagaaaaatagagtgaagaaacaacctacagaatgggagaaaatatttccaaatcatacatctgataaggagttaatgtccaaaatayataaagagctcaaacaattcaatagcaagaaaacaaataacctgattagaatatggacaaaggacctcaacagacatttctcaaaagaagacatacaaatacaaaacaggtgtatgaa

SEQ ID NO: 567109 - DNA, 545 bp, Homo sapiens
ctttttcttgcctgatctgcaggtgacattttgtgaccagaagagaaaggccaagagaaacgaacatcagcttctctaacctatttatagccaggatgatagaatcacaagattttcaaggtttayaggtgatgggctgctctcaaaaggagctttgttgtgaaaacgtaccaaaagaaaatggatgagtgattctccaatacgttgcttttcaatcctatgacatcctcacctctgccctatgggtagattctttgatgtctgaaaagtttctgtacataaagaggaacattcattactattgtttaatgccccatttgttaactgtgtgactttattaaaaaattatttttgaaggagtaaaccatcactattttaagtattcacatagtactttcaaaactaataaatatagacttggaataaaacaaattagatttactaaaacttacttgttggtcacaaacatttttaatagtatgccccaaatgcatggaatcaacctatatgcccactgctgacagactagataaagaaaatgtggt

SEQ ID NO: 567110 - DNA, 545 bp, Homo sapiens
ctttttcttgcctgatctgcaggtgacattttgtgaccagaagagaaaggccaagagaaacgaacatcagcttctctaacctatttatagccaggatgatagaatcacaagattttcaaggtttataggtgatgggctgctctcaaaaggagctttgttgtgaaaacgtaccaaaagaaaatggatgagtgattctccartacgttgcttttcaatcctatgacatcctcacctctgccctatgggtagattctttgatgtctgaaaagtttctgtacataaagaggaacattcattactattgtttaatgccccatttgttaactgtgtgactttattaaaaaattatttttgaaggagtaaaccatcactattttaagtattcacatagtactttcaaaactaataaatatagacttggaataaaacaaattagatttactaaaacttacttgttggtcacaaacatttttaatagtatgccccaaatgcatggaatcaacctatatgcccactgctgacagactagataaagaaaatgtggt

SEQ ID NO: 567111 - DNA, 589 bp, Homo sapiens
atactttcattttaaaccagttataaaggtactgaaatcaagataaattttatcatatgtacttatgcttcttcctttctaggatttttatgtattatcaaggtttctcaaggctgaagtagttttactagtgacaaaagcaaaagaataccaccttagaccagctgaaatgacaagtcgtagaattttgaaactgataaatcttggttggccaagaatcctgattgtgtaaacctttgtgatttaaacccaagccttggggcattagactgagctttcttttataataaagttttatgcattacatcaagggacttttatgtctctgcctttcagataggttttaaacttttgaaacatgttgtattcccagaaatatgttatttatccttggcatggctgacatttcttaacacataggtataaaatatctgcatgtakgtattaattagaagcttatgtaatcagtaaaaattaaatatatcccacaatgttcaccttttttattaaagctaaattttgtatacttccattaactttttatttgaatatctgaatgacctcatagcttttatagtcataattattc

SEQ ID NO: 567112 - DNA, 580 bp, Homo sapiens
aaacagggtctggagtgaacctccagcaaactccagcagacctgcagcagaggggcctgactgctagaaggaaaactaacaaacagacagaaatagcacgtccactcagagacctcatctgaaggtcatcaacatcaaagaccaaagacagataaatccacaaagatggggagaaaccagtgcaaaaatgctgaaaattccaaaaaaacacaacacctcttctcctccaaaggaccacaactcctcaccagcaagggaccaaactggatggagaatgagtttgacgaattgacagaagtaggcttcagtaggtaggtaataacaaactcctccaagctaaaggagcatgttctaacccaatgcaaggaagctaagaaccttgaaaaaaggttagatgaatttctaactagaataacaagtttacagaagaaaataaatgacctgatggagctgaagaacacagcatgagaacttcatgaagcatacacaagtatcaatgcycaaatcaatcaaccggaagaaaggatatcagagattgaagatcaactcaatgaaataaagagagaagacaagattagag

SEQ ID NO: 567113 - DNA, 621 bp, Homo sapiens
tactactcagccacaaaaaatgaacaaaataatgtgttttacagaaagttagaataatggtcttgagccccatccaagtgaagtaactaagaaaatggaaaaccaaatattgttatgttctcacttataagggggagctaagttaggaggatgcaaaggcataagaatgttataatgaactttggggactcggagaagggtgggaggaggtgaaggataaaagactgcacattgggtacagtgtacactgctcaggtaatgaatgcaccaaaatcccagaaatctatactaaaaaacttatccatgtaaccaataactacctgtaccccctaaaactattgaaataaaaataaaataaataaataaatattcacccaacacaggagtacccagattcataaagcaagttcatggagacttacaaagaaacttagactcccatacaataayagtggaagacttcaacactctacaaacagtattagacagatcatcaagtcagaaaattaacaaagatattcaggacctgaaatcaacattggaccaaatggatctgatagacctctgcagaactctctaacccaaaacaacagaacattcttctcatcactacatggcaca

SEQ ID NO: 567114 - DNA, 451 bp, Homo sapiens
actagaatctctgggacacagctaaggcagtgttaagagggaaatttatagcattaaatgctcacatcaaaaaattagaaagatctcaaattaacgatctaacatctcaactaaaagcattagagaaccatgagcaaaccagtcccaaagctagcagaagacaaatrataactaaaattagactttaactgaaggagactgagcaaaaccattcaaaagatcaataaatccaggaattagttcttttaaaaaaaattataatatagataggccactagctagacaaagaagaaaatctaaataaacacaatgaaaaatgacaaaggggatgttaccactgccccacagaaatacagctaaccagagactattatgaacacctctagtcacacaaaactagaaaaccgaaaaaaggatggataaattcctgggcacatacactctcccgaaa

SEQ ID NO: 567115 - DNA, 598 bp, Homo sapiens
ttgttgtgtatcaatggtttgtttctttttattactgaggagtattcatggtatgaatgtacttcagtttgtttaaccattcacctgttgaragacatctgggttgttttcagtttggcctattacaattacagctgctataaacatttgtatactggtttttgtgtgaacattgtcttcatttttttggaataaatgtccaggagcatggttgctgggttgtatgatacttgcatgttagttttttaagaaactgctgaattgctatccagtttaagaaactgctaaattgctatccagtgtagctgtgccattttccatgtctaccagcaatgtatgatccagtttctctacagccttgccagcatttggtggtgtcactgtgtttttattttagccattctggtaagtgtttagtgatagctcactgtagttttaatttgtattcgcctaatggctaatgatattgattatctttttatagatttttaaaataaatttatttgccatttgttatctttttcagtgaaatgcccctccttgggttttgcccatgttctaattggattgtttacatttttatggtttattttttaca

SEQ ID NO: 567116 - DNA, 592 bp, Homo sapiens
tgtttgagtgatgggtgcaccaaaatctcagaaatcatcactaaagaacttattcatgtatccaaacaccatctgttcccccmaaaaaacctattgaaattaaaaaaaaaaatcattcatcatgaccaagtggggtttatcccaaggattcatggatggttcaacatatgcaaatcaatcaatgtgatacatcctatcaacagaatgaaggacaaaaatcagatggtcatttcaattgatgctgaaaaagcatttgatagagtccaacatcccttcatgattaaaaaaaaaacctgaaaaaactaggtataaaaggaacatacctcaatataatgaaagccatatttgactgacccacaactggtatcatactgaatgggaaaaaaaatgaaaggctttcctctaagatctggaacacgagaaggatacccactttcatgactgttattccacatagtactggaagtcctagctagagcagtcagacaagtgaaagaaaagtcatttaaattggaaaggaagaagtcaaattacccttgtttgcagaagatataatcctgtatttggaaaaacctaaagactccaccaaaaa

SEQ ID NO: 567117 - DNA, 622 bp, Homo sapiens
atctgcccgcctcggcctcccaaagtgctgggattacagatatgagccaccgcaccaggccgcaaacctaacatatctttgacaagagwtctatttccagttttgctcaggagcatggaatcccatctgaggctcctacaggaacaccaccaacctctacacggcctgcagagccagcctggcctcaagagcaggacacaccagaaaacacctgttgaatggatgcaccagtgaacagagatggccacctcgccagagccacaatccatggggactggagaccaaatgacgctaatgactgcagggaaatgaacaactgagaggggctcccttttatcactggagggaagctgcttggttctagtgaatgggaaggaattgtaggcaaaaactcagggaggagacagacaaggagagcttggaaggggaaccttactaattaagacagagaaaacaaaattttgctaagcatcatttctgacttacaacacaaagtcatttttcctttcttccttgtccctcctcctttgctctccctattccttccctccttctacccagagacttccacgtaaacaggacacaaaagcatgacagagaccacaggtgcacacagaacctg

SEQ ID NO: 567118 - DNA, 561 bp, Homo sapiens
ctctttgcataggatgaatgcgcaagaggactgcgtgtaaagaaaggtaagaacattcagaggtagatcactcaaagtattggtgaaatgtacattagtcttaagtacattatttcagacacaaattagacagtaggaaaataaagtgtgacaagagagggcaagagactcaagaagcccaccttggaaagcttgacaggagaagccacccatttcttatttttatcctcttggagtagaattcctcacaggggcttcacattccttgggctcagacatgattaaacatcatatctttaaaaatgttttcctattccaagctgaggaatatataaataacccctttccagctaccactccttggcccggaattcaagccgagtgtcttctgggcttcagtctgctttgacgaggctccatataagaacracagcaaaaggccaccatgctgagcagcctgggaatctgcatgctgaatgcacaggaacgcagcagtgagcagtaatggaggccttgtttttttgtgccttgaaatgttttaaaaaggaacaatgaagttgt

SEQ ID NO: 567119 - DNA, 545 bp, Homo sapiens
ttcaatttcatagcaaatctccctgagtgttccaaaacccacaacactacacttcacgtaggctgacataatttgcttaagcactgttggatctccagtatcttatacagtcaaattgtaggtattcagctgatttttattagaagattaaagtattatatcatctcatttaaacttcaaagccataccaataaatcattgtcatcaccattttatagatgaaacaatagaaatcaagagggtaagggtaggtaatttcttcagaaaaatasaattttgaggaaaatacaggaatcgaggagattcagcatgagtctttctggctccacaccttgcttttaactactgcattacgcctcctattacaatacttagaacattttgttctttccttttttgtactggagttacatgacagcatgggagcaggggtcatgtctttataactctaatctatgagactttgtaccttataagcattcataaatatttgctaaagtagtattggaattaatgaatcaaactatactaatgcattcaattac

SEQ ID NO: 567120 - DNA, 659 bp, Homo sapiens
tgctctctctcactactcttattcaacatagaactggaaatctgggacagagcatcaggcaaaagaaagaaataaaaggcatccaagtaggaaaaaaagaggaagtcaaattatctctctttgctgatgattctatagctagaaarccctaaagactctgccaaaagactcctagactaataaacaacttcagcaaagtctcagaatacaaaatcagcatacgaaaatcagtagcatttctatacatcaataacactcaagctgataaacaaattaagaattcaatccaatttacaatagccagacacacaaaaataaaatacttaataatatatctaaccaagaaggtaaaaaatctgtacaaaaaaaatgacaaaacacttctgaaagaaatcatagacaacacaaccaaatgaaaaaaaaaattccatgctcatggattgaaagaatcagtattatttaaatgtccatagtgcccaaagtaatctacagattcaatgctattcctatcaaattaccaatgccatttatcacagaattagaaaaaccattctagaattcatatggaacaacaacaacaacaacaacaacaaaaagctggaatagccaaagaaatcctaagcaaaaagagtaaagccagaggcatcacattacctgac

SEQ ID NO: 567121 - DNA, 561 bp, Homo sapiens
tgacagaggatgtcatacagatgcctaattaaggccattagcataatgaagccatgaaatcttatgaattaaaagcattctgaacattcaaatcattctaacaaaaaataaacaaaatcatacaacctgtgactgtgtcaattatatatttgtgtatgcagatatatatatatatagtcaaactacaattctaaatctattgcaatgaacaaaayttaaaagatgtatgaaacatttgccaggagccaagaactatgaaatgcattggggctgcaataagaaacaggacagatatagaccctgctctcaatgaccttaaaagtaacaaggaaaaagaaaagcagatgacaatgaaaaacggtacggaaagaagacacccaactgatgcagggcagacacgcccctaaattggggtttaggctgtcagggttcttgactctgcccaggaaagaattaaaagtgagctggtggtggtagacagcaatgtttattgaaccagagctgctccttgcagaccagggctaactcctaggcagtgaacccagagccagaagcatgtgg

SEQ ID NO: 567122 - DNA, 544 bp, Homo sapiens
gtaaagaagaatacattttatgaactcacaaagtcaactctttgttgactgttgacaatctgaccctttggagtaaaattatgcttatccctgacttagataattatatgttggagtcatgaacaaaattaaactagtgactaattttaaattatggttacatttaagggaaaagtttagtttgataaagaccaatgatatatggtaaatgttatatttaaaatatttgtcatttaaaaatgtttgaattaattcacttttagaacttaaatccatataamccttatttaaatgttatttacataaatatccactattttgttatttcaggttgctagtaaaaatatctcatcactctgtttaaatgcattaaataaattaatagtataattatttataatgtaaaatgttaggatattacaaataaaatattcataagtaaggaatatatgaatttcatatattttgaaactgtatttctcagcacctttgtcttaacaacaaacctcattgagtccataaggtaaacaaactttatttcaag

SEQ ID NO: 567123 - DNA, 577 bp, Homo sapiens
aatgttttagattccacatataagtgatatcatgcaatatttgtctttctataactagtttatttcgcttagcataatgttttccagatttatccaacttgtcacaaatggcaggatgttcttctttttaaagactgaataatattcagacacacatatttccttatccatcaacagatgctttgactgactcagtatcttggctattgtgaataacgctgcagtggatatcaagttcaaaacattgattttatttcccgcagatatatgctcagaagtagatcttgggtcatacggtagtgctatttttaattttttgaggatccttcgtattattttccaaaatggcaagaataatttacattttcactcatagcctacaagggttcccttttctccacatccttgcaaacacttgttatcttttttctttttgctaatagctttcctaacatatataatataatataatataataaaaatatacatattttgataaatatatatatatatatatatatatatatwtttttttttttttttgagatagagtctcactctgttgcccaggctggag

SEQ ID NO: 567124 - DNA, 590 bp, Homo sapiens
acttctttgttgttgctgttgttgttgtttgagacagtctcactctgtcatccaggctggagtgcagtggtgygatcttggctcactacaacctctgcctcccgggttcaagcaattctcttgcctcaacctcctgagtagctaggattaccagtgtgagccaccacacctggctaatttttctatttttgtagagagggggtttcacctgttggccagggctggtctcgaactcctgacctcaagtgatctacccacctcggcttcccaaagtgctaggattacaggcatgagccactgctcccagccaaccaagtaggatttctgatctactatcaccacatccaacttcaacccaagtagtgctgggtattttacaggtggcctctgtttgaacaaagtgtttcattgctttaagaaaaatttgaaaatcattaattcagtctggaattcagaaagataaattcactgcaagtaacaatgcagcagatttgagagtggaacctccttcgcctgactactggtccaggttttatttctctacctcatggtagctcaaatgaattcagccaacaaatatggaagaaact

SEQ ID NO: 567125 - DNA, 569 bp, Homo sapiens
gaaaattttttcagaatgaagctgtatgaaagcttaaaagtaaactgtaaaaaagaaaagatgaggattggatggctgtcttaaatacagattgccatggagataatggctatttcacaggctcagagatagaactcttgagcagcagatttttcccctccagtttctgtggcaatgtgattggyagagatgcaggtgcattatcagcttgccgatactgccctggagcgactgatggagataattacgatttctagtaggaaaatttccctagagatgatttgttataaaaagataaaatgtatattaatgtccttccacaccatgaccttggttttgaattttagatttccaagtatttcactggaaaactccagtcttacttgggtttgattctttgacctcaggtctcaaggttttactttttactttggtttattgagtctttttaggtttgtaatggttatgttttctctttttaggtgtggtgaaaacctgcagaagactgacagtaatgaaagtggcttgagaaaaagtgaggatatttgcagattgaaaaaagaaaaaca

SEQ ID NO: 567126 - DNA, 671 bp, Homo sapiens
accactgacctcaaagaaatacaactaaccataagagaatattatgaatacctctatgcacacaaaccataaaatctagaataaattgataaattcctggacacattcaccctcccaagattgagccaggaaaaaaattgaatccctgaacagaccaataacaagctgcaaaattgaatcaataataaatattctacaaccaaaaaaaaaatccaggaccagacggattcatagacaaattctaccaggtgtacaaagaagagctggtataattcctactgaaattattccaaaaaatttgaagaggaggaacacctccttaacttattccatgaggccagcatcatatcctgataccaaaacctggcagacacacacacacacacacacacacacacacacacacacasagagagagagagagagagagagagaaaacttcaggccaatatccttgatgaacatccaggcaaaaatcctcaataaaacactggcaaactgaatctggcagcacatcaaaaggcttctgcgccatgatcaagtaggttttatccctgggatgcaagttcggttctacatatgcaaatcaataaatgtgattcatctcataaacaaaactaaaaccaaaaccacatgattatctcaatagatgcagaaaaggcttttgataa

SEQ ID NO: 567127 - DNA, 526 bp, Homo sapiens
attaaaaataaaaattctaaaattttaaaatgtgacacctgaaataataaataaactgtatgagtttaatgacataaagaaggtagcagagaaaagaaccaggaatggtcgggcgtggtggctcaagcctataatcccagcacttgaggagggcagagcatttgaggtcaggaattcaagaccagcttgacratgaacatggtgaaaccccatctctactaaaaatacaaaaattagccaggcatggtggcgggcacctgtaatcccaactacttgggaggctgagacaggataattgcttgaacttgggaggcggaggttgcagtgagccaagattgtgccactacactccagcctctgctgagtgaggctccactgaaaaaaaaaaaaaaaaaaaaaaaaaaaaggaaatgtgaagataaatcaatagaattatccaatctgaataagaggaaaaaagtaaaataataacaaatgataagagactcaaagacctgtgagagaataggaagaggtctaatttgta

SEQ ID NO: 567128 - DNA, 520 bp, Homo sapiens
tataagactacccactgcctcttctcaagtatatctgaagtatggctggttggagtrtatcaggaccctcagaggagaaaagcatataaaaccagcacacctgaacccaggtaaatggaaagaccctcattattatctttaccaaatattgacactttgcattaatttagatttaacagactactaagggctttgtctccccacctaaatctcatcttgaatttaatccccataatcctcataatctccacatgtcaagggagagaccaggtggagataattgaatcatgggggtggtatcccctatgcagttctcataacaatgagtgagttctcacgagatctcatggttttataaggggctcttccccttttactcgacgcttttccttgctggaccctgtgaagaaggtgctttgcttcctctttgccttcctccatgattgtaggtttcctgaggcttcccaagcatgctgaactgtgagtcaattaaatctttttccttcataaattgcccatt

SEQ ID NO: 567129 - DNA, 520 bp, Homo sapiens
tataagactacccactgcctcttctcaagtatatctgaagtatggctggttggagtatatcaggaccctcagaggagaaaagcatataaaaccagcacacctgaacccaggtaaatggaaagaccctcattattatctttaccaaatattgacactttgcattaatttagatttaacagactactaagggcwttgtctccccacctaaatctcatcttgaatttaatccccataatcctcataatctccacatgtcaagggagagaccaggtggagataattgaatcatgggggtggtatcccctatgcagttctcataacaatgagtgagttctcacgagatctcatggttttataaggggctcttccccttttactcgacgcttttccttgctggaccctgtgaagaaggtgctttgcttcctctttgccttcctccatgattgtaggtttcctgaggcttcccaagcatgctgaactgtgagtcaattaaatctttttccttcataaattgcccatt

SEQ ID NO: 567130 - DNA, 564 bp, Homo sapiens
actttaaatcatctgtagattatttataatatctaatacaatgtaaatgctatgtaaatagttgttatattgtttttactttgtattatttttattactatattgttattttttctgaatccatggttggttgaatccacaaatgcagaacccatgcatacagaggatcaagtgtaatatcatgttggtgcaaatatgaagcaaccagaacacttatacttttctggtagcagtgtaaataggtacaactggcagtgcctagtaaaattaaatatgcacacacaacattacccagcaattctactcattttatatcctagagaaactctttcacatatgaccaagagacaaagaatactcagagcaatatttttgtaataataaaaaactcagaaacaaaccatctgatcatcaccatcaaaactgatacaggttgagtattctttatctgaaatgtttggaaccagaagtgttttaratttcagattcttttcagattttggaatatttgcatatacataacgagatagcttggaaattagatccaaatttgaacacaaaatt

SEQ ID NO: 567131 - DNA, 553 bp, Homo sapiens
ggctgaggtgagaggatcccttgagcccaggaggtcgggctgcagtgagctctgatcatgtcactgcagtccagcctgagagaaagagtgaaaccctgtctagaatgaatgaataaataaataaatgaataagcttcctcattgtttgttcaggcacttcatgacctcatattaataagtttattscctctctgggcaacatgtcagcctcagtttctttctgttaaaacactgggcctctccattttttaaattcaaatccctgggaatacgtacttggttggactagctcaccccatctaggcagagctcctcaccccaagactcccacaggccatgggcagcccatgagttggctgcttttgagtcaggttcaatcaagtgcagctggaggaagaatgagtctcacggtgcgaaacactgtggctaatggtgcctccatcagtaccatttccttagaaaggcctgtggacacagaaggcactcccagagacagtcctcctcccaagcaccatcagggcaagataccaccatcccctgaacagcacagcat

SEQ ID NO: 567132 - DNA, 553 bp, Homo sapiens
ggctgaggtgagaggatcccttgagcccaggaggtcgggctgcagtgagctctgatcatgtcactgcagtccagcctgagagaaagagtgaaaccctgtctagaatgaatgaataaataaataaatgaataagcttcctcattgtttgttcaggcacttcatgacctcatattaataagtttattccctctctgggcaacatgtcagcctcagtttctttctgttaaaacactgggcctctccattttttaaattcaaatccctgggaatacgtacttggttggacyagctcaccccatctaggcagagctcctcaccccaagactcccacaggccatgggcagcccatgagttggctgcttttgagtcaggttcaatcaagtgcagctggaggaagaatgagtctcacggtgcgaaacactgtggctaatggtgcctccatcagtaccatttccttagaaaggcctgtggacacagaaggcactcccagagacagtcctcctcccaagcaccatcagggcaagataccaccatcccctgaacagcacagcat

SEQ ID NO: 567133 - DNA, 501 bp, Homo sapiens
cttggtttatactcctatgtaagctgcccacccattaggcctcctgcattttaattactacacatcacacgcttgtaagaaggccatactcacaccctacccccaagaggccttccctgcccatcccagctttgtcagtccctggaccccctgctcrcttgctgactatccactgagttgataccgtgctttgttagtggttttccttactctgctttctttctaactggtttctaaactgctttagggcaaggatcttatctaggtgtctgaccaattctacacaggaggttttccatgtatatttattgttcatggacttgctaagcataaccaacctgggttaccagaggaggaaacacaatttgagggaatatgattgggaagacaagccatgaaaaaaatccagcatttaatgttaacacccagctactatttttctactttgctccgtaattcttctcaaaaaagggttttttttgttttctttttttttttttt

SEQ ID NO: 567134 - DNA, 581 bp, Homo sapiens
gaataggccttttgctttaagtgaacagaaactccttgagaaaatttcgttatattgctattagcaccttcctttcaaaatatagagtcatgtagtatctatattcgttgaatcttttcatatatatatgtatatatatatatatatatataaagkctattagactacttataaaatagaagctttcatgcatcttttcttaaagcaatttgtcggggtagaatgaatcaaatttggtatttttacccttggagatgagacatttattgacatgtggtatgtagatactgttaaagccactcaggtgtgacaggcagtcctctccatgcagtgtgcaaataaaagatgggattagacatgaagatttgactagagattttgggccctaaagttttgcatattttaaactttttattagataactgatatgttttcctcaattgcaacatttcgaataggagcaaaatctactgatttagggataacacattcttaggaatttaaatttcagtttgttctggggagattttctttctactttatttccttcttaactctcttcatatgatttgattgtttac

SEQ ID NO: 567135 - DNA, 581 bp, Homo sapiens
gaataggccttttgctttaagtgaacagaaactccttgagaaaatttcgttatattgctattagcaccttcctttcaaaatatagagtcatgtagtatctatattcgttgaatcttttcatatatatatgtatatatatatatatatatataaagtctattagactacttataaaatagaagctttcatgcatcttttcttaaagcaatttgtcggggtagaatgaatcaaatttggtatttttacccttggagatgaracatttattgacatgtggtatgtagatactgttaaagccactcaggtgtgacaggcagtcctctccatgcagtgtgcaaataaaagatgggattagacatgaagatttgactagagattttgggccctaaagttttgcatattttaaactttttattagataactgatatgttttcctcaattgcaacatttcgaataggagcaaaatctactgatttagggataacacattcttaggaatttaaatttcagtttgttctggggagattttctttctactttatttccttcttaactctcttcatatgatttgattgtttac

SEQ ID NO: 567136 - DNA, 581 bp, Homo sapiens
gaataggccttttgctttaagtgaacagaaactccttgagaaaatttcgttatattgctattagcaccttcctttcaaaatatagagtcatgtagtatctatattcgttgaatcttttcatatatatatgtatatatatatatatatatataaagtctattagactacttataaaatagaagctttcatgcatcttttcttaaagcaatttgtcggggtagaatgaatcaaatttggtatttttacccttggagatgagacatttattgacatgtggtatgtagatactgttaaagccactcaggtgtgacaggcagkcctctccatgcagtgtgcaaataaaagatgggattagacatgaagatttgactagagattttgggccctaaagttttgcatattttaaactttttattagataactgatatgttttcctcaattgcaacatttcgaataggagcaaaatctactgatttagggataacacattcttaggaatttaaatttcagtttgttctggggagattttctttctactttatttccttcttaactctcttcatatgatttgattgtttac

SEQ ID NO: 567137 - DNA, 477 bp, Homo sapiens
atgtatgtatgtatgtatgtatgtatgtatgtatstatctatctatctatctatctatctatctatctaattatagctcattatgtaaaccaatatgtgacactgctggaacatgtttccacttagaaggatgctgagccattttattgatttctatatagatacctttaatctcacatgaggtagagatctgacagctgccctaactcagtgattttattgtctattctttctatattttatgtaaaaccaagttttcaaaaagttatacattatttctttcagttttcttgattcattacaattgattgaattaccttttgctacagtcattatgatcaaatgttatgtatgctttgcaatgttacgattttacttaaaaaagacattaacagccaatcactattaaattggttttaatgaatttaaaacttcagtaggtattttagaactcacagatagaacacatgtaaacca

SEQ ID NO: 567138 - DNA, 537 bp, Homo sapiens
ctcttttcttgataaattatccagtcttggttatttcttcattgcagcatgagaataaacatatacaagcagttaacctggattcaacagacacttctcattaatgcagatcatcagaccccagcatgctgaaagaagggcaaatgccaaatgggcctttttaattgatgggcatgactaagtgcatctttaagtaattgctttttgtttactttggtattccaggtgcagtctgttttttacccagtggtttctcttagctccttgtttttaatctgcagcaaatatattctttgctgattgcttttgttaaatatccaaattctcacacatttaacttgttaggaacttcacttttatgtctctgttctacyccatggcaaagtcgattcccatgtgctaacattttaaatctgtgaaatattaaatctatcagaattttggagatttaatgtttacttaccgatgatattttagttgtattatgtaagtatatccatcaatattattgtgattgtatatactacgtaggtgtca

SEQ ID NO: 567139 - DNA, 551 bp, Homo sapiens
tttgcatcaacccttttactgagaataactgaacagactgggaataacaaacaaaatatttttatttaaaaatttgcttttaatccttggagagctaataagcaataagtcataaggaattatgagaggctgggcgcagtggctcatgcctgtaatcccagcactttgggaggccaaagagggtggatctcttcagtccaggagttcaagatcagcctggccaacatggcgaaacccgtcaatactaaaaatacaaaaattagccaggtatggtggtgcacgcctgtaatcccagctactcagcaggcttaggcacgagaatcgcttgagtccaggaggcagaggttgcagtgagccaagatcgtgccactgcactccagcctggacaacagaagaagactctatcaaaaaaaaaaaaaaaaaaaattamgaggtcaagatctaggaaatccaaataattgggctggcattgaagccactttttctccatggttgtccgctgatttcagaagctaagcaacccttttgatagcttaatgggatgaagagga

SEQ ID NO: 567140 - DNA, 516 bp, Homo sapiens
gaaatccaaataattgggctggcattgaagccactttttctccatggttgtccrctgatttcagaagctaagcaacccttttgatagcttaatgggatgaagaggacaaacattacagtctcaggcatgcaaatgagtgaaagccctggaaactcaccctcaggtaaaccagaagtatacaggtcttgaaagggataaaagtcatttaatttagactaaagtggcccagattgttagtgccctagctgcctgctgaactaaacacaaacattgtctggaaaaagataaaattatcataggcctcatattatttgtataatttttatatacaatatcttgtttagtcccttcatgctattataacagattaccatagattaggtggcttataaacaacaagggtttatttcttgcaattttggaggctgtgaagtccaagatcaagatgctcacagatttggtgtctggtcaacacccaattcctgcgtcacagatggccactaggcagctctctgg

SEQ ID NO: 567141 - DNA, 634 bp, Homo sapiens
actctactatgatgctcttttcttaatgcacttatttcaaaaggtcctctttataattcattgcttttagagcctaataattctaattaaacatgattcttgacagattcatgaaatcattcatacatacacaaatttaccagacacttatgatakcccactgatttgaggattgagaggttcatgctttgttctcaagagattttgttgtcaaaatctctatacaaggagttcaaaattcatcaagccaataatcctaggtctaggactgagaagaagaaagaggggccaatatagtctcacagtaagaagaaaacaaataaatatacagtcataaaataatgtagcaagtgctatgcagcaagaagtccagaggtaggcagctcttgagaccatttttccctcctaggtctctgagcctgtgatgagaagggctgccttgaagatgtctgacatgccctggagacattttttccattgtcttgataattaacatttggctcctccttattatgcaaatttatgcagcaggcttgaatttctccttagaaaatgggttttttatcttttatatcatatcatcaggctgcaaattttccaaacttttctgctttgcttcccttttaaacgtaag

SEQ ID NO: 567142 - DNA, 597 bp, Homo sapiens
cttaacaataaaatcaaaatggaaattttaaaattatttgaattgaataataataatgatatgagttatcaaaacctctgggacataccaaaagcagtgctaagaggaaaatttatattgctaaatgcctacatcaaacagtctgaaagaggaaaaattgacaacccaatgtcacacctcaggaactagagaaacaaaaacaaactaaacccaaagctagcagaagaaactaaataataaagataagaatataactaaatgaaattcaacaaaaaaatacaaaagataaagttggttgtttgaaaagataaaacaaaattaatggaccactagctagattatccaagaaaagacagaagatccaaataagctctgttagaaataaaactggagacagyaccacaaacaccacagaaatataaacaatcatttgaggcgactgtgaacatctttatacatacaaactaggaaacctagagaaaatggataaattcctagaaacatacaatcctcctagattaaattgagaagaaatagaaaccctgctcaataatgagcagcaagattgaatcactaattaaaaattgccaacaaaaa

SEQ ID NO: 567143 - DNA, 611 bp, Homo sapiens
ggtgacaagcaaagcaatgggcatcagggaatgaacccaagagtaaacaaattaatcacaggtccaatagccaaaggacaaaaacatatgtagtctttaccaacctttgatktagatactactattattcccactttagaggagagaaaactaaaacaacgtcatgtttaaaaaaaatggtaataaaaataaagaacaggttgtttagggggccgaaggaaaaggagaggtgtggagagaacattaattcttcttttagattgattaacttgttaaaatcaacagataccccttcagtaaataacaatgaagtgaaaacgatcaagcagctcccattaaaaaaaaattcctaattcttaatttttccttgatgttcttctatcattcgtaatcaaacttcttgaaagatttttataaattactcatctttaattcttgtattttcactaacattatacatggaaacattttataattcttccactccattggaacaatactggacaaggaccccagatggttgttcatcatgacacgcagtgagggcttttcatgtttcattccatcttatctgacccttctctgttttttcttggcaaatttctgcctgt

SEQ ID NO: 567144 - DNA, 571 bp, Homo sapiens
tcaaaaaaggtataataaaaatagaactaataaaatacataaggccaactacatatttggggagtggcagaaggaaatgaagttgtctttagtggatctgctgcgctctgtcaagaactgccagtaccacacaggaccctccaggtaggacagacaatgtgggcttgggcacaagcgacaaagtgagtggggtcatgggcagtcacaactcctcatcctacacatctgctctcccactakgaagtgagttatttaggataaaaattagaacacagagtaggaagagtaggaatgctataagctctagagttgaaaacatctgtttggaagctggggtttaaaaccctgttcccatatatactatcttgtgaccttggaccaattacttaatctctgtggtttcagtttcttcatctacataacgggtataacaacagtaccttatttcacatggttgcaggaagatatgttaactcatgtaaagcccttagaacagtgtgtgacaaagactaagtgccatgaccaccataggcattgttgaaaatgtagttctcattgttagaacaggctg

SEQ ID NO: 567145 - DNA, 574 bp, Homo sapiens
ctaattttgtctaaaaaactactgttttagttttaatacgcagatcttcaatacaactggaatttagtgttttttgtttcgcttttctgtttttgttttcgcctgttcctgcagagggagtttcactcttgttgcccaggctggagtgcaatggtacgatctcagctcactgcaacctccaccttccgggttcaagcgattctcctgcctcagcctcccaagtagctgggattacaggcatgcaccaccatgcccagctaattttgtgttataagtagagacagggtttcaccatgttggccaggctggtcttgaacccttgacctcaggtgatstgcccacctcggcatcccaaagtgctgggattacaggcgtgagccatcatgcccagccagaacttagttttaagagcacataggactgtatgcatattatttcatccgattcacaaaaacctgtgagagaaaaaataattttttggccattttaaagataactaaaaagacaaagacagattatatcataaatttgttaatgattacactaaagttcaaaaagcatcttattacagttc

SEQ ID NO: 567146 - DNA, 594 bp, Homo sapiens
tttgaattgtgatccttataatccccctgtgtgaaggtggagacgaggtgcacgtgactatatcatgggggcacattccccatgctgtgctcatgatattgagtactcataatatctgatggtgtgttattagtagttgtggtgagtatcctcctgtgtgcattttccttyctgacaccctgtgaaaaaagtgccttgcttcccctttgccttccaccatgattgtaagtttcctgaggcctctccagccatgctggactgtaagtcagttaaacctctttcctttataaagcacccagtctcaggcagttttttataacaacatgaaaatggactaatacatacatctacatacacatgtgcatacatgaacatcaaaaaggtacagagaacaggtggcaatctgttaaccctagtgacctaagcatgcagcatcagagttaggagtggagaatgagaaattcttaatttcttaaaacttctacattactggaattattaaggtggacattttcttatatttttccaaacatctatatgttatgctgtttgatagaaaaaggtgtggatattgttaatgtttttagtttttat

SEQ ID NO: 567147 - DNA, 535 bp, Homo sapiens
ataggttttgagctcctttcccaccactttaatggaaagttttattgtctttacaatgcacactytcataaattttgcataaatttattattcacatcttaacataggtaactccttagtgtttgatcactgagcaaattatatgcagcaaaacaatcctatattttggtgaactcatagcttagaaaatactaaagactcattgtaaactgagggcagcattaagcaaattatatttacctttgtgactgcaaaacttaatgattcaatgcttttcccatgaaatttatcttccaatactgatagttttttaaacaaaaaatatgaattaaatatcaattaaaattttatcattgttttcagaaactgtgacttcactagttatgaacagacttgaaatgtatagtttttaagtttggaaattctttgtagtctcatttacttttccaggaaggaagtgagatattttttgccactgttgcctggtttttgtttgttttttgatcataaacaaaacttaatggagcctcaaatc

SEQ ID NO: 567148 - DNA, 542 bp, Homo sapiens
gtggaaaaataagtagcatttatatatgccaacagtgaaatgaaaaaaagaaatcaagaaagcaatcccatttacaatagctacaaagaatataaaatatctaagaattaatttaatcaaactaaatgaaagatctatacaagtaaatctgtataaaacactgatgaaagaaattgaaggggacacacaagaaagaagaaagctattccatgttcatggattagaaaaattaatattcttaaaatagcaactctacacaaggaaatttatagattcaatgcaattcctrtcaaaataccaatgacattcttcacagaaatagaaaaaaagtcctaaaattcttatgaaaccacaaaatgacccagaatagtcaaaacatcctgcacataaagctcaaaagtggaggaatcacattatctgacttcaaattatactacagaaccagcatggcactggtataaaaacagactcatagaccaatggaacagaatacagaacatagatttgaatccatgcatttacagccaactcttttgattaaa

SEQ ID NO: 567149 - DNA, 362 bp, Homo sapiens
ggcagtctgaatatttttggtttttctctaaaatttttctataatatttggattttctaggtctttatttcaagtgcatttataaaaagactcttatttgtattcttgacttcattttcaggcctcatttacccatcaagatgtaaacttcttgtagacatagactttgcatacccagaaaaacaaccttgggccttggcgatgttgactaatctacatttattttacctttctccatttctctctaattgaagtagrtgaaggaaggttgattcacttaagatgattaaactgagcacttcatcctgatctaaattttcttaaggacgctgtttataaaggtacagatttttattttccta

SEQ ID NO: 567150 - DNA, 447 bp, Homo sapiens
gcccaggctggggtgcaatggcgcgatctcggcttacggcaacctctgcctcctgggtcgaagcgattctcctgcctcagcctcccgagtagctgggactacaggcacctgccaccatggtggcatttttagtagaggcagggtttcaccatgytggtaggctggtctcaaactcctgacctcaagtcatccatccacctcggcctcccgaagtgctgggattacaggcatgagccactgtgcccagcccaagcctggctaattttctgttaaaatttattttttgtagagccagagtctccctatggtgcccaggctggtcctgaactcctgagctcaagtgatcctcccacttcaacctttcaaagtgctgggattataagcctgagccctgcatcccactaagcccaatttctgttcaacagatgtctctttgggtgtagtaaa

SEQ ID NO: 567151 - DNA, 566 bp, Homo sapiens
attatattatgttaaatatgtgaaggggaaaaagatgataaatgtattgattcccactgaacagtacacttaaaaatggcaaagacagtaaattatatatgtatattttacctcaatttaaaaaataaattcgccaggccccgtggctcacgcctgtaatcatagcactatgggaggcctaggtgggtggatcacttgaagtcaggagttcgaggccagcctggccaacatggtgaagccctgtctttactaaaaatacaaaaattttcctggtatggtggcaggcacctgtaatcccagctacttaggaggttgaagcaggagaattgcttgagcctggtaggcagaggttgcagtgagcagagatcgtgccattgcactccagcctgggtgaaagagtgaggccctgtctcaataaaataaaatagaataaaaaataaatataaaacaaatagctttaaagcaagccattagggacagatatggaaatggaatccacagtgtgatggatggcgacccccaccaacccacacacacacacrcacacacacacacacacacacaca

SEQ ID NO: 567152 - DNA, 642 bp, Homo sapiens
gcagctataaaaaggatgcattcatgtcctttgcaggaacatggatgaagctggaaaccatcattctcagcaaactaacacaagaacagaaaaccagatgttctcgctcataagtggaagttgaacaatgagaagatatggacacagggaggggaacatcacacaccggggctgtcagggggtggggggctcgagtagggatagcattaggagaaatacctaatgtagattacgggttgatgggtgcagcaaaccaccatggcatgtgtatacctatataacaaacttgcacrttctacacatgaatcagaacttaaagtataatttaaaaattattcttaaagaaaaagaaaaatgacaatcgtatatgattcccatacttttcctaacttacagttctgtgaaatctaaacttcagaaacagttgtttataatggaacatactaaagatcatacatatgtctttaaaaaggtggttccaaggttctgataatttgcctaaaattataggagagtggatgtctgagctaggtgtaggcccctggcttcccagtgctgggcagctcctcctcttcactgtctacatgtcctaggatcagacgttctcatagcaccatgtggcaaggctggtgggtgaagtat

SEQ ID NO: 567153 - DNA, 642 bp, Homo sapiens
gcagctataaaaaggatgcattcatgtcctttgcaggaacatggatgaagctggaaaccatcattctcagcaaactaacacaagaacagaaaaccagatgttctcgctcataagtggaagttgaacaatgagaagatatggacacagggaggggaacatcacacaccggggctgtcagggggtggggggctcgagtagggatagcattaggagaaatacctaatgtagattacgggttgatgggtgcagcaaaccaccatggcatgtgtatacctatataacaaacttgcacgttctacacatgaatcagaacttaaagtataatttaaaaattattcttaaagaaaaagaaaaatgacaatcgtatatgattcccatacttttcctaacttacagttctgtgaaatctaaacttcagaaacagttgtttataatggaacatactaaagatcatacatatgtctttaaaaaggtggttccaaggttctgataatttgcctaarattataggagagtggatgtctgagctaggtgtaggcccctggcttcccagtgctgggcagctcctcctcttcactgtctacatgtcctaggatcagacgttctcatagcaccatgtggcaaggctggtgggtgaagtat

SEQ ID NO: 567154 - DNA, 597 bp, Homo sapiens
aatactaactgctagtattagaatctccttttcaaatgctctggccctttggcatcctgtaatttacaagcaaacaaagactaaatctggtagattcacaggagatataatgattctattattttatccctttcatgaatccatgttcttccatatgtgtgaagaacattgatatggtttggctgtgtccttaccccacccaaatctcatcttgaattgtaactcccccaattcccatgcgttgtgggaagaactcagtgagaggtgactgaattatggggttgggtctttcctgcactgttctggtgatagtgaatgagtctcaggagatctgatggttttaaaaacgggagtttgcctgcacaagttctctctttgcctgctgccattcatgtaagatgtgacttgctcctccttgccttccaccatgattgtgaggccttccaagccacatggaactttaagtccagttaaacctctttcttttgtaaattgcccactctcaggtatgtctttatcagcagcatgaaaacggactaatgcaaacattataaaagagmtagaagaaattaggttgtaattttgcctttaacttgg

SEQ ID NO: 567155 - DNA, 604 bp, Homo sapiens
gcatttttattttcatctttatgtatatcttcattttccacagtcaatacttcttatcattatttagtcataaaacatatacaagttgagcatccctaatccaaaaattcaaaatccaaaatgcttcaaaatccaaaactttttggattgtgcacatgatgccacaagtgaaaacttccacacctgacctcctgtgagaaacacagtcaaaactttgtttcatgtacaaaattattttaaataatatataaaattactttcaggctatgtataagaggtatacatgagacataatagaatgtcatgtttagatttgggtcccatccctgagatatattattatgtatatgaaaatatttcaaaatctgaaaaaatatgaaacacttctgatcccaagcatttcagataacagatatttrgcctgtatcaatgtcggtatgagccaggcactatgctaaacctttgcaatactttataaatattatctcattaaattcctaaaatagccctttggggtagatcttatattatcctcatagtgcagatgaggaaaataaggataagaaagggtaaaattgtctcagatgacacagtttaacagcgg

SEQ ID NO: 567156 - DNA, 677 bp, Homo sapiens
aagtcataggaaattgaatagaaagcagcatacagaaatgaaaagatggaaacatagaagagaacttaagagataagtaagagaaaaagagcaaatataatacgtatctaactggagttcctgaaggaaagtagagagaagggcagagtcaatgtatgaagatgatggctaagaaatttccagacacaatgaaaagcattcaagaatcccactgaatctctagcaaataatttttaaaacattttctatctgaagacattctactaaaagtgtagaatgccaaagatcgagataatttcttcattatagaaaaaagaaaagaaaaaagagatataaagtgcaacagttagatgtatcattgatttcttagcagcaacaataaaaatcaggagataataaaacaatatcttcaacttgctgaaagaaaagtactgctaatctcaaaattctatgtccagagacccaaccaatttgaaagttwattttatattcaaatgctcttaatgaacttttttgagatcaatcaggggaaagaaaggaagtacaaataaccaattttaggcatgaaagatcctatagagcagaagtcagtgtattagtctgttcttccattgctataaagaaatacctgagactggggtaatttataaagaaaagaggtttaattggctcacagt

SEQ ID NO: 567157 - DNA, 559 bp, Homo sapiens
tggtgtttattttataattacagcacatctgaagtggggytagcaacatttcaagtgcagaatgggtacatattgctgttggctgcaatattgcacaatgcaggtgtgaggtcttcttttcttgacaatttttgtctcatcttggtaccagggtaatgttggcctcataaatgagttggaaagcacttcctccttttatatttttctggaagaatgtttgcagaattggtcttatttcacctttaaatgaagtttgcctgttaatatctgggcctgaagttttctttgttgaaagatgtttatgaattcaatttatttaataaatatagaacttttccagccatccaattattttctattgagctttggtaggaattcaaggagtttttccattttatctatgtgtcaaatttattgacaaatagctgttcataatgttcccataatatccttttaatgtctgtagaatttacagtaatgtcctttcttttatttatgatattgatactttctctttttcttttctgatattggtaatttcttctcttcttttttgtaa

SEQ ID NO: 567158 - DNA, 587 bp, Homo sapiens
ttacataaggttggaattgcctgatagaatttattaaaatcttttggagatatttttatataaaatggaaagtgaagacacagagacagaatgggagaaacagagagagtggaagaaagaagaagggaaggaagggaggaaaggagggagaaagaaaggaaagaagaagatgaaataatggtataagcctgaagtcatgtagagccagtagagatggacatttttgaagatttaaaagtataacctgaagattaggtccccaaattagataaacatgagcaataaataaaggtgaaataacatgatccaaccaaggtgaaataacatacccaagatcatgcagagaaaaactatattttgatttccccagctttccctgccttattccaggttacattggaagctttgtcagtggactagccatgctttattattcctgccacaactccatcatagtactcaggatatagtagttaataaatgagcttatctggaaaaaaaacaacgaggcatawcaatcttggaatgggtcctgatgtgggggaatttctgatataggaaattgagctggatatttagtgattgta

SEQ ID NO: 567159 - DNA, 549 bp, Homo sapiens
ctgtaactgggtatttatacctttctctaggtttggaaatttttgtactattatttctttgaataagctttctacctttttctctttctctaatccctcctgatgactaatgatttacatttgttatttgatgctatcatatagatatcataagcatttttttttttttttttgagacggagtcatgctctgtcgcccaggctagagtggagtggtgcaatctcggctcactgcaagctctgcctcctgrgttcatgccattctcctgcctcagcctcagatatcataagcattattttttcctttgtattctttcttttttcttacctgactgtatatttttaaagagcctgtcttttaactcatttattctttcttctgctttatcacttctgctctgatatcctctaattcatttttaagtacatcaattgcattttttatctccagcatttctgtataatttttaaaattatttcaatctcattattaaatttcactgataaatttctgagttgcttttctgtgtgtgtgtgtgtttgtgtgtgt

SEQ ID NO: 567160 - DNA, 573 bp, Homo sapiens
aggctagatattcttattattatctaagaaattagtaagaaattaaagagcaatgttttgtcagattatgtaagaccttgaatgttagcatttatttatatgacagcaataaaattttcagcagaaacgtggcatagttattgttctgattttatttatttatttttatagccaaatcttattactgcaaagatgatctagaaaaagcttacragtttattgtgaacattcagttgataagaaattagcattaatgatgattacaagagtggatcctgatctgtttaaaaatacattatatgtattgagacatcattatatatgacagcaacatgcataagtattatttgtcaattaagaaaaataaaatttttaaaaagaatggaaatacaaagaaaatcatgtgtagaccacttaaagaatttatctatattttgattcctcttcatttaaccttacattttcaactaaataatatcctgcttattaatttacactacatattgcctggtataatttttttttataaatttaaaaattggaaaaatttcttccattatatttcaaggtttc

SEQ ID NO: 567161 - DNA, 562 bp, Homo sapiens
gccgtgaaggactgtgccatgatgaatggtgcacagatacagcacttttcccccagtcttcacaacccacagaccaggagattccctccagtgtctatgccaccagggctctgggtttcaagcacaaaactgggcagccatgtgggcagacactgagctaactgtaggagtttttctttataacccagtggcacctggaacacctgtgagacaaaactcttcactcccctgtaaagggactgaagccagggagccaattggtctggctcagcttgtcccaaccccatggagcccagcaagctaagatccactggcttgaaatttttgctgccagyacagcagtctgaggttgacctgggatgcttgagtttggtggggagaagggcatcgaccattgttgagacttgagtggtggttttaccttcacagtgtaaacaaagccacccacccaggagtttgaactgggtggagcccaccacagctcagcaaggctgctgtggcaagactgcctttctagattcctcctctctgggcagggcatttctgaaaagaaggcagcagc

SEQ ID NO: 567162 - DNA, 609 bp, Homo sapiens
ccactgcattaattaaaatatttaaccaaattcttatttataaygtaagttgtttctaatttttgaattaaaaataatgatatgaaggacatccttgtgcacaaatatcttaacatttttccaattatttccttagataaattcctagaaaaaggattgcaaagtaaaatggcatgaacttttaagacttttgatacaagttgctaagtagctctccagaaaagttacgacaatttacctttccaccatccaacactttaaaacagcacccattttcctccatctactcaacattaagcatttttatttttttctgaattttgctaaccgtatgcacagaaaatggtatgtcattaaattttcatttttaactgctaacaaagttgaatttgtttgaactttttcttatcgtttgttggtcatttgtatttcttgttttgtaaattgcttgatcttattctctgcccattattgtcacatactggagtatgcactttttcttattaatttataagaacacattctatattaaggatattattcatctggctgtcatctatatttcaaacattatattttgctgtttgccatttttatttcaagattttc

SEQ ID NO: 567163 - DNA, 598 bp, Homo sapiens
agttttgtggttttcttagcagaggttctcaacacaaatatttagtttatcttttaaaattattattttattataaattgacaagttgtagttgtatatattcawgatttatgggatacaaatttacgtgaggatgtatgtgtacaatgagaaatgggtaaatcaactcattaacacattaaccacctcaaatacttattttttgtagtgaaaacattggaagtttgctgtcttattagcaattttgaaatacacattattatcaactatagtcactgtgctgtgcaatatatctcaaaaaattattcctcctatctaactgaaactttgtattctttggccaacatctccccatttatatctgccccctagacctggtaaccaccattctactctctgcttctgagttcaattatttcagattctacatataagtgagataatgaggtatttctatttctgtgcctagcttattttgtttaacaaagtgtcctccaggctcatccacgttgtctcaaatgagagaattttcttcttttgagatgctgaatagtattcagttgcgcatatataaaacattttctttatccattcatcc

SEQ ID NO: 567164 - DNA, 401 bp, Homo sapiens
aaatcaaaaccacaatgtgataccaccttactcctgcaagaatgcccataatcaaaaagtcaaaaaaaaaaaatagatgttgggaacacttctacatttctggtgggaatgtaaactagtacaacgaattatggaaaacagtgtggagagtccctaaacaactaaaatagagctaccatttgatgcagcaatcccaggaaaggaagtcattatacgaaaaagatactggtgcacacctttataggagcacaatttgcaattgcaagaaaataaaacaagcccaaatgtccatcaatcaatgggtggataaagaatttgtggtatatatatgtgatggaatactactcaaccataaaaaggaacgaattaatggcattcrcagcaacctggatggaactaga

SEQ ID NO: 567165 - DNA, 554 bp, Homo sapiens
gccaccacacccccaccaccacgacccaaaatctgcctacactgtcatccatggcccctgtgctcttttctgcagcagttcctgtttgcccccaggttctgctcaaaagagtttgtgcccagtcaaaattattacaaagctcaattggaaacttctttcaccctgtgaccccttccawattctgccagctgccttctccaaggacccctgtgagatatagtcagggatggcttccctaggctccagctggagaatgggagtgcctacaaggctctccccgctgctaagcctacttttgtatttcatgctaaatctgtttcagccctaggtatagttaaattctttttctataatctggattttcaggctccccagtggacaggtttttccctttcacactttgggaactcacagtttttcatgtctcacagaatttgcagcagcttgccacttctttcaaaggatctgtgaattctttcagttttcttggtacatttctgcagtggttcttggaacaaaagtccatggtgtgagtctccaaatgctagtctgtc

SEQ ID NO: 567166 - DNA, 556 bp, Homo sapiens
cacctgaaaaatcgggtcactcccaccctaatactgcgctcggcagtattaggcatatagtaatatgttcagcagggcatagccgaacaaaaggcagcagaaacttctgcagacttaaatgtccctgtctgacagctttgaagagagtagtggttccccagcacagtgtttgagatctgagaatggacagactgccttgtcaagtgggtccctgacccctgagtaccataactgggaggcacccccagtaggggcagactgacacttcacatggccaggtacccctctgagacaaagcttccagaggaacaatcaggcagcaacatttgatrttcagcaatatttgctgttctgcagcccccacagctgatacccagtcaaacagggtctgaaatggacctccagcaaactccaacagacctgcagctgagggtcctgactgtcagaaggaaaactaacaaacagacaggacatccacaccaaaaccccatctgtaagtcaccatcatcaaagaccaaaggtagataagaccactaagatggggaaaaaacagagc

SEQ ID NO: 567167 - DNA, 577 bp, Homo sapiens
tgtgggttgtctcttcagttggttgattttttcctttgctgtgcagaagcttttttacttcatttgattccattttwctatttttgctctgttttcctgggcctgtggggtatcagtcaagaaatatttgcccagtgcaatgtcctggagagtttctccaaatatttcttttagcagttccgtagtttgaggttatagatttaagtcattaatccattttaatttgatttttgcatatggtaaaagacaagggtctagtttcattcctctgcacatggatatctagttttcccagcatcatttaatgaagaggctgttagttccctgatgtatgttcttggcacctttgttgtaaatgaattcactgtagatgtatggattgttcctaggttctctattctgtttcattggtctatgtgtctccttttatgccaattctatgctgctttgtttactatacccctgtagtgtaatttaaagtcaggtaatgtgattcctccatatttattcttttttgctcagtatagctatggctattttgtttttttttaggttccatacaaattttaggattgtt

SEQ ID NO: 567168 - DNA, 577 bp, Homo sapiens
tgtgggttgtctcttcagttggttgattttttcctttgctgtgcagaagcttttttacttcatttgattccattttactatttttgctctgttttcctgggcctgtggggtatcagtcaagaaatatttgcccagtgcaatgtcctggagagtttctccaaatatttcttttakcagttccgtagtttgaggttatagatttaagtcattaatccattttaatttgatttttgcatatggtaaaagacaagggtctagtttcattcctctgcacatggatatctagttttcccagcatcatttaatgaagaggctgttagttccctgatgtatgttcttggcacctttgttgtaaatgaattcactgtagatgtatggattgttcctaggttctctattctgtttcattggtctatgtgtctccttttatgccaattctatgctgctttgtttactatacccctgtagtgtaatttaaagtcaggtaatgtgattcctccatatttattcttttttgctcagtatagctatggctattttgtttttttttaggttccatacaaattttaggattgtt

SEQ ID NO: 567169 - DNA, 598 bp, Homo sapiens
tctaatttgactgtgctgtgatgtgagaaactgtttgttatgatttcagttgttttgcatttgccaaagagtattttactccaaattatgtgattgatttcagagtaagtgccatgtggcaccaagaagaatgtatattcctttgatttgaggtgtagaattctgtagatatctatcagatttacttgatccagagctgagttcaagtccttgttcatatccttgttgtattagtctgttctcacgctgctaataaagayatgccaaagactgggtaatttaaaaaggaaagagatttaatggactcacagtttcacatggctgtggaggcctcacaatcatggtggaaggtgaaggagaagcaaaggtatcttacattttagcaggcatgaaagcttgtgcaggggaactcccctgtataaaaccatcagatcccatgagacttattcactaccacgagaacagtatggggaaaaccacctcactgattcaattatctctacctggacctgcccttcacacatggagattatttaaattccaggtgagatttgggtggggacacagccaaaccatatcacttgttaattttctgtct

SEQ ID NO: 567170 - DNA, 536 bp, Homo sapiens
actaattcattggtccctgactgactcttcagttatgtgcctgctctctttcactcccacacctgggtcccaagcttttctttctattcattgtttagctgggcctcctgggcttcacaatctaattattattcatgctgtctaaaccactctcaattcatgcttccctgcacccatcaagcatactcatttgcaaatatatataaagtgctatctttgctaatttggtaagtgatgatgaagaactgggattcaatagtagatggtctttccgtcccaatagggtggtctgcaagaaaaaatcaagctgatacaatctgcatttatttattcagaagcaatgaatgaagcactacaccaacacattcttattaagtcctactgtgcattcagctactcccaaattaataaatactgtgagtaaatttaatatataatatgaataatgagagtgacatcttctaaatttatgtgcattcttttcctattttgagtgttctgtttsccaacatacatcatgcctccttctacttctt

SEQ ID NO: 567171 - DNA, 536 bp, Homo sapiens
actaattcattggtccctgactgactcttcagttatgtgcctgctctctttcactcccacacctgggtcccaagcttttctttctattcattgtttagctgggcctcctgggcttcacaatctaattattattcatgctgtctaaaccactctcaattcatgcttccctgcacccatcaagcatactcatttgcaaatatatataaagtgctatctttgctaatttggtaagtgatgatgaagaactgggattcaatagtagatggtctttccgtcccaatagggtggtctgcaagaaaaaatcaagctgatacaatctgcatttatttattcagaagcaatgaatgaagcactacaccaacacattcttattaagtcctactgtgcattcagctactcccaaattaataaatactgtgagtaaatttaatatataatatgaataatgagagtgacatcttctaaatttatgtgcattcttttcctattttgagtgttctgtttgccaacatacatcrtgcctccttctacttctt

SEQ ID NO: 567172 - DNA, 629 bp, Homo sapiens
gacacattggaatgactgaggtagtattctctgggttaaatctgccttgatattctacaaacttcttgtacttgaatactgatagctttctctaggtttaggaaattctgttacccctttgaataaattttctacccaaatatctttctttgtctcctttttaaggacaatagctcttagatttgcattttgaggctattttctagaacttgtagctgtgcttcattcttttttatgtttttttgtctcttctgattatattttcaaactgactgtcttcatgcacactaattcttctgctttattaattctgctgttcagtgattctgatgattcgtcagtgtgttaatggcattgtcagcttcagaatttyggcttgattcttttgaattatttcaatctatttgtgaaatttatctaatatgactctaaagtccttttccatattatgttaaattttgttgagcttcttcaatgcagctattttgagttgtctgtctgaaaagctcacgtatctctgtctctctgggattggtacctggtgcctaattttttttggtggggttgtgtttttctggatagccttgatgcttgtagaagtttgtcagtgtctgggcattgaagagtta

SEQ ID NO: 567173 - DNA, 629 bp, Homo sapiens
gacacattggaatgactgaggtagtattctctgggttaaatctgccttgatattctacaaacttcttgtacttgaatactgatagctttctctaggtttaggaaattctgttacccctttgaataaattttctacccaaatatctttctttgtctcctttttaaggacaatagctcttagatttgcattttgaggctattttctagaacttgtagctgtgcttcattcttttttatgtttttttgtctcttctgattatattttcaaactgactgtcttcatgcacactaattcttctgctttattaattctgctgttcagtgattctgatgattcgtcagtgtgttaatggcattgtcagcttcagaatttcggcttgattcttttgaattatttcaatctatttgtgraatttatctaatatgactctaaagtccttttccatattatgttaaattttgttgagcttcttcaatgcagctattttgagttgtctgtctgaaaagctcacgtatctctgtctctctgggattggtacctggtgcctaattttttttggtggggttgtgtttttctggatagccttgatgcttgtagaagtttgtcagtgtctgggcattgaagagtta

SEQ ID NO: 567174 - DNA, 638 bp, Homo sapiens
caacaaattcctacatcaaaaaagaaaaaagcttcaaataacttaatgatgtatcataaaaaactagaaaagagcaaattagtagaagaaaagaatgactatcagagcagaaatatacactattgagatgaaaaatagataaaccaaaccaaagtttttctgaaaagataaatgaaatttacatttagccagactaagaagaaaagggaaagacccaaacaaaatcagagtcgaaaaaggatatatctagctgctgccatagaatgcaaaggattgttagagactattatgagcaattgtaagccaataaattagaaaaccctaagtaaatagatgrgctcttaaatacatacaacctaccaagattaagccatgaggaaatccaaaacctgagtataccaataacaagtaatgagataaaagcagtaataaaaattcttccatcaaagaaaagcccagggtctgatttcttcactgctgaattatagcaaacatttaaaaaacaactaactgatcaatcttattcaaactattcaaaaaatccaggagcagggaaaactttcaaactaattctacaaggctactaattaccctggtactaaaactagacaaagacataaccaaaaaagggaaactgc

SEQ ID NO: 567175 - DNA, 562 bp, Homo sapiens
aaaaatgttaaaaaaataaccatttcatggaaactaaaatcatatagataatatttcagataaatgtaatactcatacagttttcagctcttagagattgtaaagataaagatcccataatctcttcttttaataaagataaaatagggccagaaatatgtcatgacaamaatggcaaggaaatagaatagctaacaaaatatctgcatttagtaaactgagcatatgttttctggagaaaataaagacaaggacttcagctcactataggcattctgctttattcttcatttgagccagtatgttaattaaatctgatttggaccacctctggagcatatttccacctcttagcacacttactgcctcctttcttctttttatataagcatctttacaaaaaatgtatagaattgtcctcctgttgttcttttgacactcatgattttgttagatactcaaacaaaaatgcaccaaggaagctacatagactattattaactgattcttttttgacgagaaaattccaagttataatcatgagctcctaggtcaaatagta

SEQ ID NO: 567176 - DNA, 665 bp, Homo sapiens
ttattatgacctgacttgagagaaaacatttactttgcaaactgcaaatgaagttcgttgaatgtaattgaattaagtactctttgatatatttttgacaaatctttgaaatacatttatgcagaggctaaaaatcttgcattttcttatcaatttaaaattttctattatttaaatacaaataaatacatatataattgtaaacagacaaattcaaactatgtttctaaagaaattaaatattacttctattaatatattatgagtagaattgaaacaccccaatggcaccttcctccttcctgtgttttactttatgtaattttattcaggaataattcacatgcaataaaactgcatcattccaaagtgtacaatttggtgagttttgagagttgcacaaacctgtaaaaccacaaacacaatcaagactcagaacatttcartcacccccaaagcttctttatattagtttgcagtgtatatttctctcggctgctggcccgtgtgaacattgatctgctttctgtcactataattaatttgcctttttatataaatgaacttgtatggcatgaaattttttgtgactggtttctttcattcaacatgattttgagattcatctatgttgttcggcataacagtagtcatccctgtttatc

SEQ ID NO: 567177 - DNA, 665 bp, Homo sapiens
ttattatgacctgacttgagagaaaacatttactttgcaaactgcaaatgaagttcgttgaatgtaattgaattaagtactctttgatatatttttgacaaatctttgaaatacatttatgcagaggctaaaaatcttgcattttcttatcaatttaaaattttctattatttaaatacaaataaatacatatataattgtaaacagacaaattcaaactatgtttctaaagaaattaaatattacttctattaatatattatgagtagaattgaaacaccccaatggcaccttcctccttcctgtgttttactttatgtaattttattcaggaataattcacatgcaataaaactgcatcattccaaagtgtacaatttggtgagttttgagagttgcacaaacctgtaaaaccacaaacacaatcaagactcagaacatttcaatcacccccaaagcttctttatattastttgcagtgtatatttctctcggctgctggcccgtgtgaacattgatctgctttctgtcactataattaatttgcctttttatataaatgaacttgtatggcatgaaattttttgtgactggtttctttcattcaacatgattttgagattcatctatgttgttcggcataacagtagtcatccctgtttatc

SEQ ID NO: 567178 - DNA, 582 bp, Homo sapiens
gaatgttattataagatgttggtgagtttactcaagcagttaggataaaaggagcataaaatttgcccccctaaaatacctttaaacccaacctgtctgaatacttcctaccactcaattgtagtctaaaccactttacaagtcattttattttattttacatataccatttaaatgattggcctaaatcatacaattgaaaaagtgactattttagttataagctctccttaaggttaacactcagtctagaacaagcatagtgagatttttttgttttttgcataatatgggctggaacatgtacaaagtttcaataaagcatattttgttaataattgctaggcatagttatggactgctgggaagaggagagtagagaaagtscaatctgaggggaaataattagaagtagaagagttaattttagccagatgtttagcctgtcaaggtggcagtgttggaaattgcatttagaggcaaagattactaatcatgctgcttcatcacaaatcctctctgtagccattatcttctctatttgtgtgcgttgagtttgtactgcccatagcattacctggt

SEQ ID NO: 567179 - DNA, 516 bp, Homo sapiens
ttcagcctccagtatcttttcttctgctggatcgatttggctattgatactggtgtatgcttcacaaagttctcatgctgtgtttttcagctccatcagctcatttatattcttctataatctggttataccagttagcagttcctgtaaccttttatcaaggttttaacttccttgcattgggttagaacttgctcctttagctcagaagagtttgttgttatccaccttctgaagtctacttctgtcaatttgtcaagctcattctccatccagttttttcccttgctggtgaagagttgtgattttttgraggagaggaggcattctagtttttgtaattttcagcctttttgttctttttttttttttttttcatcttcttggatttatctacctttggtgataaatgtttgatgttggtgacctttggatgcagtttctgtgtgagtgtcctttttgttgattttgatgctattgatttctgtttgttagttttctttctaactgtcaggc

SEQ ID NO: 567180 - DNA, 461 bp, Homo sapiens
tataggtattgaagtactagacaaggttggggaactcttgctgctttcctagacgcctgataaargttgggcagtgatggtcacccatcctgacttaacagggatctctcagacctcagactgcttcccatactctaaaacaattagtatgatctttagtcacatgcagggtatacgtaaggtgcttacgcctaatttggagaatatgtccatctgattaattagatcaatataggaaacatatttgcataattctgggcacaaagtaataagtttatttggcttcaaaagatctagtttggcttatggcgtagttaagtttttgactgatttctatgtttttgcttggtagatttagcaattggaataaaaagctttgcctaaagtgttgtttagcagtttatgtctctaaatcaactataataagagtagtcactaaacagtttgaaataagtaatctt

SEQ ID NO: 567181 - DNA, 461 bp, Homo sapiens
tataggtattgaagtactagacaaggttggggaactcttgctgctttcctagacgcctgataaaggttgggcagtgatggtcacccatcctgacttaacagggatctctcagacctcagactgcttcccatactctaaaacaattagtatgatctttaktcacatgcagggtatacgtaaggtgcttacgcctaatttggagaatatgtccatctgattaattagatcaatataggaaacatatttgcataattctgggcacaaagtaataagtttatttggcttcaaaagatctagtttggcttatggcgtagttaagtttttgactgatttctatgtttttgcttggtagatttagcaattggaataaaaagctttgcctaaagtgttgtttagcagtttatgtctctaaatcaactataataagagtagtcactaaacagtttgaaataagtaatctt

SEQ ID NO: 567182 - DNA, 461 bp, Homo sapiens
tataggtattgaagtactagacaaggttggggaactcttgctgctttcctagacgcctgataaaggttgggcagtgatggtcacccatcctgacttaacagggatctctcagacctcagactgcttcccatactctaaaacaattagtatgatctttagtcacatgcagggtatacgtaargtgcttacgcctaatttggagaatatgtccatctgattaattagatcaatataggaaacatatttgcataattctgggcacaaagtaataagtttatttggcttcaaaagatctagtttggcttatggcgtagttaagtttttgactgatttctatgtttttgcttggtagatttagcaattggaataaaaagctttgcctaaagtgttgtttagcagtttatgtctctaaatcaactataataagagtagtcactaaacagtttgaaataagtaatctt

SEQ ID NO: 567183 - DNA, 637 bp, Homo sapiens
ggcagtatcaggcatagtaaagcacagaattctttgttcctcttcgccaaatggtttattaatgtgtttcactttgtctaatgtcaaaattcatccaaaattgtgatttttgcaaggatctttttctgggccaaaattgtaaaatagccattttctattgtttaaatctatatttattaacttatgaaaaatttaaaaatccggtaaatgtgtatgtttttcaaactttaaaaggttacattttggttgctgctaaacatattttatgatccagagagaaattgttaaaattaatattaactactgcatttaagaattttctatattaaacaaggacaatatttttgatatttartgactataaatatagtttaaaattattactcaagtaatctataactgcttcaatgacattgaatttcaccttctttgccttttttaattttctttctttttataattaatatgagtataaattaatttttaaaaattttaaaattttgcaatgttctttcagaataattaaaagcactaggtttagtctcagaagaacttaaatatgggtactggaataatatattaacatagattagggaacaaataaaatagattttaaaatgtaaagtaccaatctaat

SEQ ID NO: 567184 - DNA, 637 bp, Homo sapiens
ggcagtatcaggcatagtaaagcacagaattctttgttcctcttcgccaaatggtttattaatgtgtttcactttgtctaatgtcaaaattcatccaaaattgtgatttttgcaaggatctttttctgggccaaaattgtaaaatagccattttctattgtttaaatctatatttattaacttatgaaaaatttaaaaatccggtaaatgtgtatgtttttcaaactttaaaaggttacattttggttgctgctaaacatattttatgatccagagagaaattgttaaaattaatattaactactgcatttaagaattttctatattaaacaaggacaatatttttgatatttagtgactataaatatagtttaaaattattactcaagtaatctataactgcttcaatgacattgaatttcaccttctttgccttttttaattttctttctttttataattaatrtgagtataaattaatttttaaaaattttaaaattttgcaatgttctttcagaataattaaaagcactaggtttagtctcagaagaacttaaatatgggtactggaataatatattaacatagattagggaacaaataaaatagattttaaaatgtaaagtaccaatctaat

SEQ ID NO: 567185 - DNA, 292 bp, Homo sapiens
ctagggatttggtgagagctatgtcctcttccacaactctatgcttgggggcctgcatggccatcccacacttcttcagattcttacctcctctctctctctttctctttctcttcctgttcttgaaccaagaatggttctccagattgagcyttctgctatgcaactggggctcaccactgtgaaagtcagggttacctttatttagcttcatctacctataactctcattttgcatatatatatatatatatatatatatatagatatatatatatatatattttttttt

SEQ ID NO: 567186 - DNA, 448 bp, Homo sapiens
ttttctgttggagttggaggagaaaaagcacctgtcattattctccagtcatacaattataaagaaatgatcataaagcttccagaagctactggtctctaacatgcaagaaactcagaaaaaaatgacgccaactgtatgcagatgcagagagaagttggaamgaactttctttgagtcaagcctctaattcctgtcagtatcagtttggattctttgttgcaagcaacagaaactaattctggctaagtccaagaggaatttattgaaaggatatcaggtggctattgtaattgacagaaaggctggagatttcagagcagagcaccaccaagaccaaaccacagaaggaagttggtcatagccaggcacggtggctcacgcctgtaattccagcactttggaaggccaaggcaggtggatcacctgaggtcaggagtttgagacc

SEQ ID NO: 567187 - DNA, 448 bp, Homo sapiens
ttttctgttggagttggaggagaaaaagcacctgtcattattctccagtcatacaattataaagaaatgatcataaagcttccagaagctactggtctctaacatgcaagaaactcagaaaaaaatgacgccaactgtatgcagatgcagagagaagttggaacgaactttytttgagtcaagcctctaattcctgtcagtatcagtttggattctttgttgcaagcaacagaaactaattctggctaagtccaagaggaatttattgaaaggatatcaggtggctattgtaattgacagaaaggctggagatttcagagcagagcaccaccaagaccaaaccacagaaggaagttggtcatagccaggcacggtggctcacgcctgtaattccagcactttggaaggccaaggcaggtggatcacctgaggtcaggagtttgagacc

SEQ ID NO: 567188 - DNA, 444 bp, Homo sapiens
gaaaagcaagagcaaattgaaatgaaaaagacaatacaaaagaccaataaaacaaaaagttgttcttttaaaaagctaaacaaaattgacaaacctttagccagacaaactaagaaaaaaagacagaagagccaaataaataaaatgagagatgaaactggagacattacaactgataccacagaaattcaaaggatcattaatggccactatgaacaactatatgccaataaatcggaaaatctagaagaaatrgacaaattcctggacacatacaacttaccaagattgaaccatgaagaaatccaaaacctgaatagaccaataacaagtaacaagattgaagctgtaataaaaagtcttccagtaaagaaaagcctgggactcaatggctttactggaaaaacctaaaggccaccaaaaaactgataaacaaattcagta

SEQ ID NO: 567189 - DNA, 444 bp, Homo sapiens
gaaaagcaagagcaaattgaaatgaaaaagacaatacaaaagaccaataaaacaaaaagttgttcttttaaaaagctaaacaaaattgacaaacctttagccagacaaactaagaaaaaaagacagaagagccaaataaataaaatgagagatgaaactggagacattacaactgataccacagaaattcaaaggatcattaatggccactatgaacaactatatgccaataaatcggaaaatctagaagaaatagacaaattcctggacacatacaacttacyaagattgaaccatgaagaaatccaaaacctgaatagaccaataacaagtaacaagattgaagctgtaataaaaagtcttccagtaaagaaaagcctgggactcaatggctttactggaaaaacctaaaggccaccaaaaaactgataaacaaattcagta

SEQ ID NO: 567190 - DNA, 266 bp, Homo sapiens
ttgctaccgattctctatttcccatyttcctctgttaacacaatccccatcttgtttgtggagacactgtgttctgcaccattagatgaggtgactgccccaagcaataaggtgactcctgtttctggctttccctgtttccttggcagcgaggtgggactgtgtgacccaattctgaccatgagacctaaaaactagaaatcttcttgggaaatttttggaaaagccattgctttcctggtaactggaggaaaatccagctttac

SEQ ID NO: 567191 - DNA, 500 bp, Homo sapiens
gtattggtgccaataacctcagaagctacacattctattccaagcaaaatttctttcaagcacagaaaaaaggcaatgattttctttaaaaaactcctacttaggaaccctatcatatactttgctacttgtgttctttgcctgtattggccaaccacttacgtaggaaatgatgctatgaaaggaaaggaaagatagggcaaatgtaacccatatttccttttctcttcagaccttacctactcatcactaagccaccagtagagagggtagtagaatgttcatgtatcaagaagtgaaataaaaacagtagaattagttttgtgcagtatttccactgtttgaataagaaaaaaatacatatgcrtgtatgaactacacaatatgtgctgtgttctgaatacttgtgtccccccaaaatgttgaaacttaatctccagtgcagtggtcttgggaagtggggcaactggaaagtgattaggtcctgaaggctaagacct

SEQ ID NO: 567192 - DNA, 568 bp, Homo sapiens
catcttctcactcataagtgagtgttaaaaaatgtgtacaggggcaggcatggtggctcacacctataatcccagcactttgggaggccgaggcaggygggtcacctgaggtcaggagttcgagaccagcctggtcaacatggtgaaatcctgtctctactaaaaatacaaaaattagctgggcatggtggtacacacctgtaatcccagctactcgggagactgaggcaggagaatcacttgaacccaggaggcagaggttgcagtgagccgagatcatgctgttgcactccatcctgggctacaagaaaggaattctgtctccaaaaagacttttgtttcagccaggtatagtggttcatacctataatcccagcactttgggaggccgaggcggggggatcacttgaggtcaggagttcgagaccagcctagccaacgtggtaaaaccctgtctctactaaaaatataaaaattagccaggcatggtggtgggtgcctgtaatcccaacttgggaggctgaggcaggagaatcgcttgaatctgggaggcggaggttacagtgag

SEQ ID NO: 567193 - DNA, 568 bp, Homo sapiens
catcttctcactcataagtgagtgttaaaaaatgtgtacaggggcaggcatggtggctcacacctataatcccagcactttgggaggccgaggcaggcgggtcacctgaggtcaggagttcgagaccagcctggtcaacatggtgaaatcctgtctctactaaaaatacaaaaattagctgggcatggtggtacacacctgtaatcccagctactcgggagactgaggcaggagaatcacttgaacmcaggaggcagaggttgcagtgagccgagatcatgctgttgcactccatcctgggctacaagaaaggaattctgtctccaaaaagacttttgtttcagccaggtatagtggttcatacctataatcccagcactttgggaggccgaggcggggggatcacttgaggtcaggagttcgagaccagcctagccaacgtggtaaaaccctgtctctactaaaaatataaaaattagccaggcatggtggtgggtgcctgtaatcccaacttgggaggctgaggcaggagaatcgcttgaatctgggaggcggaggttacagtgag

SEQ ID NO: 567194 - DNA, 474 bp, Homo sapiens
ggtctcaatatacttttctgttttttgagtgggtctttattttttaaaaatttctttatttttatttatttttgtaacaaggtctcactgtgtcacccaggctggagtaaccagtgtgtgatctcggctcactgcagccttgacctcctgggctcaagcaatcctcctacctcagcctcctgagtagctgggactacaggcacatgccaccayacctggataaatttttatattttttgtagagacagggtttcactatgttgcccaggctggtctcgaattcctgggatcaagcatactttcacctcggccgctcaaagtgctgggattacaggcatgagccacagtgcccagcctatatttatttatttatttttaattgagaaataaaagttgtacatatttatggtgtacaatgtggttttttgatatatgtatacattgtgaaatgattaaatcaaaccaattaacata

SEQ ID NO: 567195 - DNA, 451 bp, Homo sapiens
ctctgtggcacaaaggacttgcctgagcgttgtgctgagagactcaactaaattccaggctggcttccacatacactaaacctaaaccgtgtcttaaaggttttgatttaaacctaggtttcttggccatgccaagtctttaactcaagaaaatgcaaagcagccaaaccacaagatgtatgtggtcccaaagcacattgccataccatttccagtattttttccacttaccctccttctacaatcttctatttacccatagcctcaaatccctttttggtttcccccccggctttttttttttttctttgagacagagtctcactctgtcgcccatgttggagtgcagtggcatgatctcggctcactgcaamctccgcctctggggttcaggtgattctcctgcctcagcctcctgagtagctgggattacaggcaactgccaccacgc

SEQ ID NO: 567196 - DNA, 550 bp, Homo sapiens
gattccgtctcaaaaaaaaaaaaaaagcatttgtaattttaacagatactgctgaactattttgtaaagaggttgcacaacttattcttcccctcaacagtgtatgaaagtgcatgttttctttattttgctacaatcatgacattaatctattttgttttattttactttatcatagaaagaacacctaacatgagagctaccctcttaataaaattttaggtgtacaataaattactatggactctgggtacaatgcagtacagtagatctctaggccttacacatcttgcttgactggaactttatgttcattgaayagtaactttccatttccccttttcccacagcctctggaaaccaccattccactctttgattctatgaatttgcctattttaaataccttgtataagcagaattatgcagtatttgtctttctgtgatcggcttatttcatttagcataatgtcttcagggttgaatctattttagatacctcatataagcagaatcatgcagtatttgtctttctgtgattggcttattt

SEQ ID NO: 567197 - DNA, 550 bp, Homo sapiens
gattccgtctcaaaaaaaaaaaaaaagcatttgtaattttaacagatactgctgaactattttgtaaagaggttgcacaacttattcttcccctcaacagtgtatgaaagtgcatgttttctttattttgctacaatcatgacattaatctattttgttttattttactttatcatagaaagaacacctaacatgagagctaccctcttaataaaattttaggtgtacaataaattactatggactctgggtacaatgcagtacagtagatctctaggccttacacatcttgcttgactggaactttatgttcattgaacagtaactttccatttccccttttcccacagcctctggaaaccaccattccactctttgattctatgaatttrcctattttaaataccttgtataagcagaattatgcagtatttgtctttctgtgatcggcttatttcatttagcataatgtcttcagggttgaatctattttagatacctcatataagcagaatcatgcagtatttgtctttctgtgattggcttattt

SEQ ID NO: 567198 - DNA, 584 bp, Homo sapiens
ctccagcctgggtgacagagcaagactctgtctcaaaaaacaaaaacaaaaacaaaaacaaaaacaaaactgaataaacgagacttttcctggagtttttggaaaaattacattggtggctagaaagggcttaattgtagggtttcccctttctgtgaggctttcttcaactttgtgtacctgttgttgcatrtcggcactagaatctaatgtaagttgacagtggatttggcatgagctgttgatggggttatttgacacagaatatatagaaccctgcttttcaggggaggggccagggctcccaggtgctttgtcacttgaacacattcttcgttccaaggaaaatttagtcatgtggaggaaatgagaatgagttgtgggtctcccagggtcctgggtgaccgttgggtgctgggtggatctgaagaggttaaaacatggaatgaacatttcttaggtgcttcttctggtgggaaattctctaggatctgggtgtatggacctcaagggtggaagaggcagtaggagaaaaccagaaagatggagctgaaaccagcaggctgctctaacagagacaacca

SEQ ID NO: 567199 - DNA, 584 bp, Homo sapiens
ctccagcctgggtgacagagcaagactctgtctcaaaaaacaaaaacaaaaacaaaaacaaaaacaaaactgaataaacgagacttttcctggagtttttggaaaaattacattggtggctagaaagggcttaattgtagggtttcccctttctgtgaggctttcttcaactttgtgtacctgttgttgcatgtckgcactagaatctaatgtaagttgacagtggatttggcatgagctgttgatggggttatttgacacagaatatatagaaccctgcttttcaggggaggggccagggctcccaggtgctttgtcacttgaacacattcttcgttccaaggaaaatttagtcatgtggaggaaatgagaatgagttgtgggtctcccagggtcctgggtgaccgttgggtgctgggtggatctgaagaggttaaaacatggaatgaacatttcttaggtgcttcttctggtgggaaattctctaggatctgggtgtatggacctcaagggtggaagaggcagtaggagaaaaccagaaagatggagctgaaaccagcaggctgctctaacagagacaacca

SEQ ID NO: 567200 - DNA, 584 bp, Homo sapiens
ctccagcctgggtgacagagcaagactctgtctcaaaaaacaaaaacaaaaacaaaaacaaaaacaaaactgaataaacgagacttttcctggagtttttggaaaaattacattggtggctagaaagggcttaattgtagggtttcccctttctgtgaggctttcttcaactttgtgtacctgttgttgcatgtcggcactagaatctaatgtaagttgacagtggatttggcatgagctgttgatggggttatttgacacagaatatatagaaccctgcttttcaggggaggggccagggctcccaggtgctttgtcrcttgaacacattcttcgttccaaggaaaatttagtcatgtggaggaaatgagaatgagttgtgggtctcccagggtcctgggtgaccgttgggtgctgggtggatctgaagaggttaaaacatggaatgaacatttcttaggtgcttcttctggtgggaaattctctaggatctgggtgtatggacctcaagggtggaagaggcagtaggagaaaaccagaaagatggagctgaaaccagcaggctgctctaacagagacaacca

SEQ ID NO: 567201 - DNA, 349 bp, Homo sapiens
aaagctcaactcagcaagaagatctaactgtcctaaatatataagcacccaacacaggagcactcaaattcataaagcaagtttgtagagaccttcaaagagacatagacttggatgggtccaagatggcctattagaagcagctgtggtccacagctctcacagagaggaatgaaaatggaaagyaaattatgcatcttcaactgaggtatccagattcttgcattgggactgaagaggtggatggctcaacccatggagagtgaggaaaagcagggtggagcgacagctgacctgggagtggcacagagccaggggagcccccacctccagtcaagggaggtggtaa

SEQ ID NO: 567202 - DNA, 349 bp, Homo sapiens
aaagctcaactcagcaagaagatctaactgtcctaaatatataagcacccaacacaggagcactcaaattcataaagcaagtttgtagagaccttcaaagagacatagacttggatgggtccaagatggcctattagaagcagctgtggtccacagctctcacagagaggaatgaaaatggaaagcraattatgcatcttcaactgaggtatccagattcttgcattgggactgaagaggtggatggctcaacccatggagagtgaggaaaagcagggtggagcgacagctgacctgggagtggcacagagccaggggagcccccacctccagtcaagggaggtggtaa

SEQ ID NO: 567203 - DNA, 582 bp, Homo sapiens
tcataaagactcacgtatgcgtatgttcgttgcagtactattcacaatagtaatgacatgcaatcaacctaaatgcccatcaatggtagactagatgaagcaaatgtggtacatatgcaccacggaatactacacagccacaamatgaatgaaattatgtcctttgcaacaacttggatgaagctggaggccgttacccaaagtgaagtaacacaggaacagaaaaccaaatactacatgttctcacttataaggggaagctaaacattgagaacacatgggcataaggatgggaacaacagacaccacagcctacttgagggtgaagggtagaaggagagggagaactgaaaaactacctattggatactatgattattacctggatgacaaaataatctgttcactaaatccctgtgacacacaattatagaacaaacctgcacatgtacccctgaatctaagataaaagttagaaaaaaaagcaaaatacaacaacttctaaccataaaagaaatgcttgactaagtcaactatattaaaattaataacttctgtttatcaaaaaacattgtaaagaaa

SEQ ID NO: 567204 - DNA, 518 bp, Homo sapiens
taaatgcatgtgaggcttaatacctaagtgataaattgataggtgcagcaaagcaccatggcatatgtttacctacgtaacaaacctgcatgttctgcacatgtatcctggaaattaaaataaaatttttgaaaaaggtatttaatttatattatattagtttttyattctgatcaaaaccatcaactattaccaagtaaaaaggaataagggttaaaaattttgaaagcagcatccatttttagtaaagatatgcctgactttcaatttttagtaaaaataggacttttcaattttaaaaaatttcccatttttttctaataaaaaaataaatggaagatggagcaagatggtggaatagaaggctccatcaatcatcacccctgcaaggacaccagtttaacaactatccatacaagaaaagcatcttcataagaaccaaaaatcagatgagcattcacagcacctggttttaaatttatatcactgaaagaggcactgaagaggcagaaaaacag

SEQ ID NO: 567205 - DNA, 518 bp, Homo sapiens
taaatgcatgtgaggcttaatacctaagtgataaattgataggtgcagcaaagcaccatggcatatgtttacctacgtaacaaacctgcatgttctgcacatgtatcctggaaattaaaataaaatttttgaaaaaggtatttaatttatattatattagttttttattctgatcaaaaccatcaactattaccaagtaaaaakgaataagggttaaaaattttgaaagcagcatccatttttagtaaagatatgcctgactttcaatttttagtaaaaataggacttttcaattttaaaaaatttcccatttttttctaataaaaaaataaatggaagatggagcaagatggtggaatagaaggctccatcaatcatcacccctgcaaggacaccagtttaacaactatccatacaagaaaagcatcttcataagaaccaaaaatcagatgagcattcacagcacctggttttaaatttatatcactgaaagaggcactgaagaggcagaaaaacag

SEQ ID NO: 567206 - DNA, 574 bp, Homo sapiens
tgcagaaattcaaaggctcgttagtagctactrcgagaaactatatgccaatatattggaaaatctagaagaaattgtcaaattcccgtatacatacaaccgaccaagattgaatcaagaagaaattaaaaacataaacagattaataatgagtaacataattgaagctgtaataaaaagtctcccagtaaagaaaagcccaggagccagtggcttcactgttgaattctatcagacatttaaagaactaatgccaatcctactcaagctattccaaaaaacaaaagaggtgaaaacacttccaaactcatcttttgagaccagtactatcctaataccaaaagcagacagagctacatcaaaaaagaaaactacaggttaatatatctgatgaatattgatgcaaaaatcctcaacaaaatactagcaaactgaattcaacaatacattaaaaagatcattcatccacggccaaataggatttatcccagggatgcaaggataattcaacatatgcaaatcaatcaatgtgatacatcatatcaagagaatgaagaactaaaatgatataatc

SEQ ID NO: 567207 - DNA, 574 bp, Homo sapiens
tgcagaaattcaaaggctcgttagtagctactgcgagaaactatatgccaatatattggaaaatctagaagaaattgtcaaattcccgtatacatacaaccgaccaagattgaatcaagaagaaattaaaaacataaacagattaataatgagtaacataattgaagctgtaataaaaagtctcccagtaaagaaaagcccaggagccagtggcttcactgttgaattctatcagacatttaaagaactaatgccaatcctactcaagctattccaaaaaacaaaagaggtgaaaacacttccaaastcatcttttgagaccagtactatcctaataccaaaagcagacagagctacatcaaaaaagaaaactacaggttaatatatctgatgaatattgatgcaaaaatcctcaacaaaatactagcaaactgaattcaacaatacattaaaaagatcattcatccacggccaaataggatttatcccagggatgcaaggataattcaacatatgcaaatcaatcaatgtgatacatcatatcaagagaatgaagaactaaaatgatataatc

SEQ ID NO: 567208 - DNA, 574 bp, Homo sapiens
tgcagaaattcaaaggctcgttagtagctactgcgagaaactatatgccaatatattggaaaatctagaagaaattgtcaaattcccgtatacatacaaccgaccaagattgaatcaagaagaaattaaaaacataaacagattaataatgagtaacataattgaagctgtaataaaaagtctcccagtaaagaaaagcccaggagccagtggcttcactgttgaattctatcagacatttaaagaactaatgccaatcctactcaagctattccaaaaaacaaaagaggtgaaaacacttccaaactcatcttttgagaccagtactatcctaataccaaaagcagacagagctacatcaaaaaagaaaactacaggttaatatatctgatgaatattgatgcaaaaatcctcaacaaaatactagcaaactgaattcaacaatacattaaaaagatcattcatccayggccaaataggatttatcccagggatgcaaggataattcaacatatgcaaatcaatcaatgtgatacatcatatcaagagaatgaagaactaaaatgatataatc

SEQ ID NO: 567209 - DNA, 574 bp, Homo sapiens
tgcagaaattcaaaggctcgttagtagctactgcgagaaactatatgccaatatattggaaaatctagaagaaattgtcaaattcccgtatacatacaaccgaccaagattgaatcaagaagaaattaaaaacataaacagattaataatgagtaacataattgaagctgtaataaaaagtctcccagtaaagaaaagcccaggagccagtggcttcactgttgaattctatcagacatttaaagaactaatgccaatcctactcaagctattccaaaaaacaaaagaggtgaaaacacttccaaactcatcttttgagaccagtactatcctaataccaaaagcagacagagctacatcaaaaaagaaaactacaggttaatatatctgatgaatattgatgcaaaaatcctcaacaaaatactagcaaactgaattcaacaatacattaaaaagatcattcatccacggccaaataggatttatcccagggatgcaaggataattcaacatatgcaaatcaatcartgtgatacatcatatcaagagaatgaagaactaaaatgatataatc

SEQ ID NO: 567210 - DNA, 520 bp, Homo sapiens
tcagtctgagtggagcccactgcagcgctgcaaagccactgaagccagactgcctctctagattcctcctctctgggcagggcatctctgaaagaaagccagtagccctagtcaggggcttatagataaaactcccatctccyggggacagagcacctgggggaaggggcagctgtgagcgcagcttcagcagacttaaacattcccacctgccagctctgaagagagcagcagatctcctagcacagcactggagctccgctaagggacagactgcttccacaagtgggtccctgacccccatgcctcctgatggggagacatctcccaacaggggtcgacagacacttcatacaggagagctctggctagcatctggcaggtgcccctctgggacacagcttccagaagtaggaggaggcagcaatctttgctgttctgcagcctctgctggtgatacccatgcaaacagggtatggagtggacccccagaaaactccagcagaccagcagaagaagg

SEQ ID NO: 567211 - DNA, 520 bp, Homo sapiens
tcagtctgagtggagcccactgcagcgctgcaaagccactgaagccagactgcctctctagattcctcctctctgggcagggcatctctgaaagaaagccagtagccctagtcaggggcttatagataaaactcccatctcctggggacagagcacctgggggaaggggcagctgtgrgcgcagcttcagcagacttaaacattcccacctgccagctctgaagagagcagcagatctcctagcacagcactggagctccgctaagggacagactgcttccacaagtgggtccctgacccccatgcctcctgatggggagacatctcccaacaggggtcgacagacacttcatacaggagagctctggctagcatctggcaggtgcccctctgggacacagcttccagaagtaggaggaggcagcaatctttgctgttctgcagcctctgctggtgatacccatgcaaacagggtatggagtggacccccagaaaactccagcagaccagcagaagaagg

SEQ ID NO: 567212 - DNA, 520 bp, Homo sapiens
tcagtctgagtggagcccactgcagcgctgcaaagccactgaagccagactgcctctctagattcctcctctctgggcagggcatctctgaaagaaagccagtagccctagtcaggggcttatagataaaactcccatctcctggggacagagcacctgggggaaggggcagctgtgagcgcagcttcagcagacttaaacattcccacctgccagctctgaagagagcagcagatctcctagcacagcactggagctccgctaagggacagactgcttccacaagtgggtccctgacccccatgcctcctgatggggagacatctcccarcaggggtcgacagacacttcatacaggagagctctggctagcatctggcaggtgcccctctgggacacagcttccagaagtaggaggaggcagcaatctttgctgttctgcagcctctgctggtgatacccatgcaaacagggtatggagtggacccccagaaaactccagcagaccagcagaagaagg

SEQ ID NO: 567213 - DNA, 520 bp, Homo sapiens
tcagtctgagtggagcccactgcagcgctgcaaagccactgaagccagactgcctctctagattcctcctctctgggcagggcatctctgaaagaaagccagtagccctagtcaggggcttatagataaaactcccatctcctggggacagagcacctgggggaaggggcagctgtgagcgcagcttcagcagacttaaacattcccacctgccagctctgaagagagcagcagatctcctagcacagcactggagctccgctaagggacagactgcttccacaagtgggtccctgacccccatgcctcctgatggggagacatctcccaacaggggtcgacagacacttcatacaggagagctctggctagcatctggcaggtgcccctctgggacrcagcttccagaagtaggaggaggcagcaatctttgctgttctgcagcctctgctggtgatacccatgcaaacagggtatggagtggacccccagaaaactccagcagaccagcagaagaagg

SEQ ID NO: 567214 - DNA, 653 bp, Homo sapiens
aatgcttttaccaaatgttccctattttttttcacacttgcattcaagtcatatgaatactccctaatatctcatttaggtggcagtttcaaatattgttcccagaaagaacactaaattattatttttttcttagtaaagtacatagtctagagaacatgaagatgagtgttccatatatgccctttattgctggttacttgtatgatacttctttttaaggtagtgtaaaatcagatctccattaaatcttaaataattggtccaagactatagctcttaaaaatattatatgccattttgttatttaaaaggataaacatctcttttattgtctggtcttactttaaaaacatttctgttttattggctgaccttactgaaaatgctttagtataacagtgtgaatgttaatataaactctatagtaggaatgattagttaatattttaaggacataatgacagctcatcactccaaaagcagcttgaacaagttgttcaaaattggttacctgtgtctgcatcagaaatctgcttaatctgcataagaatatttaaagtacctttaaaaattgaggcataatagatgtacatagttttgggggcacatgtgataatttaatamatgcctataatttgcaaagatcaaat

SEQ ID NO: 567215 - DNA, 553 bp, Homo sapiens
cttgagggctgtgctcctgcagcacacctctgcctggacatccaggtatttccatacatcctctgaaatctaggtggaggttctcaaacctcagttcttaatttctgtgcctctgcaagcccaataccacgtgtatgctgccaaggctagggscttgcaccctctgaaacaacagcctgagctgtacattggccccttttagccacaactgggatgcagggcaccaagtctccggactgtacaaagcagcaaggtcctgggcccagcccatgaaaccattttttcctcctaggcctaccagcttgttatggggggcgctgccatgaagacctctgaaatgccctggagatattttccccattgtcccagcaattaacatttggcttctatacaaatttttgcagccagcttgaatttctcctcagaaaatgggttttgcttttgaattgcatcatcagcctgcacattttctgaactttaatgctctgcttcccttttaaacataagttccaattccaaaccatatctttattaatacataaatacattaata

SEQ ID NO: 567216 - DNA, 460 bp, Homo sapiens
attaccagagttggttttctggttccttctcatttgggcagtctgtgtcagagggaaggtctagggctgaaggcgtttgttcagattattttgtcccatggggtgttcccttgatgtagtactctccccattttcctatggatgtggcttccatagagctgagctgtagtgattgttatctatcttctggatctagccacccagcaggtctaccagactctggactggtactgggggttgtctgtgacagagtcctgtgatgtgaaccatttrtgggtctctcagtaatggataccagcacctgttctggtggaggagtggggtgaaatggactctttgagggttcttagctttggtggttaatgcactatttttgtgctggttggcctcctgctgggaggtggcactttcctgagagcatcagctgtggtggtatggggaggcataggccgtgtgtggg

SEQ ID NO: 567217 - DNA, 460 bp, Homo sapiens
attaccagagttggttttctggttccttctcatttgggcagtctgtgtcagagggaaggtctagggctgaaggcgtttgttcagattattttgtcccatggggtgttcccttgatgtagtactctccccattttcctatggatgtggcttccatagagctgagctgtagtgattgttatctatcttctggatctagccacccagcaggtctaccagactctggactggtactgggggttgtctgtgacagagtcctgtgatgtgaaccatttatgggtctctcagtaatggataccagcacctgttctggtggaggagtggggtgaaatggactctttgagggttcttagctttggtggttaatgcactatttttgtgctggttggcctcctgctgggaggtggcrctttcctgagagcatcagctgtggtggtatggggaggcataggccgtgtgtggg

SEQ ID NO: 567218 - DNA, 610 bp, Homo sapiens
atgtttttaaaagaaatatatgctttgatttttttaaagtttcaaactctaaaaagcaaagttgcttatattatctggagatgatgttaggagacttcatcttccttgtatttgtgtttacttggtgagtgactgggagcctcaggaagctcctgggcaaatggccccagctgtgtgcatagtgaaaagccattagtacacgagtaaaagatggcaggagacaggcatccctgccaataatagggcacttgcaaagaggggctgatctgaggsagaagtcacccagaagaaagaaagagtttgagttgaaagaatgagttgaattaagaaacaggacagaggtttggccatagtggttctggaagagaatcaaggattttatttatccatccccaccacgtcatcgcagttacccagcttatataagcacactggatgtaaagcaatagtttttcttcaatttgtaatgcattgattctaaagcactcctgtgacgaaacacttttaacagaggggtaaaaatttatctttcctttgaaatagtgaaagtcatccccagagggccaaggtagcctgggctttcatctgagtgaggaacaaagaaggaggc

SEQ ID NO: 567219 - DNA, 610 bp, Homo sapiens
atgtttttaaaagaaatatatgctttgatttttttaaagtttcaaactctaaaaagcaaagttgcttatattatctggagatgatgttaggagacttcatcttccttgtatttgtgtttacttggtgagtgactgggagcctcaggaagctcctgggcaaatggccccagctgtgtgcatagtgaaaagccattagtacacgagtaaaagatggcaggagacaggcatccctgccaataatagggcacttgcaaagaggggctgatctgagggagaagtcacccagaagaaagaaagagtttgagttgaaagaatgagttgaattaagaaacaggacagaggtttggccatagtggttctggaagagaatcaaggattttatttatccatccccaccacgtcatcgcagttacccagcttatataagcacactggatgtaaagcaatagtttttcttcaatttgtaatgcattgattctaaagcactcctgtgacgaaacacttttaacagaggggtaaaaatttatctttcctttgaaatagtgaaagtcmtccccagagggccaaggtagcctgggctttcatctgagtgaggaacaaagaaggaggc

SEQ ID NO: 567220 - DNA, 555 bp, Homo sapiens
gtctgggccatgcaaacataaaaatcacatagagagtggcattataggcttatctcctcattcttgtgttcactcacccactccacttacccattcattcattttctcaattattagtttatttcaactatttcccaagtgttgttttctttgtttgttcatttattttaaagtacaagtactcaatgtgttatgtcctgagaacacaaaaagaaataatataactacttagcctcagccagtgactaaacctggggtgcaaaattaggtccccttttctcaagatggggcatttctggtgcaatttgtattctagagattccttatgcctggctacatctgagtctttcctccgtccatagcacttatggtctcatcaaggaaataaacatatacatacattagtgtgcagaagggtctttatagtgttttttaggagaaactgtgagcaaaccaaagagcagtatgcttgggagtgccaccagagaaagctttataaagaagtgagtagtggatgtgyttcttttggcaaggggcaggggtggatgggggagg

SEQ ID NO: 567221 - DNA, 644 bp, Homo sapiens
tgacaaggtgtggagttagtaatttttcagatgtgagaacagccatagaagatccacgtgtttaacttcctctctggaacaaaagaccattaacatggaaagttccattagagggttgaaaatgacccttgaaaaataaatgcaaagaaaccaggggaagaaaaccccaaagcaatgatgaggaactgagcaagcacaatatgccaggccattccctatggctggtttatgttacctcctgtaatactcatggccatcctgcaaggtggtactcttctctcctcttacagaagactgacctgaggttcagtaatatatgttttcacctaaaccaaaattaagttctgaaagagggctgcctgtccctttgggtgtacagtttttcccacattgcccttaagtggtatttacacttgcaagagtttgcattttcctaacagccacagtggttaggttagcttatgttctgcatggtgagaaaaataaaaggcttattctcatgtagctccttattgccacaccacttggagacatacaagattctaattttcagctcttgctgatgttcatatttggggtcacagttggcctcatgycatttttgatgtgtatccacaatagaaaaataaaataatctatcactt

SEQ ID NO: 567222 - DNA, 568 bp, Homo sapiens
ttattgctataaactttcctcttagttcggctgtatcccacagattttggcataytgtgttcattatcatttgtttcaacaaacttttaaatttcttgcctaatttattcattgacccactggtcattcaggagcatattgtttgatttccatatgttcatatcgttttcataatccctccttactgatttccagttttattttattgtggtcagagaagatgcttgctattattttaatttctttgaatgttttaagacttgttttatggcctaacctatggtctatccttgagaataagccatgtgctgaagagaagaatgagtattctctatgctgggtaaagtgttctgtaaatatctcttaggtctacttggtttatagtgcagaataagtccaatgtttctttgttgattttctgtctggaagatctgtccaaagctgaaagtgggatgttgaagtctctagctattattgtatggaggtctgtctctctctctctctctctttctctaaaaatatttgctatagatatctgtatgctccagtattgggtgaatatacattt

SEQ ID NO: 567223 - DNA, 394 bp, Homo sapiens
cttttctgcttgattaaggtttctttgtaagtgaagctctcaattatayttttaattttatttattgagttattcagttcgaaggtttctgttgcattcttttttatggcatctatatctttgctgaattttttattccaattgtgaattattttccttatttctttgttccgtccattggtgttcttgtgtatcttgcagagtttctttaagattattagtttcaattgcttttcaagtattctaatcattatcttttatttggggtctgttactggataattattgtgtttctttggaggtgtcatatttcctttctttttcatgttcttttgtccctacattaatatcacctcaactggtctaatagtcatttctttgaattttattaaat

SEQ ID NO: 567224 - DNA, 529 bp, Homo sapiens
ctgtagtcccagctacttgggaggttgaggcagaagaataacgtgaacccgggtggcagagcttgcagtgagcagagatggcgccactgcactccagcctgggtgacagaacgagactccgtctcaaaaaaaacaaacaaamaaaaaagagagctcatatgcagcttaactcatagatcagtttgagcaatgatattttggttagaaaatggaggacatttttagagacaagggagaccaactgaagaggaaactgctacatacaaaatattttgagataagactagaaaaacataaggggatcagattaagaataatgttgaagaaagtgacagctaatttatttaatgacagttatatgataggagactatttatttgtttgaagactatttattcctttagagtcaaccatcatcattaaaagtactaccacttctcccatcccatccccatattattagcaatctcatagtaattttgtgtttcattcaccatgttatatatttttatatgctatgttaaaaaaa

SEQ ID NO: 567225 - DNA, 617 bp, Homo sapiens
gtgtggcttttgttcttaaagcctcagaagctatttagagagccccagggagactccctctctcagcagctcatggggtggagggggtcacggagacgggggtgcagaatcttcccctctcagcagctctggaatgtctcattagacatttgacattgcaggctatggcaagcccctcacaagccacgtcagtctatggggtctggcaactgagcatgtcatttgggactttcctgggagtacacagggaagttgccaaggggaaattgtgaccaatatctgtgtcactgtgagaagcattcagaggaagcagggctgaattggtcgctttgttttrgtatgtttgatgcctgacatctaaagcacatggggagggtggtgggggcagacaatgcatattttgtttggtcttgcttctgtcctcttccaaaatattgtcagaagttagcccaccatgaggaatggaagaacaaaaccagacagcgctcagaaatttaaatatattaccccacaaatcacgctgaataaaatacctccttccagaaacacgggggggcgggggggcgggggacagatgttcaaaaagttttctacttcagcagagtgtaaaagttgta

SEQ ID NO: 567226 - DNA, 617 bp, Homo sapiens
gtgtggcttttgttcttaaagcctcagaagctatttagagagccccagggagactccctctctcagcagctcatggggtggagggggtcacggagacgggggtgcagaatcttcccctctcagcagctctggaatgtctcattagacatttgacattgcaggctatggcaagcccctcacaagccacgtcagtctatggggtctggcaactgagcatgtcatttgggactttcctgggagtacacagggaagttgccaaggggaaattgtgaccaatatctgtgtcactgtgagaagcattcagaggaagcagggctgaattggtcgctttgttttgrtatgtttgatgcctgacatctaaagcacatggggagggtggtgggggcagacaatgcatattttgtttggtcttgcttctgtcctcttccaaaatattgtcagaagttagcccaccatgaggaatggaagaacaaaaccagacagcgctcagaaatttaaatatattaccccacaaatcacgctgaataaaatacctccttccagaaacacgggggggcgggggggcgggggacagatgttcaaaaagttttctacttcagcagagtgtaaaagttgta

SEQ ID NO: 567227 - DNA, 617 bp, Homo sapiens
gtgtggcttttgttcttaaagcctcagaagctatttagagagccccagggagactccctctctcagcagctcatggggtggagggggtcacggagacgggggtgcagaatcttcccctctcagcagctctggaatgtctcattagacatttgacattgcaggctatggcaagcccctcacaagccacgtcagtctatggggtctggcaactgagcatgtcatttgggactttcctgggagtacacagggaagttgccaaggggaaattgtgaccaatatctgtgtcactgtgagaagcattcagaggaagcagggctgaattggtcgctttgttttggtatgtttgatgcctgacatctaaagcacatggggagggtggtgggggcagacaatgcatattttgtttggtcttgcttctgtcctcttccaaaatattgtcagaagttagcccaccatgaggaatggaagaacaaaaccagacagcgctcagaaatttaaatatattaccccacaaatcacgctgaataaaatacctccttccagaaacacgggggggcgggggggcrggggacagatgttcaaaaagttttctacttcagcagagtgtaaaagttgta

SEQ ID NO: 567228 - DNA, 277 bp, Homo sapiens
agttctgtagtttgggaacgaggccatatttttggaatatattcaaatccctaccatgatcttcccrgagattttttaaaccaacaatgacttatctttaagggcaacttcatttgaaactatcttctcagagctggaccatcaacaaatgggcaaatcaccgatgtctatttgcgtgtttacttgcaccaggccctgggctcatgttttacagttattttcacaataactctatgaagttaatattattctttattcttgtttcagaaaggaaagg

SEQ ID NO: 567229 - DNA, 627 bp, Homo sapiens
ttagtattatacatttttagtaaaatattgaaacatgaactccatttatgtccttttatcctccccacttaaaaaaatatttgtttcaagtatgtcctctacctatgttaagcaccacatcaactggtgttataatttttgcctcaaccttcaaatataattttaaaaacttatgagggccagacatggtggctcatgcctgtaatcccagtactttgggaggctgaggtgggtgaatcacctgaggtcaggagtttgagaccagtctaaccaacatggtgaaactgcatctctactaaaaatacaaaaaaaaaaaatagctgggtgtggtggcaggtgccttgtaatcccagctactcaggaggctgaggcaggggaattccttgaacttgggagctggagattgaagtgagccgagttggcaccactgcaatccagcgtgggcaacagagcaagactccgtctcaaaataaataaataaataaataaataagaaaacttatgaggagttggataatctattatagttactcctacttttacacattccaattttctttcctttctgaagttgaaagccttctgttattagctttctraatacagaattttctttagcaatctgta

SEQ ID NO: 567230 - DNA, 542 bp, Homo sapiens
aaaaaaacacaatatcactgatcattagagaaatgcaaatcaaaaccacaataagataccctctcacaccagtcagaatggctatttgaaaaaagtaaaaacataacaggtcctgacaaggttgcctagaaaaagaaatgcttatagactgttagtgagagtgtaaaatagttcaaccattatggaaaacaatttggckatttctcaaagacctaaaaacaaaactaccatttgacccagcaatcccattactgggtatatacccaaaggactataagtggctatctcataaagacacatgcacacatatgttcactgcagcactattcacagtagcaaagacattaaatcagtttatatgaccctcagtggtagagtagatgaagaaaatatggtacgtatacaacatgaagtgcagccataaaaagaatgagatcatgcctttgcagaaacatgaatgagctagaggccattatccttagcaaactaatgcgggaacagaaagtcgaataccacatgttctcacttataagtggaagcta

SEQ ID NO: 567231 - DNA, 610 bp, Homo sapiens
aaaggaatgcaatgatttggcatggaatggaatcgaatggcatcgaatggaatggaatggaatgcaatggaatggaatgtattagaatgtaatgaactttaatggaatgtactcgaatggattcgactggaatggaatgttctggaagtgaatggrctccaatggaatggattcaaaaggaatggaatcgtacggaatggaatctaatggaatggaattaaatggaaatgaatcaaattgaatagcacggaattgaattgaatggaatcgaatgcaatggaatctaatgaaacggaaaggaatggaatggaatgggctggaatggaaaggaatcgaaacgaatggaatggaatcgaactgaagagactggaatggaatgcactggaatggaagggagtgtaatggaaggttctcgaaagaaatggaatcgaatggaatggaattgaattgaacggaatagagtcgaatggaattgaatggaatggaatggactagagtgaaatggaatcgaaccacaaggaatggacaggaatagaatggtctcgaattgaatggaatcgtatggaatggcatcaaacggaatggaatggacagccacggaatggaatgc

SEQ ID NO: 567232 - DNA, 478 bp, Homo sapiens
tggaaaggaatgcaatgatttggcatggaatggaatcgaatggcatcgaatggaatggaatggaatgcaatggaatggaatgtattagaatgtaatgaactttaatggaatgtactcgaatggattcgactggaatggaatgttctggaagtgaatgggctccaatggaatggattcaaaaggaatggaatcgtacggaatggaatctaatggaatggaattaaatggaaatgaatcaaattgaatagcacggaattgaattgaatggaatcgaatgcaatggaatctaatgaaacggaaaggaatggaatggaatgggctggaatggaaaggaatcgaaacgaatggaatggaatcgaactgaagagactggaatggaatgcactggaatggaagggagtgtaatggaaggttctcgaaaraaatggaatcgaatggaatggaattgaattgaacggaatagagtcgaatggaattg

SEQ ID NO: 567233 - DNA, 568 bp, Homo sapiens
aatggcatcgaatggaatggaatggaatgcaatggaatggaatgtattagaatgtaatgaactttaatggaatgtactcgaatggattcgactggaatggaatgttctggaagtgaatgggctccaatggaatggattcaaaaggaatggaatcgtacggaatggaatctaatggaatggaattaaatggaaatgaatcaaattgaatagcacggaattgaattgaatggaatcgaatgcaatggaatctaatgaaacggaaaggaatggaatggaatgggctggaatggaaaggaatcgaaacgaatggaatggaatcgaactgaagagactggaatggaatgcactggaatggaagggagtgtaatggaaggttctcgaaagaaatggaatcgaatggaatggaattgaatkgaacggaatagagtcgaatggaattgaatggaatggaatggactagagtgaaatggaatcgaaccacaaggaatggacaggaatagaatggtctcgaattgaatggaatcgtatggaatggcatcaaacggaatggaatggacagccacggaat

SEQ ID NO: 567234 - DNA, 557 bp, Homo sapiens
ataatttactgggacttgaccaccgatgtgtgatttgggtattatggttcaaaactttctaaatcataaactgatcccagaatgtttgatgcttggttaacagcatggaaaggcccctaatgctgggatgaccaactgtcccaatttgaccaagaatgaggggtttcccatgacgtgagactgtcagtgctaaaagcagggcagtcctgtataaaccagggcagttatctcctacctacactgtattaaaatcctttattaaggaaacaaagaaaagagaatccagggtttctgctttcarggcttggtgtttgttgtagtctttcttccccggccattggaaccagaggcagcacccctgtgaactggtcatagagtccaggtcatctatggtttaaaaagcagaaggctatgatttttcttataaaatgttttcctttgtagagttgtttttgccagttccaagaggaaatagtgggctgaaatcaagaggcatgactggatgactagtactaagcaaatgattcgtgcaaagatttcactggaaacattcagac

SEQ ID NO: 567235 - DNA, 508 bp, Homo sapiens
ataatagcaacaagattcagctgacaatttgaaattggattatatagctttgcccttaaaagagaagttatggaaatgccttctctcccgatgtgttttttctaatgaagtaacaaactcatgaagattaaagaaacattttacaaagaaacatcrtaataaagttgtcaaaagtgtgtcacatttccaagggatcttgtccctggaatactcacaaatagtcttttaatcaaaaaaaggatgaatcttagcaatagaaatgattgctaaattgtggtaagctacacaatattggagaaaagctaactttactagctatgcaagaatttagtaaaatcatcatggaaaaaatgcaaataatttttttttacttttcttttgagcagtgttactgtgtccagaagaatttatggcagtgttgaaaaattagccatgtaatgaactgcaacaagtaagtttttatgtcaagtatatgaaagcatcttgtatgacaatgaagatttactgc

SEQ ID NO: 567236 - DNA, 508 bp, Homo sapiens
tatggcagcccctcccatcacagaccaggagaccaaggaggaaaaagtcatgttttggactggacccagaatgcccctgctgtgtgcagcttagggamttggtgccctgcatcccagccactccagccatggctgaaaggggccaacatagagctcaggccatggcttcagacagtgcgagctttcaagctttggcagcttccacatggtgttgagcctgcaagccacagaagtcaagaattgaggtttgggaacctctgcctagatttcagaggatgtatggaaatgcctggatgctcaggcaaaagtttgctgcaggggcagggctgtcatggagaacctctgctagggaagtgcagaagggaaacgtggaggcggagtctccacacagagtccctactgggacactgcctagtggagctgtgagaagagggccacaattctccagaccccagaatggtagatccaccaacagcttgaaccttgcactggaaaagccacagacact

SEQ ID NO: 567237 - DNA, 580 bp, Homo sapiens
atgaaaactttcgactagacacaccttgtacatgattattcatagcagctttacttgtaatagtcaaaaattgaaggcaattagatgtcctcccatgagtgattaaacaaactaaagtacattaatcccatggaatattattaataatagtaataaaaagaagtaggctatgtcagtctatttagtctgttataacaaaagaccatcaactttgtggctgttaaaacaagagaagcctagttctcacagttctggaggctgagaagtccaagatgaaggcacaagatttggtgtctggtggaagcttgttttgtaggttatagacggtgycctccagctgtgtcctcacttagtggaaagggcaaaatgtctctcttgcacctcttttataagggcacaaattctatacatgaggacactgcccttagatctattcacctcccaaagtaactgcttgctaatatgagcatcatattgggggctggaatttcaacatacgaattttgagggacaaaaacctttagatgatagcataaactactcatacatgcaacaacctggttgaatctccagcaggata

SEQ ID NO: 567238 - DNA, 423 bp, Homo sapiens
tgatagtgagtaagttctcataagatctgatgattttaggaagggcattgctcccaatgctttgcaattctctctcttgttgccatgtgaagatggacatttttgcttccctttccaccatgaatataagtttccagagtccttctccagtcatgtggaagtgtgaatcaattacacctcttttttttaataaattacctaatcttgggtattttcttcgtagcagcatgagaaaggactaatacaatattgtactcttatgtggagactatgttcccaacattaccatatttcattttaattacatagtctcttttcttaacatgcaaatggatttttacatctaaaytacgcttctatcacctgacctgatagaggtggcagaacgatgttcccaggtctatcaatttccaagaaaatgta

SEQ ID NO: 567239 - DNA, 613 bp, Homo sapiens
acagcagaacttcctaaaaatcctctaatcactttattctaattactttctcatttttcataggacctactccctgtctctcttcacatgttttagttttgtaactaaaatactgcttagtagttacctccattctccaggctcaacctaaacatcttggtcttgccactcctttgtgtggaaaggmaaccccatagaggacaaggagtaacaccttgcattgattttcagaccagtgtgcctgtcactaagcctgttggacaaaattgcgtgagagaagaagatacattcaaaagggccacatttaaggaagccctacatattatccttttaaaaaactctacccaataggactatgatgaatgtaaggcttgaggatttaatcagttataccagccctgctcctccttgagggagaagtggagatgaaatatacaagatgggtaagtttatgggtaagtttagagatggagagaaattttatttatctctaaaatccgacaattacaaaaatacagtatcaactaaaataaaacaaaaaggttgtaaaaataaggttgtaagaataattttgtcctttacttaaggattttaacttaaaacatttgtggag

SEQ ID NO: 567240 - DNA, 613 bp, Homo sapiens
acagcagaacttcctaaaaatcctctaatcactttattctaattactttctcatttttcataggacctactccctgtctctcttcacatgttttagttttgtaactaaaatactgcttagtagttacctccattctccaggctcaacctaaacatcttggtcttgccactcctttgtgtggaaaggamaccccatagaggacaaggagtaacaccttgcattgattttcagaccagtgtgcctgtcactaagcctgttggacaaaattgcgtgagagaagaagatacattcaaaagggccacatttaaggaagccctacatattatccttttaaaaaactctacccaataggactatgatgaatgtaaggcttgaggatttaatcagttataccagccctgctcctccttgagggagaagtggagatgaaatatacaagatgggtaagtttatgggtaagtttagagatggagagaaattttatttatctctaaaatccgacaattacaaaaatacagtatcaactaaaataaaacaaaaaggttgtaaaaataaggttgtaagaataattttgtcctttacttaaggattttaacttaaaacatttgtggag

SEQ ID NO: 567241 - DNA, 594 bp, Homo sapiens
atgtaatttggcacattaacaaactaaaatggaaatcataagatcatatcaatatatacaggaaaagcactgacaaaatttagcacccatttatgattaaaaaaacaaacaaaaatttaaaaaaagtctctcagaaatctagggccagggggaccttgttcaacttgataaaatacactatagctaccatcatacctatggtgagcaactggatgtatttctcctratatcagcaatagtgcgataatgtcttcttttacttctcctagtcaatactatgctggagtatctagttagtgcattaaggtaataaaagaaaagaaaactcagtttacatgcttggtgttcttcccaaacacccatgaaatcagtctaattatgagaaaaacatcaggcaaattctaatagagtaatattctataaaacatttgaagattactcaatactattgaggtaatcaaaaacaatgccagagaaaagtatagccaagaaaagcctaaggagacacgactacttcatgtaatgtggtaacttagatgatattctggaacagagaaaggatacgaagaaaaaactaagcaaagctaaaactat

SEQ ID NO: 567242 - DNA, 594 bp, Homo sapiens
atgtaatttggcacattaacaaactaaaatggaaatcataagatcatatcaatatatacaggaaaagcactgacaaaatttagcacccatttatgattaaaaaaacaaacaaaaatttaaaaaaagtctctcagaaatctagggccagggggaccttgttcaacttgataaaatacactatagctaccatcatacctatggtgagcaactggatgtatttctcctgatatcagcaatagtgcgataatgtcttcttttacttctcctagtcaatactatgctggagtatctagttagtgcattaaggtaataaaagaaaagaaaactcagtttacatgcttggtgttcttcccaaacacccatgaaatcagtctaattatgagaaaaacatcaggcaaattctaatakagtaatattctataaaacatttgaagattactcaatactattgaggtaatcaaaaacaatgccagagaaaagtatagccaagaaaagcctaaggagacacgactacttcatgtaatgtggtaacttagatgatattctggaacagagaaaggatacgaagaaaaaactaagcaaagctaaaactat

SEQ ID NO: 567243 - DNA, 466 bp, Homo sapiens
ccttttctcttataaattctttgttagaagtttaccaagatggaatgcatagttttatctgagacaagcagccatttaacatgtgcaaagtaaagagataagcactagacaccccaactaacaacatgaaggggagcatcctgaggagaattagaaatgaggttgaaaaaggaatatcattaaggccgccatcttgtgtcaaattacaactcttgattcaaccccgtgcttggttgaataatggacaatttttgagaaactatattgacacctctgtctttaaaaamtgaggatggcatgaacacaagttgcctcactttaatgtggaaacagggatacgtagctctactggcctaattgtgcaattgcaatttaatacaggctcccaaatttgacaatgatcaatgtgttaggttattatatgctttgttaacagaaaagaaaaatgtgtttatctgtaaatctt

SEQ ID NO: 567244 - DNA, 568 bp, Homo sapiens
tttggatatgactccaaaagcccaggcaacaaaagtaaaamttaaaaaaaaatggtgctataacaaattaaaaagcttctgcagagcaaaggaaacaatagaatcaagagacaaccctacagattgggagaaaatatttacaaatcatacatcagataagaggctaatatacaaaatatgcaaggaactcaaaatactcaataacaagaaaacataaccctatttaaaaatgggcaaagggcggccaggtgtggtggctcacgcctgtaatcccagcactttgggaggctgaggcaggcggatcacaaggtcaggagattgagaccatcctggctaacatggtgaaaccccatctctactaaaaatacaaaaaattagccaggcgtggtggcaggcacatggtagcaggcacctgtagtcccagctactcgggaggctgaggcagaagaatggcatgaacctgagatgcagagcttgcagtgagccgagatcatgccactgcactccagcctgggcaacagagcgagactccgtctcaaaaaaaaaaaagggcaaagggcttgagtag

SEQ ID NO: 567245 - DNA, 513 bp, Homo sapiens
attattaatattctaatgtggtaactctggaaatcagcttctgctccatcttcatgatttgttattgttacttaatgtgggatacttgtttatttgtttagtgacttctctaaattgtttttgtaaaaacagtattctttgttgtgtgtgatcacttaagtctctgtgtgttctaatctcttcttataagaatagcagtcatattggattagggcccagcctaatggcctcattttaccttaattacctctttagagatcctatctccaaataaaatcatgttctgagatactgggagttagggattcaacatatgaatttttttgtgggggggcaggtagagtttagcccgtaataaccaccccagtaggkaggaagaagtctaggaatcccctgtctagaatctaggatcgttaagtctaggatctccgctgacattgtagggaaactagggtgtttttttccttttcctggagggtctaaaagtcctagatttccattcagtcttctctg

SEQ ID NO: 567246 - DNA, 513 bp, Homo sapiens
attattaatattctaatgtggtaactctggaaatcagcttctgctccatcttcatgatttgttattgttacttaatgtgggatacttgtttatttgtttagtgacttctctaaattgtttttgtaaaaacagtattctttgttgtgtgtgatcacttaagtctctgtgtgttctaatctcttcttataagaatagcagtcatattggattagggcccagcctaatggcctcattttaccttaattacctctttagagatcctatctccaaataaaatcatgttctgagatactgggagttagggattcaacatatgaatttttttgtgggggggcaggtagagtttagcccgtaataaccaccccagtaggtaggaagaagtctaggaatcccctgtctagaatctaggatcgttaagtctaggatctcygctgacattgtagggaaactagggtgtttttttccttttcctggagggtctaaaagtcctagatttccattcagtcttctctg

SEQ ID NO: 567247 - DNA, 513 bp, Homo sapiens
attattaatattctaatgtggtaactctggaaatcagcttctgctccatcttcatgatttgttattgttacttaatgtgggatacttgtttatttgtttagtgacttctctaaattgtttttgtaaaaacagtattctttgttgtgtgtgatcacttaagtctctgtgtgttctaatctcttcttataagaatagcagtcatattggattagggcccagcctaatggcctcattttaccttaattacctctttagagatcctatctccaaataaaatcatgttctgagatactgggagttagggattcaacatatgaatttttttgtgggggggcaggtagagtttagcccgtaataaccaccccagtaggtaggaagaagtctaggaatcccctgtctagaatctaggatcgttaagtctaggatctccgctgacattgtagggaaactagggtgtttttttccttttcctggagggtctaaamgtcctagatttccattcagtcttctctg

SEQ ID NO: 567248 - DNA, 544 bp, Homo sapiens
cagtgtaaaagtgttcccttttcaccacatccatgccaacatctattattttttgattttttaattatggccattcttgcaggagtaaggtggtattgttttgtggttctgatctgcatttccctgayaattagtgatgttgagcattttttcatatgtttattggccattggtatatcttcttttaagaattgtctattcatgtcctcagcccacttttcaaacggataatttgttttattcttgatgatttgttagattccttgtagattctggatattagtcctttgtcggatgcacagtttgtgaagattttcttccattccatgagttgtctgtttactctggtgattattattattattattattttgctgtgagaactttttagtttaattaagtcccattgatttatctttgttttttttttacatttacttttgggttcttggtcatgaagtctttgcctaagccaatgtctagaagggtttctccgatgttatcttctagaatttttatggtttcaggtcttagatttaagtct

SEQ ID NO: 567249 - DNA, 383 bp, Homo sapiens
ttttatttatttatttatttttttgcagctattgtaaaaggggttgggttcttgatttgattctcagcttggtcacttttggtgtatagcagtgctactgatttgtgttcattgactttgtatcctgaaactttactgaattcatttatcagatctagaagctttttggttgagtcttcagggttttctaggtatacaatcatatcattggtgaacgacrgcagtttgtcttcctctttactgatttgaatgccttttatttctttctcttgtctaattgctcttgctaggacttccagtactatgttgaatagaagtggtgtaaatgggcatccttatcttgtgtcagttctcgggtggaatgctttcaacttttcctccag

SEQ ID NO: 567250 - DNA, 369 bp, Homo sapiens
aagttacccttagtctgaaaatattaaatgagaattccgagamacaaacaactcataagttttagattgtgtacattctgagtagtgtgatgaaattttgcattgtcccttccatcccgcccggatgtaaatcatctctctgtccagcaggtccatactgtagatgctccctgcttgtcagccacttagtagccatctcaattatcagatcagctgtcatggtatctcatcacgcaggcattttgtcatcttgcatcatcacaaaaagaagaagaagggtgagtacaacacagtaagatattctcagaggaagagatcacaatcaaagaagctattttgagagagagagaccacattcacctaactttt

SEQ ID NO: 567251 - DNA, 625 bp, Homo sapiens
tccccacactcaattttaatcagtcaaaatataaagctctgattgtccatcactttgtagctcagtaaaacccttaatgcaacatttttactatagcactagtgttcagcctacataaacctttattcaccaacaaagtttggctctgtgtccctacccaaattaccaaattgtaatccccatgtgccaagggaaggacttgtaatccccacatgtcgagggagggaggtcattggatcatgggggtggttctctccatgctgttctcatgatagcaagtgagttctcatgagatctgatggttttgtaaggcagttttccctgcttttgctcacttctctctcctgccaccttgcgaagaaggtacctgcttccccttcaccttctgccatgatcgtaagtttcctgaggcctcccagccatgtggaactgtgagtcaattaaatctcccttgtgtataaattatcagtcttagggaagttctttatagtagtgtgaaatggactaatacaccaacaraagtacattttccttttctatgtatatatcacacattacaggtgcaatgagaatattacaccacttgatactcatattgccaggctgccactgctgggtaacagct

SEQ ID NO: 567252 - DNA, 528 bp, Homo sapiens
gagtggtcaatagagccacatgctcaaagggctcaggaagtcccagctactcacgggggctgaggtgggagggttacttgggctcagaaggtcaagcctgcagggagccatgatcatgccactgcactccagcctgggcaacagagtgagaccctgtctcaaaasggggatagggcatcaagaaggatgagatctgaaaagaggcctcatttagatttgaaaatcatgacattatcaatggtctttgccaaagcaggttctgtgaagtaataggttataaaccggatcatgattggtgacagaatgatacaggatctgaagcagaagtcaaatgctcttttcacgaaatctggaggtaaaaagaaagcaaaatagaacagtagttaggagaagagagagggaaggaattttaggatgggaagttgagcatacatgtgcagaggacacaggacgtgagtggaaggaaagtggtttgtggaataaggcaggctcatgggcagcacgacactgaaggaagaaacacaggcc

SEQ ID NO: 567253 - DNA, 528 bp, Homo sapiens
gagtggtcaatagagccacatgctcaaagggctcaggaagtcccagctactcacgggggctgaggtgggagggttacttgggctcagaaggtcaagcctgcagggagccatgatcatgccactgcactccagcctgggcaacagagtgagaccctgtctcaaaagggggatagggcatcaagaaggatgagatctgaaaagaggcctcatttagatttgmaaatcatgacattatcaatggtctttgccaaagcaggttctgtgaagtaataggttataaaccggatcatgattggtgacagaatgatacaggatctgaagcagaagtcaaatgctcttttcacgaaatctggaggtaaaaagaaagcaaaatagaacagtagttaggagaagagagagggaaggaattttaggatgggaagttgagcatacatgtgcagaggacacaggacgtgagtggaaggaaagtggtttgtggaataaggcaggctcatgggcagcacgacactgaaggaagaaacacaggcc

SEQ ID NO: 567254 - DNA, 276 bp, Homo sapiens
gactaaataagtgaaaacacgaaaggaagatgttacactagagaagaggagatggaggcaaattttagcctgagaacatttctgttaagaaccatttcctttcatgcagatgaggatatggacatcctgtttcatatcaactctagaaatcagtcatcactgtgggaaaataacttcataatagttaatagytttgatgttgcattacacgaaaaatgttttctcccttcaaatgttctagaagcacagcaactcatttttaaaagggtcaaggca

SEQ ID NO: 567255 - DNA, 590 bp, Homo sapiens
tttaaaggattagaattaagctcattgttgggagacaattatccatccacgtgtctcttgtgtttctgcatacgtcctacaagcagaggtgctgactgcctttttttctgaactatattttcagagatgtttattatggacaactgccatgaaagatagacaaaatgttttcctcaggagtaarcagctagcatgattactgcttattataaaagatatgtgttcctgaactcagggttcctcttctctaatgcagcctactgtatatgctgattttccctggccttccatgtattgccctatgattggggctctagaaacagttgcaagaaaatgcttatactttggctgctgctattgctgttagtaagaaagtcgtttgtctctgacccagaagtctcatgtcttctgcagcatccatgaaactatagcagtttaacttgttagtttgcaagtagggcaaaatgtaagacccttcatggttcttggtacccatttaatctgtccatgtgagtagattagggataagcagggtaaattctttcctctgaatggttgaaatgatcagtccagttgacggaacagaggat

SEQ ID NO: 567256 - DNA, 611 bp, Homo sapiens
ggtttcaccatgttggccaggctggtctcgaactcctgacctctggtgatcctcccacctcagcctcccaatgtgctgggattacgacaggcatgagccacctcacttggcctgatataatttttatcattgctcctctacaggtaagatctttcccccactttggcytttttcaaaattttctctgtgtctctagttatctacagcttgaatatgacatgcctctctatggactatttggtatttatctttcttggtgttctctaagattcctggatctgtggttttatttttgttatacattttggaaaactttggccattattgcttcaaacatttcctgtggtcttttctcttactttttttctggtattatcattacatttatgttatatctcctataattgtcttacaattcttgaatattctgctctatctttttcactttttttcttgttgcatttcagttttggaagtttctattgaccttccttcaaactcatagattctttgcttcacaatgttcagtctactgatggaacaatcagaggcatttttttatttttgttaagggcaggccttgtttagaacagaatgatctgggtatattt

SEQ ID NO: 567257 - DNA, 567 bp, Homo sapiens
gttgaatactgaattaaagaatatgcctccccccagggaagatcagatggctgaacactgtgaagtcayataactgctttccaaatatctatcctcctttcttctatgccgagataactgctttgtgcagggagataatatgtacatcgagaaagaatgaatcatgacttgactaagaccagtgggacaatcctattttccatttcttcagcctcctatgcaaccaaagatgaccatgtgacatagttctgatttttaaaaagtgtgcagaagttcgttagtgttcctaggatagtgtttgcattctgtttagatggaaaatacccagataccagttttttcttcctatgcccctttgtctgccttgttggagctgcagcaactctttaatatcaaagaggtaacaaaagcaggcaaactgagagtgatggagagatagatagaaagattctgggtctctgtcccacctccatatttgttatattatacagatgctcctcaatttatggtggggttacatactaataaactcatcaaaagttgaaaacatcataagtcaaaaatgca

SEQ ID NO: 567258 - DNA, 277 bp, Homo sapiens
cagcgttttagaaaagtaattatagggagagagtaattttttttagtgttccgagattttgaatgtggcaaaagatcycatttgtttcacttgcctgcttctttgtcacaagacacccctcaaaaatgtaatatgtatactggcccccactctgatgtaatacatgttagtattcatcacatttacttcagatctaatttttttaaagaagcactttacaatggacaaagttgaaatcccatgttcttgtctgtgagatgaggatgataataatagt

SEQ ID NO: 567259 - DNA, 277 bp, Homo sapiens
cagcgttttagaaaagtaattatagggagagagtaattttttttagtgttccgagattttgaatgtggcaaaagatctcatttgtttcacttgcctgcttctttgtcacaagacacccctcaaaaatgtaatatgtatactggcccccactctgatgtaatacatgttagtattcatcacatttacttcagatmtaatttttttaaagaagcactttacaatggacaaagttgaaatcccatgttcttgtctgtgagatgaggatgataataatagt

SEQ ID NO: 567260 - DNA, 623 bp, Homo sapiens
acatatagctccaattattcatttagactatgctatatattttttccattgtataattctaactttattcatacattcccctattgatggacagttaggttacataaagctcttctgttgtgaaaggcactacagaaatgtccttgagtatgtttctttctccaaagatgtgagagtttctcttggagtaattcgaaatagttctgggtcataggcatgtgtgaatatttttaactttaactaatgatgccaaaatgtattttgttgtggttgtactcgtgatgaaggtttctatttctctacccacacttagtaaagtcatacactttaaatttcaccagcctaaatggagtgagatggcatttgcattttcctgattactagtaaagctgtatatctttccttatgtattggctataataagtatttctttttctgtgaagtgcttgcttgtttctttatttatttttcttttgagttgttcatcttttaaattgatacttgagatgaattakttgttgcttaggaacattgtaaaaatcttctaacctgtgggtttggctttttacatttttttatatctctgtcatacaacagtttttcaaatgaagtcaaaactgtca

SEQ ID NO: 567261 - DNA, 553 bp, Homo sapiens
ttcttttttaatggagcagtgatttgagtcacaggacaggagaaaggtcagaggcagccatcaggaatgtcagggaaagaaaaaattctgaaccaaagttgctcacaattgcatatttttaatttcagtacatgttgcagaaagaatatttttcctaaacagctttaacaattttatctgacctgtacccatcctagctgttagctgagcagaaattcttacccatttcagagcggaactgaaataccttggtcagggattgggccttttctggacaggaagtagtaacttgtgtgctgcagagcccgctgatcacagaaacaagatcttggtgatgtggtgccaagcggatcatacaaaacctgagaatggagaatcctgttgcygatagtttgggattacagtggctaatgacaccaaaccattcagcaacacaaactctggtacatcaccgagctcctcagagtcaaggcaacacttaggatgtgcaagaaatgcagaagcagcatcatggggccatttttaaagggaggtgattatgagcacattgcag

SEQ ID NO: 567262 - DNA, 570 bp, Homo sapiens
catgattgcaccgctagactctagcctgggcaacaaagcaagactgtgtctccaaaaagaggagaagaaacattttggagaagtagaagtgaatgcagggacctccccaagcctgatggattttcctggagctcagggagattgagagagacattgaagggtccatagagcagaggggtctggggtctgtttatcagcaacttctccagaaagatggcctgactttggagggtatgctgcatggcacatctaggaactgggaatcatgcagccaagagggtgcagaagtagcagggggatcgtgctctctggagcaatgtctatgagctgatgactgacagccaaggtgtcccctgccctgagtgctatgatgctgcattagaacccagtgccatgcagaaccccaaaagagaaragaaacattagaatacctgggattaaggagttagaaatcaagttgcatgaaataaaaattttaaaattatatttctttcatttctaagtttttcaatgagttttattcccatcaatcagtcccttctcagtcagtccttgttacctccccgcccc

SEQ ID NO: 567263 - DNA, 543 bp, Homo sapiens
attgtgaggttcaaattgagtacacacatacaaacacacacacacacatacacgtatatatctggaccttagtggccaatactacttttatcccttgtccctttcttttggttagtttmtcaactcaagagagtggtttcaaaaaaaatgtcaaatttctttagagcagaattaaactttcccaactgaactctatatctaaaaacccatcccttactggggtgggagtagtggggagaaaaactgaggcaatgcatcagaagattccactaggactagaagagaagaggagattcctcactggaagttgcaaagagcaccagggccaggagaagatgtggaactgagaatcaagtggagggctaaggttaaaaagctcaagagaacagcttgaatgataggatacaatggaaggtacccagagtagaatgccaccatgttcataaaacaaggaggagtggtttgatagtaaaagggaagtgaatggtaaatgtacttattgaaacactttgaattatttttgtgtcttttttcttgtatcct

SEQ ID NO: 567264 - DNA, 543 bp, Homo sapiens
attgtgaggttcaaattgagtacacacatacaaacacacacacacacatacacgtatatatctggaccttagtggccaatactacttttatcccttgtccctttcttttggttagtttctcaactcaagagagtggtttcaaaaaaaatgtcaaatttctttagagcagaattaaactttcccaactgaactctatatctaaaaacccatcccttactggggtgggagtagtggggagaaaaaytgaggcaatgcatcagaagattccactaggactagaagagaagaggagattcctcactggaagttgcaaagagcaccagggccaggagaagatgtggaactgagaatcaagtggagggctaaggttaaaaagctcaagagaacagcttgaatgataggatacaatggaaggtacccagagtagaatgccaccatgttcataaaacaaggaggagtggtttgatagtaaaagggaagtgaatggtaaatgtacttattgaaacactttgaattatttttgtgtcttttttcttgtatcct

SEQ ID NO: 567265 - DNA, 590 bp, Homo sapiens
atcaagtggagggctaaggttaaaaagctcaagagaacagcttgaatgataggatacaatggaaggtacccagagtagaatgccaccatgttcataaaacaaggaggagtggtttgatagtaaaagggaagtgaatggtaaatgtacttattraaacactttgaattatttttgtgtcttttttcttgtatcctgatactaatgcttattaatttatttatttcaaaagtaatacatgttcatgataagaagttaaatcagtatcaaaggatgtaaaagcctacacctaacctcatttcccatatccacactccagagataaattttatttataatctattgtatattatataaaaaattaataagtctatctacatatattaactatatctaactctctttccctcattctctttcccttttctcaaataaaatcactttacatatatatatttctatacatctatatatacccttctatatagttatatacacctatgcatatatatatccttctatatagttcagctttttccacttaatagcattttaaacaccattccacatagatatacttcattccttttaac

SEQ ID NO: 567266 - DNA, 609 bp, Homo sapiens
ttagtaccttcaacagtaacttctctactttgcrtcactgaaacagcattaggaagaccataggtggaattcaatactctcactcgacttctctacactcctggccatattaattttatcccaaagctaaagtatttaacttggcaatgtgattgaagacatgttagagcaaaatagcatttttcttttaaaagacaacaatatacattgtaaataaagaataatttactccaaagaatgctcttttaacttggccatgtggtcaaagtcacttttattatggcttggagtgatatgcaattattatatttagacagcatttactttggacaagggtgccaaatttgtacagttgcacaccatatgcttttcattttgcaataatcaattccaagatttccattttccctgctttttctaggcagtctttcttaaatgacagcatttaaaaattgcagtagccatgtttagtgaattatgaagctctttagctcttgttttaaatattggcctcctggtatttcctaaacctttaactttagatattattatcaagttatatattatggcttttccttttgggtttcatcattatagttttagttttca

SEQ ID NO: 567267 - DNA, 526 bp, Homo sapiens
atggttctggttttgggagggtagggttgggagagatgacaagcttaacagggccctgtcaccagccacaaaagatagaccctgtacttcctttagactcacatagacaaattaggaaactgcatttagttttgccagacagcaagatgtgatttataaaattagtactgttaacaamgatctgaaaatgtccttaatgcagcagttctcagtacaagtggcacagtagatttcactagtgggggctggggaagctttgaaaagttttcatactctggctacatatgagatcaactaaataagaacccctagttgggggatatctgtacttctgaagctcccctggagattcttatgaggagtcaagattgagaaccacatgcatatcactcttaaggcaccatagcatctgccctccatttttggaattggcagcaaaaatggcatggcatgcaacagtccatggtgtaaaccggctgtttgaggagtatatgttctaacatgagaaccatgaccaaagggacaa

SEQ ID NO: 567268 - DNA, 643 bp, Homo sapiens
tattaaaagcattaaatgtgaagttgtggatggattcctgggcttctcccatatatagtagataatccttatttataataagttttgctggtgattcagatgcaggtgacccataactagcttgaaaaagaaggaagagcctcattcccatgcctatactccaagcagggatttgacataatggttctggttttgggagggtagggttgggagagatgacaagcttaacagggccctgtcaccagccacaaaagatagaccctgtacttcctttagactcacatagacaaattaggaaactgcatttagttttgccagacagcaagatgtgatttataaaattagtactgttaacaaagatctgaaaatgtccttaatgcagcagttctcagyacaagtggcacagtagatttcactagtgggggctggggaagctttgaaaagttttcatactctggctacatatgagatcaactaaataagaacccctagttgggggatatctgtacttctgaagctcccctggagattcttatgaggagtcaagattgagaaccacatgcatatcactcttaaggcaccatagcatctgccctccatttttggaattggcagcaaaaatggcatggcatgcaacagtcca

SEQ ID NO: 567269 - DNA, 643 bp, Homo sapiens
tattaaaagcattaaatgtgaagttgtggatggattcctgggcttctcccatatatagtagataatccttatttataataagttttgctggtgattcagatgcaggtgacccataactagcttgaaaaagaaggaagagcctcattcccatgcctatactccaagcagggatttgacataatggttctggttttgggagggtagggttgggagagatgacaagcttaacagggccctgtcaccagccacaaaagatagaccctgtacttcctttagactcacatagacaaattaggaaactgcatttagttttgccagacagcaagatgtgatttataaaattagtactgttaacaaagatctgaaaatgtccttaatgcagcagttctcagtacaagtggcacagtagatttcactagygggggctggggaagctttgaaaagttttcatactctggctacatatgagatcaactaaataagaacccctagttgggggatatctgtacttctgaagctcccctggagattcttatgaggagtcaagattgagaaccacatgcatatcactcttaaggcaccatagcatctgccctccatttttggaattggcagcaaaaatggcatggcatgcaacagtcca

SEQ ID NO: 567270 - DNA, 560 bp, Homo sapiens
ctgtgtttatctgcgctaatcagtgtggaatacagataacctctctgatataaaccctgagctcatatgggatcacttttttgtttgttttccctttgtckgattttcaggtaattttcaataagaagtggaaaaaaagtgtttttcccgcacattcaatgctattatattaaggcttgtacccctcattttgcatttatgctgttgatatttacatttagaggaatcttgtatttgagtttgtataatttcagcttactggcttatgcctctaaggaaacagtccatacagactttatgaattccatgcatttagctgtgaattagaccatacgttgggcaatctgattatttaaactacccttacaatttggccaaattccacagccaagtagctgtaaatgtgcacaagcaactaacaatatgttgaaactaacaatatgcatgataggagatttgcaactttatattaatctattcctttttgtgccaaatgaaataatgaactctagtatcctgaattgcaacatgcactgatttatttatttaaatttgtgttt

SEQ ID NO: 567271 - DNA, 503 bp, Homo sapiens
gcttgttagcttaaagtaggtcacttaatgccaaatcagggtttttaaagaaaattcactagaaagggggtcaaaaatgtaaactcctatagatgcaagcagggaacatgaatgagaaaaaccaggctgtgtgtgagaattacaagccagggactcctggctggtgatgcccctcccaggccttgcttggccacattagtatgcctcagctcccctgtgttcagtggttcctgagctcttgcattgcgcccatgaagaatgaggatatgtgggacattgaaagatgaggagratggagaagatttttatcgaatgatgaaaatggctttcaacagagacaggaacacagttgctgggggtgcagggattgttcccctacccaaaggccagaaagatccccctggtggccaggtctggggccttttatggactcagaatggggagtgtgtgctgattggtttgtgagtatgcaaataaagttaaagcaaaggcaccactcaaag

SEQ ID NO: 567272 - DNA, 640 bp, Homo sapiens
ccacaggatgcagtcattcccactcttccttcctctttccaaaagcagaggagccacaccctgtagccactgccaccccaggccacgaggggtactcccagactaccaccaatgttcccttgaggcccaagccctcttaagtcagcttgttgtgaatgctgcctggcctgtgactcacactttagggcactggagtcccctctggtccagggcaggtccagaaaagctgttccagagtcaagtcctggaatcagggaccccaagaaccctcttgatgctctaccccaccatggcagtgttggtacctaaggtgcaagacaacgtctccttcgtctcaagcagaaggagttttgccccataaccaccacagctggtaatatgctgagtctcacctgaaaccagcaaggcttagaggctcatcaagacccatratgtagtacctgggcagcggattcccttctggcccagagaggctctctggagccttctgttccaccatcttgctccacctcctcaatttatagaaaagttttaaaattatgtgtttaagtgctctaggacagtgattttcaaaattactttaactttgaaatgattttcacaagataagttttatatggaagccccataataaaacaga

SEQ ID NO: 567273 - DNA, 592 bp, Homo sapiens
agtaaaaagaaaacccaaagtagtcataattccgtaatccaggggtaactatatttagtgttttgtcgtacatgcttccaggaacctatgcgtgtgtgtatcatattgccttgaccttggaagctttcaattttaagatacattattaacttaataacattttactgaaaacaagtttttaaaatgtaacacataatgcattattttaaatcttctattttatttagtccagataatgtcataaattgctttgaatcatcaatagctatcaccaccagtagagtgatgtatgtgatgcttttcataatcgaggcctgtgatcatcacttcttcatttcttgtagaaatgaaaatataattttgatgtatactgaaaaaaaatcagggtttttctgcatttcctgtttcgttaaacttattccaagytttttcttatctggaatacctactttctcttggtcatcagccggagcttctgaaaatagatttgaggcctgagtaaaagtccttcactactcttgaattggtcatgccacctctcctagctttgaaaattcgaagactgagatcaatttctacagcatttaatgcc

SEQ ID NO: 567274 - DNA, 585 bp, Homo sapiens
tgtaggtaaccccttcaaatttaaagcaagttatgtgaaatcaattatgtgagtatttaaaacaactgctatatctacctctgtatctccatctggtttcaaatttctctgctaatcctttctagtcactttttttttactctcaagctctttcattgttctttaaatttgttttttctgccaytgaacatctgtttgtgactttttttggtcttcacgtataaacttcagtcacgtgggtttttttgtttgtttttttctactgggagctttgggtattgcagtattgtcttctagcatttactgattttaagaagcactttggggccaacttgatgtgtttctctgtggtagactgaacattttcttctgattgcttttagagtcttttaatctccccaaattctagcaaaatatgtcttttttgaaattgttttttctcataacatgaagtacagtctcaatttttagatttaagttttatttatttagatcaggaaagcatccttctattttggggggttgttgtttctaaatttcatatttgttacctttgggaatcttaagatctgtcatttggagatc

SEQ ID NO: 567275 - DNA, 617 bp, Homo sapiens
aggacttcaacatacctttttaggggacataatgcaactcataacaatgtatgacagcaggaaaaagtcagtagaagktttgaactgtaaagatttcctgggaagaaaatctcccagaaagtggaacaaaagtggaacaaaggacaaagagatgaaaattaggagaaaaaatagaataaatttagaggacaagtccagaccatctaaaatttaaatagtaggagctctgaggagaaaaataaaaaaaaaacaaaacacacacacggaagggaattactaaaagaataattcactgaatgaccaacacacaaaatgaaacatagttgtggactgttacaatataggtgatcaatacataatcctgaagggggtaaaacaggtaatatacaaggattgtcacaaagaatggcataggaattctcagtggtgacactggaatctaaaagacaaaacaaaccttagaattttgaaggaaactgatttcgaaagtactgtactcaaccaatctctcaggtccagtcaggtgctaacatattgtaaagatagctcagacatggtaggcctcaaagtgtctctcccatagaccattttccagcctttcagccatgttctggagg

SEQ ID NO: 567276 - DNA, 617 bp, Homo sapiens
aggacttcaacatacctttttaggggacataatgcaactcataacaatgtatgacagcaggaaaaagtcagtagaagttttgaactgtaaagatttcctgggaagaaaatctcccagaaagtggaacaaaagtggaacaaaggrcaaagagatgaaaattaggagaaaaaatagaataaatttagaggacaagtccagaccatctaaaatttaaatagtaggagctctgaggagaaaaataaaaaaaaaacaaaacacacacacggaagggaattactaaaagaataattcactgaatgaccaacacacaaaatgaaacatagttgtggactgttacaatataggtgatcaatacataatcctgaagggggtaaaacaggtaatatacaaggattgtcacaaagaatggcataggaattctcagtggtgacactggaatctaaaagacaaaacaaaccttagaattttgaaggaaactgatttcgaaagtactgtactcaaccaatctctcaggtccagtcaggtgctaacatattgtaaagatagctcagacatggtaggcctcaaagtgtctctcccatagaccattttccagcctttcagccatgttctggagg

SEQ ID NO: 567277 - DNA, 575 bp, Homo sapiens
tctaccacttctggggctgggagaatmaagggcaattgaaaattggcctggcgtgcatggaaatggtaaatggctaaggatatattggcgtgtcactgacagtgtcagctaaagcgatctgcagagaataatttattttattagtatttattaatgatgtttcatttaatttgctctatcaaatgccactaaaagttgaatcctggcttttcagaggcttgagctattctgaaaaacagttgtgcaaaatccaatcgggtgtgtcagtggcatgggataggtggattgttgggagtgaaactccctggtacaggcagtagggagataatcaactgcagagaatttaaaaacaataataaaaccgattaaaaggcagtttgctttttattatcacaatgcattagcaattctaaacaatgtcagtgataaaatattcctccctaatggatgaaacactgccccccaccccactctgttctttgtgtatgtactacagtaagttgctttatcttctagggaaatatatttgtggtcaaattatttcaggtgagcatttcaagtctgcgaagaggtag

SEQ ID NO: 567278 - DNA, 644 bp, Homo sapiens
cctcgcattaccaaaaccttttaggcaataactgctgtactccagccaaaaaccacagaaagaacagtggccccacttccgcctacaccagaaaaggcagagtggggagcctagacttctacccttgtcgtgctgtagcgaggtgttctaagctcctgctgtagggtggtgttagagcaagctaagtagaaaactgggactttattcctattggatgttgatgaagacatccccatactcacagcatcagtgaggagactgagttctatctctacctagcwgtaatgatgctatcttcccctacacatagaggtagtgtcaaaggagacctagtagagactgagaaagttcacccctgcccaccccacccaagtggtgtcagtagagggcaggaacaaggcactcccagctttcccagtcagggtaatatcagcagagacctttcagggagtgggagctcccacctcatgccagcagtaatgagggagaccctcacccttggggtgttaattgagtcccagtggggaaactggacttctactctgcctagaagtagtgcagcgggactatccttctcctcttctctttccaatatagcgtcagagatgatcacctaaaacagaaggcttataaaaattcaaaat

SEQ ID NO: 567279 - DNA, 644 bp, Homo sapiens
cctcgcattaccaaaaccttttaggcaataactgctgtactccagccaaaaaccacagaaagaacagtggccccacttccgcctacaccagaaaaggcagagtggggagcctagacttctacccttgtcgtgctgtagcgaggtgttctaagctcctgctgtagggtggtgttagagcaagctaagtagaaaactgggactttattcctattggatgttgatgaagacatccccatactcacagcatcagtgaggagactgagttctatctctacctagctgtaatgatgctatcttcccctacacatagaggtagtgtcaaaggagacctagtagagactgagaaagttcamccctgcccaccccacccaagtggtgtcagtagagggcaggaacaaggcactcccagctttcccagtcagggtaatatcagcagagacctttcagggagtgggagctcccacctcatgccagcagtaatgagggagaccctcacccttggggtgttaattgagtcccagtggggaaactggacttctactctgcctagaagtagtgcagcgggactatccttctcctcttctctttccaatatagcgtcagagatgatcacctaaaacagaaggcttataaaaattcaaaat

SEQ ID NO: 567280 - DNA, 644 bp, Homo sapiens
cctcgcattaccaaaaccttttaggcaataactgctgtactccagccaaaaaccacagaaagaacagtggccccacttccgcctacaccagaaaaggcagagtggggagcctagacttctacccttgtcgtgctgtagcgaggtgttctaagctcctgctgtagggtggtgttagagcaagctaagtagaaaactgggactttattcctattggatgttgatgaagacatccccatactcacagcatcagtgaggagactgagttctatctctacctagctgtaatgatgctatcttcccctacacatagaggtagtgtcaaaggagacctagtagagactgagaaagttcacccctgcccaccccacccaagtggtgtcagtagagggcaggaacaaggcactcccagctttcccagtcagggtaatatcagcagagacctttcagggagtgggagctcccacctcatgccagcagtaatgagggagaccctcacccttggggtgttaatwgagtcccagtggggaaactggacttctactctgcctagaagtagtgcagcgggactatccttctcctcttctctttccaatatagcgtcagagatgatcacctaaaacagaaggcttataaaaattcaaaat

SEQ ID NO: 567281 - DNA, 594 bp, Homo sapiens
ggaattctgggagatacgattcaagttgagatttgggtggtgacacagcaaaaccatatcatcatgttatgtatatataatgtaataattagagaaacaactagaaaaggtgatataaaaggatgcaccccaaataatttaataaatgaaaatgaaattcacagtatttttaaataacaggaagacaaggaaattaaaacaaagaaacaaaaaaaaaggaaaaaaatccaacttcagccccataaggaacctagaagttaccattttcattcttacaatagaaaaactaagcaaactgaaaatcagttacttttcttggactcatgagaggattgaggtgacagggaaaactgccacctggaaatctggagagacaagaaaatctgagagagaaccatagctaaaatctgctcagtagaaagtgggtccctgaggaagcacagacgctgtacttagtagaaaaagaytttaagtcaactgtcttaaatatactagaaaaactaaagaaaactgtcaacaatgagctaaataaatccagaagaaccatgtatgaaaaaataaaaatcagtaaagaacagaaatagatattataaa

SEQ ID NO: 567282 - DNA, 580 bp, Homo sapiens
tttgggtggtgacacagcaaaaccatatcatcatgttatgtatatataatgtaataattagagaaacaactagaaaaggtgatataaaaggatgcaccccaaataatttaataaatgaaaatgaaattcacagtatttttaaataacaggaagacaaggaaattaaaacaaagaaacaaaaaaaaaggaaaaaaatccaacttcagccccataaggaacctagaagttaccattttcattcttacaatagaaaaactaagcaaactgaaaatcagttacttttcttggactcatgagaggattgaggtgacagggaaaactgccacctggaaatctggagagacaagaaaatctgagagagaaccatagctaaaatctgctcagtagaaagtgggtccctgaggaagcacagacgctgtacttagtagaaaaagattttaagtcaactgtcttaaatatactagaaaaactaaagaaaactgtcaacaatgagctaaataaatccagaagaaccatgtatgaaaaaataaaaatcagtaaagaamagaaatagatattataaaaaggaaccaaacagaat

SEQ ID NO: 567283 - DNA, 644 bp, Homo sapiens
cgctgtacttagtagaaaaagattttaagtcaactgtcttaaatatactagaaaaactaaagaaaactgtcaacaatgagctaaataaatccagaagaaccatgtatgaaaaaataaaaatcagtaaagaacagaaatagatattataaaaaggaaccaaacagaattctggagctgaaaaatacaataactgatgtgaaaaacccactagagtgtttcagtagcatagctgagcaggcagaagaatgaaccaggaaatttgaagayagatcaacttaaactacccagtctgagaagcaaaaaggaaaaaaaatgaagaaaaataatacctaagaagcctgtggcacaccatcaagcattttcatatactcataatgaatatcccaggagagaagagaaagtggcagagaagaaataatggctgaaaacttcccaaatttgataaaagacataaaaccacatatttgagaatctcagaaaattccaggataactgtgaagagaaccacacagagacacataatgaaattgttgaaagacaaagacaaagagataatcttcaaaaatgcatgacaaaacaactcatgacatacaagagagcattgatctagcagatttttcatcaaaaatcatgaaggccagaag

SEQ ID NO: 567284 - DNA, 644 bp, Homo sapiens
cgctgtacttagtagaaaaagattttaagtcaactgtcttaaatatactagaaaaactaaagaaaactgtcaacaatgagctaaataaatccagaagaaccatgtatgaaaaaataaaaatcagtaaagaacagaaatagatattataaaaaggaaccaaacagaattctggagctgaaaaatacaataactgatgtgaaaaacccactagagtgtttcagtagcatagctgagcaggcagaagaatgaaccaggaaatttgaagatagatcaacttaaactacccagtctgagaagcaaaaaggaaaaaaaatgaagaaaaataatacctaagaagcctgtggcacaccatcaagcattttcatatactcataatgaatatcccaggagagaagagaaagtggcagagaagaaataatggctgaaaacttcccaaatttgataaaagacataaaaccacatatttgagaatctcagaaaattccaggataactgtraagagaaccacacagagacacataatgaaattgttgaaagacaaagacaaagagataatcttcaaaaatgcatgacaaaacaactcatgacatacaagagagcattgatctagcagatttttcatcaaaaatcatgaaggccagaag

SEQ ID NO: 567285 - DNA, 625 bp, Homo sapiens
accaacatgaagcctgatctcttccaccttcagttttctgtatacaaattctccttcagtgttttatcaatcatggtaggataggtcaatgattggaaactacctcagtccatttttgtatggagtctgagataagaatggattttacatttttaaaggtctgttaaaacaaaaacaaagaagyacaagtgtcagagagtgtctgtggcccatgatgcctaaaatatttattattttatcctttacagaaaatgtttgccacaccctgagctatattatgctttgataacaaaccacctttaaatttcagtggtttgtaaaaaaaaaattagaaagttcacttttcacttaggttatacaacagtggtgggcccagttgcagctcagctcttcattctgtgtcttcttcaatctgggatacaggctataagagcgaacccatatctggcagaggcaatcaagcaaaggctgaaccaaatgagggtcccactgctttgcctgaatgtggtatacgtgactgctactcacaatcaactggtccaagccaagcacatggcaaagccttgtgattattatggcaagaaatacactctttccctccaaaaagtgtcaccagaaggaggcc

SEQ ID NO: 567286 - DNA, 625 bp, Homo sapiens
accaacatgaagcctgatctcttccaccttcagttttctgtatacaaattctccttcagtgttttatcaatcatggtaggataggtcaatgattggaaactacctcagtccatttttgtatggagtctgagataagaatggattttacatttttaaaggtctgttaaaacaaaaacaaagaagcacaagtgtcagagagtgtctgtggcccatgatgcctaaaatatttattattttatcctttacagaaaatgtttgccacaccctgagctatattatgctttgataacaaaccacctttaaatttcagtggtttgtaaaaaaaaaattagaaagttcacttttcayttaggttatacaacagtggtgggcccagttgcagctcagctcttcattctgtgtcttcttcaatctgggatacaggctataagagcgaacccatatctggcagaggcaatcaagcaaaggctgaaccaaatgagggtcccactgctttgcctgaatgtggtatacgtgactgctactcacaatcaactggtccaagccaagcacatggcaaagccttgtgattattatggcaagaaatacactctttccctccaaaaagtgtcaccagaaggaggcc

SEQ ID NO: 567287 - DNA, 625 bp, Homo sapiens
accaacatgaagcctgatctcttccaccttcagttttctgtatacaaattctccttcagtgttttatcaatcatggtaggataggtcaatgattggaaactacctcagtccatttttgtatggagtctgagataagaatggattttacatttttaaaggtctgttaaaacaaaaacaaagaagcacaagtgtcagagagtgtctgtggcccatgatgcctaaaatatttattattttatcctttacagaaaatgtttgccacaccctgagctatattatgctttgataacaaaccacctttaaatttcagtggtttgtaaaaaaaaaattagaaagttcacttttcacttaggttatacaacagtggtgggcccagttgcagctcagctcttcattctgtgtcttcttcaatctgggatacaggctataagagcgaacccatatctggcagaggcaatcaagcaaaggctgaaccaaatgagggtcccactgctttgcytgaatgtggtatacgtgactgctactcacaatcaactggtccaagccaagcacatggcaaagccttgtgattattatggcaagaaatacactctttccctccaaaaagtgtcaccagaaggaggcc

SEQ ID NO: 567288 - DNA, 625 bp, Homo sapiens
accaacatgaagcctgatctcttccaccttcagttttctgtatacaaattctccttcagtgttttatcaatcatggtaggataggtcaatgattggaaactacctcagtccatttttgtatggagtctgagataagaatggattttacatttttaaaggtctgttaaaacaaaaacaaagaagcacaagtgtcagagagtgtctgtggcccatgatgcctaaaatatttattattttatcctttacagaaaatgtttgccacaccctgagctatattatgctttgataacaaaccacctttaaatttcagtggtttgtaaaaaaaaaattagaaagttcacttttcacttaggttatacaacagtggtgggcccagttgcagctcagctcttcattctgtgtcttcttcaatctgggatacaggctataagagcgaacccatatctggcagaggcaatcaagcaaaggctgaaccaaatgagggtcccactgctttgcctgaatgtggtatacgtgactgctactcacaatcaactggtccaagccaagcacatggcaaagccttrtgattattatggcaagaaatacactctttccctccaaaaagtgtcaccagaaggaggcc

SEQ ID NO: 567289 - DNA, 593 bp, Homo sapiens
agggagggaggtgattggatcatgagaytggtttcccccatgctgttctcgtgatagtgagttctcacaagatctgatggtttataagtgtttgacagttccttctttactcgctctctctcctgtcaccttatgaagaaggtgcatgtttccccttccgccattattctgagtttcctgaggtctccccagccatgcggagctgtgagtcaattacacctccttcctttataacttacccagtctcaggtatttcttaatggcagtgtgaaaatggactaatacacatggttttcaaactttagtgtgcttcagaatctcatggaacacttgctcaaacaaggattagcttttgattcagtaggtttgaggtggggcccgggattctgcatttctatcaagttcccaggggatgctgacattccacactttgagaaccgctgctctgtaagatgcttctccgggggagtgggaatgaactctagtttaaatcagctactcccccttgaactcctctaccagtatctgcgtaatcgtaatcatcctagattacatcccaggatggaatcattataatacattcaactagatgt

SEQ ID NO: 567290 - DNA, 526 bp, Homo sapiens
tctatctatcatctatcatcattatcatcatcatcatcatcatcatcatcatcatcaatctatccattctaagtctttcggtagtagatatttccatatattaaaaacaaacaaatgaaaaaccaaaataaagctgacatttagtgccttcaagccccaaccattctctttttttaaaccactttaagtagagacaaaacaagcaaaggttgactttggtggtagagtaaatttacactttgtggaagtttaaatttgaaaggctgaactagatttccaaatttttgtaagtgaaactgatgagattaaaataaattgtcccatttcctggaatcaggccctgtccaaatgcagcatgagtttttctgaaaactygattaaaattaaaatgatctcataaggagagactttggaaatggtggagaaaacccaacatcaggcatattcgttttctacacatcagaaagaatgggtcagaatttggaaagatttgaaagtgggaatgttgtatctttcttttgagatt

SEQ ID NO: 567291 - DNA, 298 bp, Homo sapiens
gaggttaagggtttattctaatggaatttcagccagtcagtagagagatttaggacaaaaagtttcattttcactcttttacttacaagtgtttccctatagtgtaaatacatagagatactatttatgtcgtttgatgattcttaccatctttaatcttcaatgtcacttcctaatcataaactttattcatcatattttgatttcctattaggtattcatcttagaaaataactgagctaaacagttgagattagaaatagtcacatttctaawctgtctccagggtacttgttta

SEQ ID NO: 567292 - DNA, 524 bp, Homo sapiens
tttcctacaaggaaataaaaaagaaaaaggaaascttccaggccacaggtgagccgcctggtggctcaggttatccccaggccaagctgaggctgcaaggtcaccaggggactgggaattctgggcacatagctggggcagagctctaccaaatatcctcaccataataccaccgacctgccatggagcagccagaagcagcaggagaggcccttcctcctgcagtgttcctctaggattgcccactgagaaagcttagttaacatcatgctctttaaaaaggagagatgtcttcacaataaatagctaatgcatgtgagtcttaatgcctaggtgatgacttgataggtacagcaaaccaccacggcacacgtttacctatgtaacaaacctgcatgtcctgtacatgtatcctggaacttaaaataaaattaaattttaaaaaaaggagagatgcttaaagaaattctgtccattgtggcaaaacatatctcagggtgactttggagctgagaggcaataaa

SEQ ID NO: 567293 - DNA, 608 bp, Homo sapiens
caaccctttccactgcggtcacktacacatttaacttcctactccctctgttcaaaaattatcaaaggagaatgatgaaactcagaaagctgtaacacagcttcaagatgcaccacaattactctgtgaactcatgaaaagcattggatttgaaaagactagaagaataagcagctggtactttaggagtgcttatcatgtgactagccttgttctaacttatttaatccccatatcagacctatgtttatcatactgattttacagagaagtaaatcaaggagaaagaaggataagtaacttttccaaggccacaattgcaaggcttggagctaggattggaacccagaagtatggttatagagtctgtgcttctagccactatttaaacaagatgaaccaaacagttaagaccttaaatggactatgatgaatagaagtggggaagcatagagcagtgctgctgttactcaggagacccagcttcacctccacttgagaaccctctgaagtagctgacaaaatgttaggtgagtctcctcagacctgggctctggaaaataggcctcattctttcctgaaaccacagagctctaaaagagcaattg

SEQ ID NO: 567294 - DNA, 581 bp, Homo sapiens
gtttgtttctgtttgctcctttattttatttattttttttgacagggtctctctctgttacccaagctggagtgcagtagtgcaatctcagctcactgcagccttgacctcccaggctaaagtgatccccctgcctcagcttcctgcgtagctgggactgcaggcacatgccaccacaccrgctaattttgtttattttttttgtagagaccagatcttgctatgttgccagggctggtctcgaacttctgagctcaactgatcctccaaccggaatacctgtgattataggtgtgtgcttgtttactgctttaatgtggctactagaaaatatgatatatacatgtggctcgcatttgctgctctcgactacctgcttcatgaggaaggggacggtgtgcatagccccttctggcatagagccagagctcagtaaccacttggtacatgttaagtcagccttgcgaagggggaagggaaccagctctctgaagaaccatcctgcaatgtattcataaatggaatgtgacacaccaggggacttcacagatctgaatcctgggacaaagatcctccagcag

SEQ ID NO: 567295 - DNA, 573 bp, Homo sapiens
aaaaaatcccttcactcttaacttagtagaatttcagagataagcaaggatatatatatgtctatagctcatcatatgtaaccaactttcccaggacaatagatggataaagaaaacattgaagatatgttgctaaaaagcacaatgtatcattttctttttaaaagctaatattcaataattctagttttataattttattagtccattatcttgctgctaataaaaacataccagaaactgggtaatttacaaaggaaagaagtttaatggactcacaggtccacatggctggagaggcctcacaatcacggtggaaggtgaaggaagarcaatggcacgtcttacatggcagcaggcaagagggcttgtgcaggggagcttccatttataaaaccatcagatctcatgagacttacccactaccaccacaagaacagtatgggggaatctacccttatgattctccacctggcctcgcccttgacacatggggattattaaaattcaaggtgagattttggtggggacacagccaaaccatatcatataatgttaacttatatatgcaca

SEQ ID NO: 567296 - DNA, 573 bp, Homo sapiens
aaaaaatcccttcactcttaacttagtagaatttcagagataagcaaggatatatatatgtctatagctcatcatatgtaaccaactttcccaggacaatagatggataaagaaaacattgaagatatgttgctaaaaagcacaatgtatcattttctttttaaaagctaatattcaataattctagttttataattttattagtccattatcttgctgctaataaaaacataccagaaactgggtaatttacaaaggaaagaagtttaatggactcacaggtccacatggctggagaggcctcacaatcacggtggaaggtgaaggaagagcaatggcacgtcttacatggcagcaggcaagagggcttgtgcaggggagcttccatttataaaaccatcagatctcatgagacttaccyactaccaccacaagaacagtatgggggaatctacccttatgattctccacctggcctcgcccttgacacatggggattattaaaattcaaggtgagattttggtggggacacagccaaaccatatcatataatgttaacttatatatgcaca

SEQ ID NO: 567297 - DNA, 613 bp, Homo sapiens
gtgtttcctaaatgtctttgatctggtacatttgaccaatccccatttaatagtcataaaaggaagaagtccaagaataaggcaactaggtacatccctcgattcagagcttaaattctagggcgccatttctgtggagtagtttatgtagtgaataactttgagggagactatagttcatgagaaatagatacaagccctgaggctatctcataaaaccccttgctccctcccaggaatgcaattaatacagaacagtgatcatgttttctgaaggaagcaaggaaaatgacaacatcatatttttattccaggatcttagggtcttgaaataacttaggaatttttttttttwaaattttgtaaagagaaataaccaataattaactgtgatatttaacctgtgttccttccatctttgcttctatcctttattttttctttctctagttcattttttgcataaatgactatatgaataatatataaattattaataaaggaataattgacaaaacatttaccaatctttcctttctcctatttctttctgtgttatttcttttttctctcatttttatgtgaatgaaataaagagagacagaaatgcaat

SEQ ID NO: 567298 - DNA, 343 bp, Homo sapiens
tctcttgacctcgtgatcttcctgcctctgcctcccacagtgctgggattacaggcatgagccacggtgtctggccattttttttttttttwaaataatctcatctctttaaaaagcaattcccctttttatgtgatctatcatttgtgtctgaccctttcccaaagagtaactttcttttttgtttttaacttttattttaggttcaggggtacatgtgcaggtttgctgtataggtaaattgtgtgtcatgggggtttggtgaacagatatttcatcacccaggtaataagcatagtacctgataggtagtttcatgatcctcaccctcctcccaccctcc

SEQ ID NO: 567299 - DNA, 601 bp, Homo sapiens
attttattccttatggattttttttctgcttaaatacaaacttgttcaggttatattttccatgcaggttaagttattcagtaggactgagaaaaaaggaaattatattgttcaaccacttaatatttgatgtttaaattactttgatttacttctttattaataatttttaaaagtgatataacaagaaaataaaaataatcagatcrttaatcttacttttcctgcaagatggaagatgcatatatggctttcctgtttattaactcaggacacaagacattttgaccatttgatcatctgttgcatattaacagtaagcttcatttctaaatttctatacattctgtaagtacaaagagctatatggctaaaggaaagtctgagagggatttttggaagaaatgtgcagagaaggtatcactgtttcctctcctcagcactctagatagttatgctgacatttaaagcaccatcttatatagtagcgtagtgcttgaggacacccattgtgaagatatgaatttgtagatatgttttgtatgtgttatgacatatttttctgatataaacatgttttctcaccatgaccccatgtaat

SEQ ID NO: 567300 - DNA, 567 bp, Homo sapiens
agcattttccccagagtagaacttctttaaaaattggagtcagtcctctctcagcctgcygctgctttatcaacgaagtttatgtaacattctaaatcctttgttgtcatttcaacaatgttcacagcatcttcaccaggatagatcccatttcaagaaaccactttctttgctcatgtataagaagcaactcctcctcatctactaaagtttgatcataatattacagaaattcagctacagaaattcaggctccacttctaattctaattctcttgctattgaacctctcaaggtcatccatgaaggttggaatcaacttcttccaaactcctgttaatgttgatattttgacctcctcccatgaatcacaaatgttcctaatggcatttagaatggtgaatcctttccagaagtttttcaatgtgctttgcccagatccatcagaggaatcactatctatggcagctacagccttacaaaatgtatttcctaaataataagacctgaaagtcaaaactactcctggatccatgggctgcagaatggatgttgtgttagcaggca

SEQ ID NO: 567301 - DNA, 403 bp, Homo sapiens
attaaataaatagttgctgttgctatttaatatgatatttatataattatcatactttgatacattgtgtttcacacatcatttttttccagaaaaaataattaataattaaagttaattaaactttctgacatasctctgcaacaccttttcctacattatttggccatatatattttgattacctccttatgtgatgatggcttggtattcgcttttcatttttttattttatttttctcccagttttggatgtcagaattcttttttttttttagatttcagataattttctctttatattattattattatactttaagttctagggtatatgtgcgcaacgtgcaggtttgttacatatgtatacatgtgccatgtttgtgtgctgcacccattaact

SEQ ID NO: 567302 - DNA, 622 bp, Homo sapiens
gtaaaattctgcaactttaatcacaaccacttttcagaataattaaatcacccccaaagtgccttccaatccttttatatttaatctctaccccaccaccatgtctaggtacacattgatctatttttgctgtagtagttttgcttttactagaaatttcatatacatggaattatttaataagtgattgtccctagcttctttcaattaacacaatattttttaaagttatccatattgctgcacttattaatagtttgctatttctttattctaagtagtattttattgcatgaacataccatattttatctatttgacattggatgaatagttgcattattccagttttgggctactggatactgcaggagtaaggtgatatctcattgtggttttaatttgcattttgctgatgattagtgatgttgagcatttcttcagaacagatgtgtttatcacacatctgtatatcttcttttgagaaatagctattgatwtggtttggctgtgtccccacccaaatctcatctttaattgtagctcccataattcccatgtgtcatgggagggacctggtgggaggtaattgaatcatggtggtggatcttttccctaccgt

SEQ ID NO: 567303 - DNA, 545 bp, Homo sapiens
tacagtttggagacattgagatccaagttttagtctcagattggagaaacataaaaatgattataatggttggtctgtggaaattatgggtaattcttttatgttaccttttctgaaatgtttataatgcaatttgttatttccaaaatgaaaaaagaatattttaaaagaatgctaataacaataatagtctaattacaaaaaataattcgtgtatgttaataaatttgctgtgatatgtggaacgtgtgtgtgtgtgtgtgtacaaacctgtaacagagttcaggatatgtaagttagccaaaagaattgctaaactcaattcataaaagagaaacctgaaacttgtgacttgtccagatttttccataaaaatagaaatcaagtatgcattagaatcaccagctcacataaacattctttagcctccattgattgaatacttcaaattaagtagcaaactaaaataaaattmtcaagataggaggaggctggtgtgtgtgtgtgtgtgtgtgtgtgtgtgtgtgtgtgtgtgtgacagtgaa

SEQ ID NO: 567304 - DNA, 576 bp, Homo sapiens
aaagaacataggactcagccatcaagaaattagtcttggttctgctgtatggctaagatctctctgtgttcatctyactcctctgggcttaaggatgcttctttagaaataatcaataagttaacgaaggaattggctttatgaactgaatgtgtctctccaaaatttgttaaaacagctatccccagtgtggtgatatttggatgtggagactttgggatataatttaatcatgagagtggaggcttcctgaatgagatgagtacctttagaaaaagaaaccccagatagttttttcactctcattccaccacgtgaggggacaagtcctcagactgcaacctgtacgatcaccctcttcagaatgcgaccacgctgtcaccctcatctcctatttccagccttcaggacagtgaaaaaaaatgtctgctattcataaaccatcttgtctgtggtatagcagccatgaactgactaagacaggtgatttggagatgatgagtcctgtgaaccctttaaactatgagacctgcgaaatgataatttctggttcatactttttgtaaattaatggta

SEQ ID NO: 567305 - DNA, 576 bp, Homo sapiens
aaagaacataggactcagccatcaagaaattagtcttggttctgctgtatggctaagatctctctgtgttcatctcactyctctgggcttaaggatgcttctttagaaataatcaataagttaacgaaggaattggctttatgaactgaatgtgtctctccaaaatttgttaaaacagctatccccagtgtggtgatatttggatgtggagactttgggatataatttaatcatgagagtggaggcttcctgaatgagatgagtacctttagaaaaagaaaccccagatagttttttcactctcattccaccacgtgaggggacaagtcctcagactgcaacctgtacgatcaccctcttcagaatgcgaccacgctgtcaccctcatctcctatttccagccttcaggacagtgaaaaaaaatgtctgctattcataaaccatcttgtctgtggtatagcagccatgaactgactaagacaggtgatttggagatgatgagtcctgtgaaccctttaaactatgagacctgcgaaatgataatttctggttcatactttttgtaaattaatggta

SEQ ID NO: 567306 - DNA, 533 bp, Homo sapiens
gattgaagggtagcgagagagcctggagaagagagtgaaaagaccgcttacccaatttgaaattggtgagawgttccttgggctggttggtctgaggacccaaagtcataggtggatctcttcacggagtgaggatgaggacaggagactggtctcccgaaggagtccctctgacccaggtcttctgcaccaaatgtctcacgcgtccttgtgaagaaagtccaccaacaggatttgtgtgaacagcaaggctgtttatttcacctgggtgcaggtgggctgagtccgaaaaaggagtcagcgaagggtggtgggattatcattagttcttacaggttttgggacaggcggtggagttaggagcaatgttttgctggcaggtggtggatctcacaatatacattctcaagggtggggagaattacaaagaaccttcttaagggagggaaattacaaagtacattgatcagttagggtggggcagaaacaaatcacaatggtggaatgtcatcagttaaggctattttcactta

SEQ ID NO: 567307 - DNA, 533 bp, Homo sapiens
gattgaagggtagcgagagagcctggagaagagagtgaaaagaccgcttacccaatttgaaattggtgagatgttccttgggctggttggtctgaggacccaaagtcataggtggatctcttcacggagtgaggatgaggacaggagactggtctccygaaggagtccctctgacccaggtcttctgcaccaaatgtctcacgcgtccttgtgaagaaagtccaccaacaggatttgtgtgaacagcaaggctgtttatttcacctgggtgcaggtgggctgagtccgaaaaaggagtcagcgaagggtggtgggattatcattagttcttacaggttttgggacaggcggtggagttaggagcaatgttttgctggcaggtggtggatctcacaatatacattctcaagggtggggagaattacaaagaaccttcttaagggagggaaattacaaagtacattgatcagttagggtggggcagaaacaaatcacaatggtggaatgtcatcagttaaggctattttcactta

SEQ ID NO: 567308 - DNA, 533 bp, Homo sapiens
gattgaagggtagcgagagagcctggagaagagagtgaaaagaccgcttacccaatttgaaattggtgagatgttccttgggctggttggtctgaggacccaaagtcataggtggatctcttcacggagtgaggatgaggacaggagactggtctcccgaaggagtccctctgacccaggtcttctgcaccaaatgtctcacgcgtccttgtgaagaaagtccaccaacaggatttgtgtgaacagcaaggctgtttatttcacctgggtgcaggtgggctgagtccraaaaaggagtcagcgaagggtggtgggattatcattagttcttacaggttttgggacaggcggtggagttaggagcaatgttttgctggcaggtggtggatctcacaatatacattctcaagggtggggagaattacaaagaaccttcttaagggagggaaattacaaagtacattgatcagttagggtggggcagaaacaaatcacaatggtggaatgtcatcagttaaggctattttcactta

SEQ ID NO: 567309 - DNA, 533 bp, Homo sapiens
gattgaagggtagcgagagagcctggagaagagagtgaaaagaccgcttacccaatttgaaattggtgagatgttccttgggctggttggtctgaggacccaaagtcataggtggatctcttcacggagtgaggatgaggacaggagactggtctcccgaaggagtccctctgacccaggtcttctgcaccaaatgtctcacgcgtccttgtgaagaaagtccaccaacaggatttgtgtgaacagcaaggctgtttatttcacctgggtgcaggtgggctgagtccgaaaaaggagtcagcgaagggtggtgggattatcattagttcttacaggttttgggacaggcggtggagttaggagcaatgttttgcyggcaggtggtggatctcacaatatacattctcaagggtggggagaattacaaagaaccttcttaagggagggaaattacaaagtacattgatcagttagggtggggcagaaacaaatcacaatggtggaatgtcatcagttaaggctattttcactta

SEQ ID NO: 567310 - DNA, 559 bp, Homo sapiens
ctgttggttaaaaggcttttattatagcaaagatggataattgtattcaatgaaaacctataattatgtttttcttataatggtagctagtgggttctaaattatctgggatttaccctgggaattgtagctttgcttattcattctttaatgtgaaaactaggatgaaagttatgttagatcctagtttttaagaagtttcaattatttgactttgaaataaagaagatcttaaagccttttctaagctacttggcatgacctcctgtagctccattggaaaacttcaaaaccttggttacttaatattggcactggaaaaactatctctctacagtttatcccaaatactgaaggtatagtcatgtgcctacctattttttacttacttaattttaaagaatttgtaagcatcagtcaaaaaacaatttccratattggttaaaatatgtccagaggctgggcacagtggctcatacctgtaatcccagcattctgagaggctgaggcaggcagattatttgaggtcaggagtttgagaccagcttggccaacatgg

SEQ ID NO: 567311 - DNA, 539 bp, Homo sapiens
gttatcagctactgtgttcttttatgatttttagcttcttgcattaagttagaactgctcctttagctcagagaagtttgttattacccacctcctaaagcctacttttgtcaattcagccatctcagcctcgggtcagttttgtgctcttgctggggakgtgtttttgtcatttagaggagaagaggcattctgcctttttgagttttcagcgtttttgtgttgatgctttctcatctttgtgggcttatctacctttgatctttgacgttgctgacctttgaatggagtttttgtggggttttttgttgatgttgttgttgttgtgtttgtttttaacagtcagaccactcttccctacggctagggctgatatgaattttgggggtccactctggaccctagtcacctcagtctctcctgcacctggaggtatcaccagtgaagtctgtgaaacagcaaagctggcaacctgatccttcctctgggagcaccagtccaagggggtactgacttgatgccagctggaacacttctgt

SEQ ID NO: 567312 - DNA, 357 bp, Homo sapiens
gttaatgtccttttcttcctgattgaagtactccctttagcattcctttaggacaggtatggtattcataaaatacttcagcttttgtttgtctgaaaaagtcagtattctttttatttgaagaaaattttcactgtatattctattctaaggtaaaagtttytttcctttagtactttaaatatttattgcttctctttcctggctagtagagtttccactgtaaagtctgctgccagacatgttggagctccccagtatgttatttgtttcttttctctttcttcctttagaacttgtctttatctttgacttttggaagatctattgaatgctttgaagtagtcttttttgggt

SEQ ID NO: 567313 - DNA, 357 bp, Homo sapiens
gttaatgtccttttcttcctgattgaagtactccctttagcattcctttaggacaggtatggtattcataaaatacttcagcttttgtttgtctgaaaaagtcagtattctttttatttgaagaaaattttcactgtatattctattctaaggtaaaagtttttttcctttagtactttaaatatttattgcttctctttcctggctagtagagtttccactgtaaagtctgctgccagacatgttggagctccccagtatgttatttgtttcttttctctttcttccttwagaacttgtctttatctttgacttttggaagatctattgaatgctttgaagtagtcttttttgggt

SEQ ID NO: 567314 - DNA, 252 bp, Homo sapiens
ttctaatttttcgatatgggcgttacttcttatgccctactctaacttttgtccttctagaaaactcagaactatgctttctaaaccaattcaaactttctcagtgaatcaacctggtctccctgaggcaaagttmacaattttccattacacatggttctctttctctgtaagaatatctagtgcaacaatgcaagtgtttctttccctcctggtaatgcgggaaacaccttttggctgagaccgagactt

SEQ ID NO: 567315 - DNA, 252 bp, Homo sapiens
ttctaatttttcgatatgggcgttacttcttatgccctactctaacttttgtccttctagaaaactcagaactatgctttctaaaccaattcaaactttctcagtgaatcaacctggtctccctgaggcaaagttcrcaattttccattacacatggttctctttctctgtaagaatatctagtgcaacaatgcaagtgtttctttccctcctggtaatgcgggaaacaccttttggctgagaccgagactt

SEQ ID NO: 567316 - DNA, 252 bp, Homo sapiens
ttctaatttttcgatatgggcgttacttcttatgccctactctaacttttgtccttctagaaaactcagaactatgctttctaaaccaattcaaactttctcagtgaatcaacctggtctccctgaggcaaagttcacaattttccattacacatggttctctttctctgtaagaatatctartgcaacaatgcaagtgtttctttccctcctggtaatgcgggaaacaccttttggctgagaccgagactt

SEQ ID NO: 567317 - DNA, 555 bp, Homo sapiens
tccaagtgcaattttgctgtaagcatggatggcatagtggtgaagtcagggcttttaggtatccatcaccagaataacgcacattgtaccyattaagtaatttctcactgttcaccccttccatcccctcacgctgctgagtctgccttatcattacactctctacgtcaatatctacacatcttttagcacccgcttatgagtgataaaatacgatgtttactctgtgtctggcttgcttcacttacaacaatggcctccagttccatccatgtgtttgcaaaagttatgattctattgttttttttgcctgaatagtatttcattgcgtatattttctacattttctttctccagtcatttgttgatggacattaggttgattttatatctgtgttactgtgaatagtgttgcaacaaatacacaagtacagttatctttctgatacattgatttcttttcctttgcataaatactcagtggtgggattgctgaatcagacagagccaatagatgatcagtaatggtggccaatcatcagctagaaacaaagt

SEQ ID NO: 567318 - DNA, 602 bp, Homo sapiens
tgtcagggaagataagcagggtgagagtggcctcatcggaggaccccagatctctggcttccccatttggcaagtgcacatctgtgaacaaagacttcagagccagatgacaagaacggcccaagcagtccactagggaaacctgggcycagtgtacatcaatgcagagcatcaagcatggcgtaacagttgcacagttgcctattcctgttcagagatgactgcatctcacacactgtaaaatgaggaaatgcagagaagcagatgtaactgaagaagacagcaggagcaacaaggagggacaaccacgacctaggaaggcactatgccagagacgcctggaccccacgctaggcttagtgccctttatactcttgggacgcagcgctttccctctccatcacaatgcatacttgacattatttgttgtttaaaatattgtccttagatttcacctttcctaggagacacaggcagaccctgtgacactacagcttctggcacacagcaggtgcatcacaaacatctgctgagttcacacactcttgccttctcaaaccttcttgtcaagtcttcagtgaaaaggaattgctgattgagca

SEQ ID NO: 567319 - DNA, 484 bp, Homo sapiens
gtacatcaatgcagagcatcaagcatggcgtaacagktgcacagttgcctattcctgttcagagatgactgcatctcacacactgtaaaatgaggaaatgcagagaagcagatgtaactgaagaagacagcaggagcaacaaggagggacaaccacgacctaggaaggcactatgccagagacgcctggaccccacgctaggcttagtgccctttatactcttgggacgcagcgctttccctctccatcacaatgcatacttgacattatttgttgtttaaaatattgtccttagatttcacctttcctaggagacacaggcagaccctgtgacactacagcttctggcacacagcaggtgcatcacaaacatctgctgagttcacacactcttgccttctcaaaccttcttgtcaagtcttcagtgaaaaggaattgctgattgagcaagaattaaacttctagagactccgggacccactga

SEQ ID NO: 567320 - DNA, 617 bp, Homo sapiens
atctgttaggtatgtcagggaagataagcagggtgagagtggcctcatcggaggaccccagatctctggcttccccatttggcaagtgcacatctgtgaacaaagacttcagagccagatgacaagaacggcccaagcagtccactagggaaacctgggcccagtgtacatcaatgcagagcatcaagcatggcgtaacagttgcacagttgcctattcctgttcagagatgactgcatctcacacactgtaaaatgaggaaatgcagagaagcagatgtaactgaagaagacagcaggagcaacaaggagggacaaccacgacctaggaaggcactatgccagagacgcctggaccccacgctaggcttagtgccctttatactcttgggacgcagcgctttccctctccatcacaatgcatacttgacattatttgttgtttaaaatattgtccttagwtttcacctttcctaggagacacaggcagaccctgtgacactacagcttctggcacacagcaggtgcatcacaaacatctgctgagttcacacactcttgccttctcaaaccttcttgtcaagtcttcagtgaaaaggaattgctgattgagcaaga

SEQ ID NO: 567321 - DNA, 547 bp, Homo sapiens
tttgtgtgttattttaggtgcaaatattaagaccaataggctaggatttatacattgtgtaaaaggtaaattagatagctagtaggtacccttatatattataaagttcacctataagattaagtttagtgcacgcaaaaagggctcattaaaattttcatccactttcttcaacytctatccaaactatgatataatttatgccacaatttttattttatcaattactcttaaccatatttcataaaatttatattttttctttatttagaaatgtaaggctattatttgctttaaaggctgtaatacagcttttttattttgtgaaataatagcaccaatattataaatattaatagcataaatacttattcattaaaatcttcccattagagaattttattaattattgtagtgcatttctgtaaaattgtactgccatacaccacagggcaatcattcaaaatgcctggtcttcacaggtgcacagtcactgttgaacattgtggttatttagaaaaattcttttctagtgttatatcaatgt

SEQ ID NO: 567322 - DNA, 547 bp, Homo sapiens
tttgtgtgttattttaggtgcaaatattaagaccaataggctaggatttatacattgtgtaaaaggtaaattagatagctagtaggtacccttatatattataaagttcacctataagattaagtttagtgcacgcaaaaagggctcattaaaattttcatccactttcttcaacttctatccaaactatgatataatttatgccacaatttttattttatcaattactcttaaccatatttcataaaatttatattttttctttatttagaaatgtaaggctattatttgctttaaaggctgtaatacagcttttttattttgtgaaataatagcaccaatattataaatattaatagcrtaaatacttattcattaaaatcttcccattagagaattttattaattattgtagtgcatttctgtaaaattgtactgccatacaccacagggcaatcattcaaaatgcctggtcttcacaggtgcacagtcactgttgaacattgtggttatttagaaaaattcttttctagtgttatatcaatgt

SEQ ID NO: 567323 - DNA, 547 bp, Homo sapiens
tttgtgtgttattttaggtgcaaatattaagaccaataggctaggatttatacattgtgtaaaaggtaaattagatagctagtaggtacccttatatattataaagttcacctataagattaagtttagtgcacgcaaaaagggctcattaaaattttcatccactttcttcaacttctatccaaactatgatataatttatgccacaatttttattttatcaattactcttaaccatatttcataaaatttatattttttctttatttagaaatgtaaggctattatttgctttaaaggctgtaatacagcttttttattttgtgaaataatagcaccaatattataaatattaatagcataaatacttattcattaaaatcttcccattagagaattttattaattattgtagtgcatttctgtaaaattgtactgccatacaccacagggcaatsattcaaaatgcctggtcttcacaggtgcacagtcactgttgaacattgtggttatttagaaaaattcttttctagtgttatatcaatgt

SEQ ID NO: 567324 - DNA, 442 bp, Homo sapiens
aagttaaggataaagaaatgattctaaaagcatcgagagaagagaaacagataactttcagtggaactccaatacatctgacagcagacttttcaggggaaaattgacaggctgggagactggcatgacatatttaaaaagctgaaggaaaaaaagacttttactttagaataatgtatctggcaaaaacgtcctttaaacttgatggaaaaataagaactttttccracaaacaaaaactgagggatttcattaacaccagacctgtcctacaagaaatgctacagggataacctaacctaaaagaagaaaagtaagtgagcaataagaaatcatctgacggtacagaactcactagcaatagcacatggaaaaacactgactattataatatggtaattatggggtgcaaaaatctcaaatagaaagagtaaacatatga

SEQ ID NO: 567325 - DNA, 442 bp, Homo sapiens
aagttaaggataaagaaatgattctaaaagcatcgagagaagagaaacagataactttcagtggaactccaatacatctgacagcagacttttcaggggaaaattgacaggctgggagactggcatgacatatttaaaaagctgaaggaaaaaaagacttttactttagaataatgtatctggcaaaaacgtcctttaaacttgatggaaaaataagaactttttccgacaaacaaaaactgagggatttcattaacaccagacctgtcctacaagaaatgctacagggataacctaacctaaaagaaraaaagtaagtgagcaataagaaatcatctgacggtacagaactcactagcaatagcacatggaaaaacactgactattataatatggtaattatggggtgcaaaaatctcaaatagaaagagtaaacatatga

SEQ ID NO: 567326 - DNA, 442 bp, Homo sapiens
aagttaaggataaagaaatgattctaaaagcatcgagagaagagaaacagataactttcagtggaactccaatacatctgacagcagacttttcaggggaaaattgacaggctgggagactggcatgacatatttaaaaagctgaaggaaaaaaagacttttactttagaataatgtatctggcaaaaacgtcctttaaacttgatggaaaaataagaactttttccgacaaacaaaaactgagggatttcattaacaccagacctgtcctacaagaaatgctacagggataacctaacctaaaagaagaaaagtaagtgagcaataagaaatcatctgacggtacagaactcactagcaatagcacatggaaaaacactgamtattataatatggtaattatggggtgcaaaaatctcaaatagaaagagtaaacatatga

SEQ ID NO: 567327 - DNA, 326 bp, Homo sapiens
atcagcaattgtatgccaacaaattagaaaacctagaggaaattaattcttagacacacacaacttaccaagattgaactaggaaaaaatctaaaacctgaacagaccaataacgattaacaaaattaaarccttaataaaaaagtctgtaggaccagactgaaaactagagaaggaaagaacatttccgaactcattctttgaggctagtattacccttgatatcaaaaccagacaaagacatattaaaaaaagcaaactacaggcccatatctgagaatattggtgcaaaaatttgcaaaacacctagaaaactgaattcaaca

SEQ ID NO: 567328 - DNA, 615 bp, Homo sapiens
atttcatgggtcctgtggcccctttcttttggctgatttcttccttttagaataggagtatttacccaatgcctctgcctcatttgtatcttggaagaatctaacttgttttttattttacaggcttataggaggaagaaattagcyttgtcttagatgagacttttgacttttgagttaagactgaaactagttaagattttggggattattgggaagtcatgattgtattctgaaatatgagaaggatatgagatttggaatggccaggggcaaaatgatacagtttggatgtgtattcccaccaaaatcttatattgaaatataatcctcaatgttggaagtgggcctagaggggaggtgattgaatcatgagggcaagatttccatgaacagtttggcatcatttcctttggtgccattcccacaatagtaagtttttatcagagctggttatctacaagtgtgtgtagcacttcccccctgccctcgcacttaccatgtgatgtgcaagcactggatttatttttcaccttgtcaattgtcagaggcttccccagaagcagaagccagtgctatgctttctgtacagcctgtagaaccatgaaccaatta

SEQ ID NO: 567329 - DNA, 587 bp, Homo sapiens
gcctaatacatccaccaaaaactattagaggtaataacttgagtcaatttgcagaatacaaaatcaacatatacaaatcagtagggtttctttacgccaacagtcaacaaactgaaaaagaattcaaaaatgtaatactatttgcagtagccacaaataaaacaaaatttgtrggaatttaccaaagaaataaaagttctcaacaattaaaaccgtaaaacactgataaaagaaatgaaaaaggacccaaaagttggaaagatatttttatgttcatagattggaagaatcagtattttttaaaaaacgtccatacaatccataggaatctattcatttcattccatctctatcaaaataacaggccaggggcagtggctcatgcctgtagtctcagcactttgggaggccgaattttgtggatcacgaggtaaggagttcaagaccagcctggccaacttggtgaaaccccaccactactaaaaatacaaaaaaattagccaggcatggtggcaggtgtctgtaatcccagctattcaggaggctgaggcaaaaagttgcttgaacccaggaggtggaggttacag

SEQ ID NO: 567330 - DNA, 587 bp, Homo sapiens
gcctaatacatccaccaaaaactattagaggtaataacttgagtcaatttgcagaatacaaaatcaacatatacaaatcagtagggtttctttacgccaacagtcaacaaactgaaaaagaattcaaaaatgtaatactatttgcagtagccacaaataaaacaaaatttgtaggaatttaccaaagaaataaaagttctcaacaattaaaaccgtaaaacactgataaaagaaatgaaaaaggacccaaaagttggaaagatatttttatgttcatagattggaagaatcagtattttttaaaaaaygtccatacaatccataggaatctattcatttcattccatctctatcaaaataacaggccaggggcagtggctcatgcctgtagtctcagcactttgggaggccgaattttgtggatcacgaggtaaggagttcaagaccagcctggccaacttggtgaaaccccaccactactaaaaatacaaaaaaattagccaggcatggtggcaggtgtctgtaatcccagctattcaggaggctgaggcaaaaagttgcttgaacccaggaggtggaggttacag

SEQ ID NO: 567331 - DNA, 587 bp, Homo sapiens
gcctaatacatccaccaaaaactattagaggtaataacttgagtcaatttgcagaatacaaaatcaacatatacaaatcagtagggtttctttacgccaacagtcaacaaactgaaaaagaattcaaaaatgtaatactatttgcagtagccacaaataaaacaaaatttgtaggaatttaccaaagaaataaaagttctcaacaattaaaaccgtaaaacactgataaaagaaatgaaaaaggacccaaaagttggaaagatatttttatgttcatagattggaagaatcagtattttttaaaaaacgtccatacaatccataggaatctattcatttcattccatctctatcaaaataacaggccaggggcagtggctcatgcctgtagtctcagcactttgggaggccgaattttgtggatcacgaggtaaggagttcaagaccagcctggccaacttggtgaaaccccaccactactaaaaatacaaaaaaattagccaggcatggtggcaggtgyctgtaatcccagctattcaggaggctgaggcaaaaagttgcttgaacccaggaggtggaggttacag

SEQ ID NO: 567332 - DNA, 533 bp, Homo sapiens
ataaacaaggtaaagaaaaaagtctgtgcttttgatgtgcatatacataaacatctcagtgccttaaagagcagtattcctccagcatgtctcacctccagccgtaaaatatatatactatctcaatagatggaattacaatcgggtttaacctgagacatgtccattgcccagggacgagcaagagacagatggctttgtcttatctcaactgcaaaaaggccttcctctgtttattaatcctcctcagcacagaccctttacaggtgtcgggctggcggatggtcgtgtccttcccttcccatgaggccatatttcagactatcacatggggagaaaccttggacaatacctggctttcctaggcagtggtccctgtggccttccgcagtgttttgtgtccctgggtacttgagaatagggtttaacaagcatgctgccttaaagcatttgtttaacaaagcacatcctgcatatccctaaatccattaaaccttgrgtcgacacagcacatgtttctgtgagcacagggt

SEQ ID NO: 567333 - DNA, 600 bp, Homo sapiens
ttttgagtttagtaatttgaatattaccttttttcttaatctagataaaattttgtcagttttgatctttttcagagaacaaactaggttttgttgatttttgatattgattttctattctctatttcacttatttccaccgctatctttatcatttttttaattttgctagcttttagttgtccctctttaatcgtccctctttttccctctgtttttagttccttaggagtaaagttgttgatttggtatcttattttttataatcatttatagmtataaattttttccttatggtactgtttttgatgtatctcttaacttttggtatttcatgttcttaatttgtctctagatattttctattttctcttgtgatttcttcttttatccatccttgagtgtttcatacctatatttttagacataaaatgtgtaacctacaaaattttcttgatttgttacagctttatttgttgtaaacctttatttcagaattaaatgtgtgtatcaacatttgttatgttctcataaactttgaaatatatggagattcctggtccacatatgtaagtgtctacatgaatattattttgaagc

SEQ ID NO: 567334 - DNA, 481 bp, Homo sapiens
ggaaaaattggaataaagaaaatttgaaatatccaaaagaagtcaggaaagaaagaatgataaatcgaaaattaaaaataacattaatatctcaataatcacagtgtagatggtctaaactcaccattaaaatgtaaagactatcattaaataacaaacgaaaagacagatccatttttactcagttcaattccacaggtgtagggctatatgtgtgtagtaagaggatcaaatacctctccccaactcaacttcttttaactgcttttctgaaggcttgaaattaattgaaggaaaattctttataccaaaaataacaaaggaaagtaacttyggtgggaagaggagagggtgggagaaatggaaaggggacaaagagaactggcaaagaaaaataatgtttccatgccataatttcagcagaagggtaaattaaatgcacgtgaaattgtctaactgatatccagctggtttattgaaa

SEQ ID NO: 567335 - DNA, 553 bp, Homo sapiens
tttcactgtgttagccaggatggtctcgatttcctgacctcgtgatccacccgcctcggcctcccaaagtgctgggattacaggtgtgagccaccgtgaccgacctgatctcatttcttaaaccaaaccccctgattttgatgtttatactcagttcttcttcctttttcgcgtacctgacacrttgtcatgtattgggttttttaaatgggccattcatcatacaaacaaaaagtagaatagtggttgtcagcagctacagggagggaaaaaagaggaattgttgtttcaaggatattgagtttcagttttacaagatgaaaaaaaaaaaaagtcccagatatctgcttcacaacaatgtgaatatatttaacactactgaactgtatacttagaaatgattaaaatagtacattttatgttaggtatattttacccacaatttttaaaatgcaaaaaaaaattttaatgcactcgggaagagaaatggtccctccattcagaccttttctaggaaactcaaaataaatttgctactattaggacaaattag

SEQ ID NO: 567336 - DNA, 412 bp, Homo sapiens
ccctgcagctaatgccctcttgtgaggagcaattcctcagrtatatacctaataatgcaattacttggtaaattgtattttcaaattaatttctacattgtttttaagaatattaaaattgaatgtgtttttgaatattactcagaattttttaaaaatacaaatattttgaatatcttatatacacaatcatataagtaaatagagacttttactttattctttcaaattctcatctttttttctataatttttcttactgtattatactcttttgggcatatagtgcagttctgaatagaagtatttataagacatctttgactttacctgaccttataggagaaatattgaatatgttttcattaatataattttagctgtattatttttatgtgtatctgtaaaatta

SEQ ID NO: 567337 - DNA, 412 bp, Homo sapiens
ccctgcagctaatgccctcttgtgaggagcaattcctcagatatatacctaataatgcaattacttggtaaattgtattttcaaattaatttctacattgtttttaagaatattaaaattgaatrtgtttttgaatattactcagaattttttaaaaatacaaatattttgaatatcttatatacacaatcatataagtaaatagagacttttactttattctttcaaattctcatctttttttctataatttttcttactgtattatactcttttgggcatatagtgcagttctgaatagaagtatttataagacatctttgactttacctgaccttataggagaaatattgaatatgttttcattaatataattttagctgtattatttttatgtgtatctgtaaaatta

SEQ ID NO: 567338 - DNA, 412 bp, Homo sapiens
ccctgcagctaatgccctcttgtgaggagcaattcctcagatatatacctaataatgcaattacttggtaaattgtattttcaaattaatttctacattgtttttaagaatattaaaattgaatgtgtttttgaatattactcagaattttttaaaaatacaaatattttgaatatcttatatacacaatcatataagtaaatagagacttttactttattctttcaaattctcatctttttttctataatttttcttactgtattatactcttttgggcatmtagtgcagttctgaatagaagtatttataagacatctttgactttacctgaccttataggagaaatattgaatatgttttcattaatataattttagctgtattatttttatgtgtatctgtaaaatta

SEQ ID NO: 567339 - DNA, 561 bp, Homo sapiens
acactcagtgcaatgatagccaaaacaaacacacaatttcaaaactatttatcagtaataccagcataacttatcactgattgcttttcggaattcatgcccataacataagcaccagttaggtatagcatttttacgtctgtgatatgtggaggtctttgcctatcactttttccagtattctctcaatctatatttgaccctaaaagactctatttcaaaatccaagacctctctttccaacctgtaatctgtcatttgttctcccacagactttaatatagactatgtcatatctagctatggatagccacatttcacatgatgctgaaggttttcaatttatttaataagatttccaaagaccaagcaattaattaccttttgaattatcaaacttgtcacattgttttttacaattatactcattttgtcttatgtaggttactaaaaatataaagcaaaaatgtaacaaatagttttgttcctgataccaaaaattaacaactttttatattgcrctcatctcaaagaggatgtttaaataacatgcacacagca

SEQ ID NO: 567340 - DNA, 598 bp, Homo sapiens
agccttcaatttttttttttttaccttttcaggaattgcctcagctggagaaatgagccttgcctggggtcatccactgacacattcaatgactaatgtagaaagttggaaaggtctggccccttcagcccagtgaatttcactgggcaattttatatccaggactccccgtgatgttggacaaggctatcttcaggcytgattcacaggtcaacttttccctctgcccaatcctacccactttcattccttttcatttaagatgattatcccagggattctcttattaaacaaactgcacactaaattttacctcaaagtctgcttcccagagaaccctgaaatgagaagttctcagaaaacctgtgacgtaaaggtgttaggggtggctaatatccaagtctcatgacatcaaatatattactggtggaaggtattcaagttaccagtggcaaatccatacgggtctgcagcaacctcaatttttgcctcctcagaagaaagaaattgactgaggggcataaggcagagaaagagatcaaggcaagtttcgagcaggagtggaagtttatttaaaaatgctttagaagaggaaaaa

SEQ ID NO: 567341 - DNA, 598 bp, Homo sapiens
agccttcaatttttttttttttaccttttcaggaattgcctcagctggagaaatgagccttgcctggggtcatccactgacacattcaatgactaatgtagaaagttggaaaggtctggccccttcagcccagtgaatttcactgggcaattttatatccaggactccccgtgatgttggacaaggctatcttcaggcctgattcacaggtcaacttttccctctgcccaatcctacccactttcattccttttcatttaagatgattatcccagggattctcttattaaacaaactgcacactaaattttacctcaaagtctgcttcccagagaaccctgaaatgagaagttctcagaaaacctgtgacrtaaaggtgttaggggtggctaatatccaagtctcatgacatcaaatatattactggtggaaggtattcaagttaccagtggcaaatccatacgggtctgcagcaacctcaatttttgcctcctcagaagaaagaaattgactgaggggcataaggcagagaaagagatcaaggcaagtttcgagcaggagtggaagtttatttaaaaatgctttagaagaggaaaaa

SEQ ID NO: 567342 - DNA, 313 bp, Homo sapiens
tattagctcatctgactcacaaaacaagcctatgagggcagtaacgttagtatcaaccaacttaactgatgagaaaagtgtacctttaggtggtttggccacttatctaaggtcatgtggcttcacaagcctctaaactcaggccttgtctgactctcagaccaggacattttaactgatccagtagataagttcaccatcgattctgatttaaaaaggaaaattgcccagtgatgtttctaggaatgagcccagatctctgatgtaaccatcaraaacctgctgcctccaaacatgactaatttgtggtgct

SEQ ID NO: 567343 - DNA, 629 bp, Homo sapiens
catgttgaaagctgtcaataaactagacgttgaaggagcataccttaaagtaataagagtcatctatgacaaacccacagacaacatcttacagaataggcaaaagctggaagtattctccttgaaaaccagcataagacaaggatgccttctctcaccactcctattcaatcaccactgagtgctctggcrtactggatgtcccagtctgaaaaatcaggcaagaaaagaaataaaaggcatcaaattaggaagaaagaaaatcacattatccctgcttgtggatgatgtgattctatagctagaaaaccccatagcctctccccaaaattccttgagctgagaaaaaacttcagcaaagtttcaggatgcaaaatcaatgtataaaaagccagtagcatttctatacaccaacaatatcgaagctgagagcctaattaggaagaaaattccattcacaatagccacaaaagaacaaaataaaatacataggaattcagctatccatgaaggtgaaagacctctacaatgagaattacaaaacacttctcaaagaagtgagagatgatgcaaacaaacagaaaaatattatatgctcatggatagaaagaatcaatactgtcaaaatg

SEQ ID NO: 567344 - DNA, 544 bp, Homo sapiens
gtaatcccagctacttaggaggttgaggcaggagaatccttgaacctgggaggcagaggctgcagtgagctgagattgtgccactgtactccagcctggataacagtgagactctgttgcaaaaaatttawaaaaaaaagtaatgctttattcttttattctaactctagattcaatcacctgactaccttatagttaaaagtcttttctgaccttattaattttgaaattgagacccaacctttttaggccttattacttcattctactggttatataccccctttaaaccataagaaatgggattcacatcctttgattctataactgctagaagttagaagatctgttttactttgaaatgcctaccatttgttgagaagtgggaactgttgtgtatcaggaaatgaagaaaagtagttctacctattaacaaagttttccccccaaaaagacaagagacagtgggacataggtaaaagtccacatagctgtcactcctggatgtttctgtttacaccggatggataccagaatcatgctt

SEQ ID NO: 567345 - DNA, 550 bp, Homo sapiens
agtggctcacgcctgtaatcccagcactttggagcccaaggtggccagatcccttgagcccaggagttcgagaccaggctaggcaacaaggygaaaccctgtttcttagaagaaaaaaaaaaaaaagattaagtgagggataaaagagatcaagtattatgtgtaatggctacatactctgacaatgtagatacagtaaaattactcttagaaaatagaggcaaatgcggagagcaaattaaaaaatgtatctcttaataattaaaaaatttttattataattttattacaatagagacagggtctcattatgttgcccaggctggtctcaaactcctgggttcaagcagtcctctcaccttggcttcctaaagttctgggattacaggcatgagccaccacacctgggcataactcttagtaatcatattggttgaggtactgcagcattgttgttttgagcctgttgcatttataaaaaccaatgagactaaatttgaattggaatataaaaatgaattcaaaagctattttatatttaaaaacatat

SEQ ID NO: 567346 - DNA, 550 bp, Homo sapiens
agtggctcacgcctgtaatcccagcactttggagcccaaggtggccagatcccttgagcccaggagttcgagaccaggctaggcaacaaggcgaaaccctgtttcttagaagaaaaaaaaaaaaaagattaagtgagggataaaagagatcaagtattatgtgtaatggctacatactctgacaatgtagatacagtaaaattactcttagaaaatagaggcaaatgcggagagcaaattaaaaaatgtatctcttaataattaaaaaawttttattataattttattacaatagagacagggtctcattatgttgcccaggctggtctcaaactcctgggttcaagcagtcctctcaccttggcttcctaaagttctgggattacaggcatgagccaccacacctgggcataactcttagtaatcatattggttgaggtactgcagcattgttgttttgagcctgttgcatttataaaaaccaatgagactaaatttgaattggaatataaaaatgaattcaaaagctattttatatttaaaaacatat

SEQ ID NO: 567347 - DNA, 310 bp, Homo sapiens
tcactttgttaatgggtaatagttaaatattttatgctgaccatatatttgcgcttgcaggagaaactaccacattgtcyatttgtttgttaagtcacatgttctggtattttagtcataatctgaaagttacttttatatataattaatgaaacatgagagggtttgagttgatttaatctattttttcagtctccctttcctagtgatttcagaggtcagaaataacctagcttttcagacaagacagtttcctctaccaaaacaattagtgtctagctgcagaacgaaggaaatagaggtttagaaa

SEQ ID NO: 567348 - DNA, 485 bp, Homo sapiens
aaacacaaaatccatttatgttttatatacaccttataaacagagcctgaagggtaattttataaaacattttaaataatgttcttccttaaacaatgttttgatcacattttggctgtgatttgtcacatgaggtcagatgtggaatttttcatttgtggcatcatatcagcactcaaaaattttcagattttgaagcatttcagatttgggatttttaggttagggatgttcaacttgyaatataaaaacataatatagtacatttatttgcaatataccattaaggagaaaaagaatattaaaaatatagagtacgatctcaatttataaacaaatacctcctatatagctctacatataataaagctacatcacatattaaaaatccacattatatgcatacatatataattgcatataatagaatgagaaaaaactgtaatatcaattatttaaatgtggtataattgtaggtgattttt

SEQ ID NO: 567349 - DNA, 491 bp, Homo sapiens
ataacatggaatcatcaacccatggtgttctcaagaaataatagcccaatataaatgcaaggtactgctattagcataaatgtttacttgagtaaatttatgaaagaagttcaatgtcactactattcacagaaatatgaattaaaacaatcacaatgatttccctccacgtttgctgaagttctgtgctgctgaagatagaaagaacagtcctcttcaaacactgctgcctggagtgtgtaattggtacagtctttttggaragcagtgtgtcattatctaccaaaattttaaatgaacacaccttgaaaattagcaatttcacagctaggacagattctacaaacacatctacccaagtgaataaaattgatgtacaaaatgttcattgcagtatcttttataatagcaaagtactggggacaatctaaatgtccatcaaaagaagaatgtttaaacagatttagcagctgctaaaaaatagttgagag

SEQ ID NO: 567350 - DNA, 575 bp, Homo sapiens
ggtgaggtactatagggaggtctgtgggaaatataacaatctctgtgggctccaaaatctctatcagctcctgaaaagctttccaactaaacaatagaacaatatgcytgcagggctaatgtcccttgaggagaattctggccctcctttctgaaagtttgtaatctttcaacctttcatatataaaatctggagtttcccctgatagtctaacagtttctcccaaagttttgatgttggaatgtctcttctaggtacctgttcaggctgaaaaattttcaagatttctatgggtttttaaaaaggtgttgtgtgtcggtaagtgcctgcctctaaagtaattcagacctagacaggcggtataattaacaccttcacactcaacaaccaccaggacttgaagtatgacttgctgccacaaatgttactgctgtgataaacctggaattcggtgcaagaagaacaagtcctgttgtgagtaagctcagttacagctgttctctgacacagctatgtttgctcagtttgtaaggctggacttttgctttggctatggctttggcattgaggttctc

SEQ ID NO: 567351 - DNA, 575 bp, Homo sapiens
ggtgaggtactatagggaggtctgtgggaaatataacaatctctgtgggctccaaaatctctatcagctcctgaaaagctttccaactaaacaatagaacaatatgcttgcagggctaatgtcccttgaggagaattctrgccctcctttctgaaagtttgtaatctttcaacctttcatatataaaatctggagtttcccctgatagtctaacagtttctcccaaagttttgatgttggaatgtctcttctaggtacctgttcaggctgaaaaattttcaagatttctatgggtttttaaaaaggtgttgtgtgtcggtaagtgcctgcctctaaagtaattcagacctagacaggcggtataattaacaccttcacactcaacaaccaccaggacttgaagtatgacttgctgccacaaatgttactgctgtgataaacctggaattcggtgcaagaagaacaagtcctgttgtgagtaagctcagttacagctgttctctgacacagctatgtttgctcagtttgtaaggctggacttttgctttggctatggctttggcattgaggttctc

SEQ ID NO: 567352 - DNA, 530 bp, Homo sapiens
aaatacctacatgttaagaaaaagtcccactctccttttgatggtgtgcatgtggctctattgtgtttctagttaagatggggtctagagggagagaaacctagcgctctaatttatactttcatgctgaactctcctgtaatgcgggccagttgtgtcgcaacatctcaactaccctgatgttttctaagccctttctacccaacaagtgtggcacctggctccttcagttcagtgagattggcatctcaaggcaattgtggtgtttgcgggtgtgactgaccactgtgttgactcttccgagtcacatcactgtgccatgtgaattatcaggattcatgttcttwtaatggagtggaaagggtttgaggctgaaaccctggggcattcctgggagagggttggaatcaggagccgggctcagccactatcctatgacaggcccatacccttcctttgtgcaaaggatcttgaaaggcctttactgtttcttctctgtgagaccgtgaatcacctatattttaaatgat

SEQ ID NO: 567353 - DNA, 558 bp, Homo sapiens
cagtctatttatcaatttatcaggaagttttaataaaaaccttaaaygcttgcaatattgttactttctgggcccttgtgtactacataaggtgatgaatatttttataatatgaataattctatgcttcattccttgaagtcagatgttcaggtagttgtgttaactataatgtttagaatgtctttttttttcccccttctgcaatcttcctccaatccttgctccctacacctcttacctgcacagttcttttctgaaagacatctaggaactgcgttcactgcagtctctcactttattaattgctggcctagcactttgtggtctattcatcattgaaatcataattacaggtttttctggattaaaattgctcaaggagaaaattccctttgaagttttgaaacaactagcacgtgttatacaagatgtttctttatatgcaaatgtcagatacttacactttggtgtagttagattgggagaagcagtttgaaaatccattagaagaatggattctctggtgtgagtgcatttacagttatcaatgagaag

SEQ ID NO: 567354 - DNA, 570 bp, Homo sapiens
gttctccccagcaatttcagtttcaggtgtacatccagccctttcttggagctctgctttgartcactttctttttggctgagacccacacaaccattgattgagatgaagtccaaaggagccatttctctgtggtcactaaaaatacaagctgcttcatactgatctgaaggaagccacattagaaaatcttggtggtgcactgtggtcagacagaaagggatctggagctcagttctgctgagcagtaattggtttctgtacagtgtagacttgatcctgtaagtttccagatgacatggacagatgtgaggaggtaagtacaataaggagaaataaagatagcatttcagcaaataccagtgcctgcttcaatgtattagcttggttacatctatttttaagatataaccaaccactcattgtctgtttttcatttatcgttgttcagattgaaatatacagatgcacaggcaaattcataagttgtattttagtgtagaagaaaggagcttgaactaggaataatgcatctattcccaacttggccattcctgcttggctttcaca

SEQ ID NO: 567355 - DNA, 570 bp, Homo sapiens
gttctccccagcaatttcagtttcaggtgtacatccagccctttcttggagctctgctttgaatcactttctttttggctgagacccacacaaccattgattgagatgaagtccaaaggagccatttctctgtggtcactaaaaatacaagctgcttcatactgatctgaaggaagccacattagaaaatcttggtggtgcactgtggtcagacagaaagggatctggagctcagttctgctgagcagtaattggtttctgwacagtgtagacttgatcctgtaagtttccagatgacatggacagatgtgaggaggtaagtacaataaggagaaataaagatagcatttcagcaaataccagtgcctgcttcaatgtattagcttggttacatctatttttaagatataaccaaccactcattgtctgtttttcatttatcgttgttcagattgaaatatacagatgcacaggcaaattcataagttgtattttagtgtagaagaaaggagcttgaactaggaataatgcatctattcccaacttggccattcctgcttggctttcaca

SEQ ID NO: 567356 - DNA, 570 bp, Homo sapiens
gttctccccagcaatttcagtttcaggtgtacatccagccctttcttggagctctgctttgaatcactttctttttggctgagacccacacaaccattgattgagatgaagtccaaaggagccatttctctgtggtcactaaaaatacaagctgcttcatactgatctgaaggaagccacattagaaaatcttggtggtgcactgtggtcagacagaaagggatctggagctcagttctgctgagcagtaattggtttctgtacagtgtagacttgatcctgtaagtttccagatgrcatggacagatgtgaggaggtaagtacaataaggagaaataaagatagcatttcagcaaataccagtgcctgcttcaatgtattagcttggttacatctatttttaagatataaccaaccactcattgtctgtttttcatttatcgttgttcagattgaaatatacagatgcacaggcaaattcataagttgtattttagtgtagaagaaaggagcttgaactaggaataatgcatctattcccaacttggccattcctgcttggctttcaca

SEQ ID NO: 567357 - DNA, 558 bp, Homo sapiens
cacaggcaaattcataagttgtattttagtgtagaagaaaggagcttgaactaggaataatgcatctattcccaacttggccattcctgcttggctttcacaaatcattccacctcatttactccaaaactttcggggtttgggtagagaatttctaagttgtctcctagttccaagtatattgatgggagactggcataggcttacaagagccaattatgcacatttttttttcccagctctgtgtttagtgacatcagttggtagcttgaagtctactgtgtgggaagtatttatgccatggaaaatgggaaatgctataaatagggactttttttttctttttcaaagasaaaatttatcagcacagcactgttggatatctgcaataccctggtgctatggagcacatacatagtaactgggaatttgctatagtgcccgacttgtagaaaagcacagcagacctctctgtgacaaatatgggatttacacacactgcagctcgacttggatactctgctattgtatgtgatgtatctaaaatattctgcattt

SEQ ID NO: 567358 - DNA, 558 bp, Homo sapiens
cacaggcaaattcataagttgtattttagtgtagaagaaaggagcttgaactaggaataatgcatctattcccaacttggccattcctgcttggctttcacaaatcattccacctcatttactccaaaactttcggggtttgggtagagaatttctaagttgtctcctagttccaagtatattgatgggagactggcataggcttacaagagccaattatgcacatttttttttcccagctctgtgtttagtgacatcagttggtagcttgaagtctactgtgtgggaagtatttatgccatggaaaatgggaaatgctataaatagggactttttttttctttttcaaagacaaaatttatcagcacagcactgttggatatctgcaataccctggtgctatggagcacatacatagtaactgggaatttgctatagtgccygacttgtagaaaagcacagcagacctctctgtgacaaatatgggatttacacacactgcagctcgacttggatactctgctattgtatgtgatgtatctaaaatattctgcattt

SEQ ID NO: 567359 - DNA, 558 bp, Homo sapiens
cacaggcaaattcataagttgtattttagtgtagaagaaaggagcttgaactaggaataatgcatctattcccaacttggccattcctgcttggctttcacaaatcattccacctcatttactccaaaactttcggggtttgggtagagaatttctaagttgtctcctagttccaagtatattgatgggagactggcataggcttacaagagccaattatgcacatttttttttcccagctctgtgtttagtgacatcagttggtagcttgaagtctactgtgtgggaagtatttatgccatggaaaatgggaaatgctataaatagggactttttttttctttttcaaagacaaaatttatcagcacagcactgttggatatctgcaataccctggtgctatggagcacatacatagtaactgggaatttgctatagtgcccgacttgtagaaaagcacagcagayctctctgtgacaaatatgggatttacacacactgcagctcgacttggatactctgctattgtatgtgatgtatctaaaatattctgcattt

SEQ ID NO: 567360 - DNA, 558 bp, Homo sapiens
cacaggcaaattcataagttgtattttagtgtagaagaaaggagcttgaactaggaataatgcatctattcccaacttggccattcctgcttggctttcacaaatcattccacctcatttactccaaaactttcggggtttgggtagagaatttctaagttgtctcctagttccaagtatattgatgggagactggcataggcttacaagagccaattatgcacatttttttttcccagctctgtgtttagtgacatcagttggtagcttgaagtctactgtgtgggaagtatttatgccatggaaaatgggaaatgctataaatagggactttttttttctttttcaaagacaaaatttatcagcacagcactgttggatatctgcaataccctggtgctatggagcacatacatagtaactgggaatttgctatagtgcccgacttgtagaaaagcacagcagacctctctgtgacaaatatgggatttacacacactgcagctcgacttggatactctgctattgtatgtsatgtatctaaaatattctgcattt

SEQ ID NO: 567361 - DNA, 537 bp, Homo sapiens
ggatttaatgtagaaaaagaaggaaaagactaatcaaggtgattctctgtggcttggatgaacagataggtggtaatggtgccrttcactgtgataaaaattaaagacagaaagccaagtcgtgttggagaaagacaaggaatatatttgggacagaatggtgcctggggattaagcgattcagagattctagctctttatcttaaaacagatgtgcctgctatggagacatgatccagtccagggctttgctattgtttctagtatcattgtttctttactgccattaaggatatgtatgttatattttatagatatatacattcagatttcaattttctataataaattaatattcaaaccttatagactcttgtactttataaaggaagttttaaatcaaggagtttgagagcttcatgagtcattagaaatgatcgaatccagccctttatttcatagatgaagaacttaaacccaaagtgtttaagtgatttctccaaattcatggagtatatcaatgatagtacctggatt

SEQ ID NO: 567362 - DNA, 506 bp, Homo sapiens
gttcctatgggattttctgggttgcccttgatagcttctatatatgcctcagtgggatgttgctactattcctttggaggctgagtaacaaacatccactcacattattagtatcagtatctgagagcatctccctatcaagcagaaagaatatttacagaaagaaacatagtcagaggcagaccccattcaccaattctattgaaatgactcattcacrtgtttctatttcctgctagactcaactctttgtacctgtagcatttggcaccaggcttagtacacagcacacacttaccacatatatgctaagactaaactgaactgacacagggggtgataagcctgaactaattttagaatttggttctgttttttgccatgtgtgaggtgatgcatctgaagaaaaaaaatcaaggggttgctgaggctcaatgaccagggggcagctgatgggtatcaatggtaggaagcaagaacagagtccagcaaagaaagtcaagacc

SEQ ID NO: 567363 - DNA, 493 bp, Homo sapiens
ggaagcaagaacagagtccagcaaagaaagtcaagacccctgaaatggatggagcatgagttggcgaaaggggagatccaaatcaggaatcagcaaaggcaaagcaagtagcaggaaccagggaattgggaaagaaatgtggggtgggtctaaggtaccgacagccattgttgttggctcagcctagtgatgtgagcctgggtttcccacacacagaggggccatgacctgacatctgacattgattagctgtttcaccttgctttctataacctctctgaacctcagtcaccacatctataaaacaagatccttggagctcataatatttaatgtctctttcagctctcttgtactaatggttttctttcttccataaatagtaaatattctttcagatatcaaaatgagaaatgggatccatggcatgtatatccayacagaaaccattttaaatgttagctaaatagatctattgtctaaaaagacaatt

SEQ ID NO: 567364 - DNA, 570 bp, Homo sapiens
ttcatctaacttggcttcacastggtaagtgttgcttttcctaaaactgacttcaggtcctcagtttatttcaggaactcatgacaatgtctttccaatatattttaatgcactagctttcacatgatgatgttatgaaataattaacttattgctttctaatcttctgctgaccttctagatttatgacttaacaaaatgcagaaagccacaggttcatgccaatggcattttaagatcctcttgtgctcaaaaaagtgtcatgatcaggaaagataccagtaatgaccacatctgaataactctgctggccatggtggcaagaatcagaaaccaccaccatgccttttccttcccccttagtctggcttgcagtgtttttctcactctgttatcagtttgtaccaatatctcttggccttcaagttcctctttccaagagtacaatatgaaggggtttgtaggaggaattattcatgtcacttcctatagtgtcattctatttctcacttctttctcaggcaaatttggtttttggggaaactaacagacaaacaaattgccttaaaa

SEQ ID NO: 567365 - DNA, 561 bp, Homo sapiens
gcctgagggcaatatgctgaggcttgtgtgttgattgtaataggtacccacaaatagctgatgggtcagaagaggactttgaacagaagcagtctactgcaaagatgtctgacccaactaagaacactgagtgaatgtttttttgggtttttttgtttgtttgtttttcttttccgtactctgagaagcataagaaatttggactccttccttactcgtgatgctaatttagggggcaggggcagggagagagagttggatgccatcagctgcaacaagcagagcacctcatggcgacttgaaagaagccattttggtagcagttgttagtgactagagggtgtcactaaccagagggaagctgcttatttacagctactcgataagcctgtgggaaacaacccagactccggagatagactctcygggttgcattctgactctactgagcattagctgtattgggagagttatttctacccacagttctctgtctgtaatataagtcttatctctattaaattctgtaaccaaatgaagtggttattatattataaatat

SEQ ID NO: 567366 - DNA, 635 bp, Homo sapiens
ccatctgttttacatcactcctgcttcttttatttggcctcagtctaaatatacctattcaaaaaaaaaaaaaatctgcckggcgtggtggctcatgcctgtaatcccagcactttgggaggctgaagtgggcagatcacctgaggtcaggagctcgagaccagcctggctaacatgggaaaaccccactctactaaaaatacaaaaagtagctgggtgtggtggtgcacgcctgtagtcccagctacttggggaggctgaggcaggagaatagattcaacctgggaggcagaggttgcagtaaactgagatcgcacggctgcactccagtctgggcaacagagcgagactccatctcaaaataaataaataaataaagattgctttgattataaaagtgtcaatgcttatattgtacaatacacataatcttcataaaagagaaaatgtttaaaactcttcaatttttccattaaaaattattcattgtgaatgttttgggtatgttccttgtcaatagttttatgtgcatgcctacaaatgcacagtgatcttccacccaccccacacacaaactcagtgctattacatacatacagcttttataaattgaggacaataacagtatgtgtgta

SEQ ID NO: 567367 - DNA, 577 bp, Homo sapiens
atatcacgtacatggattctatatctttcacaaagaaaccatgaagttttaaaacaatttcttcttatatcaaattggcaycacatgtttatagcaacgctatttacagcagcccaaacatggaaacaacccacatgtccattaacagatgaatggataaacaacatatgttaaatccatacaaatggaatattattcagccaaaaaaagaatgaagtactgatacgtactacaacacggatgaaccttgaaaacattatgctaataagtaaaagaagccagacacaaaaggtcttatatgattccatttacatgaaacatctagaataggtaaatccatagggacagaaaggagattagtggttgccaggggttgtgggtaggaaggaatgcagagtgactgcttatgagtacaaggtgtccttttggtctgatgaaaatgttttgtaactagagaggggtaatgtttacacaacattgtgagtgttctaaatgccactgagttttggctttaaaatggttaactataatgtgtgatttcacctccataaaaaaaatcttaaataattgacaccac

SEQ ID NO: 567368 - DNA, 562 bp, Homo sapiens
catgagtatgacatcacaaaatacttctattgaatatctgtggcaatgtaaatgacagaagatgaaaaaggaaaagaatacatttgggcaaagagtagtttagaccaacaaatacaaactagtgtaggtcatgttgcactcacattttcttatgttaccatctaatctagtttcaagttgtacttagcttcctattttaatctatttttattttaaaggttttacaaatgccacatctgccttgtgtagctccttactagataacagatttttcaagaaagaagtgtaagagtaagcaaaccaagtcccttaaaatattgtccaaaagtgtgggttgcttstcttctaaaaagatttccttctataagacaatggaagctattgggttagctttatatttctcataggatgaccctaactccgtatcttctaccttcctaaattatcctattccctcaaatatagtagttttggtttattgctttgaaagtggcaatgactgctttcaaaagacacacatgtgcacacacaaactaaatcttacagtatagaagtattgcta

SEQ ID NO: 567369 - DNA, 563 bp, Homo sapiens
acagagagatgtgtaccaaattttttccctctaaataataaaatgaaattagagaaaatgtgagcaatgacacatcctcatatcctttataattaggatcttacggagagaccatggaccatcaagccaaaaagccaaaaagctgtggatcccagtttcatattattgcaccatgcacattcatattgtaaacacaccatgatacatttttggaagtcacgtctcatttaggtaaaaattatttaccaatacataatctccctccccacttttatttctttatttttatttttttatttttattttttttgaagtttgtaatagatatgcatggctaaaatttattgttacattaatcaatatattttataaattgggagaaaatattaaaagttcctccccacttttgatggccatatatttaatcacagccagagaaaatggcttcatatacatatttcttaaattttaaaaaatacttatayttccagaatttgcattaacttgtgtcaacttgcacaaactgcccaaactccaagagctttctcatatccaaagtggag

SEQ ID NO: 567370 - DNA, 622 bp, Homo sapiens
ctccacagaagggataatttttaaagcaaaccttaaacaaagtggtagaagacagagaaaggaagatactaaggatcaaaggtgccaagtatgagcaacgttgatgaaatgacctgaagatattctccaagttcagattcctttgtttgagttcagatccctgctgtattgaaacaaaataggagttgctaacttcttcacatgaattcttcctcttttgtgcctattgttaaagcattattgacataaaaggccaaaatrctagcaagtacctttctgtgtgcactgcaaaatccctgggcagcaaaactttcaagcaaataattcttaaactgaaataacagtttatacttgttgatcatttgggagaattataatattaccaatggtacaatagactatttgtaatagtaataaatagtacgatagcacgaatcatactatagtacgatcgtactatttatttttgctcaagattgtgaataattgacactaacattgattattcacaatcttgagcaaggataaaccgaaaaaagctttgacagagaaaaaaatggtaggaaatgttgaaagaattcagattctggctgtgcatgctatttaaagacttcattccaag

SEQ ID NO: 567371 - DNA, 609 bp, Homo sapiens
atgtggcaagggtgctgtaccatccctctgtacattcttcattcttacattccagaaatattgaaccataaggtttcttcctaaaaaaaaaaaaaaatcatgctgcagtaasctctttgagagcacaaaattggcattttattgttcctacttcctttccaaaatgtctggtaaattatgaatttcaaagcctgtaaatctaaactcaataactgcattccctttcaggttaactggccaaatacaacaaaaggtgaattacccataataatttttaacacatcattcactcttcaataattcctagttccttatttttaatctaatactcagaaaacttatttccaatatcagtccacatttctaatatgtatgtgactattagaaaggggcctgcaagtataaacttgaagtttatgaaactgagcacattggaacctaatactggccttgtaataaacaaaaatatgcacttgtttatgattggaaagcaggacgtaattcattgtgactgtgagactctgaccattcagttcagtctggtttaaaatattgagctgaatactctgaagcttgtcttgtgctgagtacagatactgagatgagtgt

SEQ ID NO: 567372 - DNA, 546 bp, Homo sapiens
atcctgaggaaatgatacaggtttatagattttattacagtgcccgcaagcattcttgggactgtgaaagataccggtattttcctaaagctaggggttagagctggagagctgatcctcaggagaatctaagaagcaattttccacttgaagaaactgagattgtttagttatggttggcagaaccatggagctacagtgttgtcattcccactttctctagttttgatcaatgcattttagggaaaactcttctagttgactcttactagaatatacaagcaagaaactaggctgtctctcagagaccagaggtaagaggcaagaaaagattaatgagcatttttgcagaaagccagcsccagtctcagttccagacagaaggccaggaggttcagcacagtgatctattgaaatagccctgatggtacctacagatttaatgttatcagagtttatcccagaggagttagttttcagagtcagaataaggagctggggggagggaaggagactaagcttaagagatatcatgacatagcgcct

SEQ ID NO: 567373 - DNA, 582 bp, Homo sapiens
accagtagcccatataatgcttttgagagaattagaaaaccgcccagtcctacaacaggcattggagtttagtgagctcaaagtgaattggatttcgtcccccacttacacccttggctggctgccttgggcaggacagaatctgcaagactctgtgatgacctcctgccagaatatacagtgcatgtgaacatgttagtttaatttgtttttcttcttttaaggtatatttcctcatgagaackgccattgtgtaaaatacaattaaatgtaaatattatactttctaatcttataataatttcctgataaagatatctgataaactagtctatagcattatattacagtctattgcagttggctcttctggtctcctgttttcttacgactgctatatttgatcatacttttaagatggaaataacctgggctttatccattcaataaaaaaaggttggcaagccctttttatgagtaaatggaaagggttttgcaaggcagcatatataaaaaagaaacattaatcctaacccttcactctcttaaatgggaattaaggtcaatattcttagagcagca

SEQ ID NO: 567374 - DNA, 582 bp, Homo sapiens
accagtagcccatataatgcttttgagagaattagaaaaccgcccagtcctacaacaggcattggagtttagtgagctcaaagtgaattggatttcgtcccccacttacacccttggctggctgccttgggcaggacagaatctgcaagactctgtgatgacctcctgccagaatatacagtgcatgtgaacatgttagtttaatttgtttttcttcttttaaggtatatttcctcatgagaactgccattgtgtaaaatacaattaaatgtaaatattatactttctaatcttataataatttcctgataaagatatctgataaactagtctatagcattatattacagtctattgcagttggctcttctggtctcctgttttcttacgactgctatatttgatcatacttttargatggaaataacctgggctttatccattcaataaaaaaaggttggcaagccctttttatgagtaaatggaaagggttttgcaaggcagcatatataaaaaagaaacattaatcctaacccttcactctcttaaatgggaattaaggtcaatattcttagagcagca

SEQ ID NO: 567375 - DNA, 617 bp, Homo sapiens
ataagttggaaaccattcattcatgcctttatgtgaattaaggtaatgagaagttattgtggggaaaggcagtcctgggtaaatgccatagaagaggggtttaggcaggtggaagacagcataagaatgcccggcaccacaggcctgctggtgggtgcctgtaaacccagctactagggaggttgaggctggagaatcacttgaacctgggaggtggaggttgcagtgagccaagatygtgccactgtactccagcctgggcaacaggactagactctgtccaaaaaaaaaaaaaaaaaaaaaagaatgctcagcaccaagagagaggggattgaagaaggattatggtgcccaattttgccaactttcaaatttagtctaactagcctccaccacaaaccacaaagagtagcagaacacatatgtaagcttcagtgttcttcttttttctggttcaacttccaatgagatgtgattttcaaaatagctgaggactggggagaacaagagtgaaaagagatgctgacaaattcacagattgactgacaaattattttattggctgcttgggattagtagtctcaatgatttagaaattgcatcagtagactctagtc

SEQ ID NO: 567376 - DNA, 617 bp, Homo sapiens
ataagttggaaaccattcattcatgcctttatgtgaattaaggtaatgagaagttattgtggggaaaggcagtcctgggtaaatgccatagaagaggggtttaggcaggtggaagacagcataagaatgcccggcaccacaggcctgctggtgggtgcctgtaaacccagctactagggaggttgaggctggagaatcacttgaacctgggaggtggaggttgcagtgagccaagattgtgccaytgtactccagcctgggcaacaggactagactctgtccaaaaaaaaaaaaaaaaaaaaaagaatgctcagcaccaagagagaggggattgaagaaggattatggtgcccaattttgccaactttcaaatttagtctaactagcctccaccacaaaccacaaagagtagcagaacacatatgtaagcttcagtgttcttcttttttctggttcaacttccaatgagatgtgattttcaaaatagctgaggactggggagaacaagagtgaaaagagatgctgacaaattcacagattgactgacaaattattttattggctgcttgggattagtagtctcaatgatttagaaattgcatcagtagactctagtc

SEQ ID NO: 567377 - DNA, 617 bp, Homo sapiens
ataagttggaaaccattcattcatgcctttatgtgaattaaggtaatgagaagttattgtggggaaaggcagtcctgggtaaatgccatagaagaggggtttaggcaggtggaagacagcataagaatgcccggcaccacaggcctgctggtgggtgcctgtaaacccagctactagggaggttgaggctggagaatcacttgaacctgggaggtggaggttgcagtgagccaagattgtgccactgtactccagcctgggcaacaggactagactctgtccaaaaaaaaaaaaaaaaaaaaaagaatgctcagcaccaagagagaggggattgaagaaggattatggtgcccaattttgccaactttcaaatttagtctaactagcctccaccayaaaccacaaagagtagcagaacacatatgtaagcttcagtgttcttcttttttctggttcaacttccaatgagatgtgattttcaaaatagctgaggactggggagaacaagagtgaaaagagatgctgacaaattcacagattgactgacaaattattttattggctgcttgggattagtagtctcaatgatttagaaattgcatcagtagactctagtc

SEQ ID NO: 567378 - DNA, 617 bp, Homo sapiens
ataagttggaaaccattcattcatgcctttatgtgaattaaggtaatgagaagttattgtggggaaaggcagtcctgggtaaatgccatagaagaggggtttaggcaggtggaagacagcataagaatgcccggcaccacaggcctgctggtgggtgcctgtaaacccagctactagggaggttgaggctggagaatcacttgaacctgggaggtggaggttgcagtgagccaagattgtgccactgtactccagcctgggcaacaggactagactctgtccaaaaaaaaaaaaaaaaaaaaaagaatgctcagcaccaagagagaggggattgaagaaggattatggtgcccaattttgccaactttcaaatttagtctaactagcctccaccacaaaccacaaagagtagcagaacacatatgtaagcttcagtgttcttcttttttctggttcaacttccartgagatgtgattttcaaaatagctgaggactggggagaacaagagtgaaaagagatgctgacaaattcacagattgactgacaaattattttattggctgcttgggattagtagtctcaatgatttagaaattgcatcagtagactctagtc

SEQ ID NO: 567379 - DNA, 567 bp, Homo sapiens
acacaatagcatgatcatggctctctgagcgttgactttcccatggctcaatcartcttcccacctcagcctcctgagtggctgggactgcagatgcgtgccaccacacccagcaaattttatgtttttgtggagacagagtctctctatattgcccaggctgatcttcaactcctgggctcaagcaaacctcccaccttggtctcccaagtagctgggaggctgctgcacttggcacatcagtgatctttgagatcattgagattgctattgtaaccgttttggagtgccatgaaccacactcaaatgagtaggagaacttcatcgataagtggtatgtgtgttctgacttctccactcatgggccatttcctcatctctctccctctcaatgggcctccctattctcaaagacacaaaaatattgaaattaggtcaatgaataaccctacagtggcctctgagtgttcaagtaaaaggaagaattgtacatctctagcattaaagcaaaatctagaaataattaagcatagtgaagaaggcatgtcagaaaccaagacaggctga

SEQ ID NO: 567380 - DNA, 567 bp, Homo sapiens
acacaatagcatgatcatggctctctgagcgttgactttcccatggctcaatcaatcttcccacctcagcctcctgagtggctgggactgcagatgcgtgccaccacacccagcaaattttatgtttttgtggagacagagtctctctatattgcccaggctgatcttcaactcctgggctcaagcaaacctcccaccttggtctcccaagtagctgggaggctgctgcacttggcacatcagtgatctttgagatcattgagattgctattgtaaccgttttggagtgccatgaaccacactcaaatgagtaggagaacttcatcgataagtggtatgtgtgttctgacttctccactcatgggccatttcctcatctctctccctctcaatgggcctccctattctcaaagacacaaaaatattgaaattaggtcaatgaataaccctacagtggcctctgagtgttcaagtaaaaggaagaattgtayatctctagcattaaagcaaaatctagaaataattaagcatagtgaagaaggcatgtcagaaaccaagacaggctga

SEQ ID NO: 567381 - DNA, 395 bp, Homo sapiens
catgtcagaaaccaagacaggctgagagctaggcttcttgcaacaagcagttagccaagttctgaatgcaaaagaaaagttcttgaaggaaattaaaatactattccagtgaatacacaaatrttaagaaaacaaaataggcttattactaatatgaagaaagttttagtagtttggatagactatcaaaccagccacgacattaccttaagccaaaacctagtccagagcaaggcgtaactctcttcaattctatgaaggctgagagaggtgagagagctgcagaagaaaagtttgcatctagcagaggttgtggctcatgaggtttaaggaaagaagccattttcataacataaaagggcaaggtgaggcagcaagtgccgatgtagaaactg

SEQ ID NO: 567382 - DNA, 379 bp, Homo sapiens
agaaaccaagacaggctgagagctaggcttcttgcaacaagcagttagccaagttctgaatgcaaaagaaaagttcttgaaggaaattaaaatactattccagtgaatacacaaatgttaagaaaacaaaataggcttattactaatatgaagaaagttttagtagtttggatagactatcaaaccagccacgacattaccttaagccaaaacctagtccagagcaaggcktaactctcttcaattctatgaaggctgagagaggtgagagagctgcagaagaaaagtttgcatctagcagaggttgtggctcatgaggtttaaggaaagaagccattttcataacataaaagggcaaggtgaggcagcaagtgccgat

SEQ ID NO: 567383 - DNA, 379 bp, Homo sapiens
agaaaccaagacaggctgagagctaggcttcttgcaacaagcagttagccaagttctgaatgcaaaagaaaagttcttgaaggaaattaaaatactattccagtgaatacacaaatgttaagaaaacaaaataggcttattactaatatgaagaaagttttagtagtttggatagactatcaaaccagccacgacattaccttaagccaaaacctagtccagagcaaggcgtaactctcttcaattctatgaaggctgagagaggtgagagagctgcagaagaaaagtttgcatctagcagaggttgtggctcatgagrtttaaggaaagaagccattttcataacataaaagggcaaggtgaggcagcaagtgccgat

SEQ ID NO: 567384 - DNA, 595 bp, Homo sapiens
gttattgggaaaggaaacataggaagaaaagtgggtttggtggtggtgaaataaattcaggaaaaatgaaggtcaagttgagattgcagtacctgaaaatcttcwtctgttcatgattgcagagggcccttgatccatgggtatagggtttatgataccttgaacagcattaatcgttctgctaggaaccctaaatatacactgaagggagaatgctcaaggatagcagttctttgggatcaggatgggaaggagtaagtgggcccccaaacaagggaatccaagtgcacagcttctggcagtccacattgatccagagatttaaaagtaggctagctacaatgcattattatgtattgtatatttcaaaatagtcaaaagaagattttaaatgttctcaatacaaaggaataatgattatttgaggtgatgcctatgttaattcatctgctttggtcattccatgatgtacacatgtacagaaacatcacattataccctataaatatatacacttattatttttcagtttaaaagaaaagaatttagtgacattaccttacctgtctgtaaaagggattggaaaatgtaattt

SEQ ID NO: 567385 - DNA, 578 bp, Homo sapiens
gatagcagttctttgggatcaggatgggaaggagtaagtgggcccccaaacaagggaatccaagtgcacagcttctggcagtccacattgatccagagatttaaaagtaggctagctacaatgcattattatgtattgtatatttcaaaatagtcaaaagaagattttaaatgttctcaatacaaaggaataatgattatttgaggtgatgcctatgttaattcatctgctttggtcattccatgatgtacacatgtacagaaacatcacattataccctataaatatatacacttattatttttcagtttaaaagaaaagaatttagtgacattaccttacctgtctgtaaaagggattggaaaatgtaaytttttgtgttctattttcttcttacaaggtagccatcagcccaggtaagaaaaaaatgagggtgataattcagagaaagcaagtatggggataggaaaccagtaacctcatccaaaccaggcaacttgttaagattgtctgaactaacatcaacctttgagacctagtatagcacttcccacttccaagtgcccatctgagtactt

SEQ ID NO: 567386 - DNA, 689 bp, Homo sapiens
caacttgttaagattgtctgaactaacatcaacctttgagacctagtatagcacttcccacttccaagtgcccatctgagtacttctaaatgaagtataatacctctacaaaatgaatgtaaatctttaaattatttggacatctcatttgtctgctaaagggagaggaatctatgaatagccactggttataagaagaggtttgaagaaagggaaaagtatgacatcactttccacagagctgccactctttgaattttgtcaaactggttacaatattagtattaaaaaatggctttgaacacacaaaacagataattacagaatgcaggcctaaaatacacttcttgctggaattttaattctgagtggttgctgaactaggtaggtggttgtcaaatttagtttactctgctctgatcaaggaatgtgggttgcatcattcaaaaccaacacgatttaaagatatcttgtaaaaaggagtagtgctaaaattagttgcttgtcagtgattctggtcaccatgattatatggtaaagtatttgtgaacatggcatacagaaggggttatgtctaagtggaaggattttctcatagagcaaaactkttgagcaagacttgattttgaatgatctggaatgaaagaacccaataactttgaccattatctaggcttgtattttgagtc

SEQ ID NO: 567387 - DNA, 530 bp, Homo sapiens
aaatacaataattcagtctccaatacraccagtcctttgcattttagaaacactgaatttcactaaagttttttttttctttttctttttcttatttttttagtccaagatgaaaagatatctgtctgtcctcttcatgccactctagcttatctgctgtcatctatgattcctgatgagttgtcacttctgtggcttgtcaactgaaagtgctcacaaagacaaagtctgcaataatgtttttagcatgtttaatagagcctggttaagtaaacatcctcaacaaaagcagcaaaagaaaggttaaaataaacagagctactgtgccaagttcataatgacttacacatttagcactctgcccatcttctaagcatggccattaaaatcaggtttgtgtacttaatataattgccttgaaaccatagctattcaaatactataggccatttacatacttcagctctctttgtcttccttctcttttctcctccagctttataaaacctggaaattgtttcacaaaactt

SEQ ID NO: 567388 - DNA, 469 bp, Homo sapiens
taattgggattggcaatttccatgcttctttagatatttgtagaaaattgtaaagatgaagtgcaatatttgctgatatatgtcaaaactatctggaaaatccagtaatgaacaatgggagataaaaaagaataatggcttttgaagatatatgtaagtagcagtttatttgtaaatgacaaaggagtaaaagggtgataaaaatctggctcatgaaaaataaaaactttggatccaacatagaagcttccattttgctcatataatggaatcccagttggggccagccatggtgggctccagctcttccttcaacttcccagaactaatagagatttgtttctattcaaagttgcaaaactgtctaggataagtactctctcaaaatcaggggaaaaaatcccagcctctggaattatttgaygtatttagttatttgtgcaaaacgcaaatacatatcttttacttc

SEQ ID NO: 567389 - DNA, 467 bp, Homo sapiens
gcaataatgtttttagcatgtttaatagagcctggttaagtaaacatcctcaacaaaagcagcaaaagaaaggttaaaataaacagagctactgtgccaagttcataatgacttacacatttagcactctgcccatcttctaagcatggccattaaaatcaggtttgtgtacttaatataattgccttgaaaccatagctattcaaatactataggccatttacatacttcagctctctttgtcttccttctcttttctcctccagctttataaaacctggaaattgtttcacaaaacttaatttcaaggtagttagtgatacctttctctataacaggctagacctacggatttttgtcagaaaattactgattcttgtagagtcaaggagaaacgaacactttttcacattcttcaaatcaggtactctttggsagagtatgagaagtttcatatctcaaattag

SEQ ID NO: 567390 - DNA, 631 bp, Homo sapiens
tgtaagcgttgtctcacctatttccagaaaaggaggttaaagccaatgttacatcacaagtaagcagtgtagataaaatttgaacctgaaaatccctggctcaaagtccaaagctttcaattacacaatcttgtcaagaacgtaaaaacagatgagtgcattgaatagaagaaaagatggcccaaagattaatatttgtaaatctcctctaatatcttggttaaatttaccacccaaaataaacttcaatattgtcatgaaaaaaaaacatatcagttgtcaaaattgactccattgcactggcatacactgcagcttaagatatccaaatgacttagcagcagagccaagcgaatagttgaaaaatcacccactgtacttctaattgaaatagccaatctgtataatatgcactgtaaaatatgacttttccatacagcatttgaagcagaattcagatagattcactactcaattaaatcagccttcatagggtttagacacacttgaattttttggtttaaaaatggtgaagggagtgctcttttatactttgttgttgtcattatgattattgttaytttaggaaccatatattttaatctgcaactgcctctgaaaatgtctattc

SEQ ID NO: 567391 - DNA, 573 bp, Homo sapiens
tacccacatgactcatgagtagagggcaggaattactataaatatctatttttttgttaataaagtctccctttgaaacattgtgcccaattcaaaacataagttggttcaacaagatacatgatgcaaaggctgttgtatttacttgactttcattcctagaatggaaggccaggattaaaccacttattcaccacattgccaggacattcagtgatagttattaaacataraatgtaggaaaacaggatacatttgctggaaatgtaagcagagaattcaatgaaaagtttagcagatgacttgatgtacagagtttaagtcacttaatagtttaatatgtaagacaactccatctaaaattagacaaatactctcatctaattttagattttaaaccaaagaagttgctaaaattttcaaacattatttataagtaaacttacaggaaacagttgtctacatttttgagctattcacatggagatcacgaaaggctctgctaaggaatgaacttattttgaaccaaaaaggtcttgtccttacactcttcctgctatctttcctaatcat

SEQ ID NO: 567392 - DNA, 601 bp, Homo sapiens
ctctgtttctattattttatatataaacaatgttaaaaatattcagagcaatggatatttagggatgagggatgggagtcatccaccctgaggggagatatattttttcatgaaaactgcttagaattgtcagggcctgataataaatgcagaccaactattagttggttttgttactgtctttaaattatctccttaaaaggcagacattcatcacctgcacctagagtagaccacctcaattgctccctcccttgrtaggccactagctgaaggccttctaggagaaagtcatcacgtctaagtgtcttgtttccttagtggaactggaagtacttactccataaggctgccttgacaattaaataaattacaattttgaaagtggttagaacactgcctgagatagagcaagcattacagcactgtttgtttaagtaaataaatgatatttatgaaaagcctgatgtagcagtccgccaattttatagatgaagaaactgagtctcagaggaggttaaaaaaaaaagacatcaaacagaaaatgattgtggtttaaagtaaagatattgacactaaacctgtacccattctacctctc

SEQ ID NO: 567393 - DNA, 601 bp, Homo sapiens
ctctgtttctattattttatatataaacaatgttaaaaatattcagagcaatggatatttagggatgagggatgggagtcatccaccctgaggggagatatattttttcatgaaaactgcttagaattgtcagggcctgataataaatgcagaccaactattagttggttttgttactgtctttaaattatctccttaaaaggcagacattcatcacctgcacctagagtagaccacctcaattgctccctcccttggtaggccactrgctgaaggccttctaggagaaagtcatcacgtctaagtgtcttgtttccttagtggaactggaagtacttactccataaggctgccttgacaattaaataaattacaattttgaaagtggttagaacactgcctgagatagagcaagcattacagcactgtttgtttaagtaaataaatgatatttatgaaaagcctgatgtagcagtccgccaattttatagatgaagaaactgagtctcagaggaggttaaaaaaaaaagacatcaaacagaaaatgattgtggtttaaagtaaagatattgacactaaacctgtacccattctacctctc

SEQ ID NO: 567394 - DNA, 601 bp, Homo sapiens
ctctgtttctattattttatatataaacaatgttaaaaatattcagagcaatggatatttagggatgagggatgggagtcatccaccctgaggggagatatattttttcatgaaaactgcttagaattgtcagggcctgataataaatgcagaccaactattagttggttttgttactgtctttaaattatctccttaaaaggcagacattcatcacctgcacctagagtagaccacctcaattgctccctcccttggtaggccactasctgaaggccttctaggagaaagtcatcacgtctaagtgtcttgtttccttagtggaactggaagtacttactccataaggctgccttgacaattaaataaattacaattttgaaagtggttagaacactgcctgagatagagcaagcattacagcactgtttgtttaagtaaataaatgatatttatgaaaagcctgatgtagcagtccgccaattttatagatgaagaaactgagtctcagaggaggttaaaaaaaaaagacatcaaacagaaaatgattgtggtttaaagtaaagatattgacactaaacctgtacccattctacctctc

SEQ ID NO: 567395 - DNA, 645 bp, Homo sapiens
tattattgtactttgctcttgcgtctaactcattctttagaataagtttggctttatcctcagttcttcatgcctagggattctaggcaaactcacccaacaaatgcaatgaatgtggccagtcatgtagtaaccagatagagagtcaggaagttgcatcaactgagtcattaatcagctcattcatttatttgcttattctttcattccttcagacaaagtgcatagtgaatgttgaggaatcaatgatgacaaagagaagatcactttagcagctcacagcaaaagcaagagacagataaaaaaaaaggcaacaattagcaagcaacgtgagcagtgcagttttggagacatgaggagaaggttattgaaatttaacacagagagcatttattggacctggagaaattaagaaagctttaccaaagaattatcaaagactgtttcttaggatagatttaggcacattaagttctggtataaatggctcttggtccctttggaaatttcagactaagtgggacatttactaggactctttgtaaatatgagatcaraaccttaaagcctacacttccttattccagatctctaataaaacacaaagcttttgggttcaagctaccacagaattcaattgaacag

SEQ ID NO: 567396 - DNA, 605 bp, Homo sapiens
ttctagtttatttgcatagaggtgtttatagtattctctaatggtagtttatatttctgtgggatcagtggtgatatcccctatatcattttttattgcatctatttgattcttctctcttttcttctttattagccttgctagcagtctatctattttgttgatttttttcaaaaaactagctgctggattcattgatttttttgaagggtttttgtgtctctatctccttcagttctgctctgatcttagttatttcatgtcttctgctagctttttctggtaaatattcctccatccctttactttgagcctatgtgtgtctttgcatgtgagatgggtctcccgaatacagcacactgatgggtattgactcttcatccarttagccagtctgtgtcttttaattggggcatttagtccatttacatttaagtttaatattgttctatgtgaatttgatcctgtcattatgatgctagctggttgttttgcccattagttaaagcagtttcttcatagtgttgatgttctttacaatttggtatgtttttacagtggctttactggttgttcctttccatgtttaggttaatattgttatg

SEQ ID NO: 567397 - DNA, 515 bp, Homo sapiens
catgccctgggtcctgagggccactgggcttgcacccaacccttccccctcctctttyttcggcagacggctccgggtgcggacaccgccagctgtgagtcttctgggggcctgctccccccaggctcggaggttggggggcataggggagaggggaccgtggactggagcccaccctggatcatgcctgttgggatgccaaggagtctgggatattgatgggagcaggggactatttactggggctggaatacgggaggcataggtgggaataagatggaggtcggagcaaggacttagtatgtatcctttggcttttttctagctgctgtggctgggacaggccctccggtgagttcttccagctcaggggtctctgggtagaaagcctgagagtgggggactgatagttaaatctttggggtgaggagaggctttggaaaaggggccttgaccaccattctgtgcccccccccccacccagagggccctatggagtgagcatgtggccccag

SEQ ID NO: 567398 - DNA, 549 bp, Homo sapiens
atcaaaaccacaatgagctatcacctcacactgctagaagaactattatcaaaaagacaggcgatagcaaggtcatggcaagggtgtgaaraaaagggaaccctgtgcactattcataggaaggtagattagtacagccattgtggaaaacagtatggaggctcctaaaaaaattaaaaatgaaattactatgacccagggattctcttctgggtatatacccaaaggaacagaatcgccaccttgaaaagatatctggactcccatgtccattgcagtattactcacagtagccaagatatggaaacaaccgaggtgcccatcagtggaccaatgaaagaaactctggtatatacagtcgtgcactgcataacaacatttcagtaaatgatggaccacatatatgaccgtggtctcataagattataataccatatctttactgtactttttctatgtttagataacacaaatattcaccattgtgttctgactgcctagagtattcagaatagtcacatgctgcacagatttgcagcctagcagcaa

SEQ ID NO: 567399 - DNA, 572 bp, Homo sapiens
aggcctgtgtgtgtcacagaggacccatttgaaattttccccaagtgctctcactgctgagtaggtggaaaccaggacactccgggcagtgacacctccttggtgcctgctattcccagaggaagcctgtggtgtcagctgctctggggtcagacggccacaagatggacaatggtgaaacaaagcctgtctccaccacccccaaagtgggctgagacaccaaatcccyaggtccactcccgccccctgaaatgggacccagacacccttggtcttgtgtccacgagactcctctcttccaaccacctcacaggggttgctgatctgacattaagaagaccttcagctcccaagaatctctgagctccacaggatgggcaagggtggatcgacccttgcagatacacattatattctttcacccttgacccctgagttccagggtggtttcgttccatttgagccgggactagtctacatttagagactttacaagttcttcacatcatcatctcctctttctccagggaatctgccccctaactgggttggcaccaaacccagacctctcc

SEQ ID NO: 567400 - DNA, 572 bp, Homo sapiens
aggcctgtgtgtgtcacagaggacccatttgaaattttccccaagtgctctcactgctgagtaggtggaaaccaggacactccgggcagtgacacctccttggtgcctgctattcccagaggaagcctgtggtgtcagctgctctggggtcagacggccacaagatggacaatggtgaaacaaagcctgtctccaccacccccaaagtgggctgagacaccaaatccctaggtccactcccgccccctgaaatgggacccagacacccttggtcttgtgtccacgagactcctctcttccaaccacctcacaggggttgctgatctgacattaagaagaccttcarctcccaagaatctctgagctccacaggatgggcaagggtggatcgacccttgcagatacacattatattctttcacccttgacccctgagttccagggtggtttcgttccatttgagccgggactagtctacatttagagactttacaagttcttcacatcatcatctcctctttctccagggaatctgccccctaactgggttggcaccaaacccagacctctcc

SEQ ID NO: 567401 - DNA, 473 bp, Homo sapiens
attctgaacctttggggttcctgtgcatattgaatagatagaaatgccacactgacacgtcccagatatattgagaacaaaatactgttacttttaatgtagaggctacaattttagaaraaatcacgataccaacataatcaaatgacttatcattattctagtagaagtcgaatgtcagtcttttgcagatccctgtcatgtctgtgtggagattatatttctatttacctaatatttttctttactatttacctaatatttttatttaaatcattttaaaatctactcacttttaaaaaacaatctcatgctaagtaattatattcataaaatcatttttgatattgttcaaatttttaaacatgttattaaatctgtgattataaaaatactagtccatatgccacctaaagttatcctgagtactaccaatggttcacataatgcactttgaggagttctacttttta

SEQ ID NO: 567402 - DNA, 546 bp, Homo sapiens
aagtatcataatcaaacctatgtggcagatacatccctttggtagaaacagacacrtctggctatcatcagccactagaacatccaactctcgttccagttttgattctagttctcagtgttcaattatgagttgtcttaccatgttgcttgccaaatctggtctgctgtttatgtttgtaaataaaaaataaagttttctttaagcatagccacacccattcatttatattttatatggttgcttgcctctccaacaacagagttggagtagttataacaaaaaggccaaatggcccacaaaacctaagatacttactatctggccctctgcagaacaagcttcctgactcctgccatagtaagtggaaaaggaacaagataaaaggaacctggaccctctctttaacaagactttagaaatacacttctaagccagccatagtggttcacacctgtaatcccagcagtttggatggccaaagtaggagaattgcttgaggtcaggagttcagaccagcctgggcaacatagcaagaaccccatc

SEQ ID NO: 567403 - DNA, 365 bp, Homo sapiens
tgtaaataaaaaataaagttttctttaagcatagccacacccattcatttatattttatatggttgcttgcctctccaacaacagagttggagtagttataacaaaaaggccaaatggcccacaaaacctaagatacttactatctggccctctgcagaacaagcttcctgactcctgccatagtaagtggaaaaggaacaagataaaaggaacctggaccctctctttaacaagactttagaaatacacttctaagccagccatagtggttcacacytgtaatcccagcagtttggatggccaaagtaggagaattgcttgaggtcaggagttcagaccagcctgggcaacatagcaagaaccc

SEQ ID NO: 567404 - DNA, 529 bp, Homo sapiens
  misc_feature 493: n = A,T,C or G
gaatagaatgtgggcatctttgggggccattattcagcctactacaagactgttatcacagctcataatcctctgttagtttaccttttcattgtctgtctcacacaccagactgtaaattctatgggtgaaagaactaggtattacagtgccaagtgcatagcaaatggtcatgaaacatttaataagtgagtaaagaaatagcaggatatatgatggtggagsatatgcccaaggtaaattctaaggaagattggcaaagctattccgtctatgctagatttcactaaaaaattgtaaaaagcaagccagtcttgctcaagatgatttcctttcactgctttagagtatatctcaaccctagagtaggactctaactgaccaagttggttccagtgtccaccccatggaccaatacttatggccatgaaaataaggtgatgtaacagcaccatcagagccaccagggtggagtcgggaggggcatgcttanagagagggatgggataccagaccaaaggaaagttag

SEQ ID NO: 567405 - DNA, 529 bp, Homo sapiens
  misc_feature 493: n = A,T,C or G
gaatagaatgtgggcatctttgggggccattattcagcctactacaagactgttatcacagctcataatcctctgttagtttaccttttcattgtctgtctcacacaccagactgtaaattctatgggtgaaagaactaggtattacagtgccaagtgcatagcaaatggtcatgaaacatttaataagtgagtaaagaaatagcaggatatatgatggtggagcatatgcccaaggtaaattctaaggaagattggcaaagctattccgtctatgctagatttcactaaaaaatkgtaaaaagcaagccagtcttgctcaagatgatttcctttcactgctttagagtatatctcaaccctagagtaggactctaactgaccaagttggttccagtgtccaccccatggaccaatacttatggccatgaaaataaggtgatgtaacagcaccatcagagccaccagggtggagtcgggaggggcatgcttanagagagggatgggataccagaccaaaggaaagttag

SEQ ID NO: 567406 - DNA, 572 bp, Homo sapiens
agaagatttatggacagaaaaaggaaagcaatatttagaaaatggaagtgaggtgcaaaaacagccagatcggttactgctcagcatttgccttatttgaacgtggtttgaacagttggctgcctttggttgacatttgctgattggcacaagagtaggttatagtctgtttacatatccagttaggttacagttccctatgcatggagaaacctttaggccaagcctaaaatatgtaaggaggcagttttaggttaaacttgatttaacatgtggttcttgctgaagtacagaggaacataaatggcccaaaagacaaagctccaaatctcgacaacattaaacatttctccctcctcaagggtaaaaaaggcctagtttttgcagacatggagccagccttcacacaggagttgggcgtggagggagaacacatgctttcattctttcctttggagttaacaccaaatcctatcccaaggctagatcaaatggcttctaacatggaaagaaaataaaaaagsgtaaagtaagatgaattttataggaaaaatacaattggaaaactcagt

SEQ ID NO: 567407 - DNA, 658 bp, Homo sapiens
aactctccattatttagagatgtgaagaaaacagcctggaagggcttttctgtattccccctgccatcaggcaagaccaagtgggctggggcaggggaagggaggggtcggcaatcagtgtgttctcacaaacatggatactggggtttgttggtgccacttcatagggggtccaggcagaccaggacccaccaccaatgacagtgtgcactgggaggcctcggtagaagaatggtgtacaagccccaccatgactgaggaagggtaggactgtggaaagggcccagctccaggacggggcaggcccatcagcaggcaaatatccacagagctgccgcagacaagaggggccatggtgattccatctgtggaggtcggtcctcaaggctggtccaggagaaaccagtrgaagttacaaagcaggctggcacttaacatacagaacctgctgctaaaggactggcagagtggctacccctaggtttgttattggcaccatgattgaagacagagaccttgtagaggcccggataactctggtagagataagacagagactcctcattgatccaaagtggatccaggtggtcactcagggggctctacaaccccaaatgcctgtaacccaatgattatttaatcatctactgtaagtcac

SEQ ID NO: 567408 - DNA, 437 bp, Homo sapiens
caggatgaaatcaaaaaccggaagagaccaataacaggtaatgagatggaagcagtaataaagtcttctgacaatgcccagcactggatggattcactgccgaattctacgaaacataaaaaagaactaataccatagctgcatgtgctggcatgcttgtaatcacagctactctggaggcaatcccaactactcaggagattgaggtaggaggactgcttgagcccatgagtttgagactagcgtgggcaacacagtgaaaccccatctcaaaaaacaaaagaagaagtaataccagtctttctcaaactattccagaagattaaagcatcagggattcttcctaactcattctataaggccagcattaccctgatttcaaaaagagataagracataacagcaacaacaacaaaaaaattgacaggccagtgtcc

SEQ ID NO: 567409 - DNA, 438 bp, Homo sapiens
  misc_feature 435, 436, 437, 438: n = A,T,C or G
ttttttttttttttttttttttttggagacagagtctcactctgttkcccaggctggagtgcagtggcaccatttcagctcactgcaaactccgcctcccgggttgaagcgattctcctgcctcagcctcctgagtggctgggatcacaggcgcctgccaccaggcctggctaatttttgcatttttagtagagatggggtttcaccacgttggccaggctgctcttgaaatcctgacctcaggtgatccgcccacctcagcctcccaaagttgctgggattacaggcatgagccaccgtgtctggcccacaaaacctttcggcactactcactcacttgttccaccagaagcttttcactagagaaggatgttacgtgtgcagtgaatgtgggaaatcctttagcaaatgtaataccttcagtaatcatcagtnnnn

SEQ ID NO: 567410 - DNA, 422 bp, Homo sapiens
gaattcataaaacctttttttttttttttttttttttttttggagacagagtctcactctgttgcccaggctggagtgcagtggcaccatttcagctcactgcaaactccgcctcccgggttgaagcgattctcctgcctcarcctcctgagtggctgggatcacaggcgcctgccaccaggcctggctaatttttgcatttttagtagagatggggtttcaccacgttggccaggctgctcttgaaatcctgacctcaggtgatccgcccacctcagcctcccaaagttgctgggattacaggcatgagccaccgtgtctggcccacaaaacctttcggcactactcactcacttgttccaccagaagcttttcactagagaaggatgttacgtgtgcagtgaatgtgggaaatcctttag

SEQ ID NO: 567411 - DNA, 391 bp, Homo sapiens
tatccttatagctcatgaatgtcagaattctacactggggccagcacagtggctcatacctgtaatcccagcaatttgaggggctgaggaggaagattgcttgaggctaggagttcaagaccagcctgggcaacataatgagaccccatctctaccaaaataaaaattatctgggtgtcatggtgtkagcctatactcccagctacttgggaagctgagctcagaggatcatctgagtcctggaggttgagtctgcaatgagcaatgattgtgccactgcactctagcttgggtggtgatgaagtgagaccgtgtctcaaaaaaaaaacaaaaaaaaacaaaaaaacaaaaaaactacattgggccaaacatcacagagcagtgggcagag

SEQ ID NO: 567412 - DNA, 602 bp, Homo sapiens
aactcttctgtctctgccaccctgagacagcaagaccaacccctcctattctcctcctcctcagcctactcaatgtgaagaaaaggacgaagaccttcatggtgattcacttccacttaatgaatagtaaatatattttctcttccttgcgatttttaaaataacatctcttggccgggcatggtggctcacgcctgtaatcccagcactttgcgaggtcaaggtgggcagcgcacttgaggtcaggagttcgagaccagcctggccaacatggcaaaaccctgtctytactaaaaatacaaaaaaattagccaggtgttgtggtgtatgcctgtaattccagctactcaggaggctgaggcacgagaattacttgaacccaggaggcagaggttgcagtaagccgagatcgtgccactgcactccagcctgggtgacagagtgagactcttggggaaaaaaaaaagtaaataaaaaacaaaataacatctcttttctcttgctttgttgtaagaatacagtgctaatatgtgctaatcgactgctaatgttatcggtaagccttccagtcaacagtggtgtattagataagtttttaggga

SEQ ID NO: 567413 - DNA, 602 bp, Homo sapiens
aactcttctgtctctgccaccctgagacagcaagaccaacccctcctattctcctcctcctcagcctactcaatgtgaagaaaaggacgaagaccttcatggtgattcacttccacttaatgaatagtaaatatattttctcttccttgcgatttttaaaataacatctcttggccgggcatggtggctcacgcctgtaatcccagcactttgcgaggtcaaggtgggcagcgcacttgaggtcaggagttcgagaccagcctggccaacatggcaaaaccctgtctctactaaaaatacaaaaaaattagccaggtgtkgtggtgtatgcctgtaattccagctactcaggaggctgaggcacgagaattacttgaacccaggaggcagaggttgcagtaagccgagatcgtgccactgcactccagcctgggtgacagagtgagactcttggggaaaaaaaaaagtaaataaaaaacaaaataacatctcttttctcttgctttgttgtaagaatacagtgctaatatgtgctaatcgactgctaatgttatcggtaagccttccagtcaacagtggtgtattagataagtttttaggga

SEQ ID NO: 567414 - DNA, 617 bp, Homo sapiens
ggctgggaattaaagggcgaaggtagaatgtcagrtagaaaaagtcggcagctcattgagagaagacaaaattgttcaggtgtgagaccaggactgactgtgccccaacactcagatgtttggagaagggggttgtggattggaaagccagctctccacatatcaacttacaatttgttaataaaacaaggctgactttattgtttgccactgtgaggaagaacaccacctccacagggcactggctctgtctccaagcggggaaggcaaggtcagaatttatcaagaactggaagtttggtatacaatgtggagacttgattaggattaagattaagaatcaagatttaacagttcagaattagtgaaaacaacaaggcaaggattttgaggcaaggcattcaaagacttttagagggcagagtgttgatggtttttattaaagcgttgatgaacatttggggaagttcctgtaatgaatcatcaaaccatttctgggatggagtcccctggaaaattaaagtattgctcctgagagtagtggaataggataataaagcagccatgttaaggcagacagtaagctgtttgtgtgtgtgtgtggttttggtttaatg

SEQ ID NO: 567415 - DNA, 617 bp, Homo sapiens
ggctgggaattaaagggcgaaggtagaatgtcaggtagaaaaagtcggcagctcattgagagaagacaaaattgttcaggtgwgagaccaggactgactgtgccccaacactcagatgtttggagaagggggttgtggattggaaagccagctctccacatatcaacttacaatttgttaataaaacaaggctgactttattgtttgccactgtgaggaagaacaccacctccacagggcactggctctgtctccaagcggggaaggcaaggtcagaatttatcaagaactggaagtttggtatacaatgtggagacttgattaggattaagattaagaatcaagatttaacagttcagaattagtgaaaacaacaaggcaaggattttgaggcaaggcattcaaagacttttagagggcagagtgttgatggtttttattaaagcgttgatgaacatttggggaagttcctgtaatgaatcatcaaaccatttctgggatggagtcccctggaaaattaaagtattgctcctgagagtagtggaataggataataaagcagccatgttaaggcagacagtaagctgtttgtgtgtgtgtgtggttttggtttaatg

SEQ ID NO: 567416 - DNA, 549 bp, Homo sapiens
tatgaggagcagtgtccccaggggctcaggaccttgcctaaagggaacgcttggagggctatcattttaggtgtatgttgtgccaggaggtgtagaacaagagacataggctgggaattaaagggcgaaggtagaatgtcaggtagaaaaagtcggcagctcattgagagaagacaaaattgttcaggtgtgagaccaggactgactgtgccccaacactcagatgtttggagaagggggttgtggattggaaagccagctctccacatatcaacttacaatttkttaataaaacaaggctgactttattgtttgccactgtgaggaagaacaccacctccacagggcactggctctgtctccaagcggggaaggcaaggtcagaatttatcaagaactggaagtttggtatacaatgtggagacttgattaggattaagattaagaatcaagatttaacagttcagaattagtgaaaacaacaaggcaaggattttgaggcaaggcattcaaagacttttagagggcagagtgttgatggtttttatt

SEQ ID NO: 567417 - DNA, 617 bp, Homo sapiens
ggctgggaattaaagggcgaaggtagaatgtcaggtagaaaaagtcggcagctcattgagagaagacaaaattgttcaggtgtgagaccaggactgactgtgccccaacactcagatgtttggagaagggggttgtggattggaaagccagctctccacatatcaacttacaatttgttaataaaacaaggctgactttattgtttgccactgtgaggaagaacaccacctccacagggcactggctctgtctccaagcgggkaaggcaaggtcagaatttatcaagaactggaagtttggtatacaatgtggagacttgattaggattaagattaagaatcaagatttaacagttcagaattagtgaaaacaacaaggcaaggattttgaggcaaggcattcaaagacttttagagggcagagtgttgatggtttttattaaagcgttgatgaacatttggggaagttcctgtaatgaatcatcaaaccatttctgggatggagtcccctggaaaattaaagtattgctcctgagagtagtggaataggataataaagcagccatgttaaggcagacagtaagctgtttgtgtgtgtgtgtggttttggtttaatg

SEQ ID NO: 567418 - DNA, 633 bp, Homo sapiens
caccaaggctggagtgcagtggcatgatttgggtttactrcagccttgacctccttggctcaatagatcctcccacctcagcttcccaagtagctgggactacaggcttgtgtcaccacacctggcttatttttatattttttgtagggatagggtttcgccttgttgcttgggttgatctccaactcctgggctcaagcgatccttctgcctcagcctcccaaagtgctgggattacaggcatgagccactgcacccagctgagacctctttattcgaatggcagaattgctatggggtaaagaaatccacctctggttactcctgtttctattagtaggtgtataaaatgttctacaataatatatgacccttaaaaaaaattagagtaaaagtcttttcccctcccccgaagggagttggtggaggattcgaaaaatggtttttggtttgctggattggtatctgtaaaagtgtttcttgctagaatggaatgagtacctgtgtccttggtgatggggcttcctgacatctgccacaccaagccacgtctgagggcaggggtggcatcctgtgctcactttgcaggcatcttttctgagccatggccattgtgtcacttagaattcaaac

SEQ ID NO: 567419 - DNA, 574 bp, Homo sapiens
taaaattattgtaaaacagcataattattgcattaaaaaatacagtagaaacctgtagaaagtcagaagtaaaaaccctgtatttccttttgatgccacctccttagaaggagctactgtgtgtcttttatgggaaatttgtttttacagcaaacatatacatataatatataaaatatatataatatatatatatgttctttaactttttttataccagtggaatcacagtatgagtaatgttctatggcttttcaattgtcaattagacaatatatcttaggtatcttcccttgtcagtacgtagagattgtttgcattcttttgaacagctacaaagccattccagtctatgaatatatcataatttatggagttatgtattatattttatttaacaaggaatttatttaactggaccctaggagtggcatttaggttgtccagtttttcattattataaattgtcctctacatatattrtgtacacttacagaaatatatcttatatagggaaactttccggcagtggaatttaagggaaattcagttaacaaatgtgggaatttaaatt

SEQ ID NO: 567420 - DNA, 606 bp, Homo sapiens
agtttgagaccagcctggccaacatggtgaaaccctgtctctactaaaaatacaaaaaattaactgggcctggtggtgcatgcctgtggttccagctattttgggaggcttaggcataagaatcacttgaacctgggaggcagaggttacggtgagttgggatcccatcactgcactccagcctgggygacagagtgagactctgtcttaaaatgaacaaacaaaaaacctaccaacatcatttttcacaatattaggaaaacctattctaaaattcatatataaccaaaaaagagtcaaaatacctgaagcaatcctaagcaaaaattacaaagctggaggcatcacattaccagaccttaaactatactataaggctacaataactaagacagcatggtactggtataaaaacagacacatagaccaatggaacagaatagagaacctagaaataaagctgcacacctacaactatctgatctttgacaaagtcaaaactaagcaatgttttgacaaagtcaaaaacttagcaatgttttgacaaagtcaaaaacttagcaatgttttgacaaagtcaaaaactaagcaatgaggaaaggatac

SEQ ID NO: 567421 - DNA, 359 bp, Homo sapiens
aaattttcaaaatgcacatttccaaaagaaaaaaagasttagtgatgtatccatatagtagaatgccagacaacatcctgtagactgatgctaaaacatgttcaagatgcactaggaagggagaggagcaaagtacaggctcatgtgtaaatggaagaaaagatctgtgtacacacatgcaaaagatgcctgtgtgtgcacaaatcatttctggaagagcacaaaagtccctctaggaaggggaaactaggggttcacaggaaggaatggggcatcttacttttcactgtatactgttgattcactgggattttaactgttgtttaactgggatttttactatcctcgtgaattccttt

SEQ ID NO: 567422 - DNA, 593 bp, Homo sapiens
cccaggctggagtgcagtggcatgatctcggctcactgcaacctctgtctcctggattcaagccattctgctgcctcagcctcccaagtagctgaggttacaggcacccgccaacacgcccagctaatttttgtatttttagtagagaaggggtttcaccatgttggccagtctggtctcaaactcctgacctcaggtgatccacccgcctcagcctcccaaagtgctgggattayaggcgtgagctaccgcgcctggcccacatttattctttaaatcatcacagacaactaacgggtattatgtgaaactaaataaaattgctgtttttgtaggtcaaaaacacttcaatactggcgaatggtgtagttcaacctgatctgagcatacaaagtacttagcaccgtgcatacatggagtcaatacccagtaaatgtcagccatcaccttacgacttggccacacctccctcactcttctattgaggtgatgttatttcggttttccttgtgaggaagctcagactcagaaaagttcaggaacttgcccagggactcacaactcctaagcagcagagccagaaagcgcaagca

SEQ ID NO: 567423 - DNA, 593 bp, Homo sapiens
cccaggctggagtgcagtggcatgatctcggctcactgcaacctctgtctcctggattcaagccattctgctgcctcagcctcccaagtagctgaggttacaggcacccgccaacacgcccagctaatttttgtatttttagtagagaaggggtttcaccatgttggccagtctggtctcaaactcctgacctcaggtgatccacccgcctcagcctcccaaagtgctgggattacaggcgtgagctaccgcgcctggcccacatttattctttaaatcatcacagacaactaacgggtattatgtgaaactaaataaaattgctgtttttgtaggtcaaaaacacttcaatactggcgaatggtgtagttcaacctgatctgagcatacaaagtacttagcmccgtgcatacatggagtcaatacccagtaaatgtcagccatcaccttacgacttggccacacctccctcactcttctattgaggtgatgttatttcggttttccttgtgaggaagctcagactcagaaaagttcaggaacttgcccagggactcacaactcctaagcagcagagccagaaagcgcaagca

SEQ ID NO: 567424 - DNA, 593 bp, Homo sapiens
gctctgtagaagttccagcaaagagaattttgtactctgtggactggggaagccagctggagaatccctactacccacagtccccaaccctgggagctttgcataaagcaaggaatcctgtgaaaaccttcgtctcggagatcagtggccctcaatcccacatgagtgtgccacatctccctggctcctgggagacctagaggaagttggcccagtgggcagagttctctctgaccccaagactgggagagtacaggatgggagtgcaggtgaccccaaggggcmtgcagcctgctggcttcttcactgcagcctcttgggagaaagagctgcaccatcttccaacacctgtgggaatgctgtcttgaaaacactgcagcagccagtcatgagccaaggaagcagacaagagcaacgaacacaggcgtaagatggtctgacaaagaaaggaagaccactcaggtcaaccagaacacatgccctgtaaaatcaaactgagaagacacataaaaaattgatcaaagaaggagtactcaaggagacgtaagtaatcagacacacacacacacacacacacgcacacacacacacac

SEQ ID NO: 567425 - DNA, 551 bp, Homo sapiens
atgctctcctagttgatcgaaggttgrtcctaggaccacatgagtaaacaagctgtttaaactactctacattcttatgtatctatgccctatgcttttaagataattcagctaccttcagccaaacactttatgcaaacccccataccttccaagagggtttgtgttatttcctataattttacaatttctcccactatcctgactgaacccccacattctcatccccatttccaagtgaaaaagtaggatttataggcatttgtattagtcttttacacactgctgataaagacatatcagagactgggcaatttacaaatgaaagaggtttaatttgacttacagttccacatggctggggaagcctcaccatcatggtggaaggcaaggaggaacaagtcatgtcttacttgaatggcagcaggcaaacacagcatcaggaagatgcaaaagcggaaaccctgatcaaaccatcagatctcatgagacttattcattacaataagaacagtatgggggaaattaccccccatgattcaattatctcc

SEQ ID NO: 567426 - DNA, 580 bp, Homo sapiens
taccaaaaaaagagagagagagaaataggcaagaagcaaagggcaacaggtaccaagtaagttcaaaacccaacagagaaagcaacattaaatcttgtcttaatgcttgagaataatcttcatccctatgtctaatcttccagacagactgaggcatgggttggaaacccaaggctcctagtggccctgctctcatggatttgttggatacagccactgcacatatgtcaggagttggagtcaggtgcccgcagctcaccaaggctggcatggcacattggggaccttacaggtcagggttcttacggaaaaccttgacaccatggttccactaagcattgccatagttgaggctctctgcagtgctcccaaccatggctctgctagacattgtcytggggaacactataaggttgccccacttttgtgacagatctctgcctggaccttgaggctcactgagtaactttcaaaatcctggtggaaaaagtcatgcccccacaactcttgcactctgcacacctgcagagttggcaccttgtggatgccaacaagacttactgcttgtaccttctggaat

SEQ ID NO: 567427 - DNA, 580 bp, Homo sapiens
taccaaaaaaagagagagagagaaataggcaagaagcaaagggcaacaggtaccaagtaagttcaaaacccaacagagaaagcaacattaaatcttgtcttaatgcttgagaataatcttcatccctatgtctaatcttccagacagactgaggcatgggttggaaacccaaggctcctagtggccctgctctcatggatttgttggatacagccactgcacatatgtcaggagttggagtcaggtgcccgcagctcaccaaggctggcatggcacattggggaccttacaggtcagggttcttacggaaaaccttgacaccatggttccactaagcattgccatagttgaggctctctgcagtgctcccaaccatggctctgctagacattgtcckggggaacactataaggttgccccacttttgtgacagatctctgcctggaccttgaggctcactgagtaactttcaaaatcctggtggaaaaagtcatgcccccacaactcttgcactctgcacacctgcagagttggcaccttgtggatgccaacaagacttactgcttgtaccttctggaat

SEQ ID NO: 567428 - DNA, 572 bp, Homo sapiens
ttattgaaaattaatgggtagttccccaaatccactaacagcaaagaggaagccagctggaattgctgggggctgggcagaccacgtagccaaggagcaatgcakttgtgaactggacgctggggctgccagctggctctgttctcgtgtccctgctggctctgttctcatgtgcctgcttctggatgcaaatctcagggcaggaattcagtgggtcaagtctagctgtccttcctgtgtctgagctggcagaaagcaggaagatttgtggtctcatttgacatcatcaaagggatctaaaactcagcccttatcaggagtcacagagtggggaccacccagcaaacgaaaggctgattagatgggaggctgtcttcccctccaaaatgggtcacatatcccccaaagcaagagttattctggatagtgtgatttacagaactagataatctaaaaaatctccttctatgtctaacattttataagtaacaagtatgttaaaataagaacccatgggagaaatatgtacaaactttccaattttcagggataacaaactctactactgtatg

SEQ ID NO: 567429 - DNA, 417 bp, Homo sapiens
attcacatttctagtgtggacccaggtaatggttatgctgttaatgagagaactacattgaaaaacactaatgttaaaatttaacacatttttggatattgtaagtaaacctaactggcaaatgtgtgaagcacacagcttgttttttctgtaccactcctttgttccaatcagaaatgtttctctgtagcctgaataaatatagcttgtttacatgctcaagaatgtggtagggtaaaggagggaggaacacaaggctrgatacttgatatggttttgctgtgtccccacccaaatctcatcttgaattgtagcttccacaattcccatgtgttgtgggagggatccagtgggaggtaattgaatcatgggggtggatctttcctgtgctgttcttgtgatagtgaagaaatctca

SEQ ID NO: 567430 - DNA, 566 bp, Homo sapiens
tcctggctctgccccagtggtgtcgctgctcagcattgccgtttatgctcctcaacatgaggacacagccttgtccttgagggasgctgtctcctggatttcttcaggacctagaaccagctctcttccatttcccgcttcaggatgaagaacagtaggggcttctcctgggtgcttcccaatcttgtttttgttcctgttacactaacaggatcactgttaattttcccaatctctttagtcactcatttgaatgaactatttctcacagctattctaactgatacaggttactttatttatatttttgaaaatgactcccaaggtgcttcaggatgttttactttatttcatcttagcctgtgcctggtggccggttttgatgaatcttggatccctatttcagcatgaggcgttagcatctctggctgcaatgaatgaaatgcagccattccgagaaatatatgcacacagtttagaagtacccactgtcctatagctcccatttactaaatgaaaagagaataacgctggaggctgcaaaccatccccggccttctgtctgg

SEQ ID NO: 567431 - DNA, 487 bp, Homo sapiens
ctgataccaactttgtaagacaattcagcactggttattgagatattaagtaagattaaatgaaaggggtttagtatgtagtgtcacatacagtatatatttaataagtggtgattattatcatgaagtaaagttctaagatgttatactctcccaaagcaacctaatctatacttaataattatttactggaaasactgaatgtccgctctaatgatttattgacacttctagatagttatgtatgccatttttttgattttatattaaatagctaaattaagactataggaaaaattgccttcattatgatttgatagtgctttcatatataaaaaaccaaggcttatactttcaacatattgtaactaccatttctaaatcataaaaaaagagaaaagatctttcgagtatggtgtactttagtaggaatggttacatttataacatctaagaaaagttgaagagggcgctttaaattcactgc

SEQ ID NO: 567432 - DNA, 636 bp, Homo sapiens
tctcagcttgcagcaatgatgcaggttcttctcaaacagctcatctgagttactttgaaccttgtagctgtccaggagcaactgtctctggagcataatggtctctctttgtctcctgcattttatgtatcagacagaatttctcatttctctctatgtcaaaaccataagtggaagtgaattcactagaactcagttcctatttttccttgaatcagggagaattcagagggggtggtgctgataccaactttgtaagacaattcagcactggttattgagatattaagtaagattaaatgaaaggggtttagtatgtagtgtcacatacagtatatatttaataagtggtgattattatcatgaagtaaagttctaagatgttatactctcccaaagcaacctaatctatacttaataattatttactggaaacactgaatgtcygctctaatgatttattgacacttctagatagttatgtatgccatttttttgattttatattaaatagctaaattaagactataggaaaaattgccttcattatgatttgatagtgctttcatatataaaaaaccaaggcttatactttcaacatattgtaactaccatttctaaatcataaaaaaagag

SEQ ID NO: 567433 - DNA, 560 bp, Homo sapiens
ggtttttatgttgatgaagaaattgaatcaaagatgactgaaataacttgcccagtatacaaagcaatcaagtgacgaaaccaagaaattaacacagcagtttgattacgtaactgtttattctaaacaatgtgtttctataataaagaatatcaggcctacccagtctctcattgctcaggtgagtgtactgaggccatacttccagattattagtcaataatcttattataattagagagataacagaattactatattttctaagtatcctaagaaaacccttagcatccttactatctttactatcttcaggtaaaatctaatataaacttattttacaacgtgatargtagtaaaacagggataagatcggaatgtgaaaagtgaaaaagagaaagtggtggaaggctattattttacatgcagataggtatctatgttttccaatcatttatttaccaatagtatcacaataacctttaaaataagttgttgtggcacagtccagccactagtcaggccacactgaaaccactaaggagctgtgtgaaagctcc

SEQ ID NO: 567434 - DNA, 558 bp, Homo sapiens
ccaatcatttatttaccaatagtatcacaataacctttaaaataagttgttgtggcacagtccagccactagtcaggccacactgaaaccactaaggagctgtgtgaaagctcctggagctttktcatcttcaaaattagcaaactccaagtgattttagcttatcaattggaatatactttaggtggtttcctagaacatgagagaaaaatatttatagaacacctgagaatattttgaagatttttacttctttatgtgagcaaaaaatgatagtgctcttttggtggtagttcagacttctatagcttaaaaacttgaagtaatgaccagctgatataaacctaacttcaccatctgatagtcacttctagaaagcactattattatatgataagagataatgtgggttaattaagattatcaagcttttacataactttgggaactcaaggactgaaacatttcagggttcactgctttcatgccaatgtaaaagaaaaaatgaagacataaagtgtaattcattctaaaaagtttattaatggaattgcaaga

SEQ ID NO: 567435 - DNA, 474 bp, Homo sapiens
agatctacaggcaccatgaggattgcctttccttataagctaaatgagaaataattggagactctgcagcaaaggagtgacttatttgacttagctgagggtttgtataatcaktaggttgaatgagatatgatgatgctcctcctcatagtttatgggattaaaaacctgctttgtgttaaaagagaaaatttgctgggaatgcataaagatagcaagtaccaacacttcatggtaatgttcattaaagctctacccatattttttaacagagctgctataaacagaataattaaataaaattcaaagaaagaagctgaaatattttagcaagtctttttcctaacacctttctcatttttgaaaagtttaccttcttgttgactaaacatatttttccttgcatttttgatattggctaatgtcatttttaggataaacttgaggttttttatatttctgtttaagcctttt

SEQ ID NO: 567436 - DNA, 474 bp, Homo sapiens
agatctacaggcaccatgaggattgcctttccttataagctaaatgagaaataattggagactctgcagcaaaggagtgacttatttgacttagctgagggtttgtataatcatyaggttgaatgagatatgatgatgctcctcctcatagtttatgggattaaaaacctgctttgtgttaaaagagaaaatttgctgggaatgcataaagatagcaagtaccaacacttcatggtaatgttcattaaagctctacccatattttttaacagagctgctataaacagaataattaaataaaattcaaagaaagaagctgaaatattttagcaagtctttttcctaacacctttctcatttttgaaaagtttaccttcttgttgactaaacatatttttccttgcatttttgatattggctaatgtcatttttaggataaacttgaggttttttatatttctgtttaagcctttt

SEQ ID NO: 567437 - DNA, 588 bp, Homo sapiens
gctgcatagtattccatggtgtatatgtgccacatttgcttattcaragcctttgcatttattgcaattttaatttcatgtgtttattgactttttttctgctgggctttctgattaaatagtaagtttgcttattaaccatttatcatcagaacacgacatagtaccagacacataggagttcattaattacttgctaaaaaaaagatctccaattaggtcctgtaatgtttttgatggtttaccttgagattcagagggaactactgccagaatatataaagaaagaattactatttgttaaaaatccaccatgtatctctactgtatatttttacacttatgtaatcttcctaaaaacatgttaaggataaaatatgatatatcaatttatcatttttccccaatgcataagtggagctcagagaaccagaaaaatgtttctgaattataccatgaataaaaggagccacaattcttggatttcaagctcacatcacacttggtaaaagtccattttattctgttgatttccagagattaggcaaatcatgaggtagataaatgtgatttcagtagatcaaaaag

SEQ ID NO: 567438 - DNA, 588 bp, Homo sapiens
gctgcatagtattccatggtgtatatgtgccacatttgcttattcaaagcctttgcatttattgcaattttaatttcatgtgtttattgactttttttctgctgggctttctgattaaatagtaagtttgcttattaaccatttatcatcagaacacgacatagtaccagacacataggasttcattaattacttgctaaaaaaaagatctccaattaggtcctgtaatgtttttgatggtttaccttgagattcagagggaactactgccagaatatataaagaaagaattactatttgttaaaaatccaccatgtatctctactgtatatttttacacttatgtaatcttcctaaaaacatgttaaggataaaatatgatatatcaatttatcatttttccccaatgcataagtggagctcagagaaccagaaaaatgtttctgaattataccatgaataaaaggagccacaattcttggatttcaagctcacatcacacttggtaaaagtccattttattctgttgatttccagagattaggcaaatcatgaggtagataaatgtgatttcagtagatcaaaaag

SEQ ID NO: 567439 - DNA, 588 bp, Homo sapiens
gctgcatagtattccatggtgtatatgtgccacatttgcttattcaaagcctttgcatttattgcaattttaatttcatgtgtttattgactttttttctgctgggctttctgattaaatagtaagtttgcttattaaccatttatcatcagaacacgacatagtaccagacacataggagttcattaattacttgctaaaaaaaagatctccaattaggtcctgtaatgtttttgatggtttaccttgagattcagagggwactactgccagaatatataaagaaagaattactatttgttaaaaatccaccatgtatctctactgtatatttttacacttatgtaatcttcctaaaaacatgttaaggataaaatatgatatatcaatttatcatttttccccaatgcataagtggagctcagagaaccagaaaaatgtttctgaattataccatgaataaaaggagccacaattcttggatttcaagctcacatcacacttggtaaaagtccattttattctgttgatttccagagattaggcaaatcatgaggtagataaatgtgatttcagtagatcaaaaag

SEQ ID NO: 567440 - DNA, 188 bp, Homo sapiens
gccaccattaggccaaagtgctccaaggtcctaaacaaacttgaaagccagtctaggctgcaaggacttcaattctggggcaagtcctggtgttgtgctagggtcagaggcagcgacctgagggacacacaaaccagtgggacaccaggggtacttgtatcaccyctcccgcaaccccaagcagcaca

SEQ ID NO: 567441 - DNA, 441 bp, Homo sapiens
gactgtggtgaacatatgccagtctgcagagatattagttatactccatccatatagtgtgtaagataatacataattattgaggaaccatttggatgaagaaataagttgcttgaagaaaatagtcataaarttcacttctaaattataaaataataattgaaggctggcccttgcatttgaaaatattaatatgtttaagtcagctacgtgccagataaaaatataccacaggcctccagaaaaactcagcaagtatttagaaaatggaagcaacagcttacaagatatcattttaatgggtttataaaagctcatgtctctaagggactttttttgctcaagaaaatgtcatggagatgtatgtctcagacagtgtttatgaacagtatagttattcatagttttctttacacaatgcctatggtctgtgtgtcaaac

SEQ ID NO: 567442 - DNA, 637 bp, Homo sapiens
tgcaataagccaagatcaggccactgcactccaccctgggagatagagcaagactccctctcaaaaaaaaaaaaaaagagagacaaacaatgcagcagagaaaacagtctagcatttttatggctaggatgtacttccagagagtattatttgaataacttttctccctgacatttacaataaaataatttagccaagtaacctcattgttaaggggtagaaccccttggaatcttaaacaaattaaattttgatacttctaacatttcttagacatataaaaatttaatatttattagatttatttaaatttcttctcatttttgccatcattaacattgtaatatatcctacctgattaccatagttgtatagcttaatacagacatgtaaagtcattgtcacaaagcctaacacagtgagctctgtctaaacagttttatgttaattactaatgaaattcacacctaagaaaggcatttttttcagaaacgagttttgcctttgcgtcctttcatttctcttatcagttttctctcttctcttccctacccctcaatcaatttctcttgacgatttcacactcatttcaagatctcrttgttagtcccctttcatccagtaagattctttccta

SEQ ID NO: 567443 - DNA, 503 bp, Homo sapiens
atacgtcaagtggacaaaaatttgtaaattgagaggagaagtacttctctcgctttagcacacactgtttagcccataaagtagaatcattttctttgtggaagcatagagagaacatctcccttctctycacatctagcccaaagcttggtcccttcagaccctcttggccttgagggcacactgtgattgacaagtgggaagaaagtcagaattccttttgtggctgcaatagaaagatattcttctgaaaaatgaattccactatttatatgtgaatatagagaaattcagggctagcttcatggatacatgacctgtgcacttgtacagagtcccatgcttagaagagtacaatgtttggtttaatattctgctatccctgtctcaaaataggcccaataaattaggtagctatcctgggtagggtattagagtcacattctcttgttaagttcaaccagaaataatgtcatattttgatgtttatgttttcccatgta

SEQ ID NO: 567444 - DNA, 456 bp, Homo sapiens
gaatatagagaaattcagggctagcttcatggatacatgacctgtgcacttgtacagagtcccatgcttagaagagtacaatgtttggtttaatattctgctatcyctgtctcaaaataggcccaataaattaggtagctatcctgggtagggtattagagtcacattctcttgttaagttcaaccagaaataatgtcatattttgatgtttatgttttcccatgtatacttcttaattgctgcatttctcagttgggaaaaaaaattggtgtaatattgcccacaaagaatcttcatttaaagttggtcaaattatcatttatgttttccccacacaggatgggttacacccagaaatctcacatttagtactttgcttaagcagattattaaatgtctgtccatgaataacttctcatagacttgcacaaccacaacacatctttagaagtaaa

SEQ ID NO: 567445 - DNA, 615 bp, Homo sapiens
tcacatagtgtttactaaacacatacatgcaacatacacatattaaaaatattacacaatattttgttttcaaatgtcctaaaatagtaaatattatataaaacttaagtttcttataaaactttaagaagtttgtacagacacaaatatagttgatagtattatgaagttgctataagacatttactgtaagacatttactcttttggacatcagtgaacttttgtaaaattgtacatttcagggatgttttggtgattcgatttggtgacagtctcttccctcaccttctgttctctcactctcagagtatatgtgtctcttgttaggttgacacctctctctcccctgtgtttgtgmttatatataatattctctaacatcaatgtatcattgtttcttcagattatccttgtcttctctgcattctaacctatcctctgcaacttggctctttctgtaaagactataactatgttaaaatgtaaacttctttcatattattgttataatcattttactaccttgaatatgatccctccaaagctatgcacctgtctctgctctttctttctgttgataattcccatttatttcttaatcttaagtttgaag

SEQ ID NO: 567446 - DNA, 609 bp, Homo sapiens
actttttagcttcctcttcctattatggaaaatatacgacaaaccctctttactgatttccatgtgtgctttgttttttgttttgttttgttttgttttcatttactttcttgaccctttctctggatttgtgtctctcaggygtcattctgtatactcaacagagctctactaaatttgattacatacaaacatgcaaaaagaaccaatgataactgatgcctctgctctacaactcctcagaacatgggacctaataatctcagatgatattagattacatcacattataattataattataataacaaattagccccacataaaactgtgggaggctaatattgcataacagagctgatgtttgggataaatggaattctgttctcatcagaggcatcaactatgacggaagcttatgaaggtgaaggaggatcgatttaatgaggaccgttagaattctagccctaattaatattagaattagctactttttctcacactacaccatgcatcatttcaaatagaaaagtagtgcctaatgaaactgtggagcctagtgttaaatcatgggtatctgagccagagggtctgcttttgatttctgcc

SEQ ID NO: 567447 - DNA, 609 bp, Homo sapiens
actttttagcttcctcttcctattatggaaaatatacgacaaaccctctttactgatttccatgtgtgctttgttttttgttttgttttgttttgttttcatttactttcttgaccctttctctggatttgtgtctctcaggtgtcattctgtatactcaacagagctctactaaatttgattacatacaaacatgcaaaaagaaccaatgataactgatgcctctgctctacaactcctcagaacatgggacctaataatctcagatgatattagattacatcrcattataattataattataataacaaattagccccacataaaactgtgggaggctaatattgcataacagagctgatgtttgggataaatggaattctgttctcatcagaggcatcaactatgacggaagcttatgaaggtgaaggaggatcgatttaatgaggaccgttagaattctagccctaattaatattagaattagctactttttctcacactacaccatgcatcatttcaaatagaaaagtagtgcctaatgaaactgtggagcctagtgttaaatcatgggtatctgagccagagggtctgcttttgatttctgcc

SEQ ID NO: 567448 - DNA, 614 bp, Homo sapiens
acagatgctttcaaatctttcctttgtttctttctttctttcctcctccctctccctccttcttattcttaatcagacatcattctgcctttaaatgctcaaaaatgttagaaagaatcccttactggagactcttatatggaaccctgaaaatggggcaaaccaagtatttatytattgtggtaggttcactttgacaaatccacaatggagagatataagagagctgcttctctgagaaccgttttgttttctctcatttcttgtggtcctttttcttttgacatctccaccttccccacattgttcttcttcttcatagccctgacccatgtgcaggcatttttgttctaaacagtttccctttaaacttttttgcaagtattgaggtatgaagagattctcagacagaaaatgagtgtaaagaatgcaggaaaggtggtttccctcaactgggaataacctactgcaaaaacagacatttctaatgttgagacttagccccatcttttaactccatttgtcattatgccaaaaaagtttccattttttatgtgtttctaaaagcctctactatgattttatttggcccagagttccagagtataaagctt

SEQ ID NO: 567449 - DNA, 403 bp, Homo sapiens
cagagataaacgcgtgtttaacgtatcatgtttataaagaagtccaccacgtctttctttcatgggatctaagcatgatcattgagatgtaatacagaggaaataaatttcaaaaatttttaaagttacctggcagaaatttagatagctattttctgtttaaaacatcaagtcagtattcatatctttttttttccttttagcctctgttatggcttggatgcttgatgcctcaaaacctcattttgaaatttgacctcagtgttagagatggagcctcatggacagtgtctgggtcttgggggcagatccctcatkaatagaaaaatgctttgcctgaaagggagtagtggtaagtgagtttttgctctataagttcccaagatagctggttgtttaaaag

SEQ ID NO: 567450 - DNA, 608 bp, Homo sapiens
tatgtgttactgcctcacatatgtgctttttatatctagaaaatataagggctcctgaaatttaaaaatagtatgaaattagtaccttatagtaaaaatctctagcttgaccaactatgaggatttaaaaggtggcatgaggatacgtggttttattctaacatgttttaaaatatatgtagactgataaacttttaaataaataaaatggctggtaatagctattttgaacatcacataaacaaatgtgtaaatgtccagtggtaaaatgatgaaggcagtaggcataatgcaaaatatacgctaaagtgttaaaccagtaactcaastccagcatggttttgccattcaggctaaaggaaacacaagaattcctgccttgccccccacgtagtttttctaaagaaatgcaaaattcagattcttatttgaaatattctgatttctatatgtctctcaaagaacagttgatatttaatgactagtgtttctaggtatgtaagctttatattctactattttgttgcattctcataccactttaataagtcaggcaaaggaagcaactgaaggctcaataaaggacggtagatcaacagtaatgattg

SEQ ID NO: 567451 - DNA, 545 bp, Homo sapiens
gttgatagaataaatgtattagcattttgctaaagatttttgagtttatgttcataaatattattgctctatagttttctagtattgtaatttctgtgttgattttgatatttatgtaatgctagccttataaagtttatttggaagtattgtttcattttttctgaaagttgctgtttgtaactgtgctgtaattctccctaaagtgtttgaaatttttcaccattgaagatttctttgattgaaatatttttactacaaatccaatttttagtagatacaggactattcagcttgtctgttgtctaagtgagttttcataatttgtgcttttttggaattagttcacttcaactatttgtggaatttatacgcatagagctttttgaagagttctttatatgacaggcagaataatgtctaccccctgaagatttccacatcttaatttccagaacctgtgaatatgcaaccttatatggcaaaattgaccataccaawgtaatttaactaagaattttgagatgagatggttatcctgaatt

SEQ ID NO: 567452 - DNA, 620 bp, Homo sapiens
aaatatttgcaaatttatcttgagaatttcgcttgactcatgagttacttagaatacttttgctagttttcaaaaaactggagatttttcagttatcttcctattactgatatatatatttttttgagacagagtctctgttgcccaggctggagtgcagtggctcaatctcggctcactgcaacctccaccttccaggttcaagcaattctcctgcctcagcttcccaattacctaggactacagatgtgtgccactacacccactaatttcttttttttttttttggtatttttagtagagacagggtttcactgtgttagccaggatggtctcaatctcctaacctcatgatccgctygcctcagcctcccaaagtgctgggattacaagtgtgagccaccatgcctggcctctattactgttttttaacttaaacatattatcatgacaacacatacattgcatgatttctagtcttttaaattttttaaagtttctccaaaaatagtatgtcttggttaatgttaaatgtatacttgagaagaatgtgtattttattgcacagtggtgtgtactataaatgtcagtgaacaaaaaacaataaatttgtaaaaatc

SEQ ID NO: 567453 - DNA, 656 bp, Homo sapiens
taacataatagttcatggggaagaagaacttattcattcttaaggtttctatcttttctgtgaagcgatacaatattaattctaaatagtctgtgaaaagcttaatatgaagattacaatttccagagctacctcttaaaaaagaaataattcaaagaaagcagttaggtgcagtggctcacacctgcagycccagtactttgggaggaaaaggtgggttgatcacctgaggtcaggagtttgagaccagcctgaccaacatggtgaaaccctgtctctattaaaaatacaaaaattagctgcaggtggtggtggatggccataatcccagctactcaggaggctgatgcaggagaatcacttgaacctgggaggcggaggttgcagtgagccaagattgtgccattgcacttcagcctgggtgacagagtgagactcaatctcaaaaaatatatataataataataatatttttaagaaagccaaaaagaaaataggcaaattataaagggataattagaaaaatacaaataagccaaaagaaggcagtaaaagagaaacactggagcaacaacaaaacagatggagcaaacaggaaataaagactaaaatgatgaacttaaattgaaccacatcaatctttacatcagatgtta

SEQ ID NO: 567454 - DNA, 565 bp, Homo sapiens
aatcatctaaatacttcaattaaaagcaagagattggcagaatagattagaaaggaaaaaagcaagatcttactgcatgctgcttacaagaaaccaattttaaatataaatatgcagaaaggttgaatataatggaagaaaackgataaacccacacaaattgtgcacatcagaggactggtgtatccatttaaataaaggattaagcagactccaatatcatgagtattactagagagataaataaagatcttttacaataaaaagtaagacaattcatcaggaagatataacaattataaatacgttcctataaacagtctcaagataaaagaaaataaaatggagatcaaagtaggccaaaagtaaataagatgggggactaattttaaaaaacataaattgatgaaataataaaacagacatgttttagaagattaacagtgcaaaaactggttctttgaaaagatcagctaattaccaaactgctacttaaattgatcaagaaaaataaggaggaaacacaaataactcaatatcagggataaaatatttcaaatatagg

SEQ ID NO: 567455 - DNA, 596 bp, Homo sapiens
agtatactctgaaatgtatgtgaaaatgcaaagcacctagaaaataaccaaagctgttcccaaaataaaggaaaagttaagagaatttatcccacctcacttggagacttagtataaagatacaggaatcaagacactctgttattggagaaaatagatgatagatgattgatagatagatagatagatagatagatagatgtaaaatctacaaataggtgccaaggcaatgcaatggggtaagaaagtcttttgacaaatggtattgagttacctgactatccttgtagaaataagtgagcacttactctaacttcatgcaatactcacatcatataaaaccaaattaagtttaacttcatcaaaatttataatttgatttatagctggaaataaaacctaaaactataaaactattttttgttacarttagttatttctgtaacaaacggctgttattgtgttggtacattgatcatatattctgcaaccttgctaactctcttattagtaaaaatactgtatctgtttattttccttcattatcagctacaaatatatatcagctacaaatgataattatatatttcccttca

SEQ ID NO: 567456 - DNA, 494 bp, Homo sapiens
tcatatattctgcaaccttgctaactctcttattagtaaaaatactgtatctgtttattttccttcattatcagctacaaatatatatcagctacaaatgataattatatatttcccttcaaaactcatactatatctctctttttaggctattatcttattattgacaaagcattccaatatggtattacataagagaggaactttggttataggtacctttttccttattcctaaacaaatgtgtctcaagttatagcataaactgtaatttttattgtagattctagtaaaaagcaaaaataaaaatattattttatggaagtttatttttattctattattttccaatatgtttaatataaatatgtattgaacactaagaaatgccttttacatttattgasataataattagcttctttagttttttaatgtaattaattatattaataggttgtattaaatcatatctgtgttctttacctaacact

SEQ ID NO: 567457 - DNA, 539 bp, Homo sapiens
ccccaccatgccaccaggacgggcatgaatgctggcaacactgtctctgccagcaaactacccctgctatgccaccactgcaatcatgtgcaagaatgcttccaccccactcccattggtgccccaccaaagccaatgcacatgcaccccaacatgccactgttgaggaccaaccaaaatattcaggacctgaactagacacttgaccaaatggaactaacagatatctacagaactctccaccaaaaaataacagagtrtacattctgtgccattgtgactgctgagacacacaagtgagcatgggttctgctgtcactgccaagatgaagtgctttggccaacaccatccactgaagtgctgtggtcagcagactgagaactcctcaggccctccatcacaacaagttcccaaccaccaggggccagaaaacagagctggggacctgttaccagccccagagttagagtacacagcccaggagtgctgaggtgtgctttggtcccctaacatgttccagaagcaaaaccagtcaacc

SEQ ID NO: 567458 - DNA, 539 bp, Homo sapiens
ccccaccatgccaccaggacgggcatgaatgctggcaacactgtctctgccagcaaactacccctgctatgccaccactgcaatcatgtgcaagaatgcttccaccccactcccattggtgccccaccaaagccaatgcacatgcaccccaacatgccactgttgaggaccaaccaaaatattcaggacctgaactagacacttgaccaaatggaactaacagatatctacagaactctccaccaaaaaataacagagtgtacattctgtgccattgtgactkctgagacacacaagtgagcatgggttctgctgtcactgccaagatgaagtgctttggccaacaccatccactgaagtgctgtggtcagcagactgagaactcctcaggccctccatcacaacaagttcccaaccaccaggggccagaaaacagagctggggacctgttaccagccccagagttagagtacacagcccaggagtgctgaggtgtgctttggtcccctaacatgttccagaagcaaaaccagtcaacc

SEQ ID NO: 567459 - DNA, 539 bp, Homo sapiens
ccccaccatgccaccaggacgggcatgaatgctggcaacactgtctctgccagcaaactacccctgctatgccaccactgcaatcatgtgcaagaatgcttccaccccactcccattggtgccccaccaaagccaatgcacatgcaccccaacatgccactgttgaggaccaaccaaaatattcaggacctgaactagacacttgaccaaatggaactaacagatatctacagaactctccaccaaaaaataacagagtgtacattctgtgccattgtgactgctgagacacacaagtgagcatgggttctgctgtcactgccaagatgaagtgctttggccaacaccatccactgaagtgctgtggtcagcagactgagaactcctcaggccctccatcacaacaagttcccaaccaccaggggccaraaaacagagctggggacctgttaccagccccagagttagagtacacagcccaggagtgctgaggtgtgctttggtcccctaacatgttccagaagcaaaaccagtcaacc

SEQ ID NO: 567460 - DNA, 606 bp, Homo sapiens
tgtaaataaggtaagatgagatccatataattttgtggccattacgtaagtgaggcaaagcatgatgaagcttacatttttccagttgggaacctgataaaaccattgcttagatatggaatatggaataaaaatagtggccacaaaaatggttataataatttttatgtatgtataataattggtagtcatttaggatttataggtataggcctttaaggtgaaattaattctggagatttctatttgaaagaggatagagattatgattttaccacaggaatagatgaaaatatttcacattcagtgagtaatttaacagaaagcaagagttccacraattttgaggtaaattacaggacagttgtgaaaactatgatttagccttggtttttgtttgtttttcagttagcaatacttcttgctgagttgtatttcacagtcaatgcaatgatggctccaaatttgagccctcaaaattgtggaatttaaggaatcccctgaaaaattatttacatggtacctggactgcagtcagccctccatattcatacttctggatctcaggctacaaaatgggtactttaatagagaaattagcacaca

SEQ ID NO: 567461 - DNA, 591 bp, Homo sapiens
ctgttaagttacagggctttgattcagagtacaaagatcttatctaaagatggcaccaactcctgccagtatctgacaccaaactttagttaaccacaggcttatcttcagacctgagaaaacataacaatcaaagtaactacctcatgagacatatgaacagtcctgcattaaaaattactgagattcatttagtaattttcattcaatctgagtcctagattctagataatttgaatgtttatctatctgtgagcttccttttcctatcattgtcaaaatcagacaggggttttgacctttttttttgaaatgttgctaattctttatgtttggttttacagagctaagaaaaccttttttttctctctttttgagctatttaggacttacagaaattggstaaaacaataaagattacatttctctctcatctaatatctccagattttgaaaactgttcaatcccactgggcccatctattttgctttgccaacacactgctgctaaagctatacagtatcaaccaccttccctctaagcccagggactatcgtgaaagaggtgggcatatgagattgttaagtgcc

SEQ ID NO: 567462 - DNA, 649 bp, Homo sapiens
ctattttgctttgccaacacactgctgctaaagctatacagtatcaaccaccttccctctaagcccagggactatcgtgaaagaggtgggcatatgagattgttaagtgccagtttttagggatgaaattagctcaaaacttccaaatcaaagacaagtacacaagtgcccatacagctgatgagtcaacacacagaacttatagacaagtcaatcctgtaacctttctttttggctttgggtttttgactcttatgttacttaaaagggttctattggttaatggccctctggccacttccattcccatatggcctagaatgtttaattggctgtaagtcttttgactctaagctgcttggccataggggtcccaacaagtgacataatggatctgaggcaggtagccacaccatcctggcaatgacattaaactaaataaaactttggcaattgatgttgcctctggcatgtcttgatgaaaaaggaagaatgtaaactataaaaataaaatcctaacatcccaccaactgaatggacactttctttggccaaggcaagacaatgcargtgtctcctttggcctctccaaaagtgccttaacaatttagttcccaacacttatgggacaggaggtaaaatatgcatc

SEQ ID NO: 567463 - DNA, 537 bp, Homo sapiens
caattctagaaaagaaaaagaccacaacaaagcaatggttagaaatgaaattagccatttgcctactcaaaagacctcaattccaatgggagacayggcattgtactgaatttattctttaagatgcctaataaaatattcaaatacagaaaactcaactccatcctaagtatgtggcatttgatatggtttgaaaagtaaacaccaaggaaagaatgaaaatgaaatatgctcaaaagaaaccaagattagtgggtcatttactccaaaaatctccagtcacttggttgtcatttataacttaaggctatatgcattctcttgctctctttgcaagggtatagaaatttcttccaaatatgtagaattatatcatttaaatcaatcaacattttctgaggccctttgttatgctaggtgtaaggaagtgagatacaaagataaataacaagacttattactcatcttttttcagaaagagttttgaggggtatgaccatgagtcttatcttcaagagtctatctagcattgacaca

SEQ ID NO: 567464 - DNA, 444 bp, Homo sapiens
aaaagaaccagaaaaaccattctggtwatgtgacaaaacagggttctataacacctccaaaagatcacactagctccccagcaatggatctaaactgagaagaaatatctgaattgccagattaaaaaaaaaagaattttaaagaatgactaaagcctgcaagaaatttgggattatgttaaattatcaaaacaaagaataattggtgttcctgaggaagaagagaaatctgaaagttggaaaactttttcgcaggaataactgaggaaaatttcctggccttgctagagatgtatacatctaaatacaacaaactcaaagaactcctgtaaaattcattacaaaaagatcattagtagacacatagtcattgggttactaaagtcaaagaaaagaatcttaacaactgtgagacaaaagcattaggtaagctataaggaaaaa

SEQ ID NO: 567465 - DNA, 593 bp, Homo sapiens
ataaattattctattataaagacacacacatgtgtatgttcattgcagcactattcacaatagcaaggacacgaaatcaacctaaatrctcatcaatgatagagaggataaggaaaatgttgtacatatacaccttggaatactatgcagccattaaaaaggacaagatcatgtcctttgcagggacatggatggagcttgaggccattatccttagctaactaacacaggaacagaaaatcaaatactgcatgttctcacttataagtgaaagctaaatgatgagaacacatggacaaatagaggggaacatcacacactggggcttttcagagtgtgggggatgagaggagggagaggatcaggaaaaacaactcgtgggtactaggcttaatacctgggtgaggcaataacctgtacaacaacccccatggcagaagcttacctatgtaacaaacctgcacttgcatccctgaacttaaaagtaaaaaataaatttaaaaaaacaaagtaaaaagtaaaacaaaacaaaattccaaatgctatagccattgtggagatagcttgacaatttcttataaaattaaatatgt

SEQ ID NO: 567466 - DNA, 603 bp, Homo sapiens
tatatcactatccctatctaactcagtgcagtttgtcaactgccaccatactctttgcaaattccaccataaacccatcattccaccatatttcatttttatacataaaactctttttatcttttcacatgtgtcaaaattgactgtattagtctgttctcatgcttttaawaaagacatacaagagactgggtaatttatacaggaaggagattcattgactcacagttccacatggtgggggagtcctcaaaatcatggcagaaggcgaatgaggagcaaagtcacatcttaatggcggaaggcaagagagcatgtgaaggggaactcccctttataaaaccatcaggtctctcgagacatattcactatcgcaagaacaccacaggaaagacctgccccatgattcaataacctctcactgagtccctctcatgacacatgggaattacaggagctacagttcaagatgacatttgggtgcggatacagccaaaccatatcattcatcatatcttgataacattattttttcttgggatcaacccagaaaaagtttattttttttttacttttctttaatgttcacaggaatgaaagaga

SEQ ID NO: 567467 - DNA, 554 bp, Homo sapiens
ccacagcaggattttaaaagtatttttctactttaaccacattgacatccctaatacacatttatagaaatgcatatattgaacaatctaaacaaatatattctttaaaacctatgaaaactattcactcaatgctttctgatccaatactctccagatccagtaacctttttccaacattaaaatctcatctaggatgagctatgctgtgctatcattaacaactgaaatcttgaatcccaatgatgtattaatacttttttactcacttatgaaaagacaaatacaggtggatattgctggtggttttgttctcttgagtagttctccttcatttattgattcaagggcccagccttattctgtgctgtggtttccccatcttcagatgtgccttaaatgtcatcctggtgtcattcagataagcaggcatgaaagaagcagggtagaagaaatgaaggcatgtgtagtcaatacagcagcttttcattgctttagacttaycattttcactcctttatcaagaacttgactcatggttcaatgcagattgc

SEQ ID NO: 567468 - DNA, 575 bp, Homo sapiens
taaaaaggagaacaaagatcacatgcttctgaggccaataaagatcacaaggcaaatggcaaagtcaaaaactcctgataagggtctatgttcagctgtgcacatattgtcttgataaacatcttaaacaacagaaaacagggttcaagagcagagaaccagtctgacctcaaattcaccagggtggggtttcttccaaaccctaataagcctgagggtactgcaggagaccaggrcgtatttgagtccctatctcaaccacataagacagacacttccagagtggtggtttatagacctccccccaggaatgcattcctttcccagggtcttaattattaatattccttgctaggaaaagaatttagcgatatctctcctacttgcacgtccatttataggctctctgcaagaagaaaaatatggctgtattctgcctgaccccgcaggcagtaagaccttatggctgtcttcccttgttccctaaaaattgctgttattctgttctttttcaaggtgcactgattttgtattgttcaaacacacgttttacaatcaatttgtacagttaacgc

SEQ ID NO: 567469 - DNA, 575 bp, Homo sapiens
taaaaaggagaacaaagatcacatgcttctgaggccaataaagatcacaaggcaaatggcaaagtcaaaaactcctgataagggtctatgttcagctgtgcacatattgtcttgataaacatcttaaacaacagaaaacagggttcaagagcagagaaccagtctgacctcaaattcaccagggtggggtttcttccaaaccctaataagcctgagggtactgcaggagaccagggcgtatttgagtccctatctcaaccacataagacagacacttccagagtggtggtttatagacctccccccaggaatgcattcctttcccagggtcttaattattaatattccttgctaggaaaagaatttagcgatatctctcctacttgcacgtccatttataggctctctgcaagaagaaaaatrtggctgtattctgcctgaccccgcaggcagtaagaccttatggctgtcttcccttgttccctaaaaattgctgttattctgttctttttcaaggtgcactgattttgtattgttcaaacacacgttttacaatcaatttgtacagttaacgc

SEQ ID NO: 567470 - DNA, 590 bp, Homo sapiens
gctggaagaactggggagatgttgcttagaggacacatttcagttagacaggaggaacaagttcaagtgatgtattgtacttcatggtgactgcagttaataacaatatattgtattcttggaaattgctgaaagtgtagatgtcaagtgttcataccacaaaaatatatgacataatgtatacattaaatagcttgatttagccatttcacaacatatacatctattaaggtatatgttgtaccccataaatatatataaattgtatttgtcaattaaaaataaagatatgtaaatagagaaaatacaaataggcagagatagctattaaaataaaccttttgataataacaatttcaaattcatggttaaatatgtaaaacacagactttgggggcaggcaatctgtacttgatatctgagtgttatcattatggagccagttttatttgacttcagcacttaatttacttgagatctgaaagttctgaagaasttatacagataatataagcaaaacgaggtctagtatttaagaaaactctttaagaaatgtttctgttgttgcattctacaaataatttttattt

SEQ ID NO: 567471 - DNA, 502 bp, Homo sapiens
gagaccaaggttttgtcatgcagatgaagcctccaggtagcaggcttcagagagagtatattgtaaatgtttcttattagacataagttcttcgttgacattaayacttgaggagtataatgaggtatgtccaacctcctattccatcatggcctgaactagattttcagacaaattccagaatacccttagccaagaggagggatccattgaggtggttggggggcgcttagaatttcatttttggtttgtagactatagctgctatagatagtgattcctctgatggatttgggcaaaataaattgaaaaccttttgaaagggattcaccactctagacaccattaagaacacttgcgattcatgggagaaggtcaaaatattaacatcgacagcagtttagaagaagttgatttaaaccctcatgggtaactttgaggagttcaagacttcagtgaagaaagtaactgcagaattgtagatggagcctgaagatgtgac

SEQ ID NO: 567472 - DNA, 653 bp, Homo sapiens
ccaagaggagggatccattgaggtggttggggggcgcttagaatttcatttttggtttgtagactatagctgctatagatagtgattcctctgatggatttgggcaaaataaattgaaaaccttttgaaagggattcaccactctagacaccattaagaacacttgcgattcatgggagaaggtcaaaatattaacatcgacagcagtttagaagaagttgatttaaaccctcatgggtaactttgaggagttcaagacttcagtgaagaaagtaactgcagaattgtagatggagcctgaagatgtgactgaattgctacaatctcatgatgaaagttgaatgggtgagcagttgcttcttatggattggcaaagaaagttgtttctgaaatgggatctattcctggttaagatactgtgaacattgctgaaatgacaacaaagaatttagaatattttctaagcttagttgataaagcagtggtagggcttgaaaagattgactccagtatagcaagttctattattgaaactgccattgcaaaatcataactgcgaaagttatttacagtgaaagggatctgacctaattgacttcatcttgcttctaaccacygagctatccttgttcattggtgggtgtaggccaaac

SEQ ID NO: 567473 - DNA, 552 bp, Homo sapiens
tttgctgtgagcttttctacctcactcagttttgaagtgagtttcagaatagatttcagatattaaggttttaggctcctaatgtagtcagagacatggaagcaggataatgtcattattaagagcacagtctttgaaatcaagcagcccaagtttaacaatggagacagggaatggtggaaaggtgggtgggtgggaggagggcgagggataaaaagttatttaatggatacaaggcacattatttgggtgatggttacactaaatcccagacttcaccactaggcaatatatccatgtaacaaaactgcacttggactccttaacccatttcccatttacaaagcgtagctcacatcagtgcacttttctccrggcaaacaataaatggattaaatttatacaaatatatatttgttccttaattgtacgaccttcggcaggttaaagaatctcagtgaatcctgtttttttttttttttcacccattgttttcttcatccatagaatgtggacaatcatgggacctaactgacttgtttggcatttgcc

SEQ ID NO: 567474 - DNA, 605 bp, Homo sapiens
cagtcacatcatagaattccagccttgaccagggacccagagaagtacaagtggactgttccttcctgcactgcgtgcactattcttcctctctcaggtgcttcttcacccaactcttccatccccagtgctttccttgccatgctatacggtcatccttttgatratgccaggatcaagagattgccaacaaattctaaagaatgacaacataaagtattgttagcgatatggggtaacatgtaccctcctataatgccaatggaagtaaaattggtaaaaccccagggggaatgatttagctgtatgtatcaaatgccataatctgtaattccatgtgacaaggtagtaccacttctaggagtgtctcttaaataaaactttagctgcaagatttaaactttatcttaattttaacttaagtatttatcttaggcagggtgtggtgtctcacaccagtaatctcagcactttgggaggctgaggcaggtagatcacttgagctcaggagtttgagaccagcttgggcaacatggtgaaagcccatctctacaaaataatatacaaattatccaggtgtggtggcatgcacctgtagtcctagc

SEQ ID NO: 567475 - DNA, 529 bp, Homo sapiens
aatcttccttccacatgatccattgaactttcaaaacttcagatctgaattagaaaaggaattataaraacagtcatatgttcagctcttattaggctttgttgtaatctctttatgctggaagaaagaagaggcaaggcttttcttatgtagctgttgttcctctgtaatatcctctcttgtgggttcataattaaggcaaaaacatgcattaataagcatttttctaccaatttataactcaccaggtgcttttgcactcattacctcatctgatccttataatcactgtgagtatgatatcatcattactgcctttctatagtcaaagaaattaaagcagagaaaggttatctgctcaagtatagtaacagggttcatttggttgcaaagccagaagcacaaatccaactacattaaggaaaaatgggaatttattaacttgtataactataatgtccaatgatagtaccaacttcaggcacagatggatccaggtgctccaatgatattgtcacactcaccacta

SEQ ID NO: 567476 - DNA, 529 bp, Homo sapiens
aatcttccttccacatgatccattgaactttcaaaacttcagatctgaattagaaaaggaattataagaacagtcatatgttcagctcttattaggctttgttgtaatctctttatgctggaagaaagaagaggcaaggcttttcttatgtrgctgttgttcctctgtaatatcctctcttgtgggttcataattaaggcaaaaacatgcattaataagcatttttctaccaatttataactcaccaggtgcttttgcactcattacctcatctgatccttataatcactgtgagtatgatatcatcattactgcctttctatagtcaaagaaattaaagcagagaaaggttatctgctcaagtatagtaacagggttcatttggttgcaaagccagaagcacaaatccaactacattaaggaaaaatgggaatttattaacttgtataactataatgtccaatgatagtaccaacttcaggcacagatggatccaggtgctccaatgatattgtcacactcaccacta

SEQ ID NO: 567477 - DNA, 529 bp, Homo sapiens
aatcttccttccacatgatccattgaactttcaaaacttcagatctgaattagaaaaggaattataagaacagtcatatgttcagctcttattaggctttgttgtaatctctttatgctggaagaaagaagaggcaaggcttttcttatgtagctgttgttcctctgtaatatcctctcttgtgggttcataattaaggcaaaaacatgcattaataagcatttttctaccaatttataactcaccaggtgcttttgcactcattacctcatctgatccttataatcactgtgagtatgatatcatcattactgcctttctatagtcaaakaaattaaagcagagaaaggttatctgctcaagtatagtaacagggttcatttggttgcaaagccagaagcacaaatccaactacattaaggaaaaatgggaatttattaacttgtataactataatgtccaatgatagtaccaacttcaggcacagatggatccaggtgctccaatgatattgtcacactcaccacta

SEQ ID NO: 567478 - DNA, 529 bp, Homo sapiens
aatcttccttccacatgatccattgaactttcaaaacttcagatctgaattagaaaaggaattataagaacagtcatatgttcagctcttattaggctttgttgtaatctctttatgctggaagaaagaagaggcaaggcttttcttatgtagctgttgttcctctgtaatatcctctcttgtgggttcataattaaggcaaaaacatgcattaataagcatttttctaccaatttataactcaccaggtgcttttgcactcattacctcatctgatccttataatcactgtgagtatgatatcatcattactgcctttctatagtcaaagaaattaaagcagagaaaggttatctgctcaagtatagtaacagggytcatttggttgcaaagccagaagcacaaatccaactacattaaggaaaaatgggaatttattaacttgtataactataatgtccaatgatagtaccaacttcaggcacagatggatccaggtgctccaatgatattgtcacactcaccacta

SEQ ID NO: 567479 - DNA, 575 bp, Homo sapiens
agatttacaattaaaatagttaaagtttttttccattttgtgactttgcttttcacactctaagttatcctttgatgaatacactactaattttagcatagtccaatttgttcatctttttatttatagttagtccttcttctctccttttcaaaaaatagttccatacctcatggtcatgaaaatttcctcccatattatcttctgaaaactctaccattttggcatttaaacttagatcaagaatccacttggaactgattttttccaatatatacatygattttttccaactctgtttattaagatgatggttctttctttatagttctactgggtcacattgagtctccctgtgggtctgttttggatttgcagttttgccccactgatctgtttatccctgcactgacaccaccatgccttattgcaatagtttccaatgagttttgatatccggtagggcaaatcctctgttctctatctcctccttttcttcctggtcctcctcttgcctcttcaagagtatcttagctactttttgccttctacttctccacatacattttataatc

SEQ ID NO: 567480 - DNA, 548 bp, Homo sapiens
tgttcatctttttatttatagttagtccttcttctctccttttcaaaaaatagttccatacctcatggtcatgaaaatttcctcccatattatcttctgaaaactctaccattttggcatttaaacttagatcaagaatccacttggaactgattttttccaatatatacatcgattttttccaactctgtttattaagatgatggttctttctttatagttctactgggtcacattgagtctccctgtgggtctgttttggatttgcagttttgccccactgatctgtttatccctgcactgacaccaccatgccttattgcaatagtttccaatgagttttgatatccrgtagggcaaatcctctgttctctatctcctccttttcttcctggtcctcctcttgcctcttcaagagtatcttagctactttttgccttctacttctccacatacattttataatcactttgccaaattctattagaaagaaaactattgatattttagctgggattgtattgcatctatagaacaatttgggaaag

SEQ ID NO: 567481 - DNA, 590 bp, Homo sapiens
tttacacagaagcactgtacattttttgtcagacagattcctgtgttttggataatttttgatactattgtgaaagaaacatatataagcaacaaaatatatcttatatagtcagaatatatatttttaaacatcaaaagttaaaatcaaagagacaaaagcccaatagaaaagtagccaagctgagtgtggtgactcgcgcctgtgatcccagcactttaggaggccaaggcaggagcactgcttgagcccaagagtttgagaccagcctggacracatggtaaaaccccattgctacaaaaaatacaaaaattagccagaagtggtggcacaagcctgtggtcacagctgctccaaaggatgacatgggaggatcgcttgagccccagaggttgaagctgtagtgagccgagatcatgctacttacactccagcctgggtaacagagcgacatcctgtctcaagaaaaaaaaaaaaggaagaaaaaacgtagccaagactacctgaagaatacttcatcagaaaggatactcaaatggtgaataaaatgatagaaggcactccaatctcattagtcaccagggaaatg

SEQ ID NO: 567482 - DNA, 590 bp, Homo sapiens
tttacacagaagcactgtacattttttgtcagacagattcctgtgttttggataatttttgatactattgtgaaagaaacatatataagcaacaaaatatatcttatatagtcagaatatatatttttaaacatcaaaagttaaaatcaaagagacaaaagcccaatagaaaagtagccaagctgagtgtggtgactcgcgcctgtgatcccagcactttaggaggccaaggcaggagcactgcttgagcccaagagtttgagaccagcctggacaacatggtaaaaccccattgctacaaaaaatacaaaaattagccagaartggtggcacaagcctgtggtcacagctgctccaaaggatgacatgggaggatcgcttgagccccagaggttgaagctgtagtgagccgagatcatgctacttacactccagcctgggtaacagagcgacatcctgtctcaagaaaaaaaaaaaaggaagaaaaaacgtagccaagactacctgaagaatacttcatcagaaaggatactcaaatggtgaataaaatgatagaaggcactccaatctcattagtcaccagggaaatg

SEQ ID NO: 567483 - DNA, 572 bp, Homo sapiens
tgtggtcccagctactcggtaggctgatgtgcaagaatcacttgaacctgagaggcagaggtcacggtaagccaagatcgcaccactgcactccagcctgggcgacagagtgaaactctgtctcaaaaataaacaaaataaaataaataaaataaaatagtgtagtgtttacctataacctacaaacatccaccatatactttaaatcatctgtagattgcttataatatctaatgcaatgtaaatgctatgtgaatacttgatatgytgtattgtttagggaataatgacaagaaaaaacagtctgtatatgttcaaaacagattcaactttatctttgaacatttttcatctgcagttagttgaatccagggttacagaatccacaggtacagagggctgactgtacaatgaaataacacctctcacccccaagtggctaaaattaagactgacaatagcaaatgttgatgaggatatgaagcaaaggagaacttttatatactgccggtaggggtgtaaaattactttggaaaacagtttggtattgtttactaaagttgatgatacac

SEQ ID NO: 567484 - DNA, 572 bp, Homo sapiens
tgtggtcccagctactcggtaggctgatgtgcaagaatcacttgaacctgagaggcagaggtcacggtaagccaagatcgcaccactgcactccagcctgggcgacagagtgaaactctgtctcaaaaataaacaaaataaaataaataaaataaaatagtgtagtgtttacctataacctacaaacatccaccatatactttaaatcatctgtagattgcttataatatctaatgcaatgtaaatgctatgtgaatacttgatatgctgtattgtttagggaataatgacaagaaaaaacagtctgyatatgttcaaaacagattcaactttatctttgaacatttttcatctgcagttagttgaatccagggttacagaatccacaggtacagagggctgactgtacaatgaaataacacctctcacccccaagtggctaaaattaagactgacaatagcaaatgttgatgaggatatgaagcaaaggagaacttttatatactgccggtaggggtgtaaaattactttggaaaacagtttggtattgtttactaaagttgatgatacac

SEQ ID NO: 567485 - DNA, 609 bp, Homo sapiens
gatttctcagcctctgtaactgtaatcctgtgagccaacagtttagagtaaatttctctctctctctctctctctttctccctctctctctccctctctctctctctctctmtatatatatatatgggagctaaacattgagtacatcatggatatttataaatctctttagatataatatatataatatttataataaataaataaatatatataaatacatacacacacacacacacacatacatatacacacgcacagtagtttcctggtattcatggaggattgattctaggaccccacccccctacaaatacaaaaatccacagatgaccaagtgtgtcatacaaaatggtgtagtattagcatatagcctaggcacatccttcagtatactttaaatcaagcttgtgtaacccagggccgcatgtgtcccaggacagctttgaatgcagcccaacacaaattcgtaaactttcttaaaacatgagatttttttttgtaatttcttttttagctcatcagatattgttcatgttagtgcattttatgtgaggcccaagacaattcttctttcaatgtggcccagggaagccaaaagattgtaca

SEQ ID NO: 567486 - DNA, 528 bp, Homo sapiens
ggcctccccagaagcagaagctgctatgcttcctgtacagcctgcagaaccatgagccaattaaatctcttttctttataaattacccagtttcaagtatttytttatagcagtgcgggaactgactaatacacctctctttgtttaaaggggatgccaggattacagcaatgttacgaacctcagaactcaagtgcacatttctccttgattaattaaaaggattgaaggattattgaaatgactagctgcccactgagtaatctaatgtcatttcacacaccgtctttccttaatcatcaagccactgtaccacgggtctttccctcagtttgggaaacatcatctatgttattccttcaagttcctactcctcttctacaaaagctgaccgataaggagttctaacccatcaggagactaaaactatctgatacgctcatttaaatggaagtatagaccccaagaggatggtaactattaaaaaaaatcctggagcttcttatatgttagttttgtatcattcct

SEQ ID NO: 567487 - DNA, 487 bp, Homo sapiens
aaatctctagtagaaaaacaaaagataaagagaaaggaatctaagcataccactataaaaaaaaaatcaggccaggcactgtgactcacgcctgtaatctcagcactttgggaggccaaggcaggtcgatcatgaagtcaggaagtttgagaccagcctggccaagatggtgaaaccccatgtctactaaaaatacaataattagccgggcacagtggcaggcacctgtgtaaaaagtaaagtagatgttcctcttcaaagagactttcctccccatctaattaggaataaatagtaacttctcctagaagcaaaatttattcaaagatctgtgctmacattcttcaatatctgctagccgtaataaagaaatcaatgtactttatgttcttagctcccactatttagcctaaatatttgccctgacaggcttatactggttcaagaaagcattaggtcacagcctgttcttcctcattgtttgaag

SEQ ID NO: 567488 - DNA, 581 bp, Homo sapiens
tagcaaacaaacaaacaaacaaacaaaaaattaaatcataaaggagaactacagagaaacaatggaacaaactacaaaacaagcagaaaacaatcaacaaaatgacartgataaggccttacctattgataattactttaaatataaatagattaaattatccaatcataaaacatagaaagactgaagagatttaagaaacaaaattcagcaatatactgactacagaagattcactttagctttaagaatacacataggctgaaagctaaaggaatagaaaaatacattctatgcaaattgtaaccaaaagagagcagaggtggccatgcatatatcaggcaaactagactttaagtgaaaaactgtaaaagagataaagtcatcatataatgatcaaagggccagttcatcaagaggatacaatgatgaattgtaaatacatatgtacccaacttcagagcatctaaatatataaaacaaatattaacagaactgaagagagaaatagacagcaacacggtaatagttggggactttaataccacactttcaacaatgactagatcattcagaaagaa

SEQ ID NO: 567489 - DNA, 593 bp, Homo sapiens
agggaagtgtgtaggagtagtraacgatttttaggggaattcaatgggcttgaagaacgtataatggcctagaaaaaaagtctgttgggcccacagagcagacataatggtttgtgagaaaagtctctccaggtgtgttgacagacttcagtctttctttcgtgccatatgagttcagttcatgaaaacttaagaaagggagcagaggtgattgtttttttcttgaatgggtccaaacttctggcagataagggaacttcacagaacaacttcatcctttgctttgagagagacaaagaaatgagaggcaggagaaggaggaaggtccgagagaccttgaagcttcttcagttcatcatgtcaaagtgccatattttggggtatcagtttctgagccccaacaggggtaaacataaagcttgctttctcaaacaagcattccaacatccaacagctctgttaatttccaagagtactgtaaaatatattttttcaaccaaattatatgaatgatctggttaaaaaagactttacaataaatacataatatacttttagtactaataaaaccaagaaagactgcttaaaataaa

SEQ ID NO: 567490 - DNA, 533 bp, Homo sapiens
gtcactctgttaacatcataacctccctaaactgagagagcccttggggatcacctgacccaatcatttgccagcattggcttctctcacctgccatcagccacatggggtccaaactcctccacagctggaggctcacggaccaccaaatcttcccatctttctgatccttagaaaatatatccttaggccgagcgcagtggctcatgcctgtaatcctggcacttggggaggctgaggcaggtggataactgggggtcaggagtttgagaccagcctggccaacgtggtgaaattccatctctactaaagacacacaaattagccaggcatggtggcatgtgcctgtaaccccagctacttgggaggctgaagcaggagaatcacttgaacccaggaggcaraagttgcagtgagctgagattcagccactgcactgcagcctgggtgacagagcaaaaccctgtttcaaacaaacaaaccaaaaagtaaaacaaaacaaaacaaaaaacaacaaaaaactccttattata

SEQ ID NO: 567491 - DNA, 637 bp, Homo sapiens
tctctttacagcagaagacaccaggcttcccttctgagaattcctgttgtctgtgrccttcttaaaaagatggcgctcattggcccatgcttcatagacctgagccttgagagatggagtagtcctcatccttctggaggcccaatgccacttccaaatctataccagtccttgctcctgctctttggaaggtcatgccccattttggccaacattcacttgctctctctattgctgtcactcacccataccctggtcagggtctctcattcatacacttggaaatcagcttcattgtcctcattgacacctctaatcctgttgacattttttctgatttctttgagttgcaagttcagcctctggactttgctgttctttgactgacttccccagcatcgatggcttttcactagctcttcacttcagccctctactcaggtggctgctacgttcaccttgccatcacttagaactcttccacctctgaaagcttaactttcacatcttactctctggccacacatttccccctttcatctcatcactgttctttgacctcatccaaatatctctgactgctctaatttattccatcctatcactgtatcctaactttacatccttacagcctaga

SEQ ID NO: 567492 - DNA, 528 bp, Homo sapiens
aatttcaggttaaggccttgtcttggtccttttgtgttgctgtaaaggaatacctgaggctgggtcatttataagaaacagaggcttatttggctcatggttctacaggccacacaagaagcatggtgccagcgtctgcttctggtgaaagctttaggaagctccacccatggtagaaggtgaaggggagcaggtgtgtagatatcacatggtgggaagtaagagagaggggaggaaggtgcccatcttgttcacaatcacttcttgtaggaactaatagagcaagagctcactcattactgtcgggatggcactaagccattcatgagggttctagccccatgacaaaaacacctcccaccagggcccacctccaacacrggatcaaatttcaacatgatatttggaggagacaaacatccaaaccatattatgacttttcccctttttgtttcccttaagtcaaatgcttgccttaagcatggcagagagagagtgcttgcaggtggggctttctagagaggttag

SEQ ID NO: 567493 - DNA, 343 bp, Homo sapiens
agacatccagtcatgacttaaagacattacataaaatactactgkgtttagcaactcaaatattactgatgactttgttgagaacatatttcagtggagtcatggggtgctggaaaagccggagggccagttagctgaatattgaatggtcagtgacagcgtggaggcagtgaacagagactgttttcaagaactgtggttagtcagggaaggaaagagaaagcaatgagggcaatggagaaaatatttatcaacacagagaagaaaaaagaagtggttgaaatatagacaatggaatgaaattcttgggaagctgaaggagccaagatcaagatgcctattc

SEQ ID NO: 567494 - DNA, 612 bp, Homo sapiens
cttccaccattagagtattcccagggggatgaaaatgggaaataccaagaaacatttggggtgagccaatagaggaagctctcatatcaccatcagcaccatcaattaagaaaccccgggcctgttggtgggtgcctgtagtcccagctactcaggaggctgaggcaggagaatggcgtgaccccgggaggcggagcttgcagtgagccgagattgtgccgctgcgctccagcctgggcatcagagcaagactctgtctcaaaacacaaacaaaaaaaaggaacccgaagactatacattgagtaggtcctttgaaagatacaaataaatgaggaatcttaatttaattcaaatgttatcaaaataatgagtgyccaagttttaaaaatggaatcaattctttttatgtattcatttatttattcatttgtcctacaacaatatgtactaagcatttactacgtgcaaaacacaacggtacagaaattcaaaatatagaaaaaccgtaggaagtactgtatggcacttggctttatagtctgtggcaaaggtggctagtagtttgatatggtcctgtcttcccaccttaatttggctacctttaataggagc

SEQ ID NO: 567495 - DNA, 653 bp, Homo sapiens
agagaagtgtcacaggatctacttgtcatgatgttacaggatcctgtaggacctggctacctcttagtcaaagggctccaggtctgaaaattggctccggcatggggaccaaccaccaaatggtaacttgttactggggcaactgctttcagactttgactcctccattctaactttgttcttctttttaaattagagatatcaagtggcaccttggttggctgctgtcaggggcagtgttcagcaaactacagtcagatccagcccatcgtgagtttttgtaaataatgttttattggaacacattcatgcttattaggctcttcattctttcccttgctgtctatgaaggaagcttagacatctctcctttgctgaggcttgcccatcattttttcctggcttgtaggagccactcccatcaaattagtttgtcctatcccctggggctttgctagggtgataaaaactatatcctgagaaaatgctcccaaatcaatgaattcttggttatccagcttaacattctagcytcctcaaccaaaaaccctcaagtctaaccccaggagtatttccatggtactgccagtacatatcggatagttgtctcctttcttttttctttttcaacagggtgtcactctatcgcccag

SEQ ID NO: 567496 - DNA, 418 bp, Homo sapiens
gacccctgtctacatggcctatcgcaggggtgtccaaacttttggcttccctgggccacactggcagaatgtggcagaattgtcttgggtcccacataaaatacactaattctaatgataactgatgagctaaaaaaaaaattgcataatgtttatgaatttttattgggctacattcaaagccatcctgggctgcatgcagcccatgggycatggcttgaacaagtgtgatctgttggttttcaaaacagtgcaaagatcactcaatagggagagagattcttttcaacaaatgatgctggaacaattggatgatcgaggtgcaaaaaatgaactttgattcttacctcacactacatacaaaaattaactcaaaatggatcatagatgctaaataacaaatcaagaactataaaat

SEQ ID NO: 567497 - DNA, 526 bp, Homo sapiens
ggtttaagaaggacttgtggggtagtgggctgtggaagagaagagggaaaaccctaccctggttctccgaggtgtttggagaaggagaacctttgagattcccatagatccacatgaaggatcatgcaataagagaaggcagaggagaagtgtgggctggcagatgcaagtgggagctaggcaactgttcaggtgaagagagacacaggcacccgtctgtatggagggtcttcaccacagagagtaaaattgagccctgcccctaccaaaatttcataatactaaaaccacgtacaatggagacctctatttcrtagaaggacccctgcttccaatggaagctgatgaaccagagagaatccacagaattccctgctcactgtgccagcagtcatgaaagatggtgtcatatcccactgtcccctcttcccccatctcaacctcccaccctttgagagggaagaaagaaggtgtgggtgcattgtttatggtagtcttggtactggaatggaaggaggaagcaaag

SEQ ID NO: 567498 - DNA, 501 bp, Homo sapiens
caagaataccagttgcaaggattctgaatctgtgacatctttaaaaaatcttcttcccagtttcagggaccagaggactgtatgctcctgacttggggtgtagagtcagatcttcccaagtccttattctagaaagcacaaacaccctcagttatatctcatagaacctgtagatttttagttaaacaagcatagtggttaagtatatggtctcagaagtcactcagaatcagatgtgcatctcagctccaccaataattaatttgagtgatcttaagtatattttgtaactycttcaagtttcatgttcctcttctattgcatgaaataaatgcccactaatagggttgttgtgaattttgaaggaaaacatgcatgtagaacaaagaggaatttctccaatatactcagggtgaatgaaatgtttgggtcttctctactaattacaagcaaatggacattttctgggcagttctgccagttctcgctggtactcagaca

SEQ ID NO: 567499 - DNA, 580 bp, Homo sapiens
  misc_feature 1, 2, 3: n = A,T,C or G
nnnacgcggtccttcagcccgtggtgaagacaactgaacatgccgccttgaaaagtcttgcagcagctgtctcccccaatattctacagtaactacctttgtccattccgtttctgtttctaatttcttggcttttgtaattactagtttcattaygctcagaaaggatggtcaggtagacagacacctactaaaagtaatgccccaaactaaaggggctaataaatggtgaagttctagaaggtaatcattgtcacttgttgagcatgaactgtgctccagacaccagagcaagtgttgtatatattttaactcaattaatcctcaccatagagcatggtttggggcgtcagacagagcttgcatccatgtcttagctttgccatttaactgcttgcacgaatgtagaaaagtaacttaaatctctccagtctctgtttgttcaactgtcatcaggtactgaagagcatctgacaatttcctaaggtaactctacaagagggaatgatgcatgttgaatttctgcatatgacattataccatgtatgaattctgtttgccaccagggcttaccttcacc

SEQ ID NO: 567500 - DNA, 474 bp, Homo sapiens
aagagagggttcttggatctcatggaagaaagaattcagagcgagtcyatagagtaaagtgaaagcaagtttattaagaaagtaaaggaataaaagaatggctactccatagacagagcagtgctgagggctgctggttgcccatttttatggttatttcttgataacaggctatacaaggcttggatttttttatgcctcccctttttagaccataacttcctgatattgccatgtgatttgtaaacacttgtggcactggtggaagtgtagcagtgagcctgaccagaggtcactctcgtggccatcttggttttgatgggttttagccagcttctttactgcaaactgttttatcagcaaggtctttatgacctgtatcttgtgctgacctcctgtcttatcctgtgacttacaatgccttaactgtctggaattgcagtccagtaggtctcagccttattttacccagct

SEQ ID NO: 567501 - DNA, 474 bp, Homo sapiens
aagagagggttcttggatctcatggaagaaagaattcagagcgagtctatagagtaaagtgaaagcaagtttattaagaaagtaaaggaataaaagaatggctactccatagacagagcagtgctgagggctgctggttgcccatttttatggttatttcttgataacaggctatacaaggcttggatttttttatgcctcycctttttagaccataacttcctgatattgccatgtgatttgtaaacacttgtggcactggtggaagtgtagcagtgagcctgaccagaggtcactctcgtggccatcttggttttgatgggttttagccagcttctttactgcaaactgttttatcagcaaggtctttatgacctgtatcttgtgctgacctcctgtcttatcctgtgacttacaatgccttaactgtctggaattgcagtccagtaggtctcagccttattttacccagct

SEQ ID NO: 567502 - DNA, 474 bp, Homo sapiens
aagagagggttcttggatctcatggaagaaagaattcagagcgagtctatagagtaaagtgaaagcaagtttattaagaaagtaaaggaataaaagaatggctactccatagacagagcagtgctgagggctgctggttgcccatttttatggttatttcttgataacaggctatacaaggcttggatttttttatgcctcccctttttagaccataacttcctgatattgccatgtgatttgtaaacacttgtggcactggtggaagtgtagcagtgagcmtgaccagaggtcactctcgtggccatcttggttttgatgggttttagccagcttctttactgcaaactgttttatcagcaaggtctttatgacctgtatcttgtgctgacctcctgtcttatcctgtgacttacaatgccttaactgtctggaattgcagtccagtaggtctcagccttattttacccagct

SEQ ID NO: 567503 - DNA, 597 bp, Homo sapiens
gtggcactggtggaagtgtagcagtgagcctgaccagaggtcactctcgtggccatcttggttttgatgggttttagccagcttctttactgcaaactgttttatcagcaaggtctttatgacctgtatcttgtgctgacctcctgtcttatcctgtgacttacaatgccttaactgtctggaattgcagtccagtaggtctcagccttattttacccagctcctatttaagatggagttgctctggttcacatacctctgacaccttcatgtctacaaaatgcccatctgtgtatagtattcaccacagtaggctgtgtgttacacaattttgccccattttacatttacctactctagaccaaagtaagtgtttggagcccatctaagataggctaagttaaactatgatgtttgttaggttagatgtactcattgcattttcaacatggaatattttcaacctatgatgaatttattgagaggtaacccmattgtaagttgaagggcatgtataaatataaagacatagaaaggttaaaagtaaaaaaagatgggtaaaaaatatactgtactgatatcaaccaaaagaaccta

SEQ ID NO: 567504 - DNA, 588 bp, Homo sapiens
tggaatatatttgtcaatattgaagagttttctctatttgctactgctgcagcaaaggcagaatctgaacatagttgtttaaaagtcttccatggctattttgatctcttgtctaaagcttttgaatttattttaaatcaatttcattcatggagattttggaggaaggtagggcctttcagttagtctaatttatacctgcaggcatagtctatccttttgtaaaatgtattttactggtatttatggaacaatttacgctgtctaatcaaacaaattaaaacacttatttttgctttcctcaattcagtcaattgttaataatcatgttgtcatttttttccacacttggcactgaaactttattcattctccttagaaattctgccaccaacctactataaaaactgtcattatctcctaargtcacagtcctgacatctgttaagtaaaggtttatttgacacttaaaagtcaatctgcacagctgactgaactccttcagaattttacagcttgctcttgtcaaatatttgggaaaataaaatttgcttttagaaaaaatatttggtttttacagaaaagaaa

SEQ ID NO: 567505 - DNA, 519 bp, Homo sapiens
attggatgatataaccatgtaataacagaatggtaaatttagcactgcagcctttcaatacaatggcatccaaagcagaaatcaaacactactataaaaaatagtacagtaaaagaatttttctacacagttataatagtatttatttattctggtatccctttaatattatacttcataggaggatattgtgaattataggaatgttacaaaacttgaaagaatcacaataagtacccacaaagacatacaacgtgcacacacacacacacacacrtacgctactttagtatttctgtaacaataagttttaggtcagtgtaaatttagaaatgttgtacaatgaatagtcattttatctaatttgtacaatagtccgtgaagtctttcctgagaaaaatgagcgaaattatacgacaagtaacatggagactaaacagttaaatggttaactctactgttttggtatttttccaactttcatgtaattaatttgttatttatttgataaatttcatc

SEQ ID NO: 567506 - DNA, 527 bp, Homo sapiens
tctcttgctcgaccttacagttaaaaatctaaccaggcctctatgtctccatgtgttaaatctatatgttaaacattgtttgtgtaagctatattttcttccctttacctgtgttggcttcattttgaaaagctctccctataagatgacaataacttcaggtttatgtttgccctacaagcaaaaagaaattatctctggccaggtgtggtggctcatgcctgtaatcccarcactttgggaggctgaggcgggtggatcacctgaggtcaggtgtttgagaccaacctggccaacatggtgaaacctcgtctctcctaaaaataaaaaataaaaaataaataaaaaatcagccgggcgtggtggcacgcttctgtagtcccagctactcgggaggctgggctgaggcaggagaatcacttgaacccgggaggcagaggttgcagtgagccgagattgcaccattgcactccaggccaggcaatagagcaagattcagtaaaaaaaaaaaaaaaaaaaaaagaaag

SEQ ID NO: 567507 - DNA, 563 bp, Homo sapiens
ctcagttgtggcccaaaagattactcaagaacacctgacttcctgatctagtataatttggattcaactctaagaattcaaatctcacatatctacttgggaaaccaaggatgatccaaaatattttcgtaatactagtatgcagtaattcttagaagcccaagtgaaaagaagccaagggaacctaataataatctgagtgtcatttaacttgagacatttggcttgataatattacaataatgtgtacacctttataaaggtgttttataaaggaatttttatatgtattataaaagaattttataaaggaatttctaaatgtaytatgatttcttgcataaagataaaacctgataggcaatagaatgcatgttaaagagtaaaactcaaatgagattttcaaaaacatcatgtctaccttaataaattatgtaaaagattgatgatcaattaattttagtgttatcaatgagcttaactaccaggataatttttctcccccaaaataaagagcttacttcataagaaacttaaaagcatgagaacaagcaaaataatta

SEQ ID NO: 567508 - DNA, 563 bp, Homo sapiens
ctcagttgtggcccaaaagattactcaagaacacctgacttcctgatctagtataatttggattcaactctaagaattcaaatctcacatatctacttgggaaaccaaggatgatccaaaatattttcgtaatactagtatgcagtaattcttagaagcccaagtgaaaagaagccaagggaacctaataataatctgagtgtcatttaacttgagacatttggcttgataatattacaataatgtgtacacctttataaaggtgttttataaaggaatttttatatgtattataaaagaattttataaaggaatttctaaatgtattatgatttcttgcataaagataaaacctgataggcaatagaatgcatgttaaagagtaaaactcaaatgagattttcaaaaacatcatgtctaccttaataaattatgtaaaagattgatgatcaattaattttagtgttatcaatgagcttaactaccaggataatttttctcccccaaaataaagagcttacttcataagaaacttaaaarcatgagaacaagcaaaataatta

SEQ ID NO: 567509 - DNA, 618 bp, Homo sapiens
acatctttttgcatatttactacttgtatgtcttctttgaagaatgtytattcaagtcctttgcctattttctaattgattttttttttctatttagttttaaaagctcctcatgtattttggatattaacccattattatatgtgtgatttgttaatatcttcccccattctgttgattgcctttttattctgttgattccttcctttgctacacagaaactttttagtttggtgtagtcccatttacctatttttgctattgttacctgtactttttgtgtcgtatccaagaaatcattactaagaccaaagttataaggctttccccctatgttttcttccagggggtttatagcttagatcttacatttaagtttttaatctcctttgagttgatttttatgtgtggtgtaagataagggttcattttgcatgtaaacattcagtttccccaacaccaattgttaaagaaactgttctttcccccttgtgtagtcttggcatcattgtcaaacgtcaggtgactaaaggtatggctctctattctgttccatttttctgtatgtctgtctttatgccagtaccagactgttttgattcctgtagctttgtaata

SEQ ID NO: 567510 - DNA, 550 bp, Homo sapiens
ggttcttttgaagtcttatagtggctgtccttagagacaatagatgacaaatgtttcctatttagatctttaaaaggtgctagacttttarttaatctttttacgattgggagggcctggaataaaaagatctagctatgttaccagagattctttacaggtgcaaattttccccctataaaggacagctttgcaaagccatttcaagatatggcaaagaaacatggttggggtaaaatattttgattttcttccttgtcttgtaatgttatgccagagttgggttggaaaagtaagtcatgatatatagggttaaataaaactcatctgatgagaatttatgatttgtagggcataactcccaaaaccccttagataggaatttgggcaagataaaactctgagtttagtcctcatgagcaatgtgttgcactgtgatgttatgatggttatgacatcagtaggcgatggaaatttttcagcaaaggtaggaccactgtcatatacatggtttgttgtttactaaaaggttgttatgtggtgtatgact

SEQ ID NO: 567511 - DNA, 509 bp, Homo sapiens
caggtaattaaaatactaagtgtttctagaaaaaccctctacagaattttactatyactctatagggacaaaatataacagggaaaaaaaatacaaacaaaaaagcagggtttaccttgagtctcaatagaacttaggttgtcagggaatttctaggaattttcaggaatgtgagaagttgctgaaacaggcttttttccccccagtctttcttttcttccctttatgaaaatgtaccacagataatcaccactcttttctctcaaaggaatgaaggggcctttttgatgacaaatagtgtagagagaaagaagcatgtgggagggtcctgaggggaggaaaaggtgggaggagggaagagatgcgcctaagggctaaagaagcagttaaaaaaagagagaattactgtaaatgaggggaaaggagatgccatcaggcagtgcataaaaaggacaaaaaagaacaggtgtatatccccaaagaggtcactgcaggaaaataatccttgc

SEQ ID NO: 567512 - DNA, 581 bp, Homo sapiens
catgagcaagcactcactgagtctttcctgtgcaccaagtacagcattgcctattatgtgacaggccactgagataaaaggtgcctcagtgttcctgtgcagctacctcatggattctctaaatccacattcactggacactggacttgacttaaggccactctgccttactcccaggacactgtttctcatgtaatacaagactccatgatatccttgcatattcaataaggacaasattccaagttagagcacttttcacatgcctctttaaaaatcttatttttgtaacaggatgtccacaaaatataatttcatcttaattgagaaaattttctaattctgacagcttttcaaataatatttcttgtaaattcacaggtcctttggaatttctataattcctattctataatgttactatagaaaactcttggatttactacaattctaataataataaaataatagactttaacaacattattatcaattgttaagcctgactattcacaaaaatcatgcattctgtttaatagaggactcctcttggttcaaaactaacttcttggtttgctgta

SEQ ID NO: 567513 - DNA, 507 bp, Homo sapiens
cctatatatacatatccataataaaggttaatttctaaattaggcatagwaagaatgacaatagtaactaatcataaagtagaacaattacaacaacatattgttataaaagttgtgtgaatatggtctctctctctctctcaaaatattttattttactgtactcgcctattttcagactgcacttgattcaggtaactgaggccatagaaagtgaaaccattaaaaaaaagaagactgctgtattttcaatttttcttggcacttaacttcccatctcaataaataaaccaagtccactttctgctttgaggcttaccactctattttagactttaattctattatcctaatttatgttctaaaataccacttcatcagttttctcctccccactccaccctgcatattcaatctctcctcaaatgaagcttttcccagtcttcagttctttagaagtactcaaaaagtgaattactttattctaaatcagaaaactaataatct

SEQ ID NO: 567514 - DNA, 571 bp, Homo sapiens
atagactaattcttttatcagagcagaacctgcatgacccaggcacctcttaaaggccctacctctcaatattgccacactgggggttaaattctaacatgaattttggaggggacaagtattcaaactatagcaagcagtattaataatgtctagtggaattaagaaaaccaaaacagaattaaagatctagataagaaaacttatattccaagcacaagttacatggagctcatgggttccaaggcccttctattatctgagtggagggcaaaaaggtattgagttcagagtcttatatattaagaattcatagtatatgttaatacattattctaattcttaattttatatttggaattctaggggattcattaaaagattggagcaagggtatggagaagaaaaaaataagtatacttaaagaagggagaaaagataaggaaacaaagcaagtatacaattacaggttagattaaaatccmaatatataaacaattactttatatatatggactgaatattccagctaaaagactaagttgctcaaactagattttaaaaatttcag

SEQ ID NO: 567515 - DNA, 545 bp, Homo sapiens
tggttccaaattgctcaatcaaaataatggttcaactttgcagattctaaaaaaaacggtggctctaaactgctcaatcaaaagaaaggttcaacactgtgtgaagaatgcatacgtctcaaagcrgttcctcagaatgcttctgtctggtttgtatcagaagatatgtactttgtcataataagtctcaaagtgaatccaaatatcccttcacagattcgaaaaacactgtgtttccaaactgctcaatcaatagaatggttaaactctgtgagatgaatgcacacattatgaagcaacttctcagaaactttctttcttgtttacatcagaagatactacctttttcaccattggcctcaaagcactcccaaatatccctttgcagattctaggagaacagtgcttccaaactgttcaatgaaaagaaacgttgaactctgtgagatgaatgcacacatcacgaagcagtttctaaaagaaagctctttctaatttttatgtgaggatatttcctttttcaccataggcctcaaagtgctcac

SEQ ID NO: 567516 - DNA, 544 bp, Homo sapiens
ggttccaaattgctcaatcaaaataatggttcaactttgcagattctaaaaaaaacggtggctctaaactgctcaatcaaaagaaaggttcaacactgtgtgaagaatgcatacgtctcaaagcagttcctcagaatgcttctgtctggtttgtatcagaagatatgtactttgtcataataagtctcaaagtgaatmcaaatatcccttcacagattcgaaaaacactgtgtttccaaactgctcaatcaatagaatggttaaactctgtgagatgaatgcacacattatgaagcaacttctcagaaactttctttcttgtttacatcagaagatactacctttttcaccattggcctcaaagcactcccaaatatccctttgcagattctaggagaacagtgcttccaaactgttcaatgaaaagaaacgttgaactctgtgagatgaatgcacacatcacgaagcagtttctaaaagaaagctctttctaatttttatgtgaggatatttcctttttcaccataggcctcaaagtgctcac

SEQ ID NO: 567517 - DNA, 544 bp, Homo sapiens
tccaaattgctcaatcaaaataatggttcaactttgcagattctaaaaaaaacggtggctctaaactgctcaatcaaaagaaaggttcaacactgtgtgaagaatgcatacgtctcaaagcagttcctcagaatgcttctgtctggtttgtatcagaagatatgtactttgtcataataagtctcaaagtgaatccaaatatcccttcacagattcgaaaaacactgtgtttccaaactgctcaatcaatagaatggttaaactctgtgagatgaatgcacacattatgaagcaacttctcagaaactttctttcttgtttrcatcagaagatactacctttttcaccattggcctcaaagcactcccaaatatccctttgcagattctaggagaacagtgcttccaaactgttcaatgaaaagaaacgttgaactctgtgagatgaatgcacacatcacgaagcagtttctaaaagaaagctctttctaatttttatgtgaggatatttcctttttcaccataggcctcaaagtgctcacaaa

SEQ ID NO: 567518 - DNA, 544 bp, Homo sapiens
tccaaattgctcaatcaaaataatggttcaactttgcagattctaaaaaaaacggtggctctaaactgctcaatcaaaagaaaggttcaacactgtgtgaagaatgcatacgtctcaaagcagttcctcagaatgcttctgtctggtttgtatcagaagatatgtactttgtcataataagtctcaaagtgaatccaaatatcccttcacagattcgaaaaacactgtgtttccaaactgctcaatcaatagaatggttaaactctgtgagatgaatgcacacattatgaagcaacttctcagaaactttctttcttgtttacatcagaagatactacctttttcaccattggcctcaaagcactcccaaatatccctttgcagattctaggagaacagtgcttccaaactgttcaatgaaaagaaacgttgaactctgtgagatgaatgcacacatcaygaagcagtttctaaaagaaagctctttctaatttttatgtgaggatatttcctttttcaccataggcctcaaagtgctcacaaa

SEQ ID NO: 567519 - DNA, 418 bp, Homo sapiens
tccaaactgctcaatcaaaagaatrgttcaactctgtgagaggaatgcccataccacacagcagtttctcagaaagcttccttcgagtttttaggtgaagatatttcctttatcactataggcatgaaagttctccaaaatatccctttgcagattctacaaaaatggtgtttccaaaatgctccatcaaaagaaggttttaattctgtgagataaatgcaaatatcacaaagcagtttatgagagatctcctttctagtttttatgtaaggatatttctttttcaccataagactcaaagggctcccaaatatccattttcagattctacaaaaagagtggctctaaactgctccatcaaaagtgtggttcaactatgtgagatgaatgcacacatctcaaagcagtttctgagaat

SEQ ID NO: 567520 - DNA, 524 bp, Homo sapiens
atgtatacatatgtaactaacctgtatattgtgcacatgtaccctaaaacttaaagtataataataataataataataataataataawaaatataatcagggcaaaacaaaaaaaaaaaaaaggaaaacagtggctccaaactgctccataaaaaaaatagtacaactctgtgagatgaatgcacacatcccaaagcagtttctcagaaactctctttccagtatgtatcagaagatatttcctttttcaacataagcctcaatgcacttccaaatatccctctgcagtttccagaagaagagagtttctgaactgctcaatgaaaagaaacgtttaaatctgtgaggtgaatgcacacattgcacagccatttctcagaaagcttctgtccagtttgtagcagaagatatttccttttgccccacaggcctcaaggcaaattgaaatatcccctcacagatacttcaaacactcttttccaaactgctctatcaaaagaatggtttaactctgagatgaatg

SEQ ID NO: 567521 - DNA, 501 bp, Homo sapiens
attattaaaggaagggaagtagaagstgagccatacagaagcactgctgtgaccaggttcatgcctgggattgcacatgcagtatcttatttaatcctcacaagagcctatgtgcacatctgccaaacagggtgagtgcttggcctcacagctggtaaatggtagagctgggactcaagccctggcctgcctaaccctatccttgttcttctatagtccctgatgccctgtgcctgcctctgtattaaaatgatataaaatattttaaaaacagttcaacaaatactaatttctcatgtgccataatagattccatttatgtgggcacagcaagcagaagagaaaatcacagtagtttagtggaaactgattgaatcaactcgtggttaacaccatgaaatccttaaatgcaaaactgcactggttatttgttgatccttcagcagagaccctgcacagtgtgtcagaacgctgcctgtctcccatgtttgtgaaaagctt

SEQ ID NO: 567522 - DNA, 432 bp, Homo sapiens
gaattcattttttagttctaacagttttttttttaaatggagtctttagaattttcaaatatataagatcatgtcatctgcaaacaatgtggacaatttcacttcttccctttcaatttgggcaccttttttccttgcctgactgctctggctaggactcccagtattatgttgaatagaagtggcaagagtaggcattcttgccttgactctaatcttagagaaaaagctttcagtttttcatcattgagtatgaggttggctgtgggctaaccacatatcaccttaattataatatgttgaagtaatttctttctrtttctagtttgttgagagtttttatcatcaaaggatgttgaattttgtcaattgatttttcagcatctattgagatgatcatatgatttttatcttttattctgttaatgtggt

SEQ ID NO: 567523 - DNA, 507 bp, Homo sapiens
tacttcagaacccttccctgatcaaggtcaggccttccacgggctttttgtagcttcctgtgcttgtctctaccagcacttattattattaccatgaattacttgtgtaaatatttattatctgtgtcagtggatgataagcttcatgagagcagagattggtgtctgtactatttatttttgtattcttatgcaggaggcctgagacaaagtgctaaataaatatttgttgaatgagtgagtgaggcaacaaatgaatcaatgagatacayaagaacatatgtataagaatgttctttggaaataacctagagtctagcaagagggaaacaaatcatggagatccatttgtttgaatatgtcattgaaaggcatatctcaaaaaatatttactaacattgaaaaattctcagaatgtaaggttaagagaaaaaagtagggacacaaaaattgacatatggtatgattcctttttctttttttgacataaagaaaatacagagaatt

SEQ ID NO: 567524 - DNA, 600 bp, Homo sapiens
ccaagctgggaaaccgggccaggagcagggagaggccggtgagcctgggttctgcaagtgcaagcctttatttaaagttttaatattttgtctatcatgggttttttttctttgcgattacattcaattttaaaactatttcattcattcaggattagcgttacttaacagttgctcctgagactagtgcgttagtcccttcaccctagtcctggccttggtggaagtctaaaatttayattttattccagctttctgtccaaaagagcaacccctgcaagtgtaggatgaggagctcagtccagcagcagctaacactgcactccttgcgcacctgctgtgtgctagagggaggggcggaggcgggaggtgggaggcagggggcgggggggtctttctctttttctcttcctctgcttctcaaattcacagtaggggcaaagattgacaaactcactcacattaccaccaccgcgagtttccaaaaaagaaaaaagaaagaaagatactaacttttttagatggtatctctaagaaatagtgtattaatcttccctttggaaagacaactttgaaaggctttttcattaaaatgaattc

SEQ ID NO: 567525 - DNA, 595 bp, Homo sapiens
agctgggaaaccgggccaggagcagggagaggccggtgagcctgggttctgcaagtgcaagcctttatttaaagttttaatattttgtctatcatgggttttttttctttgcgattacattcaattttaaaactatttcattcattcaggattagcgttacttaacagttgctcctgagactagtgcgttagtcccttcaccctagtcctggccttggtggaagtctaaaatttacattttattccagctttctgtccaaaagagcaacccctgcaagtgtaggatgaggagctcagtccagcagcagctaacactgcactccttgcgcrcctgctgtgtgctagagggaggggcggaggcgggaggtgggaggcagggggcgggggggtctttctctttttctcttcctctgcttctcaaattcacagtaggggcaaagattgacaaactcactcacattaccaccaccgcgagtttccaaaaaagaaaaaagaaagaaagatactaacttttttagatggtatctctaagaaatagtgtattaatcttccctttggaaagacaactttgaaaggctttttcattaaaatgaat

SEQ ID NO: 567526 - DNA, 595 bp, Homo sapiens
agctgggaaaccgggccaggagcagggagaggccggtgagcctgggttctgcaagtgcaagcctttatttaaagttttaatattttgtctatcatgggttttttttctttgcgattacattcaattttaaaactatttcattcattcaggattagcgttacttaacagttgctcctgagactagtgcgttagtcccttcaccctagtcctggccttggtggaagtctaaaatttacattttattccagctttctgtccaaaagagcaacccctgcaagtgtaggatgaggagctcagtccagcagcagctaacactgcactccttgcgcacctgctgtgtgctagagrgaggggcggaggcgggaggtgggaggcagggggcgggggggtctttctctttttctcttcctctgcttctcaaattcacagtaggggcaaagattgacaaactcactcacattaccaccaccgcgagtttccaaaaaagaaaaaagaaagaaagatactaacttttttagatggtatctctaagaaatagtgtattaatcttccctttggaaagacaactttgaaaggctttttcattaaaatgaat

SEQ ID NO: 567527 - DNA, 307 bp, Homo sapiens
gcagcctgctctgatcagctgtcagagtgtactttgctttgcaataaactcttttgcttactgttactttggactcgttctcaaaktcttttgtgcagcaaagtcaagaacctgaaacagcccactggcaacaatagcatgctaacagtaatccaaagaaagcaggagtagctctattaatgacatatcccacttcagaacaagaggaattatcagaaataaagagagtaattacataataaaaatggggtcagttctccgagaagacataacaatccttagtgtttacacacctaaaaacagagca

SEQ ID NO: 567528 - DNA, 307 bp, Homo sapiens
gcagcctgctctgatcagctgtcagagtgtactttgctttgcaataaactcttttgcttactgttactttggactcgttctcaaattcttttgtgcagcaaagtcaagaacctgaaacagcccactggcaacaatagcatgctaacagtaatccaaagaaagcaggagtagctctattaatgacatatcccacttcagaacaagargaattatcagaaataaagagagtaattacataataaaaatggggtcagttctccgagaagacataacaatccttagtgtttacacacctaaaaacagagca

SEQ ID NO: 567529 - DNA, 376 bp, Homo sapiens
tgcacacattcataaatttgtctgactcctaacgagagtaccttgtcaagggtaatatggcttatgtgttagaaatataatttaaaattaataaaataccaattttatcacattatggtaatgtttactgctttcctgaagtgtttgagattttcctgtagaatgtacttggagcatgtacagttatacaatgaaagtaataaactattaaatcaaaaaatattttagaaacactcagtatatgaacctcttgctctagcgtaatctatgtatatgttttacatccggtgttagracataggcatttttcttacagaaattctcaaataaggacaaaacatccccctaatatgtagtagaatgtttactgcggcac

SEQ ID NO: 567530 - DNA, 340 bp, Homo sapiens
cgccatcacgcccggctaattttttgtatttttagtagagacagggtttcaccatgttagccaggatggtctcgatctcctgacctcgtgatccgcccacctcggcctcccaaagtgctgggattacaggcgtgagccaccgcgcccggccagtcttatgttaaaatatatgaaataagkttccatttttatttgcagtccatcaaaatcgcaatggagaaaaagccaaggccttgtctaaaggacaaaagaaattttatgatattgttctgtgtctcaactacctgtttactctttatacagtaagggcagaaaggggtgatacctttccaaagttccc

SEQ ID NO: 567531 - DNA, 497 bp, Homo sapiens
tctctactaaaaatacaaaattagccggatgtgttggtccatgcctataatcccagctactygggaagctgaggcaggagaatcacttgaacccaggaggcggaggttgcagtgagccaagatcataccattgcactccagcctgggcaacaagactgaaactctgtcttaaaataataataaaaaatatatatatatttatatatggtatatgaatttgatacattttgctttatttcaggactaatgtaatgctacagaaaaggaatgactctaaactcgcttaatttctcctgactataaatagcccttgaccactttcaactttcccactgataactctataacatagggcaagttacttgacctcactgagcctattttgccatctataaattagctaataggacctaacttataggtttgctgagaggtataagtaagacaatagagtctagcatatggtggggctcaacaaatattagtacattacttac

SEQ ID NO: 567532 - DNA, 497 bp, Homo sapiens
tctctactaaaaatacaaaattagccggatgtgttggtccatgcctataatcccagctacttgggaagctgaggcaggagaatcacttgaacccaggaggcggaggttgcagtgagccaagatcataccattgcactccagcctgggcaacaagactgaaactctgtcttaaaataataataaaaaatatatatatatttatatatggtatatgaatttgatacattttgctttatttcaggactaatgtaatgctacagaaaaggaatgactctaaactcgcttaatttctcctgactataaatagcccttgaccactttcaactttcccactgataactctataacatagggcaagttacttgacctcactgagcctattttgccatctataaatyagctaataggacctaacttataggtttgctgagaggtataagtaagacaatagagtctagcatatggtggggctcaacaaatattagtacattacttac

SEQ ID NO: 567533 - DNA, 503 bp, Homo sapiens
aagatagtaattttatttgccagttttttggaaactttatatctgaggaagatctgctggaagatgtcatttggggtaatgcaaaatatttctggaagacacaagtaaaatgggccctcattgaccaagtagtttgtatagatgtagtgattaaactattaagtagaggggaggttgcaaaaatatttgacaaaatgaaatgtgtgcctgcagtgcaaaaccactgatcctgctcacaaacaggcatagtgagaaagatttctatatgcctggtagaacaacctctgtgggccatcttaagcactggtgattaacacttttatgcattctattacatctgaattycacgacttaacatgatacttaagctgaattaaaatgccttaatactcttgcctcaatattcttccaaggtttagcacctggtccttttaataaaaaaaaaaaaaataggttatggttacctttttttgaaaaggtactcaaatatgtcaactttattg

SEQ ID NO: 567534 - DNA, 503 bp, Homo sapiens
aagatagtaattttatttgccagttttttggaaactttatatctgaggaagatctgctggaagatgtcatttggggtaatgcaaaatatttctggaagacacaagtaaaatgggccctcattgaccaagtagtttgtatagatgtagtgattaaactattaagtagaggggaggttgcaaaaatatttgacaaaatgaaatgtgtgcctgcagtgcaaaaccactgatcctgctcacaaacaggcatagtgagaaagatttctatatgcctggtagaacaacctctgtgggccatcttaagcactggtgattaacacttttatgcattctattacatctgaattccacsacttaacatgatacttaagctgaattaaaatgccttaatactcttgcctcaatattcttccaaggtttagcacctggtccttttaataaaaaaaaaaaaaataggttatggttacctttttttgaaaaggtactcaaatatgtcaactttattg

SEQ ID NO: 567535 - DNA, 503 bp, Homo sapiens
aagatagtaattttatttgccagttttttggaaactttatatctgaggaagatctgctggaagatgtcatttggggtaatgcaaaatatttctggaagacacaagtaaaatgggccctcattgaccaagtagtttgtatagatgtagtgattaaactattaagtagaggggaggttgcaaaaatatttgacaaaatgaaatgtgtgcctgcagtgcaaaaccactgatcctgctcacaaacaggcatagtgagaaagatttctatatgcctggtagaacaacctctgtgggccatcttaagcactggtgattaacacttttatgcattctattacatctgaattccacgacttaacatgatacttaagctgaattaaaatgccttaatactcttgcctyaatattcttccaaggtttagcacctggtccttttaataaaaaaaaaaaaaataggttatggttacctttttttgaaaaggtactcaaatatgtcaactttattg

SEQ ID NO: 567536 - DNA, 586 bp, Homo sapiens
gattccctattctagcattctcagaaggatcccacccgttagacatgcagaaactgcagcccatccaaatgtgatctgtttaatcaataatcaacagttcatattgaagacagtatttttgctatatgtgcttgtcataatgaaggacggtgtacaaagaacaagttgaaccagacgaacactttaattttgatgccaaaatcaatcactttttgtcataacaccaggcatagataatggttgatccagtgcacactgtctgtattaccccataatttcctgcagcagacatgttrtaatttgacatactccttgatcattaacacattgcagtagtcagatatacttgtcaagattaagctaaatgtcagtagaagactcagtgaaggcttggaaatcttgcagcttgctctcagagacactgccaactgaaatgataaatgtcattgggctgtggtactattctcatcgacgtatcaataaataaagggatgctggcgaaaaaatgttcttccagatacctgcccactctgaacctagagttcttttcatcactgtgaaagacagctccctacacaccgcagcc

SEQ ID NO: 567537 - DNA, 586 bp, Homo sapiens
gattccctattctagcattctcagaaggatcccacccgttagacatgcagaaactgcagcccatccaaatgtgatctgtttaatcaataatcaacagttcatattgaagacagtatttttgctatatgtgcttgtcataatgaaggacggtgtacaaagaacaagttgaaccagacgaacactttaattttgatgccaaaatcaatcactttttgtcataacaccaggcatagataatggttgatccagtgcacactgtctgtattaccccataatttcctgcagcagacatgttataatttgacatactccttgatcattaacacattgcagtagtcagatatacttgtcaagattaagctaaatgtcagtagaagactcagtgaaggcttgraaatcttgcagcttgctctcagagacactgccaactgaaatgataaatgtcattgggctgtggtactattctcatcgacgtatcaataaataaagggatgctggcgaaaaaatgttcttccagatacctgcccactctgaacctagagttcttttcatcactgtgaaagacagctccctacacaccgcagcc

SEQ ID NO: 567538 - DNA, 551 bp, Homo sapiens
atgtattttttagggtatgataaacaccactaccattgattctggaaccctcaattctaacaccacggtgtatttctcttcttagtggagtatgtcctctaagcattttcaaagggatttatttgaaataaaacttttsaggccttactttttaatgtctttttctgggctttcatatttaaaagattgtggctgcaaataattcaaggattaaaattggtttccttttaatccttgaaaaatattacttcattttattcttgtctccagcattgccgttggaaaggctgacgccaatcaaaaccaatttttccctaaaggatgatctgtcttctcatcattttgacaggatgtaacaaaacaaaggagtcttcaatgttctgagtataaatcattttgcaattataaacttaacttaaatattaatgcaatacaaaaagaattaaaaccttcttgagacatgcaagtgcacaggaaaattaagtatcatgcactcattcaggaagaaaaggtgcaaaagaaattgaatgaaagagatggtcgttagatgc

SEQ ID NO: 567539 - DNA, 551 bp, Homo sapiens
atgtattttttagggtatgataaacaccactaccattgattctggaaccctcaattctaacaccacggtgtatttctcttcttagtggagtatgtcctctaagcattttcaaagggatttatttgaaataaaacttttcaggccttactttttaatgtctttttctgggctttcatatttaaaagattgtggctgcaaataattcaaggattaaaattggtttccttttaatccttgaaaaatattacttcattttattcttgtctccagcattgcygttggaaaggctgacgccaatcaaaaccaatttttccctaaaggatgatctgtcttctcatcattttgacaggatgtaacaaaacaaaggagtcttcaatgttctgagtataaatcattttgcaattataaacttaacttaaatattaatgcaatacaaaaagaattaaaaccttcttgagacatgcaagtgcacaggaaaattaagtatcatgcactcattcaggaagaaaaggtgcaaaagaaattgaatgaaagagatggtcgttagatgc

SEQ ID NO: 567540 - DNA, 551 bp, Homo sapiens
atgtattttttagggtatgataaacaccactaccattgattctggaaccctcaattctaacaccacggtgtatttctcttcttagtggagtatgtcctctaagcattttcaaagggatttatttgaaataaaacttttcaggccttactttttaatgtctttttctgggctttcatatttaaaagattgtggctgcaaataattcaaggattaaaattggtttccttttaatccttgaaaaatattacttcattttattcttgtctccagcattgccgttggaaaggctgacrccaatcaaaaccaatttttccctaaaggatgatctgtcttctcatcattttgacaggatgtaacaaaacaaaggagtcttcaatgttctgagtataaatcattttgcaattataaacttaacttaaatattaatgcaatacaaaaagaattaaaaccttcttgagacatgcaagtgcacaggaaaattaagtatcatgcactcattcaggaagaaaaggtgcaaaagaaattgaatgaaagagatggtcgttagatgc

SEQ ID NO: 567541 - DNA, 551 bp, Homo sapiens
atgtattttttagggtatgataaacaccactaccattgattctggaaccctcaattctaacaccacggtgtatttctcttcttagtggagtatgtcctctaagcattttcaaagggatttatttgaaataaaacttttcaggccttactttttaatgtctttttctgggctttcatatttaaaagattgtggctgcaaataattcaaggattaaaattggtttccttttaatccttgaaaaatattacttcattttattcttgtctccagcattgccgttggaaaggctgacgccaatcaaaaccaatttttccctaaaggatgatctgtcttctcatcattttgacaggatgtaacaaaacaaaggagtcttcaatgttctgagtataaatcattttgcaattataaacttaacttaaatattaatgcaatacaaaaagaattaaaaccttcttgagacatgcaagtgcacaggaaaattaagtatcatgcactcattcaggaagaaaaggtgcaaaagaaattkaatgaaagagatggtcgttagatgc

SEQ ID NO: 567542 - DNA, 604 bp, Homo sapiens
atccagattccctcattgggactgactaggcagttggtgtgacccatggagagcaaggaaaagcagagttgggtgacagttcacccaagagctacacagggcaaagagacctccctcctccagccaagggaggcagtgagggattgtgctacccacccagggaactgtgctttacccacagatttttgcaaaccccagaacaggtaatccctttgtgagtccacaccaccagggccttgggtcccaagcacaaagctgtgcagacccatagcaggggctccagctggcagccacttgggcaggtactgagctgtaggagtttctgcatactctggtggctcgcagaaatccagtgaagcaggagatccatcaactcccatgagaagrgggctgaagccagggagccaagcagacccactcccacagaaccccacaagctaagacccactagcatggaatccccactggccagcacagcacctggagtctgcctaagaagaccaagttcctggggggaagggtgaccgccattactgcgggtctagccggtggttttcccccgccagtgctagggagactgggtggtttgcactgggcagaattc

SEQ ID NO: 567543 - DNA, 568 bp, Homo sapiens
gtgtgacccatggagagcaaggaaaagcagagttgggtgacagttcacccaagagctacacagggcaaagagacctccctcctccagccaagggaggcagtgagggattgtgctacccacccagggaactgtgctttacccacagatttttgcaaaccccagaacaggtaatccctttgtgagtccacaccaccagggccttgggtcccaagcacaaagctgtgcagacccatagcaggggctccagctggcagccacttgggcaggtactgagctgtaggagtttctgcatactctggtggctcgcagaaatccagtgaagcaggagatccatcaactcccatgagaagggggctgaagccagggagccaagcagacccactcccacagaaccccacaagctaagacccactrgcatggaatccccactggccagcacagcacctggagtctgcctaagaagaccaagttcctggggggaagggtgaccgccattactgcgggtctagccggtggttttcccccgccagtgctagggagactgggtggtttgcactgggcagaattc

SEQ ID NO: 567544 - DNA, 568 bp, Homo sapiens
gtgtgacccatggagagcaaggaaaagcagagttgggtgacagttcacccaagagctacacagggcaaagagacctccctcctccagccaagggaggcagtgagggattgtgctacccacccagggaactgtgctttacccacagatttttgcaaaccccagaacaggtaatccctttgtgagtccacaccaccagggccttgggtcccaagcacaaagctgtgcagacccatagcaggggctccagctggcagccacttgggcaggtactgagctgtaggagtttctgcatactctggtggctcgcagaaatccagtgaagcaggagatccatcaactcccatgagaagggggctgaagccagggagccaagcagacccactcccacagaaccccacaagctaagacccactagcatggaatccccactggcyagcacagcacctggagtctgcctaagaagaccaagttcctggggggaagggtgaccgccattactgcgggtctagccggtggttttcccccgccagtgctagggagactgggtggtttgcactgggcagaattc

SEQ ID NO: 567545 - DNA, 611 bp, Homo sapiens
tcttccatctctacctttctctgtgttggttccattttatttgtttcctgcaatgactcatatcttgtgattgaaaaacaaggggccgggcacggtggctcacgcctgtaatcccagcactttgggaggccgaggcgggtggatcacgaggtcaggagatcgagaccaacctggctaacacggtgaaaccccgtctctacgaaaaatacaaaaaaaattagccgggcatggtggcaggcacctgtagtcccagctacttgggaggctgaggcaggagaatagcgtgaacctgggaggcggagcttgcattgagccaagatcgcrccattgcacgccagcctgggcgacagagacagactccatctcaaaaaaaaaaaaaaaaaaaagaagaagcctggtggatattcatttctgcaagaatactcagggagttctatcatctgggaccttttctggacatggtttgcctctccaggccttcagaaccatatctttctccccaaaacacttttgtttctgagcatcctcagagcccattttttctgacccaaattgctgctcagtaaagggacacagatatttaagggacctgaggggatggtccaaaaaga

SEQ ID NO: 567546 - DNA, 611 bp, Homo sapiens
tcttccatctctacctttctctgtgttggttccattttatttgtttcctgcaatgactcatatcttgtgattgaaaaacaaggggccgggcacggtggctcacgcctgtaatcccagcactttgggaggccgaggcgggtggatcacgaggtcaggagatcgagaccaacctggctaacacggtgaaaccccgtctctacgaaaaatacaaaaaaaattagccgggcatggtggcaggcacctgtagtcccagctacttgggaggctgaggcaggagaatagcgtgaacctgggaggcggagcttgcattgagccaagatcgcgccattgcacgccagcctgggcgacagagacagactccatctcaaaaaaaaaaaaaaaaaaaagaagaagcctggtggatattcatttctgcaagaatactcagggagttctatcatcwgggaccttttctggacatggtttgcctctccaggccttcagaaccatatctttctccccaaaacacttttgtttctgagcatcctcagagcccattttttctgacccaaattgctgctcagtaaagggacacagatatttaagggacctgaggggatggtccaaaaaga

SEQ ID NO: 567547 - DNA, 611 bp, Homo sapiens
tcttccatctctacctttctctgtgttggttccattttatttgtttcctgcaatgactcatatcttgtgattgaaaaacaaggggccgggcacggtggctcacgcctgtaatcccagcactttgggaggccgaggcgggtggatcacgaggtcaggagatcgagaccaacctggctaacacggtgaaaccccgtctctacgaaaaatacaaaaaaaattagccgggcatggtggcaggcacctgtagtcccagctacttgggaggctgaggcaggagaatagcgtgaacctgggaggcggagcttgcattgagccaagatcgcgccattgcacgccagcctgggcgacagagacagactccatctcaaaaaaaaaaaaaaaaaaaagaagaagcctggtggatattcatttctgcaagaatactcagggagttctatcatctgggaccttttctggacatggtttgcctctccaggccttsagaaccatatctttctccccaaaacacttttgtttctgagcatcctcagagcccattttttctgacccaaattgctgctcagtaaagggacacagatatttaagggacctgaggggatggtccaaaaaga

SEQ ID NO: 567548 - DNA, 513 bp, Homo sapiens
cattgctcaaactcacatggaatcccaggtgttttcaagccctgagcagctgcagcctagtgccattctaagagcccaggccccagagtcttgtgttctgccctgaagctgccactgaaacctcagggcgagggaaggagtggaaaggccaggcatttttgcacactcaaagacagataccatcaccactgctgtgagatgaaggaatcagcaactatgtgcccccacagctgccagcctccactgctccttctaagaggggcttggcctccccgatggcagrccagcaatgtagccaccctgccccctactgagcattttagctacagcctcatcccattctgacagcccagtccccacaggcttgtgtcctgccctggggctgacaccaatgttgctaccactaccaccactgccacagagcttgggagggagcagggaggccatgaactcttgtgtactttagtagagatagctctgccactgctgtgggacagaggcatgagtaaacta

SEQ ID NO: 567549 - DNA, 513 bp, Homo sapiens
cattgctcaaactcacatggaatcccaggtgttttcaagccctgagcagctgcagcctagtgccattctaagagcccaggccccagagtcttgtgttctgccctgaagctgccactgaaacctcagggcgagggaaggagtggaaaggccaggcatttttgcacactcaaagacagataccatcaccactgctgtgagatgaaggaatcagcaactatgtgcccccacagctgccagcctccactgctccttctaagaggggcttggcctccccgatggcaggccagcaatgtagccaccctgccccctactgagcattttagctacagcctcatcccattctgacagcccagtccccacaggcttgtgtcctgccctggggctgacaccaatgttgctaccactrccaccactgccacagagcttgggagggagcagggaggccatgaactcttgtgtactttagtagagatagctctgccactgctgtgggacagaggcatgagtaaacta

SEQ ID NO: 567550 - DNA, 567 bp, Homo sapiens
ttcggaatgggaaaactgaggcctgggacttgaaataacagatgtatgtttgtacagcaaatyatcatgagagccaaaactcaaacccatactctctcaccgaaccccactgcttctttcagcacacaataattattattatgccaagtaagtttaacaaggtgacttggatcgattcattctgatgatttgagttggctcctgggatcatctgggtaaatattaggcccacatctctttccaaacatattccatctctctctctctctttggttttttcttttttctacattttcacctctgctccctcatcatacctccctccctttctctgttgaactcctccccttctcttctttcctcccttcctctcatcctctcacccacaaaaacatttgtttgtcttacatagggatagtgtcatgtgactgggtggctgaaaggagaagtatcttttaagctcctggaagcagaatattttcttatggattttttattgtttggattgttttgccaggctaatgaaagaagactctgaggtccccttatctcaggccaactagagga

SEQ ID NO: 567551 - DNA, 567 bp, Homo sapiens
ttcggaatgggaaaactgaggcctgggacttgaaataacagatgtatgtttgtacagcaaatcatcatgagagccaaaactcaaacccatactctctcaccgaaccccactgcttctttcagcacacaataattattattatgccaagtaagtttaacaaggtgacttggatcgattcattctgatgatttgagttggctcctgggatcatctgggtaaatattaggcccacatctctttccaaacatattccatctctctctctctctttggttttttcttttttctacattttcacctctgctccctcatcatacctccctccctttctctgttraactcctccccttctcttctttcctcccttcctctcatcctctcacccacaaaaacatttgtttgtcttacatagggatagtgtcatgtgactgggtggctgaaaggagaagtatcttttaagctcctggaagcagaatattttcttatggattttttattgtttggattgttttgccaggctaatgaaagaagactctgaggtccccttatctcaggccaactagagga

SEQ ID NO: 567552 - DNA, 607 bp, Homo sapiens
gctgggattacaggcgtgagccaccgcgcccggccttccctagatatttttgaagatattaaaaaaagtcactatatgaaaaaaattattgatacaaaatcgatcactgaattccaagtacacatttataaactcctttcacttacaggtctatgmgtaacaaatatttattttcagatttttgtcattttttctgttatgcattcatacagatatctgccaaaagtttagttttaccatgtaaagggaggcatttcctccaatattactaaagaactcgggatgttgaattcagaaggttggcaagcaggacttattcaatgtcacagaaaaaataatttctctagatctgcatctcatatctgcttgttcacagtaactcatagagtaattcatagagtagataactacctttcctggcatgcctcagaccatccatgattttaattagtcatcataatttattgagtgcctactatgttattgggataattacttctattctaggtattggccacaaacaacaaatgggaaacgtcagactactgaaagcttatgatttatttctgacagacttggcaagaaaggaaataattcagaactgctt

SEQ ID NO: 567553 - DNA, 567 bp, Homo sapiens
ttcacatgtatattagtgatttctatttatttctrcatcatttattcatggccttagtccattttttcttagagattatcttttcctcatgaattcataagtgaaacaccttcaatatgttaatattaacccttaattacatatgttttaaacatttacctgtgggtcactaaccgggaggagtactttgtgatattttggttaaggtttttgtgtgctcaagtctattaatctttttatgtagcatctgcctcgatatcacaagagaaagttactcttcaacataggttatataagcatttatcaataattcgtattatgttacttttattatttcattttaaatatttaatatattatagagttaattttggtataaagtatcaaataaggatacgatgtgaatctttccccaaatggttagccaataacaacatgctaaacatataatcagtttttggttcactgacatgattttccaactttgttatataaaacttgttctactcaatggagtaatagaagattgagtaaaaggggagtataccttatagaaagctaacaata

SEQ ID NO: 567554 - DNA, 295 bp, Homo sapiens
aaactaagtatccatttgcagaagaatgaaactagacccccatctctcaccgtatacaaaaatcaaatcaaaatggattaaatayttaagcctaagacctcaaactatgaaactactaaaataaaacattagggaagctctccaggacattggtctaggcaaagatttcttgagtaataccccacaagcatagacatccaaagtagacaaatgggatcacgtccagttaaaaagcttctgcaagcaaaggaaacaatcaacaatgtgaagacaacccacagaatggggaaaatat

SEQ ID NO: 567555 - DNA, 298 bp, Homo sapiens
ctatctggccctgagctttttctggttggtagactttttattactaattcaatttcaraactcattattggtctgttcagggattcaatttcttcctggttcaatcttaggagattgcatgtttttaggaatttattcattccttctaagttttctagtttgcattcatagaagtgtttgtagtagtctctgagagcttttgtttgtttgtttgttatttctctgtggtcaatgttaacatctttgtcctttctgattgtgtttatttggatcttctcttttttttctttattagtct

SEQ ID NO: 567556 - DNA, 492 bp, Homo sapiens
taatatatcatcactgctttgagatgtcacaaaaggctttgaataggtttttcaaaaggtaatgaaaatcttaacctgttctttacaagctatggcttaggccaaatgcataggctctaaactctgttacccatgatgaaatatgaaatcagacatgcaaagcgccaggaataaaagcattccatctagaaaaaggagtagcaaatgccctggggcaggaaaaaaatcatgtggctaaagtgtagggagtaataagcaaacttccaaccaggcagggccttgggtgccaagttaaggaatttggaatttattttaaatgtgatgagaagccactggagagtgaaggcagggagtgacatgatctgatcacagttaaagattgcttcagcagctgggtgcagaaaatggattagcaagaaagaggcacctgccatagcacagacaacaaactgaaaaatmcaaaatggtgaaacgatgttttcttttgctttg

SEQ ID NO: 567557 - DNA, 458 bp, Homo sapiens
atccctcctgtgataatccctaatgaataccatccacctttctttgcccgcagcaggtgagwtgggaatcctcttcctcagcctctacactatcctgaacatactttcctcataacactttccacacactcttagctacgtgtgcctctcttccactagagcatgtgccttgacatcagggccccagtgactagatattattcaactttaaatctccagtgtcaatcacagcacctggcacacaggtgttcagtaatgtttactgaatgaatgaattaatgatggctgaataaactatctcctctagtttcctctatacagcagacaacctaaactccttagttccctatcctgagtccctgattatccccaaacagcatcccacacataccttacagtgacttttttctgcaacatacctcacctttgaggcagtctgctctatttttagaaaaata

SEQ ID NO: 567558 - DNA, 570 bp, Homo sapiens
acagttagctagagtatgttctgtgaagtccagtcccaggaaatgtttctgcaagaatctccctcatggaaaacactatgaataaaaaagtctttgacgagtcctacagtttattttcttcatgtaagaactaccagtgtgtcctagtttacagtgtatacaactttttcctttatatattgctctcattcattcgtttattcattcaaccatccaaaatayattgagtacttgctctactcgaggtatgaattcagtacatctattggaaaagttatttgtaatcttattcattcctcacaacaaccctttgaaatggatatagcagataatttactattctcatattacacatgagggatctgaagttcagaaatatcgaataatctttccaaggttatgcaactattgagaaagtagagaggccaggcacagtggctcatgcctgtaattccagcactttgggagggtgaggcaggcagataatgaggtcaagagattgagaccatcctggccaacatgatgaaaccccattgctactaaaaatacaaaaattagctgggcatggtg

SEQ ID NO: 567559 - DNA, 457 bp, Homo sapiens
aagtcaaactgcatttcttaagctttgctgacaccatataacaaatgcttggccttgggcacattagctgctctgagtcacttttttcttttcttttcttttcttttctttttttctttcttttttttttttttttaaaaaaaaaaaaaaaaagaaaacaggaaaagagtgcccttctgtgaaagaaraatggaagaatgagcttcaagaaagagcagcataaagatgcaagggtttagttttgtagcataactagaagtcaggggctggtcagccttggcatcggttcagcactccagctaacagggccagctgccctgagagttttgtctcctttcctccactttaccagattatctgccacagctccaggtatcacatctttgttcaagcctggtgatggagtaaagaaatggtatcattaataactaattttgttttcaagaatgtatagact

SEQ ID NO: 567560 - DNA, 614 bp, Homo sapiens
acaccactatacccagataatttttgtatttttagtagagacggggtttcaccatgttggccaggatggtctcgatctcctgacctcgtgatccgcccacctcggtcacatcacatcttctaagtgaggcttgagctgctcaccttactcatagttatattcgttatctccamcccgaaacccttttttccttattacttaaacacttgttacatatgtattgtttacttatttattttgcctgtttttttccttttcccactgtaatgaaaactccataagaacaaggaatattttcggttttctttactgctttatttacagtgcctgaaacataggagaagattatcagtagttatgtgttgagtgaagggatggaagggaattatacatctgcatgcccacatcttaatttaaatatgtgaacaaaaatttcaaataagcacccaacaaggccattatatttatctattaaattaactttcctgctctctgagacaattatttgacaacttctttagtttccctctcacattccattacttttatcctctttccccattttaaactaaggacttagtttcatgcttacttaaaaaataaatacgatttaa

SEQ ID NO: 567561 - DNA, 614 bp, Homo sapiens
acaccactatacccagataatttttgtatttttagtagagacggggtttcaccatgttggccaggatggtctcgatctcctgacctcgtgatccgcccacctcggtcacatcacatcttctaagtgaggcttgagctgctcaccttactcatagttatattcgttatctccaacccgaaacccttttttccttattacttaaacacttgttacatatgtattgtttacttatttattttgcctgtttttttccttttcccactgtaatgaaaactccataagaacaaggaatattttcggttttctttactgctttatttacagtgcctgaaacataggagaagattatcagtagttatgtgttgagtgaagggatggaagggaattatacatctgcatgcccacatcttaatttaaatatgtgaacaaaaatttcaaataagcacccaacaaggccattatatttatctattaaattaactttcctgctctctgagacaattatttgacaacttctttagtttccctctcacattcmattacttttatcctctttccccattttaaactaaggacttagtttcatgcttacttaaaaaataaatacgatttaa

SEQ ID NO: 567562 - DNA, 544 bp, Homo sapiens
tgaagtggagttgcctagtatgatattacaacatcaatagcctgaaatatctatggcattttggtaaaatattcatctaacccatacctccatacccttaatgtcagaacacaatccttaggcagggcagtccatctttgggcaggtttggttgttgaaaagkcttcctgagactaagctgaaatctctcctttatcattctctcatagaaaccccttggagccccatagaaaaagtcctgtttctttggaggtcacatgtctccaactattttctttttaggagaaacagccttagttcctttaaaccatttctctttggatatggttttgtatccttttgccttatttatcttgctggtctcaacagactttgatttccccaatttctctgcaaatgtactatccagaggtgagcatgggcctccagattatagagatgggtgtccctcctcattcagtgaattatactttcatgaacgtagcaaaggaaaacattcatttttattttattttaatttttattttgacagcaggctgcacac

SEQ ID NO: 567563 - DNA, 544 bp, Homo sapiens
tgaagtggagttgcctagtatgatattacaacatcaatagcctgaaatatctatggcattttggtaaaatattcatctaacccatacctccatacccttaatgtcagaacacaatccttaggcagggcagtccatctttgggcaggtttggttgttgaaaaggcttcctgagactaagctgaaatctctcctttatcattctctcatagaaaccccttggagccccatagaaaaagtcctgtttctttggaggtcacatgtctccaactattttctttttaggagaaacagccttagttcctttaaaccatttctctttggatatggttttgtatccttttgccttatttatcttgctggtctcaacagactttgatttccccaatttctctgcaaatgtactatycagaggtgagcatgggcctccagattatagagatgggtgtccctcctcattcagtgaattatactttcatgaacgtagcaaaggaaaacattcatttttattttattttaatttttattttgacagcaggctgcacac

SEQ ID NO: 567564 - DNA, 614 bp, Homo sapiens
ctacataatgatatcacctgtgtacaaagacacttttaattcttctacaccagtaagtatacctttayttctctttgtataattgtgctaggactttcagtaaaatcttgaaaaaagagtggtgagagttaaccttgcctacttcctgatcttagttagaaagcttccagttttccacaatcaagcatgatgttggccatcagttcctttgtagatgtctttatcagtttgagcaagttctattcttagttgactgagagattttatgatgaatgactgagagattttatgatgattttatgatgaatttttggattttgtcagatgctttttctacatctattgatacagttttgtgatctttcttatttagcttgttgatatgatggaccatattaattgattctggaatattgaaccagccttgtatatccgggataaatcccacttggtcatggcatacaattctttttatacattgttggatttgatttgctaatattttgttgaagatatttgcatctatgtccacaacatatattggtgtgtagtttccttttcttataatgtctttatctgattttagtattcaggtaatgctgacttcatagaat

SEQ ID NO: 567565 - DNA, 481 bp, Homo sapiens
catactagatctgatgagtaaacatttctgttattattattttgcagttctatatgtgtgctttttagcrtcagtttcttaatatcagtgaattttttttgttttacgtattataattctagacaatttgcaattctgtttgtacactttaagtcaatgtggggtttaattgagaaataaattagccatatgtctatcacaatcagattatatatttgtgtgtttttatctataaatatgactccaattatggttatggcttatcttgtatatattctttcttagctgattttcagtggttgttttatcttgtctaagtgagtagttgtggaaataatcttatttttgccttgtgtttaataatgaatatatattttctttgtgtgagagaaacacttttgtgatttgaaggtaattctagaaaagatttataattcttcatttagtttttcttctaaaataatttttgtaaaaacagata

SEQ ID NO: 567566 - DNA, 585 bp, Homo sapiens
gatgttgctgtattcatcatttattagactctgatggtcattttttactttataaattgaaatatgcacttatcatcatccaggaccctgtccttgatgcttaagtgtgcagacataaaacgattaaaatattggtgaaagatgagttttttttttcttaagactgagtcttgctctgttgcccaggctggagtgtaatggtgtgatctcactgcaccctccacctcccaggttcaagcaattctcatgcctcagcctcctgagtcactaggattacaggtgtgtgccattatgctgggcttggtggatatgtagttatgatgcactgacccatgggttgggtgctctccagggacccttcccttgctgtctaccttaggctagctagctaatccctctcagttcctcctcaggagtggagaccctaactgctgttagggagaagaggcattgatatttttggctattcctcgctggaaaggggtgctgtgtagaaaacagcagctaggacttcttccatggctagtttaattgtcctcagaagaaacatgtgtttatgcrtcattccatttgcattaccactta

SEQ ID NO: 567567 - DNA, 605 bp, Homo sapiens
gcccctcccgtggtccctgcacaatctcggagagacgcggccatgcgggtgcagagcggcccagagagggctccaggccagggcacagtcacagcgcatggaggagacaggtcgcccagggtcccgcagtcagcgcattcgccatcttatggctgaaggagactgaggccgagatgggaaagaactccaggcgcagattgtggagctgactgcggggaggccggagtcccgccacagccacttcccaccggttccaatcagccccttccccttctcgggatgtcggacccggcactctcaccatttctaggctgccaggggcacctggcatgttagctgtggatcttccaatgccgcaggttacagggccacagaggctgaggacacacagcagtgaaggcgagaccgggaactgcggctgcaaccagaaacaacggccccgccacatctcggatgccgccttttccgctccagctgcatgcctgattggacggttcctagcccagagtccctgattggataattcttaaatccccgcctcctcagatcctgagtgacaaaagatgtgrtcagatgctggacagaatgaagactgataggccgcg
